United States Patent Application Publication US 2026/0103690 A1 - sequence listing, part 56

SEQ ID NO: 270550 - protein, 344 aa, unidentified
MKYFTGIDVSLRSVSICVVDEAGAVQYEGKVPAEVDLIVAALQRCKAEIKQVGLEAGTLTQYLTYGLQKAGFEVICLEARQTAATLAAMRNKTDRNDARGLAQILRTGWYRTVHVKSLESHQVRALLASRKALLARCVDLENELRGLLKIFGVRLAPHLAHNRFDETVRAAVSTTPELNTCLLPLLDARTVLYKTYLKLDNAVKSVVRHDPICQRLMTVPGVGPVTSLTFKAGVDDANRFRSSRNVAAHFGLTPRRYQSGETDNPGRISKAGDVDVRMALYTAAHSLMTRSEAWSTLKAWGLRLAKVRGHRRAVIAVARKLAVILHRMWVDGTDFRAARLQGVA

SEQ ID NO: 270551 - protein, 421 aa, unidentified
MNMTSKSAQFAALIGIDWASQRHALCLYDCATAKRESSILEHTPEAIAQWARGLQERFKGKKIALCLEQSKGPLIYALLEYPFFVLYPINPATAARYRMAFKTSRAKDDPSDAQVCLELVLHHREKLNPWLPNDAPTRELSCLLQHRRAAVDLRTLLTNMLRDALKSYYPQALELAGQDLFAPLGCQFLLKWPSLQELQKARKESVRKFYYAHNCRRMDVIEKRLDAIAQMTPLCRDRALLEPAMVQVRMLARQLLQLGGALKEYHSKIEQLFAQHSDALIWESFPGAGPTLAPRLACAFGTQRSRYQSAVAIQQYSGTAPVTEKSGKNQHWVHRRWARPHFTHQSFFEYASQSVLHCSWAKLYLKEQMARGKAYPTAIRALAFKWQRIMFVCWRDRVPYDETIYRQSLQRRGSHLARKLN

SEQ ID NO: 270552 - protein, 375 aa, unidentified
MVVVGADVHKRTHTFVAVDAVGRQVGQRTVSATSEGHARALAWARSEFGLDLRWAIEDCRHLSARLEHHLLSAGQQVVRVPPKMMAEQRRVARTRGKSDPIDALAVARAFLREPSLPVASHDAVSREAKVLVDRRESLVATRTRTINSLLWRVHELDPVHAPKERSLHLVTHQQALRAWLVTLSGVVAEMALDELDDIIALTVRIKEFDRRIGALARREVPALLALPGCGELSAAKLLGESAGITRFHSEAAFARHAGIAPIPVWSGHTAGRVRMTRSGNRQINCAIHRIAITQAASPEPSARSTTRRSSPKANPKPKPCAASNDASPASCSTSSPPTTTTVKPPPSRQRLDIGETRARRQRAWNDAADEPGPPE

SEQ ID NO: 270553 - protein, 337 aa, unidentified
MIVVGVDVHKQSLTAVAVDEAGRALAELTAGSGGELLAWVDSLAAERLWAIEDCRQLTRALERALIGAGERLVRVPPKLMAPERRAGRIRGKSDPIDALAVARAALREPRLDYQRPGEDRLRELKLLVDHRDDLVDERRRAQQRLRWHLHDLDPSLAVPPGALDRTVWLDRIGRRLARQEQSVQVRICRELVARCRSLTRTILELERELHTQTAETAPGLLELPGCGALSAAKLLGEIGPIERFDTDAQLARHAGVAPLQASSGKHQRHRLDRGGNRQLNCALHRIAITQARMHPPARAYLARKQTEGKSRREAIRCLKRQLARTVHTTLKNGPPLT

SEQ ID NO: 270554 - protein, 346 aa, unidentified
MNFYTTEHRYYCGVDLHARSMYLCIIDAKGTILLHKNLKTEPAAFLAAIEPYRDGLVVAVECMFTWYWLSNLCSREKIPFVLGHALYMKAIHGGKAKNDRIDSNKLAVLLRGGTFPRAYVYPPKMRSTRDLLRRRMFLTRKRAALITHIKCTFAQYNLPEPEQNVSRVSQREGVAEQLPDPGARRNVQLDLDLLDFYDQTLTKLEQELTVIAKDHDPNSYFRLRSVPGIGKILSLVILYEIHDINRFPSVQDFASYCRLVKPAKESGGKRLGSGGAKIGNVHLKWAFSEAAVLFLRKNEAAKIYRARLVKRYGKAKSLTILAHKIARAVFFILKRRTVFEAETFFA

SEQ ID NO: 270555 - protein, 450 aa, unidentified
MRSKPNLTPVPEEIPDAEHELVIERVAAIDVAKASGKVCVRSPRERRRVSKVWDVAATTGTVTDLADQLTELGIEKVTVESTSDYWRIWYYLLEAAGLDVQLVNARDVKNVPGRPKTDKLDAVWLAKLTEKGLLRPSFVPPAPIRQLRDYTRLRVDLTRERARYWQRLEKLLEDALIKVSSVASKMDTLSVRDMIEALIAGERDPRRLADLARRRMKAKRSALIAALDGRFDDHHAELARMLLDQIDALSAQIVTLTTRIEALLEAAEPDDAGDRAHPPDDVGAAPAGPSTVERLTEIPGIGPTAAQIILAEIGRDMTQFPTAAHLVSWAKLCPRTIQSGPVTRGGKTGKGNPYLKGALGEAAAAAAKTDTFLGERYRRIVKRRGKLKALVAVARSILVVIWHLLNDPAARFRELGSDYHTRRIDIERRMRTHIAQLTAMGYRVTLEPAA

SEQ ID NO: 270556 - protein, 389 aa, unidentified
MTTSEDHHQEPAAIRTDLGAIFVSLELSRSTWLITSLSPGAGEKLSKHSVTSADVAGLLARFAQLKQKALARLGRDFPIICIQEAGLDGFWIHRLLQSQGIESWVVDPASIAVSRRRRRAKTDKIDGEALIRTLLAYKRGEPRVCAMVRAPTPEEEDLRRLCRERRTLTAERVEHVNRIKGLLFAQGIFDYEPLRRDRRRRLDELTTGDGRALPAHLKQQIIRELDRLELLIAHVKAVEAERDALLAARRETDPTSPAASLPRLKGIGEEFAAVLWLEGLFKSFDNRRQVAAYAGLAPSPWRSGKIDHEQGVSKAGNPRLRTTMIQLSWLWLRHQPSSALTLWFLERVKQNKGRIRRVMIVALARKLLVALWKYVVTGVLPEGAELKAA

SEQ ID NO: 270557 - protein, 301 aa, unidentified
MTCYVGLDVSMEETAFCVRGPEGRILGQGKVATDPEAIVGALARFGHPERVVLETGRMANWLHRQLVARDLPAVCVDARQAHAVLSQMPNKTDANDAAMLAELARTGFYRAVRVKSEASQAMRALLKARNLVLGQRMDLDNTIRGLVTSMGVRLPKGPRRWSDRVELALEANEALALALRLLLRLDLARSLLELTRRLLAEARNSGLCRRLMTVPGVGAITAYAFVATVDDPTRFAHSRSVGAYVGLTSRRYQSGEINYSGRITRRGDGLLRTLLFEAASSLITRAGGGGALREWALRAAR

SEQ ID NO: 270558 - protein, 404 aa, unidentified
MYNAVGIDVSKGKSTVTVLQPGGTVIRKPFDVSHTSQNLNELAKYLNTLDGDTRIVMEFTGRYHEPILKALSEAGLFVSVVNPHLIKNFGNNSLRKVKSDPADARKIARYTLDNWNQLRQYSGMDNTRTQLKTLNSQFSFFMKQKVAAKANLIALLDNTYPGVNKLFDSPAREDGSEKWVDYAYSFWHVDCVREIGLKAFTERYQAFCKRHHYIFQPDKPEKLFHAAKDLVAVFPKEKTYKLLIQQSIQQLNLASAHVERLRREMNELASTLPEYNTVMGIYGVGKTYGPQLIAEIGDVSRFTHREALTAFAGVDPGVDESGQHKSKSNRASKVGSARLRKTLFQIMTTLLQNAPEDDPVYRFLDKKRSQGKPYYVYMTAGANKFLRIYYGKVKECLRNLEQES

SEQ ID NO: 270559 - protein, 359 aa, unidentified
MILFCACNAETSQNSTPKPKETHTLKILALDLGKFNTMCCFFDTKTRKHSFLNAPTERNYLNTLFKKHKIDIVVMEACGPSGWINDLAISHGLKTLVCSTNEDAWKWSNVKRKTDKDDALKLSRMAAMNELKAVHMPSETHREFRSLVKYRKTLDCRINKMKCTIRAWFVNHGIEIDTGEKAWHSGRERINSFRKSLIECQPNELWKGELDLELTQFDALTVQLESVVKKLEALGKTDPRIQRIRTIPGVGPRTAEILVACIDDPHRFNNGREVSAYFGLVPRQYQSGETDRNGRITKRGNPLARTILVECAWALRYNEWAKGVYERICGKQKTRKKKAAVALARKIAVLAWADPLPKS

SEQ ID NO: 270560 - protein, 310 aa, unidentified
MDIIMDKGCGLHVHKETVVACVMGSGIKKEIKTFDTMTGSLLRMKGWLTDLGITHVAMESTGPYWKPVFNILEDSFEVILANARHIKNVPGRKTDVKDSEWICKLLRSGLLTASFVPPQAIRDLRDLTRYRQKLIQAASAEKNRIQKVLEDANVKLSSVVSDTFGVSASRMIKAIMSGNFDTDSLAELAVGRLKGKKEKLKEALQGYFRDHHGFMIQASLDHIASLEKIIADLDRQISEKLKDYHRERELLASIPGVKEQGSSSILAEIGAAMNVFPSEGHLSAWAGMSPGNNESAGKKKVERQPTAIKT

SEQ ID NO: 270561 - protein, 352 aa, unidentified
MKFYKTTTEYNCGIDLHSRQMYMCLMDSKGNKLVHTNIEGNDFGYFLKKIAPYRNSLTVCCECTFNWYWLADACQAEGIEFVLAHALYVKAIHGGKNKNDRIDSEKLAHLLRSNLIPPAYVYPAEKRPVRDLLRRRTSFVWRRATLLGQLTCSMYVLGHEPIKKTQHKVRDKWFDQLRVHYENPLTKMAAEANMYMVKEYDKIIERLEVAILKHTKREHARDFNILQTIPGVGDILALTILYEIDDISRFPGVQNFSSYCRLVKGSVASAGKFKGLRGGKLGNPYLRWAFAEAAILCKRANPDLKAYSGRLEAQHIKPVANAILANKLARAVYFMLKQGKGFDPKMFAKSSK

SEQ ID NO: 270562 - protein, 342 aa, unidentified
MTEVSIVGLDLAKRVFQVHGATADGSVAIRKKLSRGQVLAFFAEMPPCVVAMEACATAHYWAREISALGHAVRLVPPAYVKPFVKRQKNDAADAEAIAEAASRPTMRFVEPKSPRQKARAMVFRTRDMFVRQRTQTINALRAHLAEHGLIAPQGLSNLAGIQRVVDEETADLEPLIAETARIYLEQINDLSSRITKMEATLKQEAALSDASSRMMTMPGLGPITAMAIEAFAPTLSVFKRSRDFSAWLGLVPRQHSTGGKQVLGRTSKMGQRDIRRLLIIGAMSVIRWATRKGTIPGSWLHAVLLRKPRKVAAIALANKMARALWAMETRKEDYRDPRLAAA

SEQ ID NO: 270563 - protein, 437 aa, unidentified
MTNQKPERVLAIDFSLDQLDVALRGEHDKWEWSHRAYANSYSGYQGLKEDLLAYLSQQTEVSLTAVGESTGPYWWHLFYHLSHDEELAGYEPQLALLNPAHVKRFRQALPEQDKNDLLDPQLIERYYQAVGIKHPYQFAERYLPLRSLSRAYCRLIHTLAAEKAFVLSVLYLTASEYQRLKPFSDLFGVTSQQILADVADLQVLADIPLDDLSQLLTTLSKNTLPDPQKNARTLHQVAQGSYPLPPQLAETLHTILGHTLEHIRFLSDKQKAYQTLIAQLLALLPEAQPALDQPGLGPILVAGFLSEIQQTQRFISGFKFDRRRKRYRPRTYRDGQAAVAKLAGLWWPQNASGRFQAQDLHLSRERNPYLRYWFVQAAHTLQRYQPDYAAYYRKKFNEARHHHHKRALILTARKSVRLVFALLHKGQQDRLEEGHGP

SEQ ID NO: 270564 - protein, 314 aa, unidentified
MSVPVSAVFVGIDVSAKRLDVSIDAATIETFANDDAGVASLCIRLTALACELIVLEATGGYEALAVATLAGAGLPVRVINPRQVRDFARATGLLAKTDQLDARVLQCFAERIRPVVLPQKSEEERELAAIVGRRRELVQMLAAEKNRLKLATTTVRKDISAHIRFLEKRIDDTDAEMRRQIREHESFRLTDELLQSVPSIGNVSASTLIALLPELGSLSHRKIAALAGLAPFNDDSGTRSGRRRIWGGRTEVRNVLYMATISALRFNPPIRATYRRLVAAGKPKKVALTACMRKLLIILNAIVRDQTPWRPLIN

SEQ ID NO: 270565 - protein, 361 aa, unidentified
MQTQIRELDFTGQSIYAGIDVHKKSWQVSIYSEELYHKTFSQPPQPEVLCHYLEKHFPKGSYHSVYEAGFCGFWIHDRLQSLGINNMVVHPADVPTTDKEKKQKTDRVDSNKLAKHLRNGDLDGIYTPKRSVLEDRNLLRLRRTIVKELTRYKNRIKSELNFFGVEAPEQFNKNQSYWSRKYIDWLVHLELQQESGTDSLKILLDQIKTLREHLLAVNRKIRALSKTEHYNKRVALLRTISGIGLTTAMIVLTEIDDIHRFRNQERLRSYVGLTPTSHSSGEKDVHGEMINRGNKFLKSAVIESAWMAARIDPVLHMEYIGYCKRMKKNKAIVRIACKLLNRIDYVLKNEMPYKSGINSSS

SEQ ID NO: 270566 - protein, 355 aa, unidentified
MNVNVNHYIGFDVHKKSISYCVKLADGRIVEEGKLAARRVTLCQWASKRAEPWHGAMEATLFSGWIYDTLKPFAAKLEMGHPGRMKAIGASKKKNDKLDARTICDLIRANLLPACWVAPSEMRELRRILRYRNLVLEQAVRMKNKISGLLMESGVEYNKKRLHGEKYFHELLENLAAEVPESVKDLLKLSRGWLESFQATQQQLLVKLQKHPILMERLKRLKSIRSVGEVTALTWALEIGDPHRISSIGDAVSYCGLTSALVESADKQKRGPISKQRNAHLQTVLIEAAKLAPRWNPRLAELHQAEIDNGRHRNRATLEVARKLVAYLLAVDKSGKDFAVRTPSGKSEGEVKPAA

SEQ ID NO: 270567 - protein, 409 aa, unidentified
MLFAGIDWSEKLLDFHLRTAEGKVLAQGQIKPSVEGMADLFAELESQGPVSEIGIAIETAHGAWVQALLDRGYQVYPLNPKTVECFREALSANGVKTDKIDSKVLAMFLITFHQENKPLRPDAPEIIQLRILCQDRLRLVEERSAKVNELGAILKCYYPAFMGFFGDLDSGIALDFLQQYPTQKQFQKLSERRLLNWLSRHRYSYPKRIDEMVGLLKQPALPVAEHLQQAKKTLICYLARSIKTLNAEMAQRDKQINDHLDSLAESDWIRSLPRAGKVLAPALLACLGRDPERFSSVGEARALMGTAPVTKASGKSRVVVFRRGCWKFARRTLQLFADQSRHQCHWAQAFYEKQRNSGHKHHEALRALAHRWLKILLAMRRSGSLYDEGVFLNSQRRYQLKTPILKTFK

SEQ ID NO: 270568 - protein, 408 aa, unidentified
MEVVHPRCCGVDVHQASLAVCVSIKKEGKSEKHKLCCGTTTAELLRLSDWLHGHQVTHVAMEATGVYWKPVWHMLEGQFELLLANPTQVQALRGRKTDLKDGERIADYLQHGLLQGSFVPSAPIQQLRDLTRSRTTLKQEQVRIGNRIRKVLEDANVKLSSVMSDVMGVSGREMLRAMVRGETDPAALAQLARKRLRGKIPVLQQAATGTLNQHHRFLIEQWLALWDELVAQIAKFEQRIEEQMLPFATAVKTWTSLPGVDRITAWTIIAEMGADMSQFPTAAHAASWTGLCPGQQESAGRRQNGRTRKGNVWLRRAFTQAAWAASMKKGSYYKAFYHRLAVRKGKKRAIVAVAHALLVTGYMLLWTGKTYADLGADYFDQLDRDRLTKRLVKRLEKLGHHVSLQPAA

SEQ ID NO: 270569 - protein, 371 aa, unidentified
MGWTAPYGIECARMRLLQSQTREPSVNQIIRIGMDTSKHIFQLHGVDAVERPVLRRKLRRSEVLAFFAKLPPSVIGMEACGAAHYWARELRKLGHEVKLMAPQHVKAYVKRNKNDGRDAEGLCEAMSRPTMQFVPVKTEEQQAALMLAGVRQQLIARRTQLSNTIRGYAAEFGLTAAKGLDKIEPLLARIAQDETVPALARELFAVQGQDYAQLQIELKAIEVKLMAWHRANACSRRLAQIPGVGPIGATALVMKTPDPRAFPSGRHFAAWLGLTPKDHSTAGKTRLGKITRAGDEVLRSLLVAGATAVIQQVRNGRGRPSAWLLALLKRKPPKLAAVALANKIARIAWKLMTTGESYDGARMPGAQAFAA

SEQ ID NO: 270570 - protein, 411 aa, unidentified
MRLFAGDDWAEDHHDVEVMDEAGKVLAKRRLPEGAAGMAQLHELTGRFLPEDEQDAEVVVGIETDRGPWVAALAAAGYTVYPVNPLQASRYRERHGVSGAKSDGGDAHMLADMVRTDSHQLRPAAGDSPEAEGIKVVARTHKTLIWDRTRTTQRLRHQLREYFPAALEAFEDLDAPDVLELLAKAPDPARAAKLTRAQVSAVLKRARRRNIKDKTDAMLTALRGEHLGQPPALTAAYAATVRSLVAVITALNEQVKTLEEQVREHFGRHPDAEIYQSQPGLAAVLGARVLGEFGDDPGRYVSAKARKNYGGTSPITRASGKKKVVAARFIRNDRLIDALMTWAFASLNASPSARAFYDEQRAKGSEHNDALRRLANRLVGILHGCLKTRTLYDEATAWGHRENLPQSSAAA

SEQ ID NO: 270571 - protein, 442 aa, unidentified
MGRLESGSHDSEEPPCRFFDQEVIVRRVGIDLALKAHHRATVFEDAVQVGKPFSVRRTAAGIDALVRRATSGTDQPCEFIMEPTGLAWLGLAAELERRGHHTYVPKAQKTHLLRKFLAQFAKTDTADAKAQALVRHVDPDGVYRLHVPSAAETTLRLCVKQRARLVVDVGRAKRRVLSWLILANPHLGDALGDDAFNQPGTAFLRRYIDPFAVQTLGIAKLRKDWATHARGVDGKRVAAVWEACEATCALYAELRAAGRLPFDYAVMQELVRQELERIEYLENQVAALDERIRATYRLVDPDRLLETEVPGIGAAIAPTIEAFVSDIDRFGSAKRFAAYFGIVPRTRQTGGQDGKPGQRLTKGGPGLLRQYMFLAAEVARRCDPALAAAYEKARAREAPLPRGHHRGAQAPAEDLRGAQAARRRPASQARGPDSSSRRVRLL

SEQ ID NO: 270572 - protein, 330 aa, unidentified
MKTWNVVLGVDVSKKTVDICWAEHKLFIRIDNNSAGFSKFKKWCKENRIDLQETFIVLEYTGGYEYRFIQFCESQSIDYCRVPGLEIKQSMGMVRGKSDKADAFRIGQYGEDKIKRLKPDKALNKDILELKTLLSFRKRLVRENAGYQNTVKERKYMYELGNRDLVIRIANKKMSATTQAIKQVEERIMELIKSNESMYLNYRIITSIKGIGPVNGWMTIAYTENFTSFPDGRHYAVYVGVIPFEHTSGTSIKGRRRTSNLAQKELKQELNQAAKIAIQYDPELRAYAERKLKNKEYGLVLNNVKFKLILRMFSLVKRGQMYVENYKRAA

SEQ ID NO: 270573 - protein, 276 aa, unidentified
MNHTAVGVDIAKSVFQVYWVDPHTGEIVNKAVKRDRFLVSFTNREPCLIGMEACGGAQHWARQLTKMGHQVKLMPPKFVKAFNIGNKNDPADARAIWMATQIPSKPVAVKTEAQQAVLALHRMRQQLVKFRTMQINSLRGLLAEYGEVMARSREALDKAIPEILAKLSDRLPAMLIDTLREQWNGLTGLDRQTAGIEQRLQAWMKDDVACQTIAAIPGVGLLSATAAVATMGDATAFRSGREFAAWLGLVPKQTGSGGKVQLLGISKRGDTMCERC

SEQ ID NO: 270574 - protein, 332 aa, unidentified
MQTETCPLHIGADVAKNEIVVACEEQYFAPCAIDNRRSTLTTFLKAVPPGSQIGMESTGSHHELFATLAHKMGFVVFVLNPKDTRHYAKAMGLRGKTDRVDAKLIARFVDREHAKLHAWIPPTPEQRQLGRLLRRRAKLSTIKAALVQSLQGLSGFSAELKALRQRVQCVIVRIDAKIKALIAASAERQQAYTRLLSIPSVGSVVGNSILIYLERMPFPDADAFVAFSGLDPRPDDSGHHHGRRRLSKRGPSELRRLLYVAAMSAARTEAWKPIYRHYLARGLPTTAALVILARRIARTAWSMYTHKTTFNAQRITKQPSGQSTAPMADVKT

SEQ ID NO: 270575 - protein, 402 aa, unidentified
MSKKDVKVCLRTPGKRRNQRHTEVRTFSTMTNPLLAMRDWLVAERVTLVVMEATGDYWRSPYYLLEDALNVVLINAKQAKALPGRKTDVADSVWLAQLAECGLLRASFVPPEPIRELRDLTRYRTVLTTERTREAARLEKELEDAGIKLSVVASDILGVSGRAMLEALIGGERDSQALADLARGRMRPKIPGLVQAMIGRFGEHHAFLCRMHLDRIDALTRDIATLSTRIDFLMAPFRDALRLLDTIPGVNQTVAEVIIAETGADMSRFPTPRHLASWAGVCPGNHESGGRRKSGKTRKGDHWLTGSLGVAVLAAGRGTDTYLAAQYARLIRRLGNKQKAIVALQHSMLTAVWHMLSDGTDYHDLGGDYYLRRHPDRERRRAITALNKLGYTVTLNPIQTTA

SEQ ID NO: 270576 - protein, 407 aa, unidentified
MPYQIAGIDVHKKMLAVVVADVEIDGDFHFKRQKVGTTPADLRRLADWLVEHEVEEVVMESTAQYWRPVWEALEQHWRPRRARDSAPKRAGTLHLAQAQSNRGPGGRKKDFPDAERLVKRLVAQELTLSFVPDVEQRLWRTVMRRKYQVTRNRVQLQNRLEALLEEAHIKVSSLVSDLLGISARRMLQALADGETDPAALATLAAPRLRATPEQLCDAFQAGRTLHPVYRRLLKLMLEELRVIEDHLGQLDQQMADLLAAHHDAVQRLAEVPGLGVDSAQQLASWMGACPGNEESAGVNYSHRCPKGNRQMRRVLNQAANAAVKAKGTIFAVVYRRVVPRLGHAQAIGAITHRLCRLIWKILHERVRYEERGPAVSVEAKKVRARKMIRELRGLGYRVELVAPSATV

SEQ ID NO: 270577 - protein, 344 aa, unidentified
MSNLDTCGIEVSAKELVVRLRRQEDLEPLRNFTNTPEGHLIILRYLRRAGRVVRVCMESTGLYGLDLALALSGQEGIEVMVANPRAVRHFAHALMKRSKDDQIDAAVLEQFAVHMPFKPWQRPSVAMLALHALARRLRELVEMQTAEKNRQHAAGLSKAIPAVVRRDLARSLRAQERAIERLTRQARKLIAQDPQLAERFELLDSVPGIGETSAVQLLGELGVLAPDLEARQWVAYAGLDPRHYTSGTSVHKKPRISKAGNKHLRHALFMPALVAVQHDPHLRAFYQHLLAQGKFKMQALVAVMRKLLHALHAMFKTHQPYDGSKLFRLNAAPAQEVTRALVAS

SEQ ID NO: 270578 - protein, 337 aa, unidentified
MTIIRIGLDTAKHVFQVHGVDENEQTVVRRQLRRGEMEKFFGKLAPTRIGLEACGASHYWARLLRGLGHEVVLLPPQYIKPYVKRGKNDANDAEAICEAMSRPGMRFVPIKSAESQAELMLLGVRSLLIKQRTTAINAIRGHAAEFGVIAAKGPVKVAELLQQAHTKEANVPELALDMLGLLAAQLDALDIKLKLIETRLMASHRENPLSQCLASQPGIGPIGAVSFALRVTDPKSFRSGRHFAAWLGLTPKDHSSGGRHRQGRISRQGNEALRKLVVLGATAVIRFARPGHASPWLLNLLARKPKKLAAIALANKMARTLWAMMVSGEVYRRPQEA

SEQ ID NO: 270579 - protein, 388 aa, unidentified
MQTVADRPEAPTAIRTDLGAIFVSLELSRSTWLITSLSPGGGEKMSKQVVRGGDVAGLLERFARLREKARARTGKVFPFVVIQEAGLDGFWIDRALQNEGIESHVVDPASIATSRRRRRAKTDGIDGEALVRALLAYKRGEPRVCAMVKAPTPEEEDRRRLCRERKVLIGERVQHVNRVKGLLFSQGISGYEPLRRDRREQLDTLQTGDGRLLPDHLKAQVCRELDRLELLLEQIKAVEAERDVLLAAQQVAAPAPAAMLLDIKGIGPEFAAILWSEGLFRHFDNRRQVASYAGLAPTPWQSGSVDREQGVSKAGNPRLRTTLIQLAWLWLRHQPHSALALWFEERVRRNGGRLKKTTIVALARKLLVALWKYVTAGVVIEGAVMKRT

SEQ ID NO: 270580 - protein, 395 aa, unidentified
MVFLGVDWAEEHHDVCMLDEQGKVLGRAQVANSLHGVGRIHALVAEHSEESSEVVVGIETDRGLLVQALLAAGYQIYAINPLAVDRYRDRHSVSGAKSDAADAKVLADLVRTDRNNHRPVAGDSAQVEAVKLLARAHQSLVHSRQRQVNQLRSALHEFYPAALEAFKDDLGGRDAVAVLEYAPTPIRGRSVSQAKLISALRRAGRERNLKARATELQGILQQPHLEQPATLVAAYGVIVKSCVRLIRELNAQTTELEQELTKSFELHPDAELYLSLPGLGFVLGARVIGEFGDDPNRYLDAKGRRAYSGMAPITRASGTRQVVLTRYARNRQLADACYLWAFSSLTGSPGAHRYYKALRARGRSHHQALRALGNRWVSILHGCLRHRTTYLEEVA

SEQ ID NO: 270581 - protein, 340 aa, unidentified
MEELHIIGVDLAKRVFQVHGSDRAGHVLFRKKLSRPQFKKFLSEIPNCTVAMEACATSHHWGREAEEAGHIVRLIPPNYVKPFVKRHKNDAVDAEAIVEAALRPSMSFVAVKTKEQQAQAVLFRSRDLFLRQRTQLINAMHGHLAEYGVLLPTSRASVARMVAAARNCSEDLPAPVFEMALLLADDIEELSAKVAIIDKSLKKMAEASPEAKRLRTMPGVGPITAVAIEAFCPAATSFDHGRGFAAWLGLVPRQLSTGGKDRFSRVTKMGQRDVRRLLVTGAMSVISAAERKGRCDDPWLANMLKKKPRMLVAVALAHRMARQLWAMMVTKKNYEIRAAA

SEQ ID NO: 270582 - protein, 348 aa, unidentified
MKNKSFVGIDISKNVIDVSIFREDTNIKMFPHEVFNNTRKGFGDMCSWLKKSRVVLSQALFGMEFTGCYSLDLEKFLTSKNYSFCMLSTRIVKHHPMGTIDKRDKNDSAKIADFLYRYDGTECAKPYKLPSKAMQQLKQLVNERKFLVEQRTNFMNRMQLFETKEDSAMYESYIKKLNHDIEKIDQEECELMSKEEDVFDTFQNLLTIPGIGFVNATNIIAITRNFTAFDTARQYARYVGVAPCSHTSGTSVKWRARPSAHCNGQVKADLSMAALRAVEYDVEMQMFYNRKLGGRKDSDTKRKALNAVKFKLIRRMFAIGKQKRKWEVLNTSDDRKNLHIEKSKASEL

SEQ ID NO: 270583 - protein, 352 aa, unidentified
MTKGVSIPSFTSIGIDIGKEVFHIVGFDGEGKMVLRKKIKRVALEQEFTKLPPSIVGMEACLSAHFVSRTLRRLGHTPRIIPAIYVKPFAKGQKNDFNDAEAIAEAAVRPNMRVVPEKTQAQLDLQALHRVRARLVSRRTATINQIRSFLLEHSIAIRSGAHSLRTSLFPILKERAAEISPRMQEIIVGLQDDWQRLDERIEAVSQEIDQISKGDEGCKRLMSVPGIGPIISSAVVAGIGSGEAFDRGRDFGAWLGLVPKQFSTGGRTTLGAITKRGSTYLRMLFVQAARVILMRAKLWKAFSFGAWLEQAAARMNRHKLAIALANKLARIAWSVLRYGREFDAPNTGVAAI

SEQ ID NO: 270584 - protein, 340 aa, unidentified
MTYYAALDVGLHKTAVCIVDEDGAVLAERMIASEVDDLIAFLQDFGEEISIVGLEAGTLTQWLTYGLRDAGYHTVVTEARHVKSALGAMRNKTDRNDARGIAQILRCGWYREVYVKSLESHYTRTLLASRKALLSKCVDLENEVRGLLKVFGIRLRAGLGHGPFDEAAREPILQNEALAYALMPLLEVRLQLYQAFLELDRRMKRLASNDPVCLLLMSTPGVGAITALTFRAAVDDPRRFRRSRTVAAHFGLTPRRYQSGERDNPGHISKAGDPGVHAAANSIMSRSGKWSSLKAWGMRLQRSKGRKRALVAVARKLAVILHVMWVDGTVFSFTEPEAVQ

SEQ ID NO: 270585 - protein, 401 aa, unidentified
MDKNRIVAGLDVHKDSIYLCILGHDETIIFQKTYGVLTPELRQMCDEMVSYGVKEAAMESTAVYWVPVWNALCGSMELKLVNPYFIKQLPGRKSDVKDAQWIAECLLKNLIRGSFVPEPVVQDMRKLNRRIFDLQEDITYNQNKLDAALQRCGFRLSNYVTKISGTSYRKAVESISKGITDPVELLKRIHGRVINKHGRDTILAAVTGDFSECDITVIRQYWEMLEICLHQSKECNTKLLQMCEIHFPKEYKRLQTIPGVKERAASAIIAETGVDMKMFATAAMLVGWCGLKPRNDVSNGRFKSRKITHGNKYLRHILIEISWVASRTRNCFFSNFSYTQVTQKHKSKMKIQVAIARKILVAVWHMLTKDEDFVDVYLKRLERERIEQERQQTILDTITAI

SEQ ID NO: 270586 - protein, 479 aa, unidentified
MIDHRRLVGIDLGIASDHTVRVLDGGGGEICRRRARPTVESLAAVEAAALAGVTAETRLEVVIEPTGPAWLPIAVFFTARGHRVFRVSSAKAADLRRFLSRHAKSNSIDADTLARLPLLAPDTLHPLELPATAEAAALDRRVRACDRLTQQGALHQRRIKDLVRQLMPATPLTGELTKTDLAVLGRWPDPRALLAAGRARLLTVIAQASHGHQGADRAEQWRQAAMAAVELYAEHPAMAWTDLAAEVATEVRLLAAVRAELAGHAAARAEAYRFTDPARLAATLPGLAEVGAPTVTAIVGRAARFRTGRQFRSFTGLAPRASETGETDRKGQPMSKAGNRLLRTTLIRAADNARRQDPQLAKIYWVQMVERGADHLKACCVVAAHLAERLHAVLVRAMPYVVCDTDGTPVDPATAKQLIAEHWTVPREVRARRRSRKTTSTTRAGKVPQHVLTGHDRSDTQRADRRGDLPRPASCSRPA

SEQ ID NO: 270587 - protein, 366 aa, unidentified
MKSLVCVPLEMQGSSAAVPRPQPDQDVYVAVDLSRSKWVYGVRWSGAQQRTVSSPAGLPHLQALIAEYRQCRLHVVYEACGFGYEIAWWLEEQGIDGMVIAPSRLERVPGRRVKTDRLDVRSMGRKREQGQLKGIYVPRRAEHERRQLSRTYAQALKECKRARVRVRSLLQEQGRIGPAPRAGWTVYQQWLAAQELPVPVQLCARELLQMRQAAVGSARHLKAAILKLAAAPEYAPLVAALEQQPGVGTFTAIRLVLELGDIRRFATVGAIVNYVGFTPSQYSSGELDQRGHICKAGPGYLRAWLLQCAWAAIRGKHADPALQHCFERLVGRVGRKRAIVAVARRLAVRLRARWLEALAAAVAVAA

SEQ ID NO: 270588 - protein, 332 aa, unidentified
MDNFYFIGVDVSKKKLDFCVLFEGKVLREEQVSNHQQAVARLIGELKNDLEMDNEQFLICAEHTGQYTFPLVCACKSVECKLWLENPSQIKYSSGMQRGKNDKVDAKRIAIYASRFGDKVKYYDRPSEEIERLKQLERERALYVTDLAKYKGQMYDQKDFMPAALYRKKTKRMKGLIQELQAAIDAITAEMEKIIGSTEVLARQMELLMSIDGVGKVVALNVIIETEAFSRFDNPRKFCCHAGVAPFSYTSGSSQHSKNKVSHRANKNIKKLLHMAAVSVTHRKEGELKAYYMRKVEEGKNKMSVINALRAKIVARMFAVIKRNEVYTPIYS

SEQ ID NO: 270589 - protein, 323 aa, unidentified
MSEQRAGGIDVSKAWLDVAARPGRPVARFANTTAGHAEVVAHLAALPVEERPAVLVVAATGGLERGIDRALTAVGWTVVVVNPRPVRDCARCLGRLAKTDRLDAEVLARYGETLDPEPRPRPEARLQELRDLEARRRQLVEMLTMEKNRLQQAPPRTQAGIRRHLEFLREELADVTRQLAEAIQADPTWRETVARLRTVAGIGPIPATLLVLDLPELGRLDRKALAALVGVAPCNRDSGAACGTRSCTGGRAAVRTGLYMAVRSAIRGNPAIRACYTRLTAAGKRDKVAVVACIRTLLASLNVMLRTKTDWDPQRVQPTTTPA

SEQ ID NO: 270590 - protein, 322 aa, unidentified
MSQPNPLCVGIDVSKATLDIAASSDIAQFTVSNDSDGFDAVITGLRRHSVALVLMEATGGLEVAVACSLQAEGFEVAVVNPRQARDFARAMGYLAKTDRIDARVLAQMAEVINHHPERKRFIRALPDAERQALAAMVVRRLQLIAMLVAERNRLHPSHPQNKKSINTIIKALEDELVRLEKEMDSHIRNHFKEIAERLSSIKGVGTMTVSALLAEIPELGTLSRREISALIGVAPVNRDSGTMRGRRTIFGGRAGVRSALYMAALVATRFNPVIKTFYVRLLAAGKAKKVALVACMRKLLTILNAMLRKNEEWDESYHHVAP

SEQ ID NO: 270591 - protein, 343 aa, unidentified
MEHYAGIDVSLESASVCVVDASGRIVREAKVASEPEALITWFGKLGVEVSRIGLEAGPLSQWLYAGMREAGLRVELLETRHVRDAFKAMPVKTDRNDARGIAQLMRLGWFRPVHCKSLPAQELRAVLTARKLVQGKRHDIEMSLRGILRGFGLKVGPTTPRSFEGRVRQLVEGHPTLLAIADALLLARATLAEQLGKLQKRLVSLARDDTRTRLLMSTPGVGVLVALTYVAAIDDPARFRSSKAAGAHFGLTPKKYQSGETDITGRISKIGDASVRTALYEAANVILTRPVKGSSLKSWAMRVAKRAGMRKAKVALARKLAVVLHRMLADGTQFAAGKAAAAI

SEQ ID NO: 270592 - protein, 326 aa, unidentified
MDGFLALDVAKDKLDAIVSLGITDPGKDLSELPNQFKGFKKLLRHCQQLGVNKLYVCMEATGAYWHKVAKFFVEAGATVFVVNPKRIKGQRKTEQKRSKTDRVDKGLILRFMKAQLNDLQPWSPPSEAVRQLQSLVRFRESLVSERTAKKNQIKSQAAVPAVVRMAKQQIDDLNRDISELDKRIAEVIAQDPKLHEQYTNATSVPNIAQVTASIILGELRGFSEVRDPRQATAFAGLDVVHEESATLKKPPRISREGSRLLRSAVYRVAPGACRRSGQFRDLFLRLRSRGLKTKQAYVAVARKLLEITVAVVVSGQPFDPHRYQPA

SEQ ID NO: 270593 - protein, 309 aa, unidentified
MDTTVVGIDVSKERLDVSVQPAGTALGYSRDAAGIELLIGMLTSAAPQLIAVEATGGFETVVAASLAAAGLPVVVVDPARVRAFAASLGKRAKTDRLDAKVIAQFAAATNPPVRALPDAATQALSDLVTRRRQIIQMIVAEAQREKRAAPRPRRSIGRLLKSLRAELSEIDAEIDESVRGSPIWCEKESLLTSVPGVGSTTARTMLADLPELGTLTRRQIAALAGLAPFTRQSGKWRGKSFIGGGRASVRTALFMAALTAMRWNPTLRAFHHRLRATGKPKMVALIAVARKLLTILNAILRDKTKWQTA

SEQ ID NO: 270594 - protein, 403 aa, unidentified
MNMNAVGIDVSKGKSMVAILRSYGEIISKPFEVKHTVSGIRSLIEQIQSIDGESRIVMEHTGRYYEPLVRELSKADLFVSAINPKLIKDFGDNSLRKVKSDKADAVKIARYTLDSWTELRQYSLMDEIRNQLKTMNRQFDFYMKHKTAMKNNLISILDQTYPGANTYFDSPAREDGSQKWVDFSATYWHVDCVRKLSLNAFIDHYQKWCKRRKYNFSRSKAVEIYEASKELVSILPKDDLTKLIIKQAVEQLNTASQTVEQLRTMMNEAASKLPEYPVVMAMKGVGKSLGPQLMAEIGDVSRFTHKGAITAFAGVDPGVNESGSYEQKSVPASKRGSSTLRKTLFQVMDVLIKTKPQDDPVYLFMDKKRAQGKPYYVYMTAGANKFLRIYYGRVKEYLSSLPE

SEQ ID NO: 270595 - protein, 364 aa, unidentified
MKKLTTAATNWIGKQERLTIGLDLGDRSSHYCVLDESGRIVTESKTATSPKAMEAVFGGMTRSRIALETGIHSPWVSRLLSQHGHEVIVAHARNVRLIGESRKKDDRLDAQTLARLARIDPELLCPVKHRSAKAQADLSLIRARAGLVRARTALVNTARGLAKSYGQWLRGCNVRNLNPEKAEALSPELQVALQPLLAGIEAVSEQIGEYNERIEKLAQESYPEVKLLKQVKGVGTLIALTFLLTLEDQHRFSKSRDVGCYLGLQPGRRNSGQSEPQMHISKEGDPYLRTLLVQGAQHILGPFGPDCDLRRWGLKLAERGGRNGKKRAIIATARKLAVLLHHLWVSGEVYEPLHNNRTAIAVAA

SEQ ID NO: 270596 - protein, 355 aa, unidentified
MNDVKYIGLDVHQATISAAVRDSDGKLVLEAILETKAETMLQFIHGLRGSLHVTFEEGTSADWLYSLLKPHVTEVLVCDPRKNALLKVGNKGDRIDARKLSELLRANLLRAVFHDDTGLRTLREMARSYLTFTKDVTRVMRRLKAIYRSWAIPCGGQQVYSPRHRAEWLGKITEASVRRRAELYYQQLDTLRVLHQQAKKELLAEGRKHKTMKLLRQIPSIGPIRSVLLVAILQTPHRFRTKRQLWSYSGLALETRNSGEYRFEGGQLKRSKKVFAVRGLNKNHNHDVKNIFKGAAIRAMTVEGPFQKFYEALVAKGMKPAMARLTLARKIAAITLIVWKKGARFDAEHLKQQAA

SEQ ID NO: 270597 - protein, 351 aa, unidentified
MTADIIDPIGEVIVGVDTHADQHTAVAINGIGQIQETLEVPTTTIGFRQLVGWARELGRFERAGVEGCGSYGAGLARHLTEAGVTVIEVDRPNRRRRRRRGKSDPTDAESAARAVLAGEAATVPKLSTGTVEGVRILHLTRRSAVKARVQAGNQIKDLVLTAPEPIRAQLRDCNTKQRVKICAAWRPGPVTDPTSATRRALRHLARRWLDLAAEIKELETELLRLLRELVPSVLAERGVGIDVAAKLVIAAGENPERLRNEASFAALCGSSPVDASSGKHAAHRLNRGGNRQANNALYTVALHRTRTCDETKAYIERRRSEGKTDRAIRRCLKRALARRFHRLLVHDLTSA

SEQ ID NO: 270598 - protein, 344 aa, unidentified
MGVAIGIDSHKSSLAAAALDELGRMVDVKEFRNDARGHDDLLRWSRAQGGDRVIGIEGAGSYGAGVARHLIDANENAHEVPAFLTHRERKRNPSKGKSDPSDAVAIARVAARGEGLCSPRRTDVFVDLKLLSDHRDQLVRARTQLINRTHTDLVISHPGYEKRIPKLNSKKSQAAALTLLRGDRSVRARLIRERIGEIRRLTKKIADVERQIAGKVNESGTTLTSLHGIGFVIAAKILGEVGDPARIRSKGAFAMLTGTAPIEASSGATKRHRLNRGGNRQLNYALHMMARARLRHHADTKAYVARRQMEGKSDKEAMRCLKRHLSNVVFRQLMADLKGLSKAA

SEQ ID NO: 270599 - protein, 383 aa, unidentified
MNEYDGNQLVGINLHRQRSVIVRQTAEGEQLSAVRIVNDPVALGLQIEKAGPNPEVVLAATYGWYWAVDALQAAGATVHLAHPLGVKGFRYRMVKNDVRDAGDLADLLRMNRLPEAWIAPPATRELRELVRYRAKLVALRSGLKAQVHAVVAKAGVLIPVSDLFGVTGRQRLARVPLGDAYAQRVISLLGLIDDLDAHAARFTARIAAELRGARGYAAIQTLPGVGPTLAAVFVAEIGDVHRFADPAHLCSWAGLTCFRMHSEEYIDSAVTVGSRMQFGKVTSFSSNHSTADNFAGHPPCMALGRSVASSSRSPWDGLLTGTGWTFAVFRHRTCSPSSWRAELPASLATRRTATSKTCEPTPEGEDLRADARGSGGRGHPAPC

SEQ ID NO: 270600 - protein, 345 aa, unidentified
MNNNSKKIVYLGIDVHKRTYSVTAISDKQVIKKATMPAVQEVLLSFIQKNFPNATVNSAYEAGFSGFGLHRFLVTNKINNMVIHAGSVKIAINNRAKTDKRDSQKIAQQLSEDDFQSVNIPSEQRECWRAITRVRAQLVKRKAQTSCQIKALLYYFGILPHNHSKRTSKKWLIGLLILKDSIDSDVFFSLKTLIDFWLYLNQRIKETEKRVKEQAKEDFVIGNVYKETPGIGLISSRILANELGNLSQFCSQSALFSFTGLTPKEYSSGEHTRKGNISHMGNPMIRAILTESAWKAIKKDKKLGETYERLLKNTGSKKKAIVGIARKMIGIVRAKLKKVRINTMH

SEQ ID NO: 270601 - protein, 341 aa, unidentified
MADAKLIGIDLGKYSFFVHAQDARGQQLWRRKFTRHQLIMMLAQHPPCTVAMEAYAGAHWLARKLQSFGHQPRLITPQFVKPFVKGNKTDFGDAQAICETASRPSMRFVAIKTPEQQTLLALHRVREALVSERTATSNQIHAFLLEFGISLPTGARAIARLPALLDEPAHELPPRLIATLLRLHRRYGQLGNEIAEIETDLKAQLAEDEAAQRLLTIPGIGPITASSLIAVIGDAHAFRHARDFAASLGLVPRQHSTGGRATLLGISKRGNAQLRSLLVQGARAVMRYIERRHDALGTWVQSLLRRRHSNVVACALANKMARIAWAILARGGEYRAQPSPA

SEQ ID NO: 270602 - protein, 367 aa, unidentified
MKKVSTVAAQQQKNLSLQKLTIGLDLGDRSSWYCVLEEAGRVLLEQKVSTTPKAMEEVFGEMPRSRIAIETGMHSPWVSRLLGEVGHEVIVAHARNVRLIGESRKKDDRRDAQTLARLARIDPQLLSPVKHRSAKAQADLTVVRARAGLVRARTALVNTARGLAKSYGERLRGCNVRNMNPEKAEALSPELRKALGPLLAASAALSEQIAEYNERIEGLAQESYPQVALMKQVKGVGTLIALTFLLTLEDPGRFRKSRDVGCYLGLQPGRRNSGQSEPQMHISKEGDPYLRTLLVQGAQHILGPFGADSDLRRWGLKLAERGGKSGKKRAIIATARKLAVLLHRLWVSGEVYEPLRNSNPRAMPAAA

SEQ ID NO: 270603 - protein, 355 aa, unidentified
MKYYTSTTEYNCGIDLHARQMYVCVMDRQGKKLVHTNVKDNDFQYFLKLIAPYKHSLTVCCECMFGWYWLADACQAAGLNFVLAHALYVRAIHGGKNKNDRVDSEKLTHLLRSNLIPPAYVYPTQQRPLRALLRQRIFYVWRRSELLARIHSHQLAHNRVPAKQSRWSRDPWEEELLKAEVDPLRQLALSNDLAMIRHFDHQIFEVEKALQRQTKQVAAREYALLQTVPGIGEHLGLTILYEIGDIQRFPTVKDFLSYCRLVKGTVASAGKIKGLRGAKLGNPYLRWAFGEAAVIAKRDHFRIRPLAQRLEARMEGNKFKANTVLAIKLARCVYFMLKNQTVFDPDRLVAALARN

SEQ ID NO: 270604 - protein, 385 aa, unidentified
MQASNVCTPTVDHFGTILVAIELSRQSWLVTMHSPDRDRISRHKLCGGDHAGLLALIERVQERAARALGSVPAVVSCYEAGYDGFWLHRRLMAAGITNHVFDPASIAVEQRARRAKTDRIDGELLLRTLMAHWRGEPRVVRIVRVPSAEQEDARRDTRERQRLITEQTAHTNRIKALLRLLGMAVGNPRRRDWLIWLAAQRDWQGQAVPPRLAAELEREHARLMLVREQLEALSQAAVGADAPAAAAQMARRSALLLRLKGLGPVFAATLTNEVFYKDFRNRREVAGYCGLAPSPWRSGATNHEQGISKAGNPRARHKAIELAWLWLRHQPDSALSQWFRERTLNGSGRIKRIAIVALARKLIAALWRYLTTGLVPEHAVLKAKA

SEQ ID NO: 270605 - protein, 314 aa, unidentified
MGSHHKEGSTKMSKYSMVCAGIDTAKHKLDVALEGRSETLQVDNTADGHMALSAWLRQHWVERVGIEASGGYEQEVVAQLRRDGFVVVVFQPAQVRAYARFLLQRAKNDKIDAGLIAACTAATKKIHAPPDPRLAPFAEHLTLVEQITDDIARLKNRRESCRDPRIRGFWKAEIARCNKLLRIELKALAAAIRQHRDLAERLDLILSVDGVGLRKAASLAGLAPFDDDSAEHEGVRHIAGGRERLRGSLYAAALPAAMRWNPQLMALYQRLIAKGKPHKVALVACARKLLIFVNAVVERGTPWVEEPPARLKPS

SEQ ID NO: 270606 - protein, 349 aa, unidentified
MLADELDYVIGVDTHRDEHVLAVLTAAAAAVVAGEALPANARGYRETLRFAERYAAGRRAWAIEGTGSYGAGLARYLAGRGETVLEVSRTPRAERRLRGKDDTLDAARTARAALASDTLALPRSGERREALRLLLVARRSAVDVRREALTQLRGVLVTAPDRRREELRGLPTGKLLHRCSRLRRSSAASVDELATKLVLRSLARRIEAATLEADELERDLLGHVRALAPALLDEPGVGPIVAAQLIVAWSHRGRLRSEACFARLAGVAPVPASSGQTVRHRLSRGGDRQLNRALHTIVLHRRQHDQATKDYIAKRIAEGKSRRDATRLLKRYLARHLYRLLQQTEPLMT

SEQ ID NO: 270607 - protein, 340 aa, unidentified
MFHYIGIDVSKATLQVYIPFKEENISIDNNKKSITQLYSKLKKYYKKEITNIVFIFEPTGSYSHLLKDFCVNKNVYAFIVNPRQSSNFAKALDHRSKTDIIDAKMLYMFHVMAKDGDVKVPIIDTTQKVLGELLSYYKLLIKQRTGFSNHLEALAFQDGDNYLIKRLEKETKRLKEEEKLTLEKMIELVESDKDLCERFQNIKSFKGIGDRAGIALIHLFITYPQANRQELTALSGLDAIEITSGTSINRRSRISKKGSSIYRSMLFMPVLSAVRSNPYMQVFYDRLKQNNKHSTVAQIAVMRKMMLIAHSLYKNNVSFDNEKYEKSISYLREANIEIMT

SEQ ID NO: 270608 - protein, 378 aa, unidentified
MSQSTTTAATVYAGLDVHKDSIDIALAEAGRDGEVRHLGAVAGGVNAVSKALRRLVSQGHCVHVVYEAGPCGFVLQRHLAALGYHCEVVAPSSIPKRSGDHVKTDRRDALMLARLARAGELSAVRVPDAVDEALRDLVRAREDAVREQRNARHRLKALLLRNGVMYAGKCAWTAAHLRWLASLALPHAAQQIAFQEYLHAVSESGARIARLEQSLRDALQGWSLAPVVAALQALRGVQLIAAVTLVAEIQDFHRFANPRQLMAYLGLVPSEDSSGQRRRQGAITKAGNSAARRMLVEVAHLYRYPARVSAVIAKRQSELPKTVTDIAWTAQLRLCARFRRLAARHVPHNKIVVAIARELSGFVWAIACEVTPPPVAST

SEQ ID NO: 270609 - protein, 350 aa, unidentified
MTDLNTEAPRTVVIGVDTHKDVHVAVAIDPLGRKIAQHCAATTPAGISDLLAWASTLDPCCQWGIEGTSSYGAGLTRRLRSNGGTVHEVCRPGRRIRRTRGKSDPIDAEAAARAVLAGDGLIEVKSAETTSESLRQPRATRRSAVKARTQVANLIHALLLTAPADLREHLTHHRFIDTVHACVRLRPGSCADPREACKFSLRSAARRWEHLDAEDAQLTEKITALITQEAPELLEVFGVGPDVAAALLITVGGNPERMRTEASFAALCGISPIPASSGKTHRYRLNRGGDRQANTAIHVVALTRRRSDARTKKYLEKRTAQKLSSRDINRCLKRYIARELYRILKAHSTA

SEQ ID NO: 270610 - protein, 353 aa, unidentified
MRYANRVDFSGQTIYIGIDVHKKSWTVSIFLEHLEHKTFTQSPEVAPLVSYLHRHFPGAFYRAVYEAGYCGFWVHDRLVENGIVCMVTNPADVPTRDKERRRKGDRSDSRKLARCLRSAQVEGIHVPTRARTEDRGLIRTRQAMVRKQTRCKNQIKSLLLFYGFPTPEVSRSWSRNYIRWLEGLRFERESGNLAMRAYLTELMHLRQIIAQLNRDILLLSRTDDYREGVQLLKSIPGISTLSAMVFLTELGELSRFASLDKLCGYVGLTPDTHGSGEKQGVGDITRRCNQMLRSLLIECSWTALRKDPSLALAYETYCKKTRRTKAVVKIARKLLNRIRFVLNTRHRYAMNVA

SEQ ID NO: 270611 - protein, 355 aa, unidentified
MNDAKYIGLDVHQATISAAVLDSTGKVLMESVLETKAATILRFIHGLRGSLHVTFEEGTCAAWLHDLLKPHVTKVLVCDPRKNALLKSGNKNDRIDARKLADLLRTGLLRAVYHGENGIRTLKELARSYLAVTQDLTRVMNRLKALYRSWAIPCTGQRVYAPRDRCEWLAKITEAGVRRRAEFYYQQLDALRTLHQEVRHALLAESKKHNAMKWLRQIPSIGPIRAALLIALIQTPHRFRTKRQLWAYSGLALKTYTSGEYRFVEGQLKRSKKLLAIRGLNANHNHDLKNLFKGAAIRAAAVAGPFQEFYAALVAKGMKPPMARLTLARKIAAITLLVWKKGVRFDAEHLKQQAA

SEQ ID NO: 270612 - protein, 366 aa, unidentified
MLSAVAIRSERRTLVNSAKYIGMDVHTATVSVAVRDAAGKRILESVLEAKASTIPQFIHGLRGELHVTFEEGTWAAWLYDLLKPYVTNLVVCDSRRNALLQEGSKNGRIDGRKLSELLRANLLRPVYHGENGLRPLKELVRAYLTLSKDLTRVMHRVKARYRGWGIPCAGQSVYHPRHRGEWLRKITQASARRRAQLCHLQLDMLVGLRQQARQELRVAAKKHPAWKFLRSIPALGPSRAAVLMAMVQTPHRFRTKRPLWKYVGFGVVTHSSADHRHVEGQLQRSKKSLSVRGLHNHDLKDLFKGAAIQASTREGPFRQFYAARVGKGMRPEMARLTLARRMVTLAFTVCKKGVVFDTQYLKPQTA

SEQ ID NO: 270613 - protein, 394 aa, unidentified
MKLVGIDVGKNSHHFCVMDKETGEFNVTPTSFSNNKEGFDFLINSLKPYSKKSILIGMEDTGHYHVALLKFLLSNGYTVALINPKTTDLTRKMEGGITKNDKLDTITICDVLDTPERKKQYRITKVDRFDLYEQRQLTRHHHNLKEELNVYCNRLQKSIDLVFPEFNTLFSSKYSIVYMNLLKTFGSAEAIASTDIRTIRKCFEIKGRGNRISLTPEKLKECAKNSIGISSEVETIQIKHLVSQITLIKEQIAEIDKKIEEFSITNNSPILSIPGISHFSGTSILAELGDIGNYSKPSQIIKFAGVAPYHYESSQYNAQHTGITKKGSKYLRKTLYQIILTVINNNPVFKKYYRLKISQGKGHRCAQGHCIRKLLRIIYHLLETGQSFYPALLR

SEQ ID NO: 270614 - protein, 329 aa, unidentified
MSQNNISKNNLNTIWVGVDVAKATLEMDLGGVIHKLGNETKDHTRIVKLLGRAEKALAGSKVHVILEATGGYEVALVRALHEAGRLVSVIQPSRVRHFAYAKNQRAKSDPIDARILSQFGEAIRPAPTPPPSTAQIHLSVLVTRRAQLIQTRIAELNRSAHYNDKMLCRQSRGLLALLDRQIAACDKAIATQIAADETMKARAQRVQQVAGVGPVVAAVLQAGLPELGTLTPCEAAALAGLAPYDCDSGPRKGIRHIWGGRAPVRCALYMTAMTAIRRDPILKAFYLKLLAAGKKPMVALTAVMRKLIVLLNHLIKNPEFKLITTPRTN

SEQ ID NO: 270615 - protein, 364 aa, unidentified
MDPPLKDGVIMRQHRISIFKKRRRSMKDIKILGVDIAKDVFQLCGIDEWGEVIYTRRVKRAQYVSTVASLKVGCVVMEACGGANHWYRTFIGMGIPTQLISPQHVKPYVKSNKNDRNDAQAIAEAASRASMRFVRGKTVEQQDVQALLKIRDRLVKSRTALINEIRGLLQEYGLTMARGAKRFYEELPLILASEAVGLTPRMKRVLNCLYTELLNRDEAIGDYEEELKAVAKANEDCQRVQSIPGVGYLTALSVYASVGDIHQFHRSRQLSAFIGLVPRQHSSGNKEVLLGISKRGNVMLRTLLIHGARALLRHVKNKTDKKSLWLKALIERRGMNRACVALANKNAPIIWALLTRQETYRCGA

SEQ ID NO: 270616 - protein, 384 aa, unidentified
MKNVYESVTGGGMDVHYKSSEVTMRDAQGRVVRRERLEHRDRAALRKKLSGWPREVPMVMEASFGWGWLADLMTEMGLQPELSNCYKIEQMRRARGWVKTNQKDADLLSLLPGEKSDWWKVWMAPPEVRDLRERMRHRTSLVVVQTETKNRIWALFHRYGIFQDTSDLFGVAGRKFLGALCREGRTAEVSLRPGALEALRSLVELLEHVRKQLARMARELRGQLERSDLARRLDGIPGIALILAHTLMAEIGRMERFASHRHLASYALLAPRSNDTGEDDGRPPVGRHLGHRGNRTLQWAFIEAAHGAVRRGGKWRRIFDAATDGGERDRNRGYIKVARELAKVVYVMWKNGSSYMDNPPSRPGSPRERMDRFFSRARSGTGQP

SEQ ID NO: 270617 - protein, 349 aa, unidentified
MQSKLQIRSIGIDLGKTTFHLIALGNHSQVVIRKKFSRSQLLVYTANLAPSLIGMEAGVGSHFLGRALREQGHEVRLIPAQFVRPFVKSNKNDYRDAEAIAEAVERENMRFVPIKTEDQLDLQALHRVRDRLVARRTSVINQIRAFLLERGISFRKGPASLRRQMPEILENADAKLSTAMRRLLDFLWQEWKGLQLQIESLDTELEQIASSDPSCVRLQQIPGVGPLISTAVVSAIGNGAAFKKGREFAAWLGLVPRQWSTGGKAKLLGISKRGNPYLRKMFIHGARAAVLRVKREGSSLGKWMGELETRAARNVVIVATANKLARISWAVLASGNDYQPLHKALLFSN

SEQ ID NO: 270618 - protein, 338 aa, unidentified
MIVIGVDVHKQSVTAVAVDEAGRMLDERTVLVGNDELIGWASVLDPERLWALEDCRLLTPWLERQLLGLGEELVRVSPKLTVPERRAGRVRGKSDPIDALAVARAALREPDLPRPQPGERVHREIKLLVDHRDDLVDERRRTQQRLRWHLHELDPTLAVPLGALDRAVWLDRLGRQFARREQTTQVRIARDLVGRCRTLTRSIGELDRELHARTAALAPRLLQLPGCGPLSAAKLLCEIGPIDRFRTDAQLARHAGVAPLDASSGKHQRHRLDRGGNRQLNCALHRIAVTQGRVHAPARAYLERKQSEGKTRREAIRCLKRQLARTVYTTLKNELLLT

SEQ ID NO: 270619 - protein, 425 aa, unidentified
MNNVEKKQLAYGDVLVVGIDIAKKVHWARVLEPMGVDVIKPFKFHNTREGFVRLESKINEARNKTGIQRVIVGMEPTGHYWKPLAYYLKEREYSVVIVNPHHVKKSKELVDNSQTKSDRKDAGIIADLVKSGRFLNCLLPTGIYAELRNLSTARIQARKIFNGALAQLQAIIDQFFPEYTQVFKNVLGKASTWVLRHYPFPKNILSLTEKELAIKLKQASNNRVGLKRAKQLQNVAKESIGIKEGLEGAHLKLMTIMDRLEYAASEISKIEAALERTLEKTGLAEYLLSIPGIGVITAAWLLAEVGDLSKFDDWRQIRKLAGLNLVENSSGMRIGSKKISKRGRPGLRNVLYLASLVLVAKNAEFKALYNYFKTRAENPLKKKQALIAISMKLIRVIFALVKNRTLYDPAKVFGEYRAAQLQQAA

SEQ ID NO: 270620 - protein, 410 aa, unidentified
MYNAVGIDASKFKSTVTVIQPAGIVIRKPFDVLHTSNELNTLVTYLKSLEGETRAVIECTGRYHEPVVKSLEYAGIFISAVNPKLIKGQKQNSLRKVKSDPADARKIAKYALDNWAELRQYSSMDTIREQLKTLNSQFDFFMKQKVAAKANLISLLDNTYPGVNKLFDSPAREDGSEKWVDYAYSFWHVDCVRKIGLKAFTERYEAFCKKHHYNFQKGKPAELFEAAKQLVAVFPKEKSYKLLIHQSIQQLNLASEHIEILRKEMNQLASTLPEYDTVMSIYGVGETYGPQLIAEIGDVSRFTHREAITAFAGVDPGVNESGQFRQRSNRASKNGSTKLRKTLFQIMTTYLQNKPVNEPVYQFLDRKRAEGKPYLVYMTAGANKFLRIYYGKVKECLHNLEQDSLPPEES

SEQ ID NO: 270621 - protein, 403 aa, unidentified
MNNVAGIDVSKGKSMVSVLRPFGEVVAKPFSVGHTGSELKELADYLKSLDGETRVVMEHTGRYYEPVARFLHDEGVFVSAVNPKLIKDYGNNTLRKVKTDKADSRKIARYGIDNWAELRQHTPMDTIRMQLKTLNRQQSLYSKTKTMMKNNLIALLDQTYPGVNALFDSPVREDGSQKWVDFATTFWHVDCVRNMSLTAFAERYRKWCKRHGYNFSQSKAVEVHAGAQDLIAMLPRDALTKTMVRQAIDALNAVSASLERLKAEMQALAAQLPEYPVVMAMHGVGDSLGPQLMAELGDVTRFTHRNAITAFAGVDPGADQSGTHEAKSTRVSKSGPPELRRALFLVMDCLLKTQPQDDPVYRFMDKKRAEGKPYLVYMTAGANKFLRIYYGRVKEYLAQLENS

SEQ ID NO: 270622 - protein, 351 aa, unidentified
MPHKLNSGIAVIGVDIGKNSFHVVGHDKRGAIVLRQKWSRGQMEARLANLRPCLIGMEACVGAHHLSRKLQMLGHDARLMPAKYVRPYSKGQKNDFRDAEAIAEAVQRPTMKFVATKTAEQLDLQALHRVRERLVSQRTGIINQIRAFLLERGIAVRQGLRFLRAELPRILAASCDALSPRMLRVIEDLAGDWRLLDQRIEGLSSEIEALARKDKDCERLMTVPGIGPIISSAMVAAVGTGDAFSKGRDFGAWLGLVPKQISTGDRTILGSISKRGNRYLRTLFVQAAWVVLVRIGPKHWDRYGLKSWIEAAKKRLHHNVLAIALANKLARIAWSVLAHGRAFEATKIQAA

SEQ ID NO: 270623 - protein, 412 aa, unidentified
MDVLVERCAGLDVHRDSVMATVRVPGKRRRQREQHKRAFGTTVAQLQELGGWLQGFGVTLVGMEATGVYWLPVFDLLERRFECWLLNAQHLHNVPGRKTDTIDSAWICQLVEHGLVRPSFVPPPEIRRLRDLTRLRKAQINERGRAIQRLEKVLQGVGIKLTSVASAAYSVSARAMLEALLAGTTDPNELAQLARGSLRGKIPQLREALANRFELAHHGVLVSGLLAHIDALDQGIAALDARVVEATEPLAELVELVSTIPGVKQRNAQVLIAECGIDMSVFPTVHHFASWARICPGNNQSAGKHRSGKTLRGSRWLRQALTESARAAARTKGTYLASHYWQIRGRRGEPKAIGAIRHDILVAYYHIARDRVPFRELGADWLARRHSPEHRTRRLVRQLEALGHKVTLEAAA

SEQ ID NO: 270624 - protein, 353 aa, unidentified
MENSSRVESRWVVGVDLGDRWSQICRLDAETGAIQEERRLSMTSASLQRYFSVLARCRVILEVGAQSGWVRQLLESMGHEVITANASKLQAIASSLQKTDQRDARCLAQLGRVAPELLAPVHVRSAEAQSALAVIRAREGLIKVRTLLINQVRGTVKTFGARLPGCSSKSFARKVSLSLPQALRAALEPLLAVIADLTQRIRGFDRDVEAWAQRFAVTQRLRQIRGVGALTALTFVLTLDDPQRFARSRSVGAYLGLVPASRSSGASRPQLPITKQGDRLLRRLLVQAAHYILGPFGQDSDLRRFGLELAQRGGKNGKKRAVIAVARKLAVLLHRLWVSSEDYQPHRQLAKAA

SEQ ID NO: 270625 - protein, 446 aa, unidentified
MKKSSRMSVIHPHAAGVDIGAEFHVVAVPPDADAEPVRTFQSFTGDLHRMSDWLKTCHITTIAMESTGVYWLPAFEILEAAGFNVILVNARDAKNVPGRKTDVNDAQWLQKLHSFGLLRASFRPEHDISVLRSYLRQRERLTEYRAAHIQHMQKALMQMNVQLHHAVSDITGVTGLSIVRAIVSGERDPSVLIQYRDVRCKKTPEVLQQALTGNWQPEHLFALEQSVAFFDFYQEKIRECDDQIETSLLQLSTGTEEPEGVLPSARHRTKQPNQLSFDVRPLLWKITGADLTQIHGFGPYLALKFVAECGTDMNRWPDASHFTSWLCLSPGNKISGGKVLSSKTRRSSSRIAAALRLAATTIGRSDTALGAFYRRLSSRIGKAKAVTATARKLAIQFYNALKYGQKYVDPGADYYEERYRNRVLDGLKRRAKSLGYSLQQDPELCV

SEQ ID NO: 270626 - protein, 343 aa, unidentified
MQIHSVGIDLGKTIFHLVALGDNGKVLLKKKFSQKQLIAFTANMQTCLIGMEACSGSHFLGRALREQGHDVKLIPAQFVKPFVKSNKNDFIDAEAIAEAVVRENMRFVPIKTDDQLDLQALHRVRDRLMARRTALINQIRAFLLERGIVFAKSPIRLREALPEVLENVNESLTPRMRNLVAILWSEWKDLELQIVQMNDEVERIAASDAACRRLRQIPGIGPLVATAIVASIGNGAAFRKGREFAAWMGLLPKQHSTGGKARLYGISKRGNSYLRKILIHGARAVVLRSKRDQIAMGAWMTALETRAPRNVLIVATAHKLARIAWAVLATGQDYRAVPEALTV

SEQ ID NO: 270627 - protein, 311 aa, unidentified
MKQSVVYIGIDVAKTHLDVAWAGTFRRLPNERSGHAALVRWIKQSATPVQLICEASGGYEQALLESLEKSEVKVTLVQAVRVRQYARAAGILAKTDRIDAKVLAAFGSAMQPQPSRPLSAEQKRLRQYEAQRRHLSRTLVAEENRLAQLSCAELRTLSRSLISKIKTQIKTIDRGISDLIAQDQTLCVKAQKLTAISGVGVRTAALLLAQMPELGQLNRRQAAALAGLAPFNHDSGSVRGKRAIFGGRPASALRSGLYMAALSAARFNPILSNFYQRLRAKGKPHKLALTAVMRKLLLALNQTLKPLPYSA

SEQ ID NO: 270628 - protein, 536 aa, unidentified
MRKNDHNTQRRPRHVPGQKPRGCFQERVKKVGPEHFAIIPVDCGKPEARTRVADFYGNVLLEPFSFDITRAGLDTACCRIQQTIRQHHIQDWVCVIETTGRYHLPIRETFKKQQWDTRDVHPYTSSLLRRSADLGTKTDDVDLAALHRAAVDGLAMRPEVLDPASQQWRLLVRHRRDLVEKCVILKNQLKETFHAYLPGYARLWDDDHFWDSPVAATIATAFDSPRAMQQAPDERFRQVVRDAQSVIQKKTIDRIRAWTHQAGPCDDAYQLLHRRACSLWTDLRVKWREIEAFELELADFLCHNPCVLLLAFPGINVISASDYGAELGPISNYATSKSIAGRAGLYPSRHQSSQTDCQNGRLVVRRNRQLRAALMRLARCLNASNHYFMGLAQEYQKRQPNCDAKVPIARSFSRLSYYVIASQMLPAHAAIQNQEKVLQKLLEFYQKRQANPEKTTAAVTATIGRLPATVLRGERSVLAAHHCAVQNKRRTRRVMRIGEILPQVLLRIDQRLQEQTKSETSEVLTEAIHEDRTHGS

SEQ ID NO: 270629 - protein, 414 aa, unidentified
MSLTSWAGRAIGLDVHRDFCVVAICEDGQVRSGARVPSTPEGLGMLAQSLVKSDRVALEVTGSCWEVARILEPHVDRVIVVSPDDTGIAQARAKTDRLDARALARLLWSGELESVWMPDERCRVLRRRLARREQLVHSRSRAKNEIHAVLQRRLQGKPPCSDLFGVKGRRWLAGLELPIEERESVDAGIRHIEFLDSEIAAVERVIAQQALEWPEIRRLMTVPGVNLICAATFIAAVGDPRRFLSSRKLVAYLGLDPKVRQSGDAPARSGRISKRGSAAARWALVEAAWSAVLQPGPLHAFYDRTRARRGHGKAIVATARKLAILFWCMLTRGEDYAHQQPSLTKKKLRRLEITAGAPKYAKAARGIWSSNHAIRQAERELAAQAEASYERLVKDQQAGAPARKVGAGATPERA

SEQ ID NO: 270630 - protein, 364 aa, unidentified
MYDSTTTVAVGLDVHARSIRLAAVRADELLEERTLPYDEEAVERLLGRWPGVRCCYEAGPTGFGLYRHLVERGFDCAVVAPGLVPQRPGDRVKTDPRDARKLARLLAGGLLEPIHVPSPEQEATRDLVRAREDARLDRMRDRHRLSKFCLRHGRRMPTSSWTVVRRKWLSEQRFSFAAQQITFDSYLHTLDLVDARIEQLERAIRETAEQGPWRELVARLRCLRGVDTLTALALVAEIGDFSRFRTAEEFMAFVGLVPCEHSSGERRRQGSITKVGNSHVRRLLVESAWHARRRPKVGYELARRQRGQHAEVIERAWRCQERLYQRWQRMAGRGKPKQKIVVACARELAGFVWAIATEQPLRST

SEQ ID NO: 270631 - protein, 326 aa, unidentified
MTAPKLGIDISKKTFDVALIRDPETMKVKQRQFSNTPDGFQALQTWLAKQGVRQVHAVMEATGAYGDALAECLHGAGHLVSIVNPAQIKAFGQSELQRNKTDRADAALIARFGWRHNPAPWTPPEPEHRELQSLVRHLDDLIEQRTQVSNRLSEGRLTKAVRESWEEILQALNERIAEVKRQINQHFDDHPTLKRQRELLDSIPGIGPETAGRLLAEMPQLGEFDSARAAAAHTGLTPKRHQSGTSINAPARISKIGNSRVRYALYLPAMAALRSSKEFKELASRLTERGKKKMQIIAAAMHKLVRIAHGVLKNQRPYDPNYAAAD

SEQ ID NO: 270632 - protein, 532 aa, unidentified
MATKRKSRKSRKPCPAVLGKPNGVIQPRVQAVGPERFGVVAVDCAKARSKWMLCDFYGNILIPPTDVEHHRAGLQMATVMLKEACRKHGLQDHIVAVEMTGTYHKPVQRAFREAGSETRLVHPFASKHYRLPAHADNKTDDHDLEAIFRAAVNGFGLLEPTWHESYLQLQLLARHRRDLVEKRSKLQCQIRQYLERCLPGYAALFPDDDLWTRPVAMAVARRFGDAETIRQAGVSGVTRELKEEKMRFQARTVERLVSWAANAAKADPLAAHLARVWHALHDDWQAKTAQITRLELELAEILVKTPYILLLSQPGINVVSAGELAGEMGPIEHYAHARAITGRAGLFPSRYQSDKVDRANGPLAQFRNARLRAAWLRIADNLIKCNAHYRGKFQLWKQNGVDARDIRCRVANRATRTIFRMVSGRKLYHHSSQLDRQYVLDKLLKFHQDHGTPPHEILRDLQEAAQQIPRSDQAAEASPLKQTCERIRRSRRRDPQPIGTILIAVLAKLGVTELQSESEALSPDANMSDVSS

SEQ ID NO: 270633 - protein, 382 aa, unidentified
MHARQTTLEMLNDRGQTVKRQTIRGGLDKVVEEVAKLPGPLSIAYEASCGYGYLHDRLAPLAKRVVVGHPAQMRLIFKSKRKNDRIDGGKIAKLLYLDVMPQVHVPGVDVRQWRGLIEFRAATLNRRVALKNQVRALLRGLGLAASVPRGLWSKKGIVWLKDLSGLGETEALRRDMLIDELSEVNRRIKLLEQALAKIAAAHPAVRLLMTIPGVGIRTAEAVVAYVDDVNRFGKMTQLGTYFGLVPCQDSSAAVNRLGHITKEGPATVRKLLCEAAWQARRRSRRVSGWFERITGGDTDRRKIAAVAVARKLVVVMGHMLRSGEAWREGPASTSSSTNTSMRTGCARRLRGSPPEDTVTGNDRRSSVAGAVAGPTVNGERRR

SEQ ID NO: 270634 - protein, 349 aa, unidentified
MASACSVTLGVDTHKDLHVAVALDQVGRRLGVASFGTDDAHHPGLWAWASDFGSITQAGVEGTGSFGYRLARFLTGSGVQVFEVNRPNRITRRRRGKSDPVDAEAAARAVLAGDATATPKNRSGPAGQLRALLVARRSATKARTQTEQQLRSLILELDDDQRAGIDRRRILELASACAALAGTDGTSIALRALARRWQHLDQEIRDNDQDVTTIVRRIVPGLLARPGIGPVCAAQLLVTAGDNPDRLHSQAAFAALCGVSPVEHSSGKTQRHRLNRGGDRAANSALWIIANNRLMHDPQTRAYAARRTATGASRKEILRLLKRYIARQVFAAIRHALSPPDTLPDNSLT

SEQ ID NO: 270635 - protein, 344 aa, unidentified
MLFVGIDIAKNNHVASMMDEYGKVVFKAFSFSNTTDGGNALFSKLSSYSSNPSDFEIGMEATGHYWLSIYSFLFEKGFLLHVINPIQTDGWRKGTEIRKRKNDTIDSVLIADLIRYGQFVQTRLADEDLFSLRTLTRFRTYLVESISDLKRKVVCVLDQIFPEYQSIFSDIFGKTSKEILLQFSSPIDFENISSESLAELLAQLSRQKIGAAKAEQLKAAASSSFGITFAKNSFTFQLKALIEQISFIENQVKETESEISNIMRKLNSPITTITGIGNVTGAAIISEIGDISKFDNPRKLVAFAGLDATVTQSGEFEASHNVMSKRGSPYLRKAISGSPDCFFP

SEQ ID NO: 270636 - protein, 326 aa, unidentified
MMNYLGIDVSKEKIDCCLFINGISGKGKSKIFSNSESGFIKLTDWLTHLNINSNDLLVTLEATGIYHENLCYFLYDLKINIAISNPMRTRRFAQGMSILNKTDKVDSEVLAKYGALAPIKYWKPDSKNFRELRDLMIRRDALSTDLVRESNRLEKSTFTKTSLHVISMIKESIDNLQTRINHIDVIINELIKNDSELTDEMSLLISIPAIGQRTALQMLTLFHGKDFDNAGAAAAYVGLVPILKQSGTSVRGATRISKSGSSRIRAALYMAAIVAIRFNPHSKVLYDRLLKNGKSKMSALCAVMRKLVYLCYGVLKNKTPYQPDYA

SEQ ID NO: 270637 - protein, 370 aa, unidentified
MTEDNVFYVGVDVSKAKHAIAIAEGGREGEVHFFGEIEATPAAVERFVRKLEQKHPRLHLCYEAGPTGYGLYRQIVALGHRCDVVAPSLIPKRPGERVKTNRRDAVSLARLLRAGELKGIWVPDAMHEAVRDMVRVRATASEDLRKKRQQLLSFLLRHGRVFSGRKNWSLAHARWLAAQKFDHPAQQIVFQDQVDVITDAQARLERLDAQLVELVPSWSMAPVVAAYQALRGVSFIVAVTFVSEVGDVRRFDNPRQLMAFLGLVPSERSTGDTVKRGGLTLAGNRRARRVLVEGAWSYRYPARVTEPIRARLEGLPKAVREIAWKAQTRLCARYRRLTAAGKKTPIVVAAIAREMAAFLWAIGHQVEPVR

SEQ ID NO: 270638 - protein, 351 aa, unidentified
MNVRKKDVGDKFSRVEMVHGYNHYIALDWSLDNATLARLSPSSSTPKVIRLNSNVKEIKDWAQKLRGRSILSIEETTGSHWLYVELKDYFSKILICDPYRNRLLSEGAKNDKADAIKLCQLLRSGMLKEVYHSVDEDYHLRKLVSYYEDWIKFGVRFQNQKSALYRSLGLQYKKEQLKATTAHLQFIDKYQHEALELYREGKKAYEQLFKTIRRKNHHISRLTSIAGISDISAVTIYSIVIDAGRFANKYNYWAYCGLVFQEKESGNRSYGRRRPRYNRKLKAVYKSAAVAAIGGKNDIREYYDHLVVDAGLSPWDARHAVARYIAKVSYAMLKNGTAYQPYQWRESLTKK

SEQ ID NO: 270639 - protein, 417 aa, unidentified
MKLLFIGDDWAEGHHDVVAQDDAGKTLARRRLPEGADGIARFHEMVASCLGEDTEPDPARVVVVIETDRGPWVKALAAAGYRVYPANPRQAARHKETVANSGKKDDFFDAGCLADMGRTRRHQMRELAADSDVAEAVKIAARAHQKLVWERTRHLLRMRSALREYFPAALEAYADLTLAGKDALELLAKAPAPESAARLTVTQITAALKRAGRRGDLTQRARDIQAALRAPHLAQPDVIAEAYAASVQAAAAVITALNEQVKIMEAKVSGLFRRHPDAGLYLSQPGIGDITGARILGEFGDAPGRYATAKARKNYAGTSPLTIQSGKKKTVHARYIRNRHLIDALHAQALTALSASPGARGYYDDLRARETGHDDAMRRVASRLVGILHGCLKTGREYDEATAWSHRAGTPGAAEAA

SEQ ID NO: 270640 - protein, 317 aa, unidentified
MKNTSECFVGIDVSKKSLDVAVRPLPIKWSCPRDETEYPALIDRLLELRPTVIVIEATGGLEVPVVTALVFAGFPVAVVNPRQARDFAKAIGRLAKTDTIDADVLARFGEAIRPEPRAIKDLSAQELSAIIARRRQLVDMLTAEKNRLSSASSRIRSNIQQHVDWLKRQIDDVEKDMVSLLQDNKIWRDKDDLLQSVPGVGPILSRTLIADLPELGTIKIRPLAALTGLAPLNRDSGQFRGTRHVWGGRNQVRSVLYMATLAACRYNPVIREFYTRLIQKGKKRKVAIVACMHKLLTILNAIVSSGTPWHENLPCSS

SEQ ID NO: 270641 - protein, 431 aa, unidentified
MLGGNQEKLMSQNQPEIQYAAFVSIDWADQKHVWSLQEANSSTREHGEVGHMPEAIEAWIAQMSQRFVGRQIAVAVEQSRGALVFMLSKYEQLHIFPVPPAMTANLRKAFYSSGAKTDPADTDLLQDVLQMHREKLRRLSPDTEATRLIQNLVEERRKLVDEKTAQSNRLEAHLKIYFPQIPQWFGDVDSPLVCALLVRWSALEALQKARPDTLRSFFRKHQCRKEELIESRIKAIGEAMPALKDRAVVEAQLAVVKVLVQVIQVLHQGIEDFNRQIQEAAAAHPDFFIFESLPGAGAVMAPRLLAAFGSQRERYRNAAEVQTLSGIAPVTESSGKSSWIHFRFACSKFVRQSFHEWAALSITQSQWARAYYELQCRRGKRHHAAVRALAFKWIRIIFRCWKERVAYDEKVYLAALAQHNSPLLAATKIAL

SEQ ID NO: 270642 - protein, 388 aa, unidentified
MFYVGIDLAKRRHSASVVRDDGRRLVLGFAFPNSRDGFEALLRRLEAVGAAPGDSRVCLEATGHYGRNLIAFLEGHGYEVFEVNPLLTANWRRATSVRKVKNDAVDAEALALWLLAGNPTARRRAKDESDDLRALARSRTSLSHMIGDCKRRAVAILDVTFPELHGFFSDDFCVAATAVLMRWQSAEALSHARLDSIRKEVREAGGRLSDARAAELRGLARDSVGTASAPLAFQLRQLLAQIEFTRGQMAELDAELARMVAGSPVLTIPGVGTVLGAGILGEVGDVSRFASAKKLLAFAGCDPSVFESGEFVGSRAHMSKRGSPYLRWYLWLAAERARVHDPALGAYYAKKRAEGKCHKVAVSAVVRKLVSIIYAVLRDGTAYVCPAA

SEQ ID NO: 270643 - protein, 417 aa, unidentified
MQYAPPTLTAEPANGLTGGIDWARDDHAIAIIDNRGVPVHRSTVEHSSAGLHELVAVLARTGVSEVAIERPDGPVVDALLTAGITVVVISPNQLKNLRSRYGSAGNKDDRFDAFVLADTLRTDRARLRPLVPNSPATVALRALCRARKDLVIHRVAVANQLREHLKLVFPGALGLFDELDSAISLKFLTRFDSQDRADWLTPIRLGTWLKSVRYTGRTDPATLHARLTVAPRGATGAAGAAQVCITRALVATLTSLVEQIKILSVQIAEQLADHADAHIFTSLPRSGTVRAARLLAEIGDCRARFPTPEALICLAGVAPSTRQSGKIRTVGFRWSCDKQLRDAVCDFANDSRQANPWAADLYNRARARKHDHPHATRILARAWLYVIWHCWQTNTAYDPAHHRALQALLKQHQQPAA

SEQ ID NO: 270644 - protein, 429 aa, unidentified
MTRSKDTTVVTVLHPVCCGLDVHKEFITACLMTTNSSDEETLLLETFGTFTDDLIRLREWLLGHECPVVALESTGVYWRPVHNILEGYLNVVLVNARHIKNLPGRKTDMSDCQWIATLLRVGFLKGSFIPPKIVRQWRDLTRYRRSLVEGLGDVKRQVHKLLESSNIKIDSVVSVLFGKTGRNLLELLAQKPGKLTMEAVQTCLRGTLKKKATELFRSVQGFFEDHHRWLLRDMLHRVDLYERDVKKVESRLKDLMEPHAELVHRLCQIPGIAPTSAYAILSETGTTLESFPNAAALCSWAGVSPANNESAGKRRSTRSPVRRNHLRTHLVEAAWGAIKKKGTYLRSKYFSLRSRLGPKKAIMAIAHKILKALYNIIKHGESFRDLGEDYLIELRSRSVISYIQRQAKKLGMVVLPEGIWKMMLHPSPA

SEQ ID NO: 270645 - protein, 364 aa, unidentified
MSDTYYIGFDVHKKRVSYCAKTVSGEIVQEGELMARREVLRAWAAAQSQPWRGAMEAALFSAWIYDTLKPYAQQLDMGHPARMKAITAGKKKSDRLDARTIADLLRCNLLPTCYVLSPPMRDLRRLLRYRHLVVTQSVRMQNKIAGLLMESGAPFVKARLRGKKYFNELLQALEEVPESVKDLLKMSRGAMELFEATQKQLVKRLLNEPALQARVERLANIPGVGPITALTWALEIVDPFRFPSIGKALSYCGLTSTFRSSAGKEQRGPLSKQRNAWLQSTLIEAAKLAPRWNPQLAEVHEQELKRGHRNRATLQVARKLVAYLMAVDKSGQPFQLRPTPTVETAPPMKKKAKTRPRKEVPQLT

SEQ ID NO: 270646 - protein, 346 aa, unidentified
MANLESRPEAGQAVYIGLDIARTKWVFNVRWGGREQRRFSTPPALSHIEALLTEYRHATVHLAYEACGFGYEIAWLLQARGVAVTVVPPSTLARVPGATVKTDRLDARTLAFELEHGRLKRVHVPTREDQVRRQLSRTYEQAGKDKKRAQARIRSLMQDHGRLGPLPSQKWGAYERWLRAQTLPGPVQQCVDELLDLRLAAFTSARRLKRALATVAREPNYAPVVRALSAQGGVGPFTAIRLRLELGDITHFRTADSFPNYLGLTPSEHSSGDRVQRGPILRRGPRHLRGWFVQCAWASLRTDADLRACFDRLNPRAGKKRAIIAVARRLALRVRARWLAQLKEAV

SEQ ID NO: 270647 - protein, 348 aa, unidentified
MAHFVGLDVSVKETSVCVVDDTGKVILEQKVPTEPADIITLLSSLGVSYGRIGIEAGPLSQWLVNALTVAELPVICVETRHMKALLTAQQLNKTDRNDARGIAQMMRVGLFKPVHVKTLVAQEQRMLLTSRKLLQRKLLDLESDLRGTLRNFGLKVGVVSGGRYEGRVRELIAGFPRLAAIAEPLLKVRQVMRQQLAVLHKMLLDTVRDDPVCRRLMTAPGVGAVVALTYRATVDQPQRFVHSRAVGAHVGLTPKRYQSGEIDYDGGVSKCGDALLRTMLYEAAQVLLTHGSKWSWLKAWGVRVVQRRGMRRAIVAVARRLAVVLHRMWVDGSEFRWSKDSAAVPTAA

SEQ ID NO: 270648 - protein, 317 aa, unidentified
MDTSILGIDVSARKLDLCWSNTESSEAATIAYTREALTEYLAHSNKHITPTSCVVGLESTGDYHISAARFFLKRGFTVRLINPIVTKYYTRLTIRGAKTDQKDAALICKLVKDGQGAVISWTDVADRDKELLRLARHLTKASAQLKVRLQSTKRKELTQMTKIELSVERLVKRISKVSDMCVAAATTDRSVEEELIDTIPGFGVQLSATVYHELGDIERFKNAKSLVAYAGLDPRIKQGGSKLNTTGRLTKRGSPMLRHALYVAANVARRFDPELNSYYTKKREEGRRHAEVLCIIARKLLYRVNAVLRERRPYVAA

SEQ ID NO: 270649 - protein, 411 aa, unidentified
MSAAVITAVGIDVSKYKSTVAARRPGGEVALLPFDISHDVTGIKKLLERLHSLSNEGSEIRVVMEHTGMYWRPVALALQQAGFFVSVVNAILIHDFSDNSLRKVKTDKADALKIANYGLTFWMNLREYSAEDETRQMLKIQNRIYERTTTTGTMLRNGLISLLDQTFPGANKLFLNEGRNSKGHVKWVDFVIRFWHKECVAALSLHTFADTFQKWCKRIGYRFSTSDAKRIHTAAKNAVATLPKNDSTKLLITQAAISLNTIYDSLHALRTEMNRLASLLPEYGMVMAMEGVGKITGPQLMAEVGDVRRFSHKGALVAYASVDAPPYQSGTFDAKKRHVSKRGSPHLRKVLFEIASMILVRGNPDNPVFCFMDKKRTEGKHFYVYAVAGAAKFLRIYYAKVKEYLNSQEVA

SEQ ID NO: 270650 - protein, 348 aa, unidentified
MAMTIVESTRPITGGVDTHADVHVAAAVDANGGVLGVESFATTPAGYAQLHGWLTDFGDVARVGVEGTGAYGAGLARHLRGRGLLVVEVDRPNRQERRRNGKSDELDAIEAARAALSGRASGIAKSADGDVEAIRALLVVRRSGRNVRIKYLNQIRHLVFTAPDELRERLRDVHRDRLARTAAALRPTAGSDTVVYATKLAIATLGRRVLALEADAERLDHELETLVRRTAPSLLDVYGVGINTAAILLVAAGDNPQRLKSEAAFAHLCGVAPLLASSGKIDRHRLNPGGNRQANHALWRIVFTRMSGDERTRKYVARRVAEGKTIREIMRVLKRYVARELYPHLVRD

SEQ ID NO: 270651 - protein, 343 aa, unidentified
MYFIGLDVHKKTISYCVKDAAGRVYQEGKIGSTRWELDEWIRTMPQPRTIAMEATIFTGWIYDHLLPHAEKVKVAHPLMLRAIAAAKKKNDRIDAGKIADCLRCDFLPECHMASTEIRERRRTLRYRSLVIRQMVQMKNRVSGLLMETGVSYNKQRLHKVGYFAELMTANEDVHESIRPLLKLSREMIRRSQKLDYALVSSLERDPLLKERLRRLRTVPGVGPITALTWALEIGDFTRFSSIKQAISYCGLCGDEKSSADKVMRMPISKQRNKHIQRVLIEAAKLAPRQSPELALVRARELERGNPNRATLAVARKMVSYMLAVERRNQDFVPAEEFSRTAAA

SEQ ID NO: 270652 - protein, 444 aa, unidentified
MRRNIAGIDLGSTAHWVCAPTVDDSGREITDFGATTPELIRMVEWLKERKVESVALESTGVYWIAPHEVLEAHGFEVLLVDTRQLAQVPGRDKKTDPTDCEWIQRLHSCGLLRGSFRPAEQICMLRTLVRDKANLVSESGDWVRRMQKSLDQMNVRVHRAVSSIEGITGMAILRAIAGGERDAQKLAQLRDPHCRKSEEEIAEQLSGHWRADHLFSLQQALKMYDAIQERIAAYEREILRKLGELASAKHQGQSASPPKNANKAKLIKNRGQEPLRQALYRMSGVDATQIDAIGVETMEVVISEYGPDLSRFPTEKQFVSHATLAPHVPKSGNKPVKKKKRYSASARVAAALRMAALSLRHSPTALGAYYRRTAQRAGGDIAVFATARKLATLIYRLLRWGQPYVDEGAEAYEQRHQQQRIRSLTAKAKELGYRLTPVTAQVTA

SEQ ID NO: 270653 - protein, 344 aa, unidentified
MLYVGLDLSRKRLDFDARLAGGELVERGAVPPDQDGLFGLTRRLGDTGVLAVIESMNGARFVHDRLEVAGWDVRIADAVKVKGLAPLACKTDRIDAWVLAELARLDPVPEISLPGPAVRAERERARFRLHLVRHRTALKNRIHSILIAHGVPSPSSDPFGLAGRRLLERLALPEPWRSTTAASLALIDSLDEQIGACERELCALGADHSYVPLLLTCPGIGWILASTIASEIGDISRFATPTKLVGYSGLTPQVHQSGEQDRRGPLRKNGPDHLRWALVEAAHTASRHPLYQPILERNRARHGRKRGSKIAALTIARKLTEAIWHMLTTNQPFTPAGATRPLAA

SEQ ID NO: 270654 - protein, 367 aa, unidentified
MKKVSIRAAAQSRNISQQKLTIGLDLGDRNSWYCVVDETGQIQLEQRVRTSAKALQEVFGAMPRSRIALEIGTHSPWISRLLSELGHEVIVANARKVRLIGESRKKDDRLDAQTLARLARIDPELLYPVKHRSAQAQADLMMIRARAGLVRARTGLVNTARGLAKSYGERLRGCNVRNMNPEKAESLSPELQAALEPLLNAIESLSERIVEYNEGIEKLAQQSYPQVALLKQIKGVGTLIALTFLLTLEDPHRFRKSRDVGGYLGLQPGRRNSGQSEPQLHISKEGDPYLRTLLVQGAQHILGPFGVDCDLRRWGLKLAERGGRNGKKRAIVATARKLAVLLHHLWVSGEVYEPLHNGSRVNVAAAA

SEQ ID NO: 270655 - protein, 364 aa, unidentified
MPTVVGVDAHKASHTLVAVDAVGVKLGEKTVPSTTAGHGRALSFVHARFGTDVLWGVEDCRPLTARLERDLLAAGQRVIRVPPHLMSRARASSRTPGKSDPIDALAVARAVLREPDLPVAFHDQASLELKMLVDRREDLVGQRVATINRLLWRVHELDPAQLKPINWQRKKTRHTMGSWLSAQTGLLAELARDELADINRLSDTIDALSARIADRVRAVAPTLLALPGCAELTAAKIVSETACVERFKSEAAFARHIGLAPVPHWSGPVNVALKPTRRGNRQLATAIHRIAVVQIRMNCSGRQYFQRRLAEGDTRPRALRALKRRLSRVVFQSLRADRGLRAQAWPIVGDDAAASLRPGWHPRI

SEQ ID NO: 270656 - protein, 378 aa, unidentified
MNRIIKIGMDVHTSNYTLCIFEPSFEHDGTVHCITQVKPEVKNIIHVIETFKKKHENEELNIVCGYEAGCLGYSLYHELKEKGIECVILAPTTMKTEKGGRKLKNDYRDAKMIAECLAYGGYSAVHVPTELDNSVKEFIRMRDDIKENLKSIKQQIIAFLTRNGKQFEGKSFWTRKHIDWINTVSFSEPLLQDTLKEYMIEYNHLCNRIETLDRQIEEISLKEEYVEKVQQLQCLIGIKTHTALSLIVETSDFNRFKKGNMYSAYLGLIPGDDSSGGHENKLGITKAGNSHLRRLLVEAAQGYTRGRVGFKSKDLKSRQEKCSSEVVAYADRANERLRRKYYRMTLRGKKFNVAKTAVARELACFVWGIMTDHIDLCN

SEQ ID NO: 270657 - protein, 322 aa, unidentified
MSSPTPVNIGIDVSKETLDIALHETAVHWTSKHEFSEFPQLLKSLKALHPTRIIIEASGGLENLLASYLATNTLPVIVVNPRQVRDFARATGQLAKTDRIDAFVLASFGATLKPAVRPLKSAETHELEALVARRAQLVSMLTAERVRLQQAQQQRRQAVVVDLKAHISWLETRLGKCESDLSRLLRSSPIWGATDKQLQSVPGIGPITALVLIAELPELGQLPDKQIVALCGLAPHARDSGKWHGKRTTRGGRARVRTALYMAALVATKHNVAIKTFYRRLLRAGKVKKVALIACMRKLLVILNAMFRNQTSWHPPALVSGA

SEQ ID NO: 270658 - protein, 339 aa, unidentified
MRLYSAFDLHSNNAYLGIIDEDGKRVFRRKLQNDEGLMVKMLNPFKKDIEGIVVESTFNWYWAVDLLMEEGYKVHLANPSKIQKYSGLKYVDDEDDAFWLAEMLRLGILPEGYIYPKADRPIRDLLRKRGHLVKLRTSLIVSLQNIISRSLGGKMKTSDIKVLAEDRVTPLLAYNEDLALAGKVSKETIDALTRQIKAIEGAVEKKIDLSKPYHHLLSMPGVGRILALTIMLETGPIGRFQEVGNYASYCRKVPSSWRSNDKKKGKGNKKNGNKYLAWAYSEASELARRFDDHARTYFDRKRKRTNTPIAHSALAHKLARAAYYIMRDGVPFMPEKTFG

SEQ ID NO: 270659 - protein, 406 aa, unidentified
MQVYLGIDCSQHSYEASFVNQAGAVLARLAIPSSPEGFLHLDAARDKLGIPPSDCLVALESAHNLLVDFLWDHGYSQVYVIAPHVIKSCRDRYRHSGARTDPSDAYVLADVLRTDRHRFYPWYPDQPSTRQIRAMNSLIGHLGRTIVRHSNRLRAVLARYYPGLLQAFRDIHGPVALHFIQAYPTPQATAQLTWEQFQLFARQHRYTHRARVSRCFSRLQTPQPEAAPPIVEAYQQEAVLLAGLLLSLVEKRRALIRQMDLLFERHPDHTIFASLPGAGPQLAPALLAKFGDDRSRFPTPATLQALAGSCPVTDSSGKRRTVKFRRACDREFRHIAQQWARCSLQRSLWAQAYWSQVRPRCSSDSHALRCLANRWLAVAWSLWQKHQPYDEAYHLHQRALNTRLPT

SEQ ID NO: 270660 - protein, 355 aa, unidentified
MSQEKYIGMDVHAATISAAVKNAEGKLLMECVLETKAATILEFIQGLRGTLALTFEEGTLATWLHDLLKPHVSRLVVCDPRKNALLRDGNQNDRVDARNLAELLRTNQVKPVYHEEHGIRTLKELGRSYSTLTKDSTRVMNRIKSVYRSWAIPCAGTSVYSRRHRAEWLAKLVEPGVRIRAQHLYQQLDSLEPVRQAARRELLRESGKHAAVKLLRQIPAIGPIRSALLVAILQTPHRFRTKRQLWAYSGFAVQTYDSGEYRVVRGKLQRNRERITVRGLNRNHNHDLKNLLKGAAVSAIERPGPLQDFYAALVEKGMRPSMARLTLARKIAAITLTMWKKGVSFDPKQLQRQAA

SEQ ID NO: 270661 - protein, 407 aa, unidentified
MDVHRDFLIACIAATNAQGVTEYQSRRFSTYTGSLRELRDWLLANDCKDICMESTGKYWFPVHNILEESCHVVVSHPKFVKAIKGKKTDKKDAQWIADLFKHDLVRGSFIPPKDIRQLRDLCRYWVKLSSYMTGEKNRAQNCLTVSNFKLDDVFSNVFGKSASAITTQLLEHPGEQFDVAPFVDGRCKTPIAQIQEAVDGIFTYEQAEKLKIIRGHMDSLERHKAELESLILEIAQNYLPQIELLLTVPGIHDAFTAIRILAEIGADMTVFDTSKHLCSWAGLTPQNAESAGKKKTTRIGKSGAYLKPLLIQVALAASRGEKHPEIYGKKQALQKRRGKKKAIVAIARRLLTAIYHILSKNEPYNPAAYIQEDKNPMARQISQEKAFEMLARMGFIVSNPSPLSSSG

SEQ ID NO: 270662 - protein, 407 aa, unidentified
MPDYDWYVGVDWGGERHQVAILDATGARVAEHQVAHSGAGRESLVEHLARLGADPGRVAVAIEVPRGPVVDTLLMRGYHVFALNPKQLDRFRDRYSVAGAKDDRRDALVAASALRTDQLAFRQLQPDDPQVIRLRELSRTYDELLGEERRLANQLREQLWRYYPQALPHCPGADESWLWELLHEAPTPAHAQRFTRPALRALLARYRLRRITGDMLYETLQARSVTLTPGAAEAAAEHVELLLPRLRLVHEQRQQWERRMDALLDALGPPVEGRQEHRDVTILRSLPGVGRVVAATMLAEAWGLLAARDYQSLRAQSGVAPSTQQSGKQRLVLMRRSCNHRLRTAVFHWARNSVRLDPRCRAQYQRLRQRHSQARALRSVADRLLSVLVAMLCSGTTYDVTRCPNAA

SEQ ID NO: 270663 - protein, 450 aa, unidentified
MAGRKRKMAMKVPNPLDLPIINPHAAGVDVGSEKFFVSVAGQEPRVFLTVTSQMQEVCEYLKAEGVQTVAMEATGVYWINLHGALEEAGLQVKVVNGAHCRNFPGRKTDMQDCQWIAVLHAHDLLSGGFVPPSAIRRLRDYMRLRGDLVSMAAQHVQHMQKALDRLNVKIHVVISDITGWSGMRIIKAILAGERDAEKLVTLCDPQILKTKKAPMIEALRGLWRQEHLFALRLAVESYESYQQQISQCDAQIAEVLKELSEGRTLPPLSPPKELRHNAIILEGLQQQVAQIYSKDLTRLPCINESTAALLLSEIGNDMSQWPDWRHFGSWLALAPCSAQSGGKRRRVKRYLTRAGQILCRAVQCMAVGKHTWLASFYRRIRAKRGAKVAIKATAYKLAKLIFLVLTKGWEYVEQGIAKYEERIRQMRLKALQKLAKELDFVLLPKNMANS

SEQ ID NO: 270664 - protein, 352 aa, unidentified
MVALSAPFSDRISHHSITGGDADGLLKLIGQARSRAEVALGQPVRVVCCYEAGYDGFWLHRVLTAHGIDNHVLDAASLPVDRRARRVKTDRIGVDGLIRALAALVRGERHAGRAVRVPSVEDEDRGHQTRERERLITERTAHINRIKGLLMVQGVRDFMPLRPDAAERLIELHTGDGRALPPCLVAEIRRELRRLKLVEEVIGEVETERDSVAVETVADQRIALLRQIKGIGPVAATVLGREVFHRDFTNRRELAGYLGLTPSPWASGSVQRDQGISKAGNARARTTLIEIAWLWPRYQPGSRLACWFRERVGQSKGRLRRILVVALARKLAVTLWRHVSTGVIPEGVELRA

SEQ ID NO: 270665 - protein, 347 aa, unidentified
MNITRIGLDLAKNVLQVHGVDERGKALLRKRLKRGEVVAFFARLSPCLIGMEACGSAHHWARELAALGHTVRLMAPQFVKPYVKANKSDARDAEAICEAVGRPSMRFVPVKTLEQQSVLSLHRARQGFVAARTAQANQIRGLLSEFGIVIAKGIRQIESRVPEILEEAENGLCGMNRALFQRLFEHFRQLDRQVKQLEEQIHAWHREQVDSRRLAGIPGIGPLTASALTAAIGNAREFAHARQLAAWLGLVPRQASSGGKERLLGISKRGDVYLRTLLIHGARSVLRRTRACPDPAQGWLAQLVHRRNPNVAAVALANKNARIVWALLAHGREYQPGYVGAPLPTAA

SEQ ID NO: 270666 - protein, 320 aa, unidentified
MMAQNDLVVVGIDVAKDKVDACIRKLTLRQTFPNTAQGHRKLVAWLRKYQVGKAVMEASGGYEREWRNVLHNAGIEVRIVDPRRVRSFALSAGRLAKNDPIDAEMIAWFAETFSQVPGQIPDAAREELAALAKARKALVDVKIRLQAQDEHAAPEPARKAYARVLKSLAAEIDKLEAAISAKVKATPEFAERAEIIESVPGLAQATSAILIAGMPELGQVSDEVAAALIGVAPYDDDSGKRRGERYIKGGRRWVRNAIYMPCLGAATQCNPVLKAFYQRLLTKGKEPKVALVACMRKLIIILNTMLARRQKWNPGRYAMA

SEQ ID NO: 270667 - protein, 321 aa, unidentified
MNSTATSADVGGVDVSLDHLDVGIWPGGQTFGDSNDGPGRKRLAQRLAELKVRLVVMESTGRMEVPLALELDEHHVPYRIVNARQVRDFARAAGRLAKTDKIDALVLAHFGEAMRIAPKALPDAGRRALKALVMRRAQLVESKVAEENRLRGETNPDVSKSLDKSIAWLRREIATLDAKLDRTIKGNPEFAALSETVLSVPGVGPQTTRMLAAALPELGSLTRQQIAALVGIAPLNRDSGKHHGKRSCWGGRAEVRCALYMATLSGVKHNPALKAMYERLLAKGKLAKVALVACMRKLLTILNAMVRDGAPWRQTSPAATA

SEQ ID NO: 270668 - protein, 335 aa, unidentified
MDRQYVGIDLHRRRSVIVRKDANGEVLAKTHITNEPATLAAAVADAGPGAHVVLEATYGWYWAADLLQDLGLDVHLAAPSGLNWGSRRVKTDERDAVDLADMLRLGRLPEAWIAPPATRELRELVRHRIKLVSLRTGLKAQVHAVMAKNGVLPARVEMWGPGGTAQLDSLELPDAYARRLDSLRRLIANIDDEVAQAQVEIHRRLRGDRGYEAIQHLNGVGQVLAAVFVAEIGDIHRFSSPKALCSWAGITPRHHQSDTTLHRGPVTKQGSRLVRWAAVEAVARGRGGPKLVADYQRIAANRGRFKARVAVARKLLCLVYYGMRDGEIRALREAV

SEQ ID NO: 270669 - protein, 370 aa, unidentified
MEKSITIVGLDVHKDSIEIVVAETSGGQAVRHFGRIGGDMASLDKAIRKLQSQGAELRFVYEAGPCGYEIFRHLSRRGFHCAVVAPSMIPKRSGRRIKTDRRDAEALARLYRAGELTAVSVPLEQDEAMRDLTRAREDAVKAQRSARQQLGAFLLRHGLRYPGRSCGSAAHLRWLSDLKMAHPAQQVTLQEYICALMQCTERVQRLSKQIQQLLAQWERAPVVYALQALRGVAPIVAVTTVAEIGDLGRFANPRQLMAYLGLVPSEHSSGEATRRGGITKSGNGHVRRALVEAAHAYGYPARVSRPLLKRQEGLAEPIRQIGWSAQVRLCGRFRRLLARGKSRNTVVAAIARELSGFMWAIAKQVAVSNV

SEQ ID NO: 270670 - protein, 369 aa, unidentified
MQKYIMAACDLHDKTMVLWIARGREQAERWSFPNDPWGRRMMIEELRQRSAADGGAEIVFAYEASSQGFGLHDVLSEAGIRCHVLAPTRMARSPKERVSKNDARDAKAILGLLRGHVLAGNGLPAVWIPDRQTRDDRELVRARLDAASKLSKVKGQIQSLLKRHDLRRPGGTGRGWTDAFVMWLGVLSGESTGEASKLGPNARVALRSLLRQKEAMEEEIAALDQAVAALSKTARYAEAMKALLALKGVGTLTGMVFLTELGDPGRFSNRRQLACYLGLTPTSAESGRANDRKGHITRQGPSRVRRVLCQAMWAAIDSDPVLTEKYRRVVRKNPKHKKIAVVAGMRWLSIVMWHRALEAMGPPPSSMAA

SEQ ID NO: 270671 - protein, 420 aa, unidentified
MKSFVPVAGVDVSKRFSDLCVLSPDNNVLLRQKIYHDMVSMKLAEKKLHEIELECGARPVVVMESTSHYHLILFQFFTDAGFEVVVVNPIQSGALKNINVRKVKNDRVDAYRIAMLYRLKVLRPSQIPTSSLRGLRLLTRQRSELKGDVARFKNRLTAYLDQIFPGYGEVFSDVGGSASRAVLHMCPTPEKLLNADGSLLAKAICEAGNKGPKFGAEKAAKLREAAGSAQVIGVRSASNASLIKNVLDIIEGLLAAIQRIEGEIKELVTQDTRLDEDVKLLCSIPGIGFSSAVVIAAEMGNISLFRKPKQLAAYFGLDPGERQSGTFKGRKNKLSKRGSPQVRAALHMAAVSSVSRNRDGTYRNPVLAEYYERKCAEKPCKVARVAVMRKLSNIIYAVLRDRRPFELRTPQEHMALLAAA

SEQ ID NO: 270672 - protein, 481 aa, unidentified
MESRPAEKAKKTTEAKHVHWNDMNRKQRREMTRKIQSADLSLEVVHPNAAGIDIGNEAHYVAVPPDRDSQPVRRFGCTTTELKAMADWLKQCGICTVAMQSTGVYWIAVFDILEAAGLEVYLVNARDTKNLPGRKSDVQESQWLMKLHTYGLLRNSFRSSQEIRTMRTYWRQRNDLVQAAGSHIQRMQKVLTQMNVQLANVLSDISGVTGQAIIKAILAGERDPHQLAELRDPHVKADKEQIARYLEGNWQEDLLFVLKQEHEAYKFCQQQMVACDQQLEQYLRQREDRSQGAPLPEEKRKGRLKKKKGNKPQFDLRADLFRMTGTDLTTIDGIDVMTATTILSEAGWDMSKWETEDHFVSWLRLCPDNRISGEKIIGKRRLPTNNRITIALKMATTALRTSNTYLGAQFRRLRTRLGAPIAIKAMAAKLARLVYRILRYGMKYVDRGVEFYEAQHRGRQIKNLKSTAAKLGFSLVQAAAA

SEQ ID NO: 270673 - protein, 344 aa, unidentified
MSGVTIGLDLAKTVFQVHGVDAGGITILRRKLVRADMIAFFTKQPPCLVGMEACSSAHHWARLLTKAGHTVRLIPPQYVKPYVKRNKTDAADAEAICEAVAKPNMRFVPIKTEEQQAVLALHRARSLFVRQRTATINALRGLLGEYGIIAGKGVRQLALLSERLATAGETVVPNEAREALRSLFNHIDALSEQLKAVEVRIVAWHKANPDSQRLASAPGVGPITASAIVAAVGDGKQFKSSRHFAAWLGLTPRIKASGGKEKIGRISKGGDRYLRTLLIHGARAVVGTTFRKDVAPRPWLSAIVARRPTNVAATAVAHKTARSLWAMLTRSEVYRRHTVQPLAA

SEQ ID NO: 270674 - protein, 357 aa, unidentified
MSNKATKLDFRGQVFHIGIDVHKRNWRVTVLNNGLELKTFSMNPSPDDLRSYLQSNYPGGEYYTAYEAGFCGYWIHRKLESLGMKNLVVNPADIPVNFKETVRKTDTIDSRRLARALYSNLVHGNYIPSLEQQGFRSLCRLRKQLVKDQARVKNRIKSFLDFSGIKVLSQNEISHWSGLFLNYLSNLDLGNEHSNETLSRMLGQLMSLRNQIADLVKRLKTIVRQDEAILRVMNNLMTIPGVGFSCAIVLYSELMDINRFSSVDKLCSYVGLVPDLRSSGGSEYTLGISKLQLQFLRAMLIECSWIAIRKDPALTAAFNTLGMRMKKQEAIIRIGKKLLTRIMYVWRNNEPYICSIV

SEQ ID NO: 270675 - protein, 451 aa, unidentified
MKSYQSYQTKRSNVADKTIIGIDPGKSRHQAVIIDATGIPIGRTFSFSVNHKGYHEKLWNEIKKQIPDYSSSNLLFAVEASCNLWQTISDYLRLEGYEVVLISPMCTKQSRVMLNNDFSKTDPKDALLIALNTQRGYYIEMRNYSKISNNMHILSIAYNKLRKDHSRYRGRLRAAIELIFPEFLEVITLGTQTSFYLLGKYIFPEEYLNMNIELESLQIGTISRSKYGIKHLNKLQELAKYTIGISSHNELYDRTIVLTWLEGMKEIGSRMKVILDQLIKLASSMKELSILTNLMGISNETASLFLAEIRDISAFDNYKEIEKFAGYNLRLTQSGKHIGSRRISHLGNTRLRWVLYRMTEETMKYIPEVRIKYLKRQLKKQIYRKNLVSCVPQLLKLIFSLLKENRYYEYYEERVAEMEKLNIQYQVVKAERAAKHRKHKPIIKEKLRKTA

SEQ ID NO: 270676 - protein, 317 aa, unidentified
MDVAFKSFVGIDIAKRTLDVHVLPERTSLKPPNDSKGRGQLREKLPPPGECLIVVEATGGYERALVAELIDAGHQVAVVNPRQVRDFAKACGILAKTDRIDAAVLARFGQAVVPRTQTKIPEKQLELQDLVVRRRQLVELRTAEMNRKENVASKFVKKSLQESVDALTKQIRRFEKRIAALVQSDDEWKQKAEIVQSAPGIGPGTSATLIAEVPELGKLSRRKISALVGLAPFNRDSGEFRGRRAIRGGRSAVRCTLYMATLSARRSNPVIRAFSDRLKALGKKPKVIITACMRKLLVILNTMVKNNTHWNPAISTT

SEQ ID NO: 270677 - protein, 395 aa, unidentified
MKTVCGLDIHKSMILMCIIKENGEKIIREFTTLTVDIESIRDVMHEHGVQEVGMESTGVYWIPVWRILQGQFDLKLINPWFIKQLPGRKTDIKDSEWIATVIQKNLVRGSYVPGRHIQELRQYERRYVRLCEQSTRIEQEIDRQLHRCNIQITNYATKIGSASVVKVVKAIIAGETTAGMLEKHVHGRIKNKYKEEISASLTGVISSTDRFILSQNILEYELILAQQEECLKEMSVYCEKYYMKELQLLCTIPGIQKLSAMIIIAELGVDLKTFITAAALTGWAGLRPRNDESAGKIKSKKITKGNKYLRRILVQCAWAASRQRNGWLKTKFEQLCVRKSNKKALIAISRKLLVIIWNVLSKQEPYKEFIPKIDPRQKQKKIDYHRKKIQELETV

SEQ ID NO: 270678 - protein, 381 aa, unidentified
MKNSNMKRTGQTVTPSVVADRSKAKVVPSLLPKSSNSCLGYPSPHVAQGRASLEQTKIIKEDWSLEAPLIFVGIDVCKAQLDVAIRPTAHNLSVTNDKAGIQTLVKHLNRLQPSLVVLESTGGLERQIMLALISAEIPAVMANPRQVRDFAKATGQLAKTDKIDAAVLAHYAEAIRPKPRPLPDQLTLKLRALTTRRRQIIDMIVAEKNHLATAPQVIKKRISAHIAYLEQDLDGADQDLDRFIQNNPLCKENQEILCSTPSIGPVSSRTLLAELPELGTLGRKQISALVGLAPFPRDSGTLKGRRTIWGGRASVRGVLYMATLVATRCNSIIRDFYKRLKAKGKPFKVALVACMRKLLTILNAMIKHKTRWSENFSHQAT

SEQ ID NO: 270679 - protein, 338 aa, unidentified
MNYVGIDHHRQYSHMTLMDQEGQVLRSGRIPNIQAEIEKFLEGFEAVEAVIETGRSSYTMVDVLDEMGVAVKIAHPNEVKAIARAKIKTDKRDSEVLTHLLRMNMIPEVYRRSVENRQAQRVLRQRAFYVSAMTALKNRVYAFLAQQKEEVREDVARETNIFSAKGQKALLELDLARGEKRLLEALLKTYRHLETRIEESTALVGKLYEESREAQLIRTIPGFGKYLSVLVAVEIADLARFADAAHLHAYAGVIPSTHSSGDRTHHGKIIRAGNRWLRWAAVEAVWPAIRADFNLRCFYERLARGKGANKAKVATARRLLTIIYKVLKEGRNYIAYPR

SEQ ID NO: 270680 - protein, 346 aa, unidentified
MKINRVGVDLAKNVFQLHGVDRKGKALWKRRLTRGKWLAVLCDTVEPGTEIGMEACAGAHHWARQLMQRGYPVKVIPPQFVKPFVKSNKNDANDAAAICEAMGRPDMYPVKVKTVEQQDLQAMHRIRDEIKSHRIAKANQIRGLVTEYGLVAPQQLSALRSAIPDWLEEADNGLTFLFRQLLQGLWGDLYALDQRMTELDKQIAVVAQEDPTAKRLQQLRGVGPLIATALVATIGDGKQYRKGRDMAAALGLTPRQHSSGGKDRLLGISKRGDAYLRCLLVHGARSAVRTAKDKDDRLSHWIINLQARRHANVVAVAMANKMARMAWVIMTKDVDYDPDLAAASVN

SEQ ID NO: 270681 - protein, 348 aa, unidentified
MKQVMTIGLDIAKSVFLVHGVDAAGQPVLRQKLSRSRVLEFFAKLPRCLVGIEACASSHYWARELIAIGHEVKLMPAQYVKPYVKRGKNDAADAEAICEAVTRPTMRFVGVKTVEQQSIMMLHRVRLILMRQRTQLSNALRSHLAEFGIVSPIGREGLNRLLTIVADTDDGRVPAEARASLAMLAAQLEGVKAKILENDRRIIASARATEVGRRLLEVPGIGPVLASAFVASVADPAIFKSGRDLAAWIGLVPRQNSSGGKERLGGITKAGNGYLRQMLMVGATAVIRYAQRNSARRPWLVQLMCRRPTKVAAIALANKTARTVWALMISGERYRDPQAMQAAVSATL

SEQ ID NO: 270682 - protein, 348 aa, unidentified
MDYYAGLDVSLEATSVCVVNGEGKVVREGKLPSDPDAIELFLAEWGIHLKRVGLEAFSFSAWLYAALDEKGLPIVCIETRHTKAALNAMLNKTDRNDARGIAQLMRTGWFRPVHVKSREAQALRMLLAGRKALLGKVLDMENMIRGLIRPFGLKVGQVSTGKFDGRVRDLVAGLAELEQIVEPLLAARAAMRLQFARMHRLALAAARNDKAVRRMMTVPGVGAIVALTFRATVDDPGRFRKSTTVGAHFGLTPRRYQSGETDWSGRISKCGDDMTRAMLYEAAIAILTRIPKNFKLRLWGLKLLKKKGLKKAATAVARALAVLLHKIWVDGSTFRYGVGLKGGRIARA

SEQ ID NO: 270683 - protein, 316 aa, unidentified
METTQPFVGIDVSSQRLDVDMLPAGHRSSEPNTEDGIASLVLCLKPLNPKIVLLEATGGYEIPVAYALYEAGLPVVIMNPKALRHFAKAIGKLAKTDKLDAQVLALYAQRVQPPVRPLKDQEQLELANLMTRRRQLQGMIVMEGNRRRTCTPKVRGNIDQSLASLRQLLKDLDQEIHDSIRRTPLWHENSEILQSFIGIGPKVSASLIAVIPELGTLPGTKVSALAGLAPMNRDSGQFRGKRKIQGGRPAVRQALYMAALVAAHHNPVIMEFYQRLRLAGKPAKVALTACMRKILVILNAMLKNRTYWNPQLLLAA

SEQ ID NO: 270684 - protein, 463 aa, unidentified
MKDKKPTGKRSRRSRPLLERVNLNAAGIDCGSAMHYVAVPPDRDPEPVRCFKTFTDDLHRLADWLVACRITSVAMEATGVYWIPIYEILEARGLEVLLVNARHVKNVPGRKSDVTDCEWLRELHSVGLLRGSFRPTAEIAALRSYLRHRETLIQSAATTINRMQKALVQMNLQLHVVISDIAGATGLRILRDIVDGKTDPRHLATHRDARCQASEAEIAAALTGHYRAEHLFVLRQNLELYDAFQRQIESCDTQIEVHLKALATSATQPAAPLTASRSRRRPRSNEPRFDVRASLHQLSGVDLSQIDGIGPYNALRLISEIGTDMSRWRTEHHFTSWLTLAPDNKVSGGRLLSSRTRPSANRAAAVLRMAAMSLGRTQTALGAFYRRLAYRVGKAKAITATARKLAILVYRCLKGELVYQDPGAAEYDRKHRDAVLRRLRQRAAVLGFHLVNGQTGEILEGVS

SEQ ID NO: 270685 - protein, 314 aa, unidentified
MNTQNQSEISIGVDVGKANLDIAIYPLDRYFRIPNTREAIQKFLPLLKELDVKRIVVEATGRHEHPFVFACDQAKLPICIVNPIKVRRFAQALGIHAKTDKIDANLLAKFAATMKPESKAIPDKQSRLIKDLLVRRAQLVEMSTMEKNRLQIMPKELHSSIKSMLKILDKQLECLSEKIEQLISENQEWRMKTEILTSVPGVGKILAYTLLCELPELGSLNSREIAALVGLAPFNKESGRMNGKRSIRGGRPRIRTIMFMAMMSSIQCNPVFKQKYEHLKAAGKLPKVALIACMRKLIVILNTMVKNQQQWQLN

SEQ ID NO: 270686 - protein, 356 aa, unidentified
MALSGDSADSVTVGIDLGDKYSHFCELDARGEILEEGRLATSPTAFRRRFSSRVRARVAIEAGSQSAWVARLLKDCGHEVLVANPRKVRLIYENDRKTDRIDAHQLARVARADPQLLYPIEHRPLSAQRDLAMLRARQTLVRARTQLVNHVRATTKAFGARLPKCSTSSFTKRCRAALPQELIVALTGLLDVVETLNGTIQSCDTRVEQLISEAYPETARLSQVPGVGPITALTYRLTIDDPDRFGRSRAIGSYLGLRPRQRASGAQDRQLRITKAGDTDLRRLLVGCAHYTLGPFGPDTDLRRWGLALATRGGKNTKKRAIVAVARKLAILLHRLWVTGDVYQPLRKPLAPETAA

SEQ ID NO: 270687 - protein, 335 aa, unidentified
MEITTIGLDLAKHVFQVHGVAADGSVVLKKRLRRNHVQAFFAGLKPCLVGMEACATAHFWARQLRQLGHDVRLMPAQYVKAYLRRGKNDAADAAAICEAVTRPSMRFVPIKGEDQQAALMLHRARDLLVRQRTQLINAIRGHLAEFGVIEAQGPWNIPRLLAGMDEADLPDLVPGIVRLLASQLEEVELRIDEVDTQIAAWHKASAVSQRLAGVPGIGPLVATAIAATVPDPTVFRSGREFAAWLGLAPRQNSTGGKTRLGRTSRQGNAYIRRLLVIGAQSALFCSKATKANPWIQALLAKRPRLVVAVALANKMARIAWALMARQTTYQAASAA

SEQ ID NO: 270688 - protein, 466 aa, unidentified
MPKTPTSSLMPHTKSPKTAKLKPPQDCTLGLSVVHPKAAGIDVGNEEHWVAVPPSLDPNPVRRFGCFTGDLLALAAWLLQCGIQTVAMQSTGVYWIPLFDILSQHGIGVFVVNARDTKNLPGRKTDIQECQWLLKLHVYGLLKPSFRPAEEILVMRTYWRQRQQHIADAARCIQHIQKVLTQMNIQLANAITDLSGTTGLAVLEAILAGERNPRKLAQRRDPRIKASPEVIAKSLEGNWRPELLFVLRQELDSYYAFQKKIAECDQQLQRHYQTMEQKGDPQQLPKVARDQRAHGNAPGHFDLREQLYRSTGVDLTAMDGINVLTAQTVIAEVGYDMSRFPTEADFVSFLGLTPNYQISGGKVVGRDKRKKKNRAGLALRFAAGTLLRSDTYLGAQYRRLRTRLGTPKAKKAMANRLARIIYRMLKFGEAYVDKGREFYEEKYRSQQIRFLSKRAGELGLQLVQPC

SEQ ID NO: 270689 - protein, 347 aa, unidentified
MLHAGLDLSRKKLDVCLLFGRGEHLDQLAVAPDVDSLRTLARRVEEVHRQPVCAVIESMTGARIVPDTLEQQGWSVEIADAQKVKGLAPLACKTDKIDSQVLAVLSHRDLVPAIWLPDPSVREERELARFRLHLVKHKSALKCRIHSTLINFGKPCPFTDLFGVEGRRLLKRLQVPEPWRGNITASIELIDDLERQIAEINRRLKEGHAEHPYVPLLLTVPGIGWVLAFTIAAEIGEIERFPSPEKLAGYTGLCPRVNQSGEKDRRGPLTKHGPTYLRWALLEATMHALRHPAYSERYERTKRRLGKQRGAKVAQVDLARRLAHAIWHMLSRKEKFAPRGAAFRLAA

SEQ ID NO: 270690 - protein, 343 aa, unidentified
MTVVILGVDLGKNSCSVVGVDAVGAVIVRRSMRRQTLIDYVSKLPACVVAMEACCGAHYLGRLFAAHGHEIKLMPPEYVRPYVKAQKNDDRDAEGIAEAASRPTMRFVELKTAEQLDIQTLHRVRSRLVAERTNLINQLRAILLERGVIFPLGRRKFELGLDAMLADGDGAISQRMSQLVSDLRGEWLELDTKIQALNGEFVELAHHDAAARRLTSIPGVGVLNATALIAAVGNASGFARGRDLGAWLGLVPRQQTTGGKPRLLGISKRGNTYLRTLLIHGARAALPPLSKSDTPLGRWLKAMIERGVHRNAVVVALANKLARIAWAVLRKETTFERGYAVAV

SEQ ID NO: 270691 - protein, 388 aa, unidentified
MLHDHPSAGLTAIHTQFAAIFVSLELSRSSWVVTSLSPGNGEKMSQHSLAAGDISGLLARFADIKRKAKQHTGSDYPIITIQEAGLDGFWVHRVLRREGIESHVVDAASIATSRRRRRAKTDKIDGEALLRALLAFKRGEPRVCAMVVAPSPEEEDRRRLCRERQALIAERIIHVNRIKGLLFAQGVSDYAPLRRDRRKRLEDLRTGDERPLPVHLKTQIGRELDRLELLLGQINTVEAEQQALLATESTTPQGAPPHAVAMLLAVKGIGEASAAILWSEGLCRPFANRRQVAAYAGLAATPWRSGAVIHEQGLSKAGNPRLRTTMVQLAWLWLRHQKQSALANWFHARGERGRKGSIVALARKLLVALWKYVTHGVIIEGAEMKPAT

SEQ ID NO: 270692 - protein, 358 aa, unidentified
MASIASTSRVVIGGIDTHKDLHVAAVIDTAGVLLGTEAFSTTRAGYRALVRWLRGFGDVRLVGIEGTGSYGAGITRHLGEAGIQVLEVDRPDRSDRRRRGKNDTLDAENAARAALAGRRTSIPKTKDGTVEALRVLRLTRTTAVKSRRVALQLLGNHIVAAPEELRDQVRNLTRMQLIRTCAAWRPDTSGFRDPVVATRIALKSLARRTLELNDEIADLDQLITTLVGELAPQLVAATGIGVETAGQLLVTAGDNPQRLRSEPAFAMLCAAAPLPASSGKTQRHRLNRGGDRQANSALHLIVITRMRVDQRTKDYVTRRIAQGHSKPEIIRCLKRYVAREIYYLLKPPTQANMKSRAA

SEQ ID NO: 270693 - protein, 347 aa, unidentified
MNYIGVDCHISSLDFAVVNERGTTTKRQKVNTGVKELIGFVKSVPKPRKVIIEEGSLANWLLETCTGYGEKLIVTDPKKNRWIGRSGKKNDAVDAEKLAQLARGGYIKEIHHPLGGRRRFRELVLSYHDTVKSQTRIKNKLKAKFRENGIRCMGETVYSAQYRKEWKQRLPKDKVVHIIVEGLWRQLDQLEEVREEILGQIRKQGRGYSEIKRFKKIPGIGAVHAATVSAIVEDPHRFANKKKLWMYAGLGLAERESGGKVYSRKLTRNYNRHLKNALKQATEAAIIAKDNQFRRQYLRLTLEKGIASHRAKLSVARSILATLYGIWKSGEAYDPDIDKRRLEAKET

SEQ ID NO: 270694 - protein, 411 aa, unidentified
MEPKLIVAGIDVHKRMLAVVVVDEDNPKQALVKRTFGSNAGELKHLAAWLIAHGVTQVVMESTAQYWKPVWLALEKDFDLHLAQAQSNAGPGGRKLDYVDALRLARRFLAAELRLSFVPDAEQRSWRCLSRSKYQKRRRRVQLQNQIEALLEESQIKLSSVLTDLLGGTGYRILKALARGESDPQELIKLAANNLKASPEQLADSLSGPMQDRHRKVLTMQLEELDLIDKHIAELNQQLQEALQDHQQAVLRLCEMPGLKQDAALQIIAEIGPRAAVFETPEGLASWIGVCPGREESAGESKSNRSPKGNRAMRRLLNQIAWGAVRTKDCFFRELYNRLVYKLGVHKAIWAIAHRIAKLIWKVLHEQVTYVERGPLALDPIAMKKRVTRLSQQMRKLGYILEVKQLVVETN

SEQ ID NO: 270695 - protein, 350 aa, unidentified
MGAVSAESPAAPWATKPVPEHGASAVDFVIPNGRLGRTASPHAQGWEPRSMFVGIDVAKDRLDVHVRPAGEAFTVARDGEGIEELAKRLNAVAPTLVVLEATGGFETIVAAGLAAAGLPVAVVNPRQIRDFARATARLAKTDTLDAAVIAHFAEAVNPPPRPLADAQSRLLGELMARRRQLIEMIGAESNRRRMLTVRRTLKSVDRVLATLKAQLEQIDDDIDIAVRGTPAWREAEDLLISVPGIGPRIARTLIAELPELGRLDRRQIASLTGVAPFNRDSGTLRGRRTIAGGRPVVRGRPLHERARLDPPQAAAGPDLSSPESRRKARQGRHRRLHAQARDYPQRHPQG

SEQ ID NO: 270696 - protein, 542 aa, unidentified
MVTAMIVMLDEGRDLGFKVLLEEVVFKQDAVLQRLVPAFDFPLRLRVAGSAVNLVDLVFLQPFAEIRCDVTRTVAPTEGRVGATSNGARSFFAASAHRLRWPWPVEVALECECSQLIPERPTMTSQNSIPADAVLVAIDIAKVRNEVLIEAPGHKRRRRLSVLNTRAEHDHLIAILQSYDRPVVCAFEATGNYHRPIAWRLVEAGFETRLVSSLALARTREALHNSWDKNDPKDAQVILHMLRIHSTQVYHDPLRAGINDVQELSKTHEAIANAKTEIQHRILTHYLPLYFPEIERFRGNSRSDWFFAFLDAFPTPSSITTLTKEKFVEAAWDVVGRKVSKSQILMDIYETARTSIGLPLPLDAPAIRMFRMVVAEARSLIRQRNEIEAQADDLLRNSRDYQILRQIPGIGPINALTIIAEAGDLRRFHHHRQFLKFCGLDLSTQQSGQYRGQTRLSKFGNARLRRTLWIAGQVAIRQRENGFRHKFERYIARDRDNPDLRRKAMTAITAKMARVVHAVVKSGSDYRPFVEGRVPGGRTSVS

SEQ ID NO: 270697 - protein, 402 aa, unidentified
MEIYCGIDWSERHHDVAVVDRAGVLLGRRRITDDLAGFTDLTALLAEHTGDEFTAVDVAIETDRGLLVAALRAAGHRVYAINPKAVDRYRDRHAVSGAKSDPGDALVLAHLLRTDRDHHRPLAADTELGQAVSVLARAHQDMVWARQQDTNRLRSLLREFFPAALTAFADLTTKTALTVLAAAPTPAAAAALTRANLIALLHAAGRGTRPADAARLVEVFGQPQLHQPPAVEDAMGEAVRAIVRTVAATSESIKDLEKALNASFEQHPDAEILDSLPGLGLVLGARVLSEFGDDPNRFTHAASRRAYAGTAPITRASGRHRAVLARHIRNRRLADACYLWAFAALTKSAGARAFYDRRRAAGDHHNAALRRLGSKLIGQLHHCLHQRQPYNELLAWTQPEPA

SEQ ID NO: 270698 - protein, 310 aa, unidentified
MEQISVVGIDVSKDRLDVHVLPAGETWSVSRDGEGLGELCRRLGGTARLVALEATGGYETIVAATLSSEGVPVVVVNPAQVRHFANALGQRAKTDPIDARVIARFAEATQPEIRPLPDRATRLLADLVARRRQIVEMIVAERQRLHRTEPARVRTSIERLLKALEKELASVDHDIDGSVRRSPVWREKEDLMTSVPSVGPIIARTILAELPELGTLDHKRIAALVGLAPFTRQSGVWKGKASIGGGRRAVRTALFMGAQTAKRWNPALKAFYDRLIAAGKPKMVATIAVARKLLIILNAILRDKTPWQNA

SEQ ID NO: 270699 - protein, 381 aa, unidentified
MKKHMRWVGLDVHAETISVGVAEANGEVRPLGTIANRPEAIRHLVRKLAGPEGLRACYEAGPTGYVLYWQLTSLGVMCDVVAPTLVPVKAGDRVKTDRRDAEKLARLHRSGDLTAVWVPDAQHEALRDLVRAREAAKGDQLRARHRLQKFLLRHGRRAPAGVNAWTLKHLAWVKGHVRFEHPAQEATLMDYISEIDHVAERLERLEKAIDRAIAEVPEKLRAVIEGLQSLRGVAKLTAVTIVSELGEISRFPKARQLMGYTGLVPSEHSSGDKTRRGGITKTGNARLRRVLTEAAWAYRLRPSVGGALRRRQAGQSEAVKEIAWKAQHRLHDTYRRMLGRGKPKQKVITAVGRELVGFIWAIAVEVDQAQTTFSKRKAAIA

SEQ ID NO: 270700 - protein, 451 aa, unidentified
MQHTIEEFDTDEQEERLERVAAIDVAKATGMVCTRLPHPTTEGRRVTKVWNVASTTNAILELADALAAQGVERVVVESTSDYWRPFFYLLEARGLLVWLVNARDVKNVPGRPKTDKADAVWLAKLNERGMLRPSFVPPKQIRELRDYTRLRLDLTEERSRHKQRIEKLLEDSLIKLSSVATDIFGKSGRAMIEALVAGERDPDVLADLALGKMRPKRAALREALTGHFDAHHAELIKMLLDQIDALTDKIDTLGLRIDQLITAIPGATPPAVDDETGVRGAGADPITAPLSVVERLDEIAGIGRRTAQVIIAEVGLDMTQFPTAGHLVSWAKLSPRTIQSGTKNRGGPTGKGNPYLKGALGEAAAAAAKTDTFLGQRYRRLAKRRGKMKALVAIARSILVIVWHLLADPCARYEDLGPDYFDKRIDINRRTANLVHQLHALGHQVTLTPAA

SEQ ID NO: 270701 - protein, 347 aa, unidentified
MRFYTRQHRHYCGVDLHARSMYVCVLDRDGNVLVSKNIASAPEPFLELIAPYREDLAVAAECMFTWYWLADLCAREGIVFVLGHALYMRAIHGGKAKNDRIDAHKIAGLLRGGMLPQAYVYPQAMRATRDLMRRRNYLMRQRAELLAHITNTNHQYNLPAFGVRPARPAERSGLLEHFAEPQVRRSIAVDLSFVEHYDRELPALERYLESNAQAHNPVALAIVRTVHGMGKVLGLSILYEIQDIGRFARVQQFLSYGRLVKPTKESGGKILGHSGRKIGNAHLKWAFSEAAVCFLRANKPAQALRARLAAKHGKGKSLAILAAKLARAVYFMLKRGEPFDAERFFAH

SEQ ID NO: 270702 - protein, 453 aa, unidentified
MSEPSNESKGTSLEIVHPNAAGIDIGNAAHYVAVPPDRDPQAVRRFECFTEDLKKMADWLIQCGIDTVAMQSTGVYWLPAYEILTERGLRVFLVNAAHTKNLPGRKSDVQECQWLMKLHTYGLLSNSFRPTEEICVLRTYWRQRDAQVKAASMTIQRMQKVLTEMNVQIANVISDISGVTGMAILDAILQGERDRYKLAELAHPRIQASQEEIAKSLEGNWRSELVFVLRQERDIYREYQKKIGECDEAIQAHLKTMEDKAEPGSKPGTPKAGKRAGGNAPRFDLRGELYRISGIDLTRIDGINIMVAQTILAEVGLDMSKWPTEAHFASWLGLCPNHQITGGKVYHRGSRHVENRAATAFRMAATSLWRSKTYLGAKFKRLRAQLGAPKAITAMAHNLARLVYRMLRYGKEYVDKGMEFYQQRYQQQQIKWIEKKARDLGLVITLAPAGTVN

SEQ ID NO: 270703 - protein, 411 aa, unidentified
MRIVGLDVSRSVAEIAYLEDGTLHAGGRTGLRRDELERFAAKLRATDHVVLEATGNTTAIVNVLRAHVARVAIANPLQVRLIAEARVKTDKIDAAVLAQLYASGFLPEVWMPDEHTLALRRQIARRSQLVRQRTRLKNEIHAVLIAHLIERCPATDLFGKKGRAWLGVQPLPLDERLGVEQRLRELDRLGDDLREVEQALAQATIDDARLRVMLTITGVNTTVAIGLLSAIGDIARFPNPEKLVSYFGLNPSVYQSGPAPARHGHITKRGRSYARAMLVEAAWGATQAPGPLRAFFLRVRDRRGQQIAAVATARKLAVIVWYVLTRGEPFAWDRPALTAHKLRALELQAGMPAQHGPRKGSAAAYSLKSLRQQERAVAEQSERTYQRLFDRWKQSRPKSDSAPIRWPQART

SEQ ID NO: 270704 - protein, 316 aa, unidentified
MNETVVEKFVGIDVSKATLDVCIEPLGQTLHVAYDEAGIKQLVGRMEEIIPTLIVVEATGGLEVRIATALASKGLQVAVINPRQARDFAKATGRLAKTDQVDAAVLAAFAKAIRPQARPLKDADTRALDDMVSRRRQLIDMRVQETLRLGTAASKPLQKSLNNHIAWLDKRIAEVDNDLTKRLRGSDVWRTKDDLLRGIPGVGSVTTRTMLAKCPELGALNRREIAALTGVAPLANDSGKHRGKRFVWGGRAEVRAVLYMATVSAIRCNETIKAFAERLKKAGKQPKVVIVACMRKLLIIMNSMLKNNTPWNPKIV

SEQ ID NO: 270705 - protein, 426 aa, unidentified
MWDARRRVLKMKSLKQGIIQDKEIIIMRTVFGIDVSKASSEVAILVNGEKVHGYTMPNDAIGFNRLLGDLATVNSPEIIFEATGVYSRRLQAFLEINGYAYTRLNPLEAKKQLDSFRVRKTDQIDAEKLASSQFILNRKPTYVQEEVYQNLRDLSRFYQNLTEDIVRNKNRLHKVLQVAFPEIENLLSSPTGEQYWSLVTIFQTKHWVLELSEVELKETIRQSTSKRISENRVERLAEKLVELAKQSYPALSKTSPMIEEVKYHAQELLRLTNPRDQVLAQMIELAEPLPEYEILLSIPGIAETTATSIIGELGDIRRFQSANQINAFIGIDLRHYESGNFLAQEHITKRGNPYARKILYKCIHNIASASYTNPCHIADFYEKRKRQSQTTSTKPHTIASIHRLIRTMYYLLTHNKLYDYASTQSR

SEQ ID NO: 270706 - protein, 398 aa, unidentified
MPAVMIGVDPHKASHTAVAIDAAEVPLGTVRVRASAVQAARLVEWAADWPERTWAVEGAGGLGHLLAQQLVAAGEKVIDVPPKLGARVRLLSTGISNKNDPNDARSVAVAALRSPGCHQVTADDHALVLRVWSRRHQQLSSLRTQAACRLHAALCEIVPGGLGKDITADRAAAILDEHVPDGPVSLAWHDLAKDHLADLRRLDTRLADTRKRITAAVQASGTTLTSVFGVGPVIAATVLGDVADVTRFSTADKFASYNGTAPIEVSSGQRKIFRLSMRGNRRLNHAIHMAAVTQIAHKHSQGHAYYQRKLAEGKTPAEARRALKRKISNAIYARLQADARARAAGPGGQPGNDSDSSAADLHPERQLFGQATPRPSATLLPPAPASRKKTPRISSRIT

SEQ ID NO: 270707 - protein, 368 aa, unidentified
MNTVKFIGMDVHKKMITIAIADEDRQKQPRGYGSIANDPDALDKFCRKMVSTSTRLHFVYEAGPCGYGIYRHLSQKGFDCMVAAPSMIPKKSGDRIKTDHRDASMLARLHRAGELTAVYVPEDQDEAMRDLTRAREDAVMATRKAKQRLNAFLLRNGLTFAGRCKWSKTFFNWLADIAMSYPAQQVALQEYIDTVHENQNRVNRLTEQIRQMIPGWRLAPIVSALQAARGVSLIVAVTLLAELGDLGRFDKPSQLMAYLGLVPSEHSSGESIKRGGITKTGNSHARKVLVEAAWAYRMQARNSRLLLNRQQGLPDLICRIAWKAQLRLCGRYRRLAAKGKPKQKVVTAIARELSAFLWAIAKQVQPVV

SEQ ID NO: 270708 - protein, 351 aa, unidentified
MMIIGVDYHPSFQTIAFLMEETGEYGEQELNHSDGEAEKFYRDLNQRGVSVRVGLEATGYSRWFERLLAELGFEVWIGNAAEIKKKRVRKQKTDREDARLLLKLLLENRFPRIWVPSPENRDLRQLLWHRHRLVQMRTRIMNQLQAVAMNEGYRWKKKLFSQQGRALLEKLSLAPWASRRRKELLELLDQLDPKIAELTAAVQQEANQRPDVLRLMTHPGVGPVTGLAYVQVIGTPDRFPCGKQIGSYIGLIPCEDSSAGKQRLGHLSKQGNALLRYLLGEAAQAAARCNPDWRRRYVHLAMRRHKNIAKAAMARKLAVRLYWMWRNGWDYSQLVSFGSNAGKLATGHGVK

SEQ ID NO: 270709 - protein, 358 aa, unidentified
MNRIATQSAGQIIGLINGRQVIGLDIAKNVFQLHSVDMSTGEIVNLQLRRAKVLEHFANRAPCLIGIEACGGAHHWARQLTALGHVVRLIHAKAVRPFVTGNKTDASDARAIWLAVQQPGTRFVGVKTLGQQATLTLHRQRQLLMKIKGMQTNALRGLLYEFGATFARGKNALFSDIEAALASLAGDIPQYVADSLREQVQRIKQLAADIKAIEVKLAAVLRTDADMKRVAAIPGVGLLTATAAIATMGQASAFKSAREFCAWLGLVPSQRGTGGKVQLLGISKRGDSYVRTLLIHGARSVLTHAKEPGAWLQQIQARRPANVVIVAQAAKMARTIWAVTAHQQAYQRGHRSTRAQAA

SEQ ID NO: 270710 - protein, 337 aa, unidentified
MQVTLIGIDLAKTIFQVCGVNAQGMPAFNRTVKREGLLNLLLRYPEATAAMEACSGSNYWGRELKRYDIKVLLIPPQHVKPFVKGNKNDRNDAFAITEAARRPNLQCVEPRSTAQTDMIQVHRLRERLVSERTGLINQLRGFMNEFGVVVSRGRQILFTSLLEIIDNPNNGLSPLARTLYRRMYDQWRYLNDEIKQLDKSIAAQAKTNEDARRLMTIKGVAEKTATAVIAHAGNGAAYKNGRHFSANLGLVPKEHSSGGHQKLGSISKRGNRYVRRLLIQGAWSVMRNASRSEDRLSRWAREVAARSGQQKAVVAIANKLARIIWSMLHHRTEYRAG

SEQ ID NO: 270711 - protein, 340 aa, unidentified
MLYVGLDVHKEFCQASILNEKGFEEDNLRFPTTRRGLESFLDRFEDASFVLESTGVWEFVYEIIEEKGFPVKLAHPLKVRAIAEASVKTDKVDARTLAKLLRLDMVPESYIPPKEIRDLRRLTRLRSYLTQTNTGLKNRTHAELLARGIRRPDDLVTPFTQKSNEWMRSLDIPGVDVQLNMVEAVQEQISLVNEMIRTEFDRREEVRNLTSIPGIGIYSALVIFAEIGDVRRFPDPEHLCSYAGLTPTVSQSASSVHYGGISKEGSKQLRWILTEVVHSHHRFEPSSNLSRFYDKIARKRGKQKAAMAAARKLLHIIYWMMLTGETYHSHGFNPVLKPAA

SEQ ID NO: 270712 - protein, 326 aa, unidentified
MQFIGIDVSKKRLHGAWLRDPRQGSVRAKATDNSGEGHEQLLAWAQRASGAPAGKLCFVLEATGVYHEAVALFLHQAGGLVAVTNPLHVKRFAESHGIKIKNDAHDGRVLALYGHERNPKPWQPPPAQVRDLHALLRRLDALEEDRQREANRLEKTQIEGAPGSVLDSLQAMLATLGEQIKRLRLQLDEHIDHHPELKKQRGHLETIPGVGSKLSAEFLALFGSKHFRNAKQAAACLGLVPVEHQSGTSILKRPRLAKNGDSRWRARLFLPALTAARYNPDVCALYQRLIAAGKCKMSATGATMRKLVQIAFGVFKHQRPYQPQSV

SEQ ID NO: 270713 - protein, 314 aa, unidentified
MTEVFVGIDVGKTWLDVAVRPSSETWRVPNNPLGTGALAAHLAAFSPALIVLESTGGYERLVVAALREQTMPVVVAHGWHVRQFARGIGHQAKTDRIDALVLARYAEQVRPPIREKPDAYVEVLRALVVRRFQVQNFRLAELKRLQVAEEQVIRESLETSIAFMRSVEKNLDASIRKCVRGDEVAAVRYGVLTSAPGVGPTLAVTLLALLPELGRLSERQVAALVGVAPINVESGVKTERSRIHGGRSRVRSMLDMSTLTAVRCNPEIRKVYVNLLARGKTPRVALIACMRRLLVKLNAMARDNTPWRAESRNV

SEQ ID NO: 270714 - protein, 369 aa, unidentified
MNKMIYVGLDVHKDTIAVAIADEGRRGEMRFFGTITNSSDSVSRLTKRLAETGKTPTFCYEAGPCGYGLYRHLTKLGFECAVVAPSMIPRKTGDRIKTDRRDAEMLARLWRAGELTPIWTPDEEQEAMRDLIRTRKQAKDAVKVAKQQLLSFLLRHGLRYQNGKYWTMRHRRWLAEMSRFPYPHQQLAFEELKRAIVQCETRVATLDHAIEEAIPQWHFAPIVDALRALRGVNTTIAATVVAEIGDITRFENPRQLMAWLGLVPSEHSSGSTTRRGRLTKTGNALARTMLVEAGWSYRHPPKEGYPYLKRSAHLPQEIKDIGWKAQTRLCKRFRHLSRAGKPQPRVLAAIARELAGFIWDIARKTPLPT

SEQ ID NO: 270715 - protein, 376 aa, unidentified
MAKALVKQDSGNIDVLHLALELSNSKWRLCFSDGEKLRHKVIEAGHLVGLDEEIARAKERFGLSARCRVVSVYEAGRDGFWIDRALKARGIENLVVDSASIEVNRKHRRVKTDRVDVEALVRQLMRYCGGEAKALAVLRVPTVEEEDLRRISRERDRLVKERGGHRSRIQSLLVAHGVRCRVDAGLLEALDELHSPAGYALGEELKAEIRREYQRYRQVHEQVLVVERQQRERVSTSPQGAFKQVGQLLQLRGVGPVSAWVLVVEFFSWRGFANRKELAACAGLTPAPYNSGDSVRDQGISKAGNRRLRTLMVELSWLWLRYQPDSALSQWFGQRFAGGGKRMRRIGIVAMARKLLVVLWRYLERGELPDGVVLAA

SEQ ID NO: 270716 - protein, 420 aa, unidentified
MKAKKKAKLDLVDDNTLVVGIDIGKRNHYCRFINVRGYEIGKGFSFSNNRDGMEKAISKIEEAKIQNNLVKAVIGMEPSGHYWKPAAHYLFGSGYKLALVNPYHIKRIKEIEDNSQTKTDPKDSLLIAKLVRDGDFFDPNLADGIYAEIRRMYRLRLKVKKSFIREKTKLKALLDEYFPEYEGLFCDILGVTSEYILKNYFLPEIVAREDIISLTGKIKMISKGKIGASKVLKLIERARVSIGINTGIDAAVLEKTYILESISNLKLKLAFLNKKLKYYLDKIECSKYLLSIPGVGVVTAAGFLGEVGDISKYRSAKEIIKLAGLNLVEISSGAKKGKKKISKRGNNRLRCLLYQCAIVAISKNSQLKRYYCYQAETKNKMKMVVAVQCKLARIMFALLKYKKYYDPEEVLKSMVAQEVA

SEQ ID NO: 270717 - protein, 398 aa, unidentified
MTESSDYESVQVFIGVDVGKDTHHAVAINRSGKRLFDKALPNDENKLRSLISDLKQHGQILLVVDQPATIGALPVAVARSEGVLVGYLPGLAMRRIADLHAGEAKTDARDAAIIAEAARTLPHALRTLKLADEQIAELSMLCGFDDDLAAQTTQASNRIRGLLTQIHPALERVLGPRLEHPAVLDLLQRYPSPEKLASLGEKKLAAQLCKLAPRLGKRLAADIAQALAEQTVVVPGTNAAAVVLPRLALQLITLRKQKDEVALEVEQRVLAHPLYPVLTSMPGVGVRTAARLLTEVACRAFASAAHLAAYAGLAPVTRRSGSSIRGEHPSRRGNKALKRALFLSAFAALRDPLSRAYYTRKMSQGKRHNQALIALARRRCDVLFAMMRDGTFYTPQGS

SEQ ID NO: 270718 - protein, 375 aa, unidentified
MTMMHHREIRYIGLDVHKATISAAIAEEGGAPTSYGKIPNDPGAIRTLMTRLGGPQVELRVAYEAGPTGYALQRQLTRMNIQCLVAAPSLIPKQPGNKVKTDRRDALKLARLLRSGDLTPVWVPDEAHEALRNLVRARADAKADLLRAKHRLSKFLLRQGCWAPIGVRNWSKRYFTWLHQLEFEHVPDRVVFADYLTEVNAAGERVKRLEAALHACAQSSSQVALIRALQAFRGIGFLSAVTLVAEAGDLRRFRTAPQFMAYAGIVPSESSSGGKQQRGSITKTGNSLLRHVLGEAAHHARRAPRVTSTVKRRQKDVPPEIIDLAWRAQVRLHTRYRHLSARIGALKALTAIARELAGFIWAAGHVVQQEVPAAA

SEQ ID NO: 270719 - protein, 429 aa, unidentified
MNSTQNKKIEQVKETTMIVGIDIGSEKHYFRAFNWRGIELTRKPVAFSNSMEGFNSFYNTIVELIQKSELEEALVGIEPTGHYWFDLGQFMGEKNIKFVMVNPHHVHKTKELDDNSPSKNDRKDPRVIAGLVRDGRYFYSYMPTGVYAELRNASNRRFVLVEEQTRAKNRLQKWIAVYFPEYKGIYTHIDAKGGLLVLKQAPTPEEIVKLGEEGIIKIWKDAKLRRNGNKKALKILNAAMRSIGLRTGLTEARMKIQDLIEDYELQTKRLERVNDLIKELCQQIRYADKLLEIKGIGITTVAGFIAEVGDITRFDSTKELQKLAGLELVADSSGKHNGKTKISKRGRKRLRYLLFEAAISVVGKNEEFKEIHRYYTTREKNPLKKMQSLIAVACKLIRVFHVILTKGVSYDASKMLEGIRHPGEQLKAA

SEQ ID NO: 270720 - protein, 400 aa, unidentified
MLSIGIDVSKGKSTVCGMKPGGEIVYAPFEVQHTREGMLELVSLLRSSGEEVRAVLESTGSYHCPVVAALLENGIFVSVVNSLRMKRFCSQSIRKVKTDRIDAMQIALYGLAYWQELQPAKLPEDTYRELQLLARQYYQMTSMLIKAKVDFNAICDQVLPGMQELMNDHAGRHKLSDFVLRYRHTTHILEMGETRFRKDYCKWAEKKGYRNCERMAALIFATAQNGIPVLPNAPSTQIVITEAIRVLHTVEASRDAILTQMQALAKTLPEYSLVREMPCIGDTLAPRLIAEIGDVRRFHSKRALIAYAGIDAPPYQSGKFCANNRHISKRGNRYLRKTGYEVMQSYVMHKPANDPIFTFIEKKRGEGKSGKLAMVAGLNKFLRVYYGKVTELYRSSSAIE

SEQ ID NO: 270721 - protein, 364 aa, unidentified
MAQGRGAEAQSNPVLQGVNMPVAEVDTFVGIDVSAHELSVALRRGQSHDKAAMAKFPNHPSGHKALVAYLLRGGGRVRVCLEASGNYSLDLALTLQAHRQVEISVINPRRARRFAESLGERSKTDPVDARVLCEYAARMPWVRWQPPSPVALHLRALTRAIADLGVIHTQQNNRAYAAAASQALPVLVVKEMQRHKKYLEQRMTRLRREAVRLIACDPELERRFRLMLTTIGIAETSALQILGELAVLPDMLDARQWVAFSGLDPRLFKSGKSVEKRPRISRSGSRHLRRALYMPALVALRRDPYLRVFYQNLLARGKARLQAVVAVMRKLLHALFAMFRSNQPYDGSKLCAVELAVHAIAACA

SEQ ID NO: 270722 - protein, 464 aa, unidentified
MGWTLGIDLACRAAHVASLAGPDGALVWTGRTFFTRLEDLERLWADVDVGPQELTVVMEPTRNAWAPVAAWFKRRGVKVVLVPTTQSADLRAYYSKHTKNDRLDSSLLARLPLLHPEGLRAHTGAGPADPLRRAAKQRSSIVKRRTAVFARIDALLELLGPGWYQELGSDYGNASLHLLARYADPHDVIRLGPTRLARFLIRYSHGQWREPKAAALLQVARQSLSLWDGDGMDFAALAADIALEAEQALQLTSQLDTLKTRMTDLYVQADPGQVVISAPGVGPILAATITGRLGDPHRFTSLAAVRSYSGLVPKVSQSGQAEHHGGITKAGDRTLRQAAFMAADMARRADPQLAAKYVRLMNTGRHHDSALCHIATILLTRIAACQRTGQTYVIRDLDGTEITEAQGRRIVTEHHQVHPTVRAKNAGTRTSQRLKNRTSRESQKSPSAPTSRPATTQPTNPRAA

SEQ ID NO: 270723 - protein, 388 aa, unidentified
MRFAAAQPQAPTAIRTDLGAIFVSLELSRSTWLITSLSPGGGEKLSKHSVRGSDVAGLLERFAHLKEKARARTGEAFPIIVIQEAGLDGFWIHRVLQSEGIESHVVDPASIATSRRRRRAKTDRIDGEALVRALLAYKRSEPRVCAMVKAPTPQEEDRRRVCRERKVLIVERVQHVNRVKGLLFCQGITGYEPLHRDRRERLEELRTGDSRPLPDHLKAQLRRELDRIELLIEQIKAVEAERDALLARDHAVTPAPAAMLVNIKGIGPEFAVILWAEGLFRHFDNRRQVAAYAGLAPTPWQSGSVDREQGVSKAGNPRLRTTLIQLAWLWLRHQPHSALTLWLEERVKRNGGRLKKTTIVALARKLLVALWKYVTAGVVIEGAVLKAI

SEQ ID NO: 270724 - protein, 348 aa, unidentified
MTSRPKAVISGVEARKSGLNEAGKTLVVDAFPPDADGLAHLVRHVASFGEEVHAVIESMNGARFVHDTLELHGWGVEIADALRVKGLAPLACKTDKIDAKVLAELSRRDLVPAIWLPTPSVRAERERARFRLHLVHHRVALKNRIHATLLAFGHPCPVSDLFGESGRALLDRLAIPEPWAGTVSASLRLIDELDDQIDAAERELRRLGANHPYMSLLQTVPGVGWVLAYTIASEVGDIARFESPKKLVGYTGLCPRVYQSGGTDRRGRIAKNGPTYLRWALIEASIHACKNPLYKPAYDRTKARLGRDRGGKVARVELGRKLAEAMWHMLTKGERFAPARSQVVALVA

SEQ ID NO: 270725 - protein, 412 aa, unidentified
MLKVINSVVCGLDVHKDSVKACLLKAIDSQRYQDTIKTFTTMTSDLKKLKAWLLDEGCTKAVMESSGKHWIPVHNILEDSISIVLANARHVKNLPGRKTDTNDARWLAKLLALGLVEGSFIPSKYIRELRDLTRRRQKLIYMRSSERSRLLDVLRTSNIMLSSVASDVFGVSGMLMLNALISDDKEQSQNAEDIANLAKRKLRQKIPQLVEALNGDLDKHKKGLIKEILEHLEFLDSQTSKLEQMIDEKCEPYNEFVNIIDSHPGIDKTSAQAILAEIGPDMKVFHSEDHLASWCGLSPGSNESAGKKKSTRTKEGNNYIKTILCQCAHAAANTKNTYIAARHWSIKARRGPQKAAVATARKMITTIYHMICNNTYYREAGPDVYKEARSKNKTRSMIKSLHALGYEVIEKV

SEQ ID NO: 270726 - protein, 355 aa, unidentified
MSEEKYIGMDVHQATISVAVMDAQGKLIMECLLETKATTIVEFIQGMQGTLSLTFEEGTSATWLHDLLKPHVSRLVVCDPRKAALLKEGNKSDRIDARKLAELLRTNQLKPVHHGEHGVRTLKELGRSYLTLTQDVTRVMNRIKALYRSWAIPCAGTTVYAPRHRAEWLAKIGEPGVRVRAQRLYQQLDGLQPVRLEARRELLLESHKHSAVKLLRQIPSIGPIRAALLVALLQTPHRFRTKRQLWAYSGFAVETHDSGEYRCVRGKLQRNRERMTVRGLSANYNKDLKNLFKGAAISASTRPGPLRDFYVALLAKGMRPTMARLTLARKIAAVSLTIWKKGVDFDAKQLDQQAA

SEQ ID NO: 270727 - protein, 418 aa, unidentified
MVMKIVRFNCCGMDVHKNLVVATIGITDRKTNITEYFQRSFSTLNSDLYRLKDWLRSHHCSDVCMESTGKYWIPIFNILEDETNVHLTHPKYVKAIKGKKTDKKDSKWICDLFKHDLIKFSFIPPKEIREMREIARYRYKLVCMRSSERNRYQNCMTISNVGLASVVSDPFGKTASNIMKEVMKSNVIDDDKILKLVHKNCKNKDKILDSLHGYHIESDQRFKMEKSLDHVEYLDQLIDSCEVELIKRAYPFRRSFQHITQIKGISALSAILIISEIGIDMSQFESDKQLVSWAGLSPANNESAGKKKSVRISKAGQYLKPLLVQCALSAIKDKTSYFGRKYSNIKKRRGHKKAIIAIARMMLVSIYHMILTGEEFNPCDHESFMDPKPNANPSLTVEKALNFLKQSGIDISSIPVNL

SEQ ID NO: 270728 - protein, 326 aa, unidentified
MEHELHYIGIDTAKEKLDVDVLRPDGRHRTKKFANTTKGHDELVSWLKGHKIDHAHICIEATGTYMEPVAECLYDAGYIVSVINPALGKAFAQSEGLRNKTDTVDARMLAEFCRQKRPAAWEAPHPLERALRALVVRHQALTDMHTQELNRTETAREVQMPSIDAHLLWLEAELKRLEKQIKDLTDDDPDMKHRRKLLESIPGIGEKTSAVLLAYIGLKDRFAHARQFAAFAGLTPRRYESGSSVRGASRLSKAGHVSLRRALYMPAMVATSKTEWGRAFRDRLATNGKKGKVILGAMMRKLAQVAYGVLKSGVPFDASRHNPVAA

SEQ ID NO: 270729 - protein, 410 aa, unidentified
MKMAGIEVHKKVWMVVVVDASVPEEKPVRRRFVTLPSELQRFRIWLQEQGVEEAVMESTAQYWRSVWLELEPHMSLHLAQAFSNRAPRGRKHDFKDAERLVRRLMADELILSFVPKGEQRIWRSLTRMKVQLTRDRVRLQNQMECLLEEMRIKLSIVVSNLLGASGLRILHALAQGETDPKRLAELGDERLHCTQEQLVDALTGRVQPMHRGMLALQLQRLQLIDQQMTQLNSMIAQAMKSHQDAVIRLAEVPGLGVDSAQQIIAEVGAQASTFSSAAELTAWVGTCPGKEESAEQNHSSRSAKGNKYLRRVLNQAAHAAVAKKGSYFQGVFRRLMPRLGYKSAIWAIAHRLCRVVWKILHEGVRYIEQGREVGPREKKQRAQMLARALRKLGYEVTITPINQLAPKPAI

SEQ ID NO: 270730 - protein, 351 aa, unidentified
MTDYKLGFDVHKRYSQIAVLNAEGQVCQRKRLVHSPESVREYLMQFPAGTPVAFETVGNWYWIAEAIEAAGCEPLLTHAAKAKVMMGNVNKTDKLDAEGLATLLHLGKLPTVWIPAAALRDERELLRTRMFLSKIRTGLKNRIHAALAKYALVIEDSDLFVGKGYEHLKQKLLELPTQTYASVAQELELLDQVQKQIDLLEKRIQPCVRDTPAATLLNTLPGFGKVFSSLVAKEMGPADRFPDAEHFASYAGCVPKVSSSGGKTHYGHLRKEANHYLKWTFIEAANVIVAHRNRPAWRNKHVVRLYERTRQRKGHAVAVGAVARHLAEAAYWMLRKNQPYREPTSDLPRQA

SEQ ID NO: 270731 - protein, 352 aa, unidentified
MKQMKQILKQVSGIDVAQKELVVTLGRMYCDLTIELYAYKVFRNTQTGIISLLKWVRMLSDQAVRIQFVMEATGVYHQKFAYYLDEKGYDLSVVLPNKISNFIRTLEVKTITDKTASQAITQFGLERKLDFWKRPKKAYMALQQLTRERGQIVDERSIIKNQLHAENTEALPNKRSIKRMKSRIKFLNSQEKEIKKDIDKIVNAEETLKQEIDDICTIPGVGMLTAVIVLAETNGFELIRNKKQLTSYAGLDIKEKLSGTSVKGKPRISKRGNRNLRKAMHLPSLSAVKYNKSHKELYVRLIAKSGIKMKGLIAVQRKLLELIYVIHKNKTTFNEYYELEKRAFNSKLVDAL

SEQ ID NO: 270732 - protein, 378 aa, unidentified
MQPTQRVDRRTALDVSLELAGKAWKVAATDGQRRHPAVFVVDGDPRWARLQALLRRLRELQARWKLPRACPVHVIYEAGQDGFWIARALEAEGIQVIVVDAASVPVARHARRAKTDRLDALKLLEALRGWLRGERGELRVLHRPSEQAEARRLLARERGLLQKEVGQHRDRARKLLLLHGCTEEVDAGLADRLMAGKVRCADGGRLPEELWSWLMRELERMELARQQLGSLEKTLLQQLPEAVQRCVAQLAQLRGLGWVGAMRLVLELFWRDFANRRQVGACVGLVPQPYDSGNSHVDQGISKQGNRRVRSLLIEIAWFWVRYQKGSELAQWFAKRTANGNKRSKRVAIVAVARRLAIALWRYLRDGVIPAGAQLKAA

SEQ ID NO: 270733 - protein, 331 aa, unidentified
MEKYKIFVGIDISKRWIDVAVSNGNLIAHRNYGNNKKDFKLMLSWLKTFARPTEMILCMENTGVYSMPLWEYLIAHKIAIVVENALQISRSMGIRRGKSDKADAQMIARYIKLHHTECRLCKAPSKVITRLKVLFGYRERLLKVKHQLWVASKEVKGFISAELCKEMIHDSEVLVKNINHKIDKAEKLILSIITSDNQAKRIYKLITSVPGIGLITATYLIIITQNFTIIENSRKLSRYGGMSPEKNESGIIKGKAHVSPIGNKKLKSLLSNCVGTNLKYDTETKEYYNRKILEGKAEGIVLNNLKNKILHRVCAVVNRGTSYVDIRKYAA

SEQ ID NO: 270734 - protein, 462 aa, unidentified
MKRKAKSQATHSGLAVVNPNAAAIDIGATMHVAAVGADRASDPVRSFGTFTADLHRLADWFAECGVKTVVMESTSVYWIPIFELLDERGFEVILVNARDAKHVPGRKTDVSDAQWLQRLHSYGLLRASFRPKGEIVELRAYLRQRERLLDTAASHIQHMQKAMTEMNLQLHHVVSDITGATGMRIIRAIIAGERDPAVLASMRDTRCHSSAEVIEKALTGHYRGEHLFVLEQALALYDVYQQKVAACDIRIESVLKELNSIRGRKEDARADGSGSPRRRSRQSNGPDFDVGKALHSLLGKDLTRIHGMGPYLALKLVSECGDDLSAWPSAKHFTSWLCLAPSNKISGGKVLSSRTRRSGSRAASLLRLAAVTIGRTDTALGAFYRRLSARAGKSKAVTATARKIATLFYNALRHGMDYVDPGASYYETRYRERVVKNLHRRAKAFGFILQAAEMPAAEQAVS

SEQ ID NO: 270735 - protein, 322 aa, unidentified
MARVQGETTTEVAQHFAGIDVSKAYLDIRLTREKRSRRFTNDPAGFAALAAHLGPAPHLIVLEPTGRYHHAIWKALAAAGHGVAPVNPLHVRRFAESDGELSKTDALDAAVLARMAVERRPAAKAPPGEDQLRIKELTTSLADRIDRRAMLKAGRKEIRNPLIAKLDEAEIDLLSGAIGTLKAEIAGLIDTDPERARCAEILVSIPGIGVSSAHRIIAEMPEIGTLDKKQAGALLGAAPRASESGKRKNRRRTKGGRRHLLAALHMPAIAAGRANPDLKAFRQRLKARGKPGPVITTAVLRKLIVLANALVQQNRLWAPKMG

SEQ ID NO: 270736 - protein, 425 aa, unidentified
MDFKQNHKINQVTEKTLVVGIDIAKRKHFACFVDDRGRVLQKSFSILQSNDGFQHFYHRILTAMKEHEKTEVIVGIEPTGHYWLNLAYFLEERGIPLAMANPLHVKRSKELDDNLPTKHDRKDALVIARLIKDGRFSYPRILKDIEAELRVGSTFRGKLTEELGAVKNMMIRWLDRYFPEFTQVFPSFGKMALAVLECTPFPSDLFQKQPDEILSLYRQVEGLKSPQRPKAIQLIEVSSNSIGVTEGREMARIEIATLVRRYNQLEQEIESITQQLVTLVQTSVEYEWLSTVQGLGDTTIVDLLAEIGSFSHYEDPRQIIKLAGLTLRENSSGQHKGQKHISKRGRRKLRALLFRVMMPMVRHNEAFRKLHEYYTNRKVNPLRKKQSIVVLCGKLLKVLHGISTKHKAFDAQRMMKDIPSLAEAM

SEQ ID NO: 270737 - protein, 339 aa, unidentified
MFMIGVDPHKGSHTAAAVDLSQEVVDTIRVDADGQQRARLLAWAARFSPRTWAIEGATGMGALLAQQLVAAGEHVVDVPPKLSSRVRLLERGRIDKTDPNDARSAAIVAWHNPLLNVVTGLDEHRVVLRLLADRDHQITANRTRTICRLHALLCLLIEGGTGKALTVTKAEELLVKVNIDGPVALERIAAAHQLLAEIEVLDAARVDVRKRTMAVIVATATTVTEVHGIGPLTAAIIIGRVGDIGRFPTAGHFARHNGTAPIEASSGPKKRHRLNPRGDRQLNHAIHMAAVTQVAHDTPGRVYYLRKQAEGKTRKEAMRALKRQISDAVYQRLVADTRH

SEQ ID NO: 270738 - protein, 351 aa, unidentified
MKTKDTTESKLFIGIDVHKRSWKIHTSTDLFDGSSLTIPPDAFSLKKYVDKHYQDFQVYCCYESGCCGFSHHRHFISFGWHSLVVNPADVHRPAKAQFQKTDKIDARLLCKELKDGRLKGIHVPEVEREQLRCLFRRRNELVKQHRKIKTQIKMQLLYLGIEIPKEFDNSHWSHQFRDWLSSLRFDYPTMDYCFETRLSAYEYIDKQKRDVSTKLRGYCRKHYKKDYYLLRSVPGVGGIVACGLICELGDLRRFKNFKQLASYVGLIPWVHQSGDTLKTWGLTPRANRLMRSYLVEATWQALRFDPVMQAYYRSHSGKDVKRILIKVARKLLSRIHAVIRTGIPYQVGVVS

SEQ ID NO: 270739 - protein, 374 aa, unidentified
MNESSTLFVGLDVHKDSIDVATAEASREGEIRHVGTIGGSVAALDKALRRLTSRGHPLHVVYEAGPCGYVIWRHLHAQGLHCEVVAPSSIARPSGDRVKTDRRDAMLLARLARSGDLAAVRVPGEGDEAVRDLVRAREDAVREQRNARHRLKALLLRNGIAYAGRSSWSAAHLRWLSTIALAHASQQIAFQEYLHSITECTARIARLEQALREALPTWHLSAVVLALQAMRGVQLIAAMTLVAELQDFLRFDSPRQLMAYVGLVPSEHSSGPKRRQGSITKAGNSAARHMLVEIAWHYQHSPRVSPVIAARHEGLPSSVTDIAWKAQLRLHAKFKRLLARRVLKNKAVVAVARELAGFVWAIGQDVQRSQTTTH

SEQ ID NO: 270740 - protein, 418 aa, unidentified
MKKHSKSSQRSEPTLKRTKARGPVQRDAKEVLAEVLGKLTGKLDGPAVSTSAKENRRGNTVGPNRDRLTVGVDLGDRWSQYCILGLEGETLAEGQLRTTQEDVREFFQALTVARVVIEVGTHSAWVQDVITEWGHEVLVANPRLMEGSKRRKRKSDRIDANKLARLGRVDPQSLYPIRHRSREVRQDLVVLRARDALVSVRTELINTARGLVKSMGTRLPRCSSPSFADKVKDAIPVEVREALLPLVQLVETVKDCIARYDQKIEELGREKYGHTTLLRQVKGVGPITSLAYVLTLEDPQRFASSREVGPYLGLVPKQEDSGDSQPQLGISKAGDRMLRRLLVGSSQYMLGAFGPDTDLRRYGLRLCERGGKNAKKRAVVAVARKLAVLLHHLWVTGDVYEPLHHPGAETRTAQATAA

SEQ ID NO: 270741 - protein, 347 aa, unidentified
MDHYAGIDVSLECSSVCVVDASGKIVREDKVASEPEALIAWFGSLGFGLTRIGLEAGPLSQWLYAAMKQAGLAVELLETRHVRDAFKAMPVKSDRNDARGIAQLMRLGWFRPVHCKSLAAQEVRALLTARKLVQSKLHDVEMSLRGILRGFGLKVGRTTPTRFAGRIRELVAGHATLEVVAEAMLSVHAILRREFTGFERRVRAMARSDVRVRLLMSAPGVGAIVGLTYVSAIDDPARFKSSKGVGAHFGLTPKKHQSGEKDITGRISKIGDASVRAALYEAAHVILTRPVKGSGLKSWAMKLAKRAGMKKAKVALARKLAVILHRMWVDGTSFALATPNNPAAAAA

SEQ ID NO: 270742 - protein, 406 aa, unidentified
MNRFFAGLDWAAQTHALCVIDEQGAVRDRFEVAHDATGLRELLGKLRGVARDPAQLAVAIERPSGVLVDTLVEAGYPVVPIHPNVVKATRPRYRSHGAKSDASDAYLLADLLRTDGARFAPLKPQSDAIRALRALVRGRDDLLATRVQLANQLRSLLESFWPGAAAIFADIDSPIALAFIERYPTPQAAAHLGDKRLATFLAQQRYSGRRTPTELLERLRTATAGHSSELEREAKGELVRALARTLEPLVAQIAQLSARIEHTIAELPDGHIVMSLPRAGRLCAAQILDELGDVRERYPTDDQLAAEAGVCPVTYESGKHRSVTFRWACNHRLRRAVTCLADNSRHACPWAASRYAAARARGCDHPHAVRILARAWIRVLWRLWTDRATYDPTRHRAAVAFNPLKG

SEQ ID NO: 270743 - protein, 381 aa, unidentified
MTATTRSEFRSVSDSTLYVAFELGKKEWKLAMTSGFGVTPWLQTVASGDLGAVERALARGRARFGLTPSAVVMSCYEAGRDGFWIHRALTQLGLRNRVVDSSSIEVNRRARRTKTDRIDALKLVTMLVRVCCGEPHVWHEVRVPSVDDEAARHVSRERTALTKEQTRLSNQIAGWLATWGCIASARARRTARWWTTARDWDNAPLPAAVQARIARADERLTMLATQIAALEEQQEATVQAADGDSALGRLVQLKGVATTSASVLLDEGLVWRAFRNRREIGGLLGFAPAKYDSGDSEHDQGISRAGNAHLQAISIQLAWNWVRWQPTSALTRWYREHFGPRRRARRIGIVAVARKLLIALWRYATTGVVPTGAIFNSGSHA

SEQ ID NO: 270744 - protein, 368 aa, unidentified
MNTAYCTTIGADVSDRTTKICVMTKESGNPKIVCETTIPTSPDGFRTFLEGQDKSAPLVFETGTHCRWIDKVGTAMGFKTFVANPCRLRMITESKTKNDKNDARMLARLALADIELLHPVKLRDDGHQRMVNLHEIRDQLVKERTAEILQIRAIAKSIGFRIPDCSAECFHNLDRKGWPKELNDVVWPLMKELKGKSVTIKTVEKQMKRLANSGAFGESVARLMEIPNVGFFTATCFVAVTGGDMDRFDKPRDIGPWLGLAPRQDQSGDVDRQCHITKAGSSLLRWKLTQCAQKTMQKDSADTDLKVKGMRLCARGGKIAKRKAVTAVARGLAVLMVALLKKPENKYVPLSDYHEKELLAMNATPVAA

SEQ ID NO: 270745 - protein, 362 aa, unidentified
MAIIAQIYSFVIGVDTHAKEHVLSILKPNGELLETKSFRTNSLNAAINWVGKLTLGDSSVLWVIEGVATYGATLAAEVSLAGFTVVEAPRMNTRANRGIGKTDTLDSQRIAAAALPLDEAKMRLPRLHEGTRVALQLLVTSRDQMTTERTGAINQLTAILRQWNLGVDARRPLTAAQILEISKWRRRQFKDVGIATAYSEANRIAKRITTLTSEITANLQKIEALVKGSMAAVLLELSGIGPITAAVIYCAWSHYGRVPTADAFKSLAGVSPIPASSGNTTRYRLNRGGDRRLNSAVHMATISQEIHDSETKAYIAKRLAEGKTRKEIRRCLKSYIIRRAYRALNAAARQEIADAKSLSLAA

SEQ ID NO: 270746 - protein, 424 aa, unidentified
MREEGLSMAEEIEWFVGIDWASQSHQVCLVDARGECLGERAVAHGGLGIEELCDWLIARTGATPEVIGVAIEMTQGPVVEALLERGFCVYGINPKQLDRFRDRFTVAGAKDDRRDAHVLGDSLRTDRHAFRRLSNDEPVIVKLREWSRMADDLQQERARLASRMREQLWRYYPQMLELADDLAADWFLDLWNQAPTPAKAVRLRETTIERFVKAHRLRRWQAPEVLRILKQKPLSVAPGVVEAASDHIRTLTVRIRLVNQQLKAAHRKLDELCAQLVPSEEDEPGQQCEQRDVVILRSMPGLGRTILAVLLAEVWQPLRRRDYHALRSLSGVAPVTRRSGKTCVVVRRYACNKRLANALYHWARVATQHDALSRRRYAALRQRGHSHGRALRTVADRLLSVACTLLEQQTLFDPTYEVREAAGA

SEQ ID NO: 270747 - protein, 334 aa, unidentified
MKYKFFVGIDVSKSTFDVAVLCRDNSQQIVHHVFSNDEKGIKEMGQFLKESFSDYNHTNTLFCMESTGMYCNALLNFFKETSTDVWVENAIQIKRSSGITRGKQDKIDACRIALYAYKNADAARLWKPAREVMEQIRNLASLRDRMVQTQKKLQTPINEFEAVGEKKMAALLAKSISKSLKAIDADIKQIELKITTLMKQDESLNHLFKLVSSVVGIGFVTATNLIIHTNEFTIMKDCRKLSCFCGVAPFPNQSGTSIRGKTRVSHMANKKLKTNLHMASLTAVKFDPELKTYYERKVAEGKHKMSVLNAVKCKLLARVVSVVNNQKEYVKKAA

SEQ ID NO: 270748 - protein, 422 aa, unidentified
MSYCPVAGIDVSKQFSDMCILSPDNKIFAQEKIYHDETSINRANALLQKAERLFFSKPVIVMESTSHYHLILFQFFSEHGYDVIVVNPLQSNSMKDFSIRKRKTDRVDAFKLAMMYRTKTLRPSQIPQTATRALRQLCRHRAELLNDVSSYKNRLTALLDQTFPGYDKVFSDVGGVTSCAVLVRFPTPTILLMEEESELVEVIAAASKSGYSFAKKKAGLLISAAQKAQTLGIHSCADETLIVCTIQMLRTLSESVLQIETAIDNLLAQIKEMRNNVSLLQSIPGVGSHSAALLLGEIGDISLFKKPKQLAAYFGLDPTERQSGSFRGTKNKLSKRGSPYARAALHMGVVNSICKRGKDSAANPVLLSYYEKKCKNKPAKVAQAASMHKLVFIVFAVLRDQKPFELKTPEQHAVEQGFVKAA

SEQ ID NO: 270749 - protein, 331 aa, unidentified
MTHDSSQPVSPPSASPLFVGIDVAKETLDLARSDSGELFCSDNDPHGIRRIIESFKAVRPACIVIESTGGLERPLLEALLDAELPVALVNPKRVRYFAVGIGILAKTDPIDARVLMKFAQLAAPRLAQKRSANQAELDELITCRRQLTAARTTQANCRLATRSKSALMAIDVVLKTLDKQIDALDQKIRKLIDSDDDFKHLDRLLRSVPGVGPVLSATLVAELRELGTTDRRQITSLVGVAPFNCDSGTFQGKRSIRGGRTQVRCVLYMATLAAMRFNPVLRIFAERLGHAGKSAKVVIVACMRKLLVLLNAMIRDDLSWNELQVVKALDL

SEQ ID NO: 270750 - protein, 317 aa, unidentified
MNSEKNQNEINVGVDTGKTQLDIYIRPLDIFFSVSNDDSGIKKAINQIKKHKPTRIVIEATGRLEHAFIMACSKANLPFVVANPTHIKKFAGAVGRLAKTDKLDAQLIAHFGEAIKPPLSTLKPEDMRLMSDLLSRRRQLITMQTMEKNRLQIMPKEITNSIKPLLTALKNQLEKIESKLSKLIKECDEYKAKNEIIQSVPGVGNVVAFHLISDMPELGYLTNKQASALVGVAPINRESGIYEGKRMIRGGRHQIRTVMYMAMMSAMQCNPVFKVTYERLVAAGKPKKIAIIACVRKMVVILNSMVRDGVMWDPKMS

SEQ ID NO: 270751 - protein, 460 aa, unidentified
MNQYFLGIDASKGYSDFVMLNAKKQPVIENFQLDDTFEGHARLYELLRSFNQDHPEATIYAAVESTGGYENNWFQSLLKFQGSLPIKTAHLNPLGVNYNHKADLKRNVTDKISAQNVAEYMIAHPEKVSYQHQDSLASLRKQWGFITMLTKQSTQLLNQLESLVYNANPEILMYCKDGTPQWVLKLLTLYPTALRLSKAKVKSVARIPYVSKDRAQQLVATAKKSVASASDNVTQRLIVATVKQILHLNKTIKAQTKILTNECAVPEVELLKTFIGISDYSAIGLMLEIQSIQRFLLSKKLASFFGIHPAYKKSGDGTWKYRMSKKGRKEPRRILFMVAMSAIKSNPLIRSIYQQAVQRGMKKKAAVGLCMHKILRIIYGMLKHNKAFDPEIDRKNRQKTPLRQRRVRQDKNRRYQDFDSKAPISSRQKIKRKERKQSQNVSNVEYGISEASVPVTELAN

SEQ ID NO: 270752 - protein, 356 aa, unidentified
MSKNKQIDFSDKTIYVGLDVHRKDWKVCILLEGMVYKQFCQPPSPKTLGNYLRKHFPNGEYKSVYEAGFCGFWIHDGLVEEGIENIVVNPADVPTTDKERQQKTDKRDAKKLARTLRGGTLEGIHVPSREMVEHRSLVRLRSRWVGDMVRTKNRIKAHLHFFGIAIPAEYSGCNWSNNFLKWVGSREMETLVGKLVLDDLLSQFYVQRTRLLGMNKQLRILSQTEQYKKKAELLQSVPGIGLIGTMKILTELGDIKRFKGIKKLAAYVGFIPSTDSSGEHERIGEMTNRGNRQLKKMLIEASWIAIRNDPALALKYAELRKTMRATKAIVRIGRKLLNRIRYVLINEEKYVIGMVE

SEQ ID NO: 270753 - protein, 432 aa, unidentified
MKRKSNTTQNREDAAHAMPNTVLIGIDWADKVHAWHCVDPAGNVSHGELEQSPKEIALWIASIRQQCPDARIEICLETSRGALVNALLEHDVTVYPINPNALANYRKSHAHGGGKSDRVDARLILQFLAERRGSLRPLVQNSPLTRKLAALSQDRRQLVEHRVDLSNELKSTLKTYFPAALELKPAKMYADFMVAFLLKFASLDAAQKAGATKLRKYFFGVGAKAKAQERVELLCEANPLTTDPVVISTCSLKVESICAMLAALNRSIREYDRLLQELVVTHGDYPIVASFPGAATKMQARMIAALGDDRARYTDTVSFQCATGIAPVTTQSGNQKFVSSRWACTKFLKQTFHEYAGLSISRCCWAKAFYESQIAAGKTPQAAKRALAYKWMRIIFRCWQDGTCYDDQKYMQRLRKNGSHLADKLFPAAKVA

SEQ ID NO: 270754 - protein, 354 aa, unidentified
MAISKQCIGIDISKATFTACLCQCSDDGELVFSKTVDFSNDSKGFNQFLRWAKGVIAKDAALVFLMEATGVYYENLAHHLHKIKKRVHVVLPNTSKHYFSSLNIKTKTDAVDARILSQFGVERIHKAWSPPPPVLLQLRNLTRYHVQLQEQKTALGNIKHSKDCSHAIQIFILKSNKKLISEIDKEIGRCIGEINRLVKSDLGLHKKIEKLATIKGIGMITMVTILAETMGFEQFGSAKQLVSYAGYDVVQRESGTSVKGKTRISKKGNRYIRNALYFPAMVACRHNSVLKEAYTRIIQKKPSKMVGQVAVQRKLLILMYTLWKNDTVFIENYKVSSPDPKTETTLDSSEAELL

SEQ ID NO: 270755 - protein, 344 aa, unidentified
MSEAIIIGLDIAKHVFHAHGADERGRAIFSKRISRGKLLDFFAAQPNCTVALEACGGAHHWARQLTQLGHEVRLIPPAYVKPFVKRQKNDAIDAEAICEAAQRPGMRFVAVKSEQQQAAGLVFRTRDLLVRQRTQLINAIRGHLTEYGWIAPKGPSHLATLADLLEEEEMASSLPEAARAMFRLMLDLLAGLDGKIADLDKEIARRAREDEVSRRLMTVPGIGPISATAIAALAPPAETFAKGRDFAAWLGLTPLQRSTGGKRKLGATSKMGERTLRRLLIIGSSAVVLQASKRGAPKGSWLEQMLARKPRMLVTVALANKMARIIWALLVKQENYRAPVAAKA

SEQ ID NO: 270756 - protein, 350 aa, unidentified
MMIIGCDYHPGFQQIAFVDTETGELQERRLEHREEAEKYYRGLGAQGVKIRVGMEASGHARWFERLLAELQFELWTGDAAAINAKRVRKQKTDRQDAQLILRLMLKDDFPQIWVPNWENRDLRQLLWHRHRMVQTRTRIMNQLQAVALNEGLRCKKRLWRDAGREQLEAFKLAPWASRRRRDLLELLDRLSPTIAELTRAIEQEVEKCPEAQRLQTHPGVGALTALAFVLIIGKADRFQCGKQIACYLGLVPLEDSSGQRRRLGHITKQGNSLLRFLLVEAAQVSVRSLPEWRSKYCHMALRRGRKIAKVAMARKLAVRLYWMMRKGWDYEQLRKFGSHAGKPGHRDGVR

SEQ ID NO: 270757 - protein, 349 aa, unidentified
MIYAGLDLHKNFSVITTMNAQGKEMVKQKKLPNNGEIIELFQGFNEPVTLAMEATRSWYWLYDLLEENGIEVKLSHPLKTKAIASAKVKNDKIDSRILAHLLRTELLPLSYVPPKPVRMHRELLRYRASLVKIQTGVKNRVHAILAKNNITHNFSDLFGKQGKAFLTSLSLSETYRMAVDGYLSVLDELEQQIKAVNKRIVVSVKDDEDTGLLMTIPGVGYYSALLIKSEIGDINRFPSAKQLCSYAGLTPSTYSSGNTTFHGHITKQGSKWLRWIAAEAIGHCVAKPGHLQAFYRRLQRRKGEKIAKVATERKLLEWIYHMLKERKTFQKIEKMVSYQGEPVSVTGLK

SEQ ID NO: 270758 - protein, 322 aa, unidentified
MQQSLCVFGADIAKDSFVSAAHNQVGAPRTVANTSQAIAQWLATVPGGSIVAMEATGAHHRLLAQMAHAAGMRVFVLNARDLYFYAKSLSGRAKTDRLDARVIARYAAEHHARLHPWQPCTGVERQLHELLRRRARVTKLLVSLRQTLANVPALRTAGRQLEQEFAAFFKSLDAQLQALVASDIELGSGIARLRTISGFGPQGAVALGALLSSMRFASADALVAYSGLDPRPCDSGKHRGTRRLSKRGPAWLRRQMYLVALAACRSKALGPLYRCIKAKGFASTQALVILARKLLRVAWAVWRSGKPFDPTRLAVDAACAKT

SEQ ID NO: 270759 - protein, 414 aa, unidentified
MSNRRKNNDKVNKKVLIATVDIGKKSNHGYWRSYTGDDCKAFESTNTREGFDKFWRTIRTARIQQKAESIIFGFESTGSYGEPLVHYMRMKPVKMVQTNPMHTKRVKELDDNSPRKTDSKDPRVIADIIQLGHYLSLVVPSGPAAGLRRLSNARESRVSHRTAFLNRLQDITGVVFPEFLTVMKGVQSKSAQYILKRYPLPGDIVRLGRSRLAKKLHKVSRGQLGGKRAAELFTAARNSTGVTEGAEIICMEIRQLLAAIANENEVIDALEAKMSEYLTMIPYNHSLLSIKGVSTVIAAGIIGEVADFSAFHSAKALVKLAGLTLYEVSSGMHKGKKRTTKRGRALLRKLLYFAAINVVKKDGILHAYYQRLIDRGMLRMKAVVAVMRKLLRIIFALVRDKTVYNTEYSIKKAA

SEQ ID NO: 270760 - protein, 404 aa, unidentified
MINDDRPLIFLGVDIGKSAHYAVAVDRDGQTVYSTPVANEESALRLLVLWARAHQAVVIVDQPGGTAAVLLKLCWDATIGIGYVPGLAMARARDFYAGDSKTDPKDAFVLADVARAHPSRVVWLQETSVARAQLELLSGYDADLRGDANRVTNRVRALLATYWPALERALGDRLDTIGGAALLKRYSSSPQLRKAGAKRLVALLRATHRVHEPETWVQELLVAAKAQTVVVPGAETAADLVAELADQLQHVLVRRQRLEKEIDQVFFGLPEASILRSLPGIGPRLGARILIEIGDIRHFRTPAQLGAYGGLGPTPHQSGTSIRGNRVTRFGNHRLKNAFFLAAFSSLKHPPSRTYYDRKRAQGKRHTQAVLCLARRRVDVLHAMLTQHVPYRAPVPSLPTTLAA

SEQ ID NO: 270761 - protein, 343 aa, unidentified
MKEVITIGLDLAKNVFQVHGVDGSGDTVMRRQLRRSQLLPFFKKLPPCLVGIEACATSHHWARQLIELGHRVKLMPARYVKPYVKRNKNDAADAEAIVIAARQPEMRFVESKTIEQQSRAAVFRSRERLVHQRTADVNALRALLYEHGHVFPVGTRYLARMTALLEDLTSDVPDLIREECQDLLTQIAEKAARIAERTAKLKTLASQSDRARRLQTMPGVGPLTAIAVEAFGPDMAQFKTGRDFAAWLGLVPKQHSSGGKERLGRMTKAGQADIRRLLIIGAMSRLGWLGRRTITEGSWLSRLLARKPKMLVAIALANQMARQIWAMLTKNEDYKDPALAVAA

SEQ ID NO: 270762 - protein, 401 aa, unidentified
MRAFGLDVHRDFCEVAIAEDGEVRSAGRLATRVDSLELFAQSLAAGDVVALEATTGADRIVSILQAQGIRVVVANTRKLRSITEAKAKTDRLDARTLARLLASGLLDQVWTPDERTRALRRLTNRRERLVRARTRAKNEAQGVLARNLCERAPVTDTFGKGGRRWLASLVLPLDERLTLDGCLRQVDFLDGEIAALDGEIAKQALAWPEVLRLMTVPGVNVQTAATFMAAIGEIGRFSSPQKLVSYLGLDPRVRQSGNAAARHGRISKAGASEPRHMLGEVAWKVMQTPGPLRAFFERVRVRRGPQIAATATARKLAVLFWHLLTREEDYAFARPAMTRHRIRRLELLAGAPPQKGRHGIAGGKSKAVFDAERELSRQAETAYRRLVSDWRSTGPKKRVRA

SEQ ID NO: 270763 - protein, 350 aa, unidentified
MRTKPIPETAAFGIDIGKKVFHVVALNAAGAVIQRAKFSRDTLMAFFEAAPRALIGMEACPGSQWLARRLAAMGHDARIIPARFVKPYVKSNKTDTVDSAAIAEAVTRPTMRFVEVRTPDQIDLQALHRIRDRLVGQRTALMNQARAFCIEYGLAMRVGAGGFHADIRRHLAHAENDLTPTMRTLLEELLDDLAYIEGRIKAVNGKVEAYASQHEAIGRLVTIPGIGALGATALVAAAGDGRQFRKARDLAAWLGLVPAEHSTGGKQTLMGISKRGNRYVRRLIIHGARSCLLHLNRANHAIGRWLSDLEARTHRNKAVVALANKLTRIVWTILTRPGTVYLPSKGTAST

SEQ ID NO: 270764 - protein, 415 aa, unidentified
MALKIVYKICCGIDVHKTFVVACIASTNDKGITSYESHRFSTYTSGLKTLLQWLLDRNCKDVCMESTGKYWIPVYNILESDCSIVLAHPKYVKAIRGKKTDKKDAKWIADLFKHDLVAGSFMPPADIRQLRDLMRYRFKLTCFKSSEKNRLQNCLTVSNIQLGNVVSDTFGKSAQAILDKLLENPADTSFDLEPLVYKSLKKKLPELRDAIDGYITPEQAGKLKVIKAHYENLESRKAELEELILALATPYQQELAILQTAPGISSDFTAIGIISEIGTNMEAFPSAKHLCSWAGLTPTNNESAGKKKSVRVSKAGCYIKPLLVQCANAVVKSNKHPEIRNRYLRIKKRRGHKKAIIAIARMLLTALYHILKNGENYNAELYRKSDLPPVDREITVEQALMIARNQGYKIKSATA

SEQ ID NO: 270765 - protein, 405 aa, unidentified
MGAVRVTYSSCAGLDIHKKTVVACVITPESQEVRTFSTMTKDLLALSDWLGQQGVTHVAMESTGVYWQPVWNILEDRFELLLVNAQHIKAVPGRKTDVNDCEWIADLLRHGLLRPSFVPDRPQRELRELTRYRVSLVQERTAEVNRLQKTLEGANIKLASVATDIMGVSAQAMLRELLEGNADIAAIAELARGRLRKKLSELEKALTGRMRPHHRFITARQLAHIDSLDELIAEVDAEIQERMRPFDGEVQLLDTIPGINRLAAQGILAEIGTDMSKFPTHSHFSSWAKVSPGNNESAGKRKSSHTGKGNRCLRRFLVQAARSAARKKDSYLSAQYRRLAARRGGNRAAIAVAHSILIIIYYLLQRRCTYSELGGNYFDERQREATVRSLTRRLENLGYKVTKAA

SEQ ID NO: 270766 - protein, 344 aa, unidentified
MILIGCDFHPSWQQVCWLDTETGETGEAEVVHAPGEVEKFYRRFAAPALIGMESTGNCQWFVELAEKLGHEVWIGDAAKIRASEVRQQKHDRRDAALLLRLLCEKRFPRIWTPSSEERDARQLLIHRHKLVRLRAQVKNGLQHLAMNRGMQKKRRLWSAAGQQALRELPLQPWADRRREDLLKLLAMFDEQVASLDLAVKAAAEENENARLLMSQPGVGPVTSLAFVLTMGDVRRFPRGKQVASYLGLIPREYSSGGHQRLGSISKQGNRFMRMLLVEAAQVAVRCDPGFRNEYLHRCHSKPKGVAKVAAARKLAVRLYWMLRTQKRYPEIVHVESSPRVPVVG

SEQ ID NO: 270767 - protein, 339 aa, unidentified
MHVTTVGLDLAKNIFQVHGITEDGTIAFNRSLRRAQLLAFFERLEPCLVGMEACGSSHYWARELCKLGHEVKLIAPIYVKPYVKRGKSDAADAEAICEAVMRPTMRFVAVKSPEQQAILSLHRARDLIVRQRTQTINMLRGLLAEFGVIFAQGVGHVVKFAKNATEGLLPDLPPAACEVILDLSEQLLALHLRVNWYGRRMTAAAKSEPRIALLQTIPGIGPITASAIVATVGSGEQFQSGRDLSAWLGLTPINKSTGGKERLGRISKMGDRYIRRLMVVGMTSRIKQIKSAPERFDPWFADILHRKPAKLAAIAMANRTARIIWAVLSRNQPYEVRAV

SEQ ID NO: 270768 - protein, 356 aa, unidentified
MTSTKYVGMDVHKESISIAVMNSAGKIVMECVIETKASVLLQFFNGLRGDVRVTFEEGTWAAWLYDLLKPRVSEVVVCNPRKNALLKDGSKSDRIDARKLAELLRGNHLKPVYHGEHGLRTLKELGRSYLTITKDVTRVMNRLKALYRGWGIACAGHEVYVPRHRSEWLGKISEAGVRRRAEHCYQQLDVLRLLRQQVRRDLLLESRKHPAWRLLGLIPGIGPIRAALLIALIQTPHRFRTKRQLWTYSGLGLETHDSAQYRVVEGQLQRSKKSVTLRGLNQDHNRDLKDIFKGAATKVSSSNSGPFHDFYEHLLAQGRKPTMARLTLARKIAAITLIVWKKEVRFDASYLKSQTA

SEQ ID NO: 270769 - protein, 354 aa, unidentified
MERYLGLDAHSRSCTLAVMGSSGKRLKCLVVETNGHALVEAVQSIPGRRHLCLEEGTQSAWLYELLRPHVDELVVTVPSKRKGERKDDERDAWSRANELRTGAIETRVYKAPQHLAALRSAVRAHGFAVRDVVRAKNRLKAAFLSRGVVTDSTVHDTKRREAWLKQLPTVHRRLAEWLGRELDQLEPLRQEAEDWLLQESKAHPIIRKLATAPGMGPIRTAQVVAIVGSPERFRTRRQFWSYSGFGVVTRSSADWVPGPGRGEWKRAQVRQTRGLTRKRNPLLKSVFKGAATTLIQHLPNDPLHADYQRLLESGRKPNLAKLTLARRIAAMVLSMWKHQEVYDPKRIKAATVKA

SEQ ID NO: 270770 - protein, 324 aa, unidentified
MSDSILGIDVSKETLDAYCARGQRKQGRTFPNSPDGWKLVRAWLKAMGNKQAHVCMEATGRHSLGVALALHEAGHVVSVVNPAQIRDFARTKLGRNKTDKVDAALICEYAELFKPEPWTPPSPAMRRLRELQTMRAGIIRSRAEWKNRIGSGLGDSTATKLAAATIDHFTSQLEAIDRAIGKTIEQDAELRGRRDLLLSVIGVGETLAASLMAEMPEPGVLRRSGEMVAYAGLNPSHHRSGTSIDRPTRISKIGNATLRSSLYMPALSAMRFNPAVAILVARLKSAGRLKPKQIVVAAMRKLLVLCFGVLKTGKRFDLAIAMPA

SEQ ID NO: 270771 - protein, 412 aa, unidentified
MYEKAAGLDVHQKTIVACVRKMQPQGGITDEVRTFGTMTKDLLEMSDWLANEGVTHVAMESTGVLWKPVWNILDGGQFELLLVNPRELKRAPGRKSDVSDSQWIAQLLQCGLLRSSFVPSRPLRELRDLTRQRTQLTREQTRIVNRIHKTLEDANIKLGAVASDVVGKSGRAMLQALVAGERDPAKLADLAKGRLRGKILQLKDALQGNLTEHHVFLLRTLFEHLQYLEQQVDAYSQRIDACLHPFLDPEQLQRLDEIPGVNRRTIENVVAEIGTDMSRFPDEQHLSSWAGMCPGNEQSAGKCTRRRTTKGDSWLRSALTEAAWAAGRTKESYLGALFRRQSARRGKKRALIAVGHTLLVIFYHMLKTNVPYNDLGPDFFERLKPEQYRRYLVKRLESLGFSVELKPRDKAA

SEQ ID NO: 270772 - protein, 359 aa, unidentified
MTSMQDAPRRRRVVVGVDTHKHIHVAVALDELGGRIEARSFAADRSGYEQLIDWASSLGREVMFGVEGTGSYGAGLASAIRRRSIGVLEVLRTDRRDRRLRGKSDTIDAENAARAVLNGQASAVPKSADGTVEMIRLVKVAKDVAVKARTSAMISLKAVLVNAPAELREQLQPLTKMALIRRCAALRPGPVTDPMTAAKHTLRAIARRWLALDAEIKAHEQVLNRLTTELVPDLVAAFGIGADIAAEMLIVAGDNPERVRSEPAFARLCGVAPIPASSGMTTRHRLNRGGHRQANTALYRAVIVRLQYHQPTQAYYQRRTAEGRTKAEIIRCLKRLLAREIWSYLRPLRQARQPLILAA

SEQ ID NO: 270773 - protein, 452 aa, unidentified
MPSIRPNAIRIKRFRELKADLRTQRDRLLVGIDIAKAQHVAQVRLAHTRLLDKRVGIPNTEAGFEGFWGHLQARRAAVGTTEIVCAVEPTGTYHEALAHFLEAHGADVVLVSNTVAHHNRRTLDGTWGKSDPKDAHNLCELLERGLVVFYSLPDSRTAALRRLVRLLRHARTDLAACKARFRNTLLPLLGPAGEPLPAARVASLPAPLQALLPRAQRTDRGAGAAGPPALAFECTELAARLVSVRARSAQIEAELVRVAAPLPVSARLRTIPGIGPTVAAILLAEIGDIAWYTQFSQLRKLAGLDIQRVQTGQWAGTARISKAGRPLLRWALYQAALGACRTPGWRARREALIAKRAGDPHAFFKATVELAAKLLRLVWGVWRSGQPYDPQWGQRGPAARPAIAPRAARAGRRGAPPSPQGQAAIGEPRASQAGRSSATRPLSRGKGTSRRV

SEQ ID NO: 270774 - protein, 352 aa, unidentified
MTKRARVVIGGVDTHGRTHHAAVIDQHGRLLGDAEFGAHTDGYRQLLRWLGRHGRLQAVGVEGTGTYGAGLTRFLLDQGVHVLEVDRPDRKTRRQRGKSDPIDAEAAARAVLAGTATALPKRRDGIVEAIRALRSVRAGAVKARTAAINQLKAVVVTAPAAVREPLDGRSTARQVAACARLRPDPEQLADPVQATKAALRAVAVRILSLEQEIRVADQRLAQLVAKAAPRTLGLLAIGIEHAGQLLTTAGDNPDRLRGEAAFAHLCGAAPIPASSGRSQRHRLHRGGDRDANCALHLAVVVRMRYCPRTRAYVERRTKEGLSKPEIMRCVKRYLAREVYHAILADFEALHAT

SEQ ID NO: 270775 - protein, 428 aa, unidentified
MNYNTQNAKIASITEKTLIVGIDVGSETHYARAFDWRNYEYTRKPLEFSNTEAGFQTFKAWMEDIAAKHGKTAVIPGMEPTGHYWFALGKFLQDTGMKPVHVNPHHVKKSKELDDNNPNKNDRKDPKTIAALVNEGRFSYPYIPTGIYAEIRSLSNLRFQTQDELTRIKNRLARWFAIYFPEYKDVYGDLKAVSGRMVLKEAPLPEDIRKLGVEGVNRIWRDAKLRGAGMKRAKTLVTAAEHSVGSTEAPEAARMELKNLLADMDVYTARQEELLRNIEEKLKKIPYIDNLLSIKGIGMVTISGFIAEVGDIGRFDNPKQLQKLAGYAIVANDSGKHNGESRISYRGRKRLRYVLYEAAVSLVGKNAEFREIHEYYRTRKENPLKKMQSVVAVACKILRIFYTILTKGVEYDPEKLLGDIRRPQVRAA

SEQ ID NO: 270776 - protein, 435 aa, unidentified
MCYVDDSRLEQFRLLKKEIRGSEEYLIIGIDVAKEKHRAFFGTAQGKTLLKNLIFDNTIEGFEKLDMHVKRVKVQYSLPKVVFGIEPTADYHKPLAEHLLKCGLMVVFVGGMAVKNNRQLLNGRWDKNDDKDSANIADLIAQGKCMFYEYPLMTLQNVRVLNGLKRRLKKREHGISAYIRNHILAQYFPELDKYYGSLETLAVVRECLDPSAIAGMEYDDFCRTVAPGKMTLAQGRRVGAIWRTAVNSVGCTMGEAAFHEAQIAVDSLKRVRQEIKTVDDKLENACLEFPEYTYLLSIPGFGPDVSAKVLGAIGDPHRFTSGKQVLRLAGLDLCAKRSGKTSNGATPIISKQGKADLRCALYQAAFIASIKSKDFIPYFTNKLAGRVKEKGIGTKMRVKLAAKLLIIAWTLMKKKECFDSNYLKLGDREERKAAA

SEQ ID NO: 270777 - protein, 327 aa, unidentified
MKHIGIDVSKRKLDLHVLETEVFKTFDNDSKGQKALCKYVRKRGEARVVLESTASYGTAIAELLHEEKRTKVYVANPRMTKAFSRSLNMRAKTDRLDAAMLARFAQVADIPEYVPPSEPLKLLRALTTRRGQLVKTNAKEKVRLKEAEHTGHVPPVVVDDMRAHIDYLNGSIERTEKAIDEHVKAHPDMSEVFELLTVASGIALVTAATIIAEIGHLPKDMTAKQVVAYAGLDPRTFQSGNMDARRRITKRGNKRLRTAMYMAAQNTSKYDDNVRAWRQRLLDAGKPPKVANVAVARRLLHAVHAILKNRTPWDGDRFYKLPEANRA

SEQ ID NO: 270778 - protein, 429 aa, unidentified
MNSTQNKKIEQVKETTMIVGIDVGSEKHYFRAFNWRGIELTRKPVAFSNSMEGFNSFYNTIVELMQKSELEEALVGIEPTGHYWFDLGQFMGEKSIKFVMVNPHHVHKTKELDDNSPSKNDRKDPRVIAGLVRDGRYFYSYMPTGVYAELRNASNRRFVLVEEQTRAKNRLQKWIAVYFPEYKGIYTHIDAKGGLLVLKQAPTPEEIVKLGEEGIIKIWKDAKLRGNGNKRALKILNAAMRSIGLRTGLTEARMEIQDLIEDYELQTKRLERVNDLIKELCQQIRYADKLLEIKGIGITTVAGFIAEVGDITRFDSTKELQKLAGLELVADSSGKHNGKTKISKRGRKRLRYLLFEAAISVVGKNEEFKEIHRYYTTREKNPLKKMQSLIAVACKLIRVFHVILTKGVSYDASKMLEDIRHPGEQLKAA

SEQ ID NO: 270779 - protein, 417 aa, unidentified
MLKIVNRNCAGIDVHKKIIVVTIAKTNEQDITEYQTKSFTTFTDDLIKCRDWLVSNNTLDVCMESTGKYWIPVFNILEEKCHCIITHPKYVRTILGKKTDKKDSIWIADMFKHGLVEPSFMPPADIRQLRDLMRYRNKLVNVRSSEKNRFQNSLTMSNVQIANVVTDVFGKTSQSILKLMLTNPNLTLDDITPLLRKNLKSTPEDILKSINGNFDESQSSKMNIVLKHYDSINECIDELEEQILKLAVKYSTEINQILTIPGINEISAIFIIAEIGTNMNNFVDDKHLCSWAGLTPRCNESAKKKKSVRITKAGVYIKPLLVQCALCAIKDKSCPYIKARYESIKRRRGHKKAIIAIARLLLTSIYHILLTGEVFDYERFEKLMNRNFKSHNKIQNTPEEMISYLTNLGYNITLQNT

SEQ ID NO: 270780 - protein, 327 aa, unidentified
MAHYIGVDLHKAFCQVCAVEADGTRAWERRYPTTVAGLATLSAQCGATARVAVEASGPTWWFVDQVRPHVQAVVVVDAGRTRLKAGYAAKTNRLDAYRLADALRRDSVVAVWYPPPALRDLRELSRYRISLVRTATTLRQRLRALLLRQGVTVRAADLSSPSATAALQQVALPGWAARGGQGLHALLGEVLTRLAPIDAAVTDAGHADPIVRALETLPGIGVILGVTIRAEVGAIERFPSPRHLASYAGLVPRVSGTGDRIHYGAITKRGSAWLRWALVEAAIHGTRRRDRTGRWARGVALRRGRLKARIAIARALCTEIYRTWPRG

SEQ ID NO: 270781 - protein, 413 aa, unidentified
MIVLGADAHKRSHTIAAVSATTGELVGERTVQVGARGFAALLSWARALGGERVWALEDCRHVSGSFERFLIGRGERVLRVTTRLMAASRRNVRDRGKSDNIDAIAVARAALREGLDALPAAQLDGPELDVRLLVDHRERLIRQRVALNNTLQWHLHDLWPELELPGSSLFYGRWAPRVARRLARAEQTMRVRIARDELRRIRELSQTIKALEREIAALVGEVAPQLLTEPGFGPLTAAKLVGEVAGASRFASDAKLARAAGVAPIPVSSGKTNRHRLDRGGNRQINASIHRIAVTRLRCHPETQDYIARKRSEGKSTKQAIRCLKRHLARRIWHLLQAPHPDRATPPSPSNFLTQERRKQQRRGRCAVPKHRSAQSHGDQHSAQRSGDSPCDCTLRAAGRPVPGRRHCRPRHP

SEQ ID NO: 270782 - protein, 368 aa, unidentified
MPTLAYLGLDVSQESARVCFLLADGEEPRPRWTIPNTQPGAEALSCELARLCFLYQVDQLRIGLEATGLLWWHLACALKDAEALAPFRPQIYALNPQLVETFRKNFGALPKSDHADAFLIAERIRYGRKLPSPFQLDTRYAPLQRLTRFRCHLVQDVAASLQRAARDSYRLDKVLQEPLRLVLATTMASIRSLQQQLKTLDKTIAQELATIPQTLSSVPGLGPVWTAGLIAELGDIRRFDDQGAIAQYAGLTWPSAQSGEFAAEDTEMSKRGNSYLRYYLVEAANSVRTHCPEYTRYYAAKYAETPRHAHKRALVLTARKLVRLIDVLLREGCIYQPPQQRAPAPPATQPHNKRPGPQRRSKPLRAGT

SEQ ID NO: 270783 - protein, 393 aa, unidentified
MICVGIDVAKDKHDCFILSSEGEILADVFTIPNNAEGFDTLLHTIRRCARPEDKIKVGLEATGHYSYNILGFLLNKGLPTFVINPLHTNLYRKSLSLRKTKTDRVDARTIAAMLMSDVDLKSYTDTAYHNEELKSLTRYRFDKVRERAKLKQSVSRLVTILFPELEKLVPTLHMASVYALLSEFPGAKQVAEAHLTHLKTVLSNASKGRYRRDMATTLRDTARCSIGSVMPAKSLELQHTIRLIRELDAKIEDIEAAIRSMMEEIHSPITTIPGIGVRMGAMILAEIGDFSRFDSPDKILAYAGMSPSTYQSGQLSLSGTYSHMEKRGSRYLRYALYNATKYVCLWDPTFAAYLPKKRAEGKHYNVALSHAAKKLVRLIYAMEKSKQSYRNAA

SEQ ID NO: 270784 - protein, 435 aa, unidentified
MPRRQRRTTRAVTTPVLHPHAAGIDVGATELYVCVPLDRDPQPIRRFGTFTEDLRAVATWLTQCGVTTVAMESTGVYWIPLYQILETRGIEVCLVNARHVKNVPGRKTDVQDCQWLQYLHAVGLLRGSFRPPETVCAVRSLLRHRAALVQLAATHTQHLQKALTQMNLQLHHVLSDITGVTGLAILDAILAGERDPQVLAGHRDRRIKASSETIAKALVGDYRSEHLFTLRQSLDAYRHYQRLLGECDGEVQARQPRKARGTPGFDLRTELYRILGTDLTQVPGLQTPTVHTLFAELGADLSAFPSGAHFASWLGLCPDNRISGGQVLSVKTRHVKHRVAYALRLAAYSLSRSQSVLGGFFRRLRATLGAPKAITATAHKLARIVYHLLTTRQPYEESRLAAAEADHRRRTESRLRAQARVLGFQLVPVVEQSVS

SEQ ID NO: 270785 - protein, 403 aa, unidentified
MAIRLEVWVGIDVGKSMHHACAIDTDGKVLFSQKLGNDQRAIEQLIARASAAAQRAQWAIDLTSPMALLLITALLAADQSVTYVPGRVVNTMTHGFRGEGKTDAKDARVIAETARLRRDLTEVTMPDELAVSLTQLTSYRADLMSDWVAGINRLRALLGSIFPALEAAFDYSNRTPLILVAGMCTPAEIRTAGIGGVTTHLTDNKAWGPAIGKTAATAVAAADAQDLVLPGEADAAMLVKRIARKLLDLDREIKDTDKLITARFRRHPWARIIESLPGMGPGLGAEFLASTGGDLASFATAGRLASYAGLVPVPRDSGRVSGNLRRPKRYNRRLRRVFYMAALSSLRTQGPSRRFYDKKRAERLIHTQALLALARRLVDVLWALLRDGREFTLDTPNPVTVAA

SEQ ID NO: 270786 - protein, 316 aa, unidentified
MTTTAVVVGVDVAKDRLDVAVRPSGEVWSEANDETGITTLVGRLRPLRPALIVCEATGGFERAAIAALAAAGFPVVVANPRQVRDFARATGQLAKTDQLDAAILALFAERVRPTPRPLPDAAAQLLDAVLTRRRQLLEMLVAEKNRLGFAPKPLHRGIQAHIRWLERQLDDVTKELAGLIEASPVWRAKDDLLQSVPGVGPIVSSTLLGELPELGTLSHKQIAALVGVAPLARDSGTLRGKRLVWGGRASVRTALFMAAMCGRRWNPTLKVFYERLKAAGKPTKVALIACARKLLTILNAMVRDQSPWTSNVQYSC

SEQ ID NO: 270787 - protein, 353 aa, unidentified
MGRKETAVYDHKDIILAVDYHAENTEVRRLNCCTGEERRLNIPTTRIGILRLVEKAVGEAAQVGGKVIWIMESTTGWARVKELIGSRVQFIMANVLQMPLPPKAYRRKSDKIDTGRILREFLNGSLPRSYQPVSRWRELRRLVDSRQDLVERQTAVKNWITHFLHHETWGDRDGLWTLKGLKRLGGLNLSASDRMVLNLKLQELEQLADRRKQMEAAMQAAYDQWPEAQHVDEVRGIGMVTAVSILAHIGSIRRFGSAEDLISYAGLAPGHRQSDGTRHNSRIGGGGTDSHLRYLLIESMQWVCQIPRYRDAFDRAVTKHGKNIARIIVARMLLRSIFKMLRDGVRFNQVSAA

SEQ ID NO: 270788 - protein, 360 aa, unidentified
MMVLGCDPHKRSITCGAVEAATGVARGARTAAARVDGFDVLVRWARGLDRERVWAIEDCRHVSGRLERFLVARGERVVRVAPKLMAGAREGARTRGKSDAIDARAVARAAVREGVGTLPTAWLDERALELRLLVDHRDDLVGARTRDQARLRWHLHDLDPTFTVPPRALDRPIWWRRVRARLEQEPTGVRVRIALELLDQIRGQTTSIRALEAELARRVHAYAPRLLAERGCGPLTAAKLIGEIAGVERFATDAKLARNAGSAPIPASSGNRTRHRLDRGGNRQLNCALHRLAVNKGLWDPDSAAYLARRQADGKTRKEALRCLKRHLTRRVWQLLRTPPPTQPAVQTHCNMPTHALALT

SEQ ID NO: 270789 - protein, 361 aa, unidentified
MAKSTTIVAFDQHAATTVAAVLLPGQRTPALHTLTSDSPTILRFVQRLRATSVECCYEAGPCGFELQRALTGHDIRCDVIAPALIPRRAGDRVKTDRRDASQLAVLYRAGALTAIHIPSEQEEAARDLLRCREDIRADLLRARHRLSKFLLRHGRRFTGTKKAWTTRHTAWLQAQRWPIPALEQTHLAYMRAVDDAVGRLHAVDTELRDLLTIEPLRARVERLRCFRGIDDLTALTIAVELGDARRFPSAPRVMAFTGLVPSEYSSGAKQARGRITKTGNAHLRRVLVESAWQYRHHPFLGRALRLRQRGAATAIIEQAWHAQHRLHRRYRRLAARGKAKQHIVTAVARELSGFLWAALTH

SEQ ID NO: 270790 - protein, 383 aa, unidentified
MPRYWGLDLHAQYVHVCEWRPETQKEKHSRFPNTPDGWARFLQRLSPDDRVALEVTGNAFEVYDWLSPHVAQVLLANPVELRRLGSGRHTDRVDAARLAKMLAMGTLPTVWVPPQPVRELRRLLRYRERLLNVATRWRNQIRAVLRRYGEQPPRGVDLGAFLTPERLGAFASGDRAIVVSALRQLQCTQEECTAIEAEIAEHLARTPEAQVLLTMTGVGPITAAAIWAALGDPRRFRTPKQVARYAGLDPSVYQSGETYFHGKISKNGNPLLRTYLIEAAHILARFDNGPLGQFYHRKRRQLGHKRAVVALARKLLIVAWRMLLTGESYRYQRPKTVQNKMSQLRGLRRHQRNWEDVMVTVLAKPQERARQSRMKGYRTEVPA

SEQ ID NO: 270791 - protein, 333 aa, unidentified
MMNMHSQGRVASEATRPNAGIDVSKEHLDVHLLELGMRVDNDASGWEPLIAKLKESDVDLVVVEASGGYERGLVTALHRARIDVARVNPRQAREFARSMGVLAKTDRVDARCLRDFADVLARHKDRHKYITVPADPERELLAALMTRRRQLVDMRVAEANRLEGATARTVRSIRSVIKTLDKQLHDIDGDIDQHLERHFKPQKELLDSVRGVGPMTILTLTSALPELGRLGRRQIAKLVGVAPLADDSGRRKGVRRTAGGRSEVRAVVYMATLTAIRHNPVIQVFYSRLVAAGKPKKVAIVACMRKLLTILNAIVRDQAPWRTDAGITSSRST

SEQ ID NO: 270792 - protein, 340 aa, unidentified
MVIVHDEREIMKHNHVGIDVSAKTFTTIIDCEGTRTEAFDLPNDPKGFKKLIRMITKKGFTAQVVLEATGNYSLDLALALHRAKRIEVMVANPRAVALFAGAFLRRSKTDALDANVIVEFSIRMPFEAWKPPEAHCFNLRAISRRIEALTKSATQEKNRLHAAMTFDEMSEIVRNDIEVNIRHLERRIERLREQARELISQYPDLERAFLHMISVKGIAQAAGIQILAELSILPKDMDVRQWVAHAGIDPMQFQSGTSIDKPSRISRRGNVHLRRALFLPALVAAQHEPHVTAFYQKLLGRGKTKMQANVAVMRKLLHAIYGMLKHDRDFEGEKFYVIGA

SEQ ID NO: 270793 - protein, 318 aa, unidentified
MSSAAPAFVGIDVAKAELVITIRPSGEHWTIANDVAGIHTLVQRVRGHAPTLIVLEATGGYERAAVAALAAAQLPVVVANPRQVRDFARATGQLAKTDRIDADILALFAERVRPAPRALPDDAAQALDALLTRRRQVLEMLIAERNRLEHAVPTVRRGITQHIRWLERQLADVDRDLDDTIQASPVWRAKENLLRSTPGVGPVLSRTLIGELPELGTLPRKQIAALVGVAPLARDSGTLKHKRLVWGGRAPVRAALFMAALVGTRCNPVLRAFYRRLLEAGKPKKVALTACMRKLLTILNAMMRTNTAWRHIDLSPTT

SEQ ID NO: 270794 - protein, 311 aa, unidentified
MTLPQTYIGVDVAKDWIDVCDPASSRQERIQTDRRSLRSFAATVGSSIVVLEASGGYERPVMSALFEAGRLATCVNPRQAREFARATGRLAKSDRVDALVLAEMGRALQLAPASPRSAERQRLSELTGHRAGITTMIVAEKNRLRTAQDPWIRRNISQHIKTLQASLAKAEAEMEAVIQEQCDLREQAARLRQVNGIGPVVSATLIAQLPELGQLDRRRIAALAGLAPHANDSGHRRGKRSIWGGRGTIRRTLYLAALTASRFDPRFRAFKERLLAAGKAKKPVIVACARKLLTVLNAMIKTGTAYRDAIV

SEQ ID NO: 270795 - protein, 310 aa, unidentified
MEHTTVVGIDVSKDRLDVHVLPSGEAWAVSRDADGLAELCRRLAGMSGVVALEATGGYENIVAASLSSAGLPLVVVNPAQVRAFAKALGQRAKTDPIDARVIARFAEATKPMVRPLPDQATRMLAGLLARRRQIVEMMASESQRLRRSEMPRVRKSIERLLVALKRELADIDHDIDDTVRGSPVWREKEDLLASVPGIGPIIARTMVADLPELGTLGRKQIGALAGLVPFVRQSGQWKGHAHIGGGRPTVRTALFLGAQVAKRHNPVLKAFYERLIAAGKSKMAATIAVAHKLLIILNAILRDKKPWQAA

SEQ ID NO: 270796 - protein, 354 aa, unidentified
MLIGKESNLNPWRCYIKLYAGFDLHSNNSYLGIIDENGGRVFKRKLRNDPELIVTVLNPFKSDIEGIVVEYTFNWYWMVDLLSDKGYQIHLANPSKIQQYSGLKYSDDKHDAFWLAEMLRLSILPEGYIYPKEDRPIRDLLRKRGHLVRLRTSLIVSLQNIIARNGGEKLKGSDIKVLKTDRVTPLLQENEDIALAGKVSKEAIDFMTRQIKAIEASIEGKMQLSSPYDRLLSIPGIGKILALTIMLETGPIGRFPKVGNYTSYCRKVPSGRFSNDKKKGTGNRKNGNKYLSWAFAEASERARFYDSEARKYFTRKRQKTNAPVAHSALAHKLARAAYYIMRDEVVFMPDKAFA

SEQ ID NO: 270797 - protein, 399 aa, unidentified
MNAVGIDVSKGKSTVAIMQPFGVVAASPFEVSHNGQELKELVERVKLLPGETKVVMEYTGNYYEPIAQYLHNEGIFVSVVNAMLLHNYSGNSIRKAKTDKKDAIRIAQYALDRWLDLREYIPDDEIRRSLKLLNRQYTTLCKVKTMLNNNFISLVDQSFPGVNKLFTSPQRSSDGHIKWVDFVIKFPHCDCVRGIPRSAFKDKYYRWCNKNGYYYSDKKADTIYDYSKTLIATLTNSDYIASLIGQSATQLNCACETLSELQKQMTALSQQLPEYDVVMEMFGVGKVLAPQLIAEIGDTRRFHSRKAITAFAGLDAPPYQSGNIDVKSRSISKRGSPHLRKTLFQVVDVILKNSPADEPVYSFLDKKRAEGKPYKVYMMAAANKFLRIYYAKVNEALNT

SEQ ID NO: 270798 - protein, 343 aa, unidentified
MHIASIGIDLGKTTFHLVGLGERNKIQLRKKFSRSQLLAYTANLPPSLIGLETCAGSHFLGTVLRQQGHEVRLIPAQFVKPYRKSNKNDFIDAEAIAEAVTKQNMRFVQIKTQEQLDWQAMHRVRDRLVQRRTALINEIRGFLLERGITFAAQPIHLRKNLPTVIEDAEQNLTPRLRWLLNRLWQEWKQTEIEIKAMTEEIERISNEDTRCRQLRQIPGFGPLVSTATVAAIGNGSAFRRGRDFAAWVGVVPRQFSTGGKQKLLGMSKRGNIYLRRMLIHGARSVLFRVKYEMGGFGQWVHRLAQRAPRNKVVVAIANKLARIAWAVLSSGRDYRHQPLQLAA

SEQ ID NO: 270799 - protein, 369 aa, unidentified
MKTDKYIGLDVHQDTTVIAIAEKGREGEVRLYGSISSDLQALEKLLRKLGGDDVTLHVVYEAGPTGFVIYRRLQQLEIECAVVAPSKTPQGKGPRQKTDQRDALQLARLHRAGELTPIHVPDAVDETIRDMTRARADAVDDLRRAKQRLKSFLLRHGYRYKGKANWSEAHQRYLRELVLPMPALKAVLEESLLAIDQATQRLARLDDLLAAQVPQWRMYPAVQALMCLRGFQLTAAAILVAELGDIRRFAHPRGLMAFLGLIPQENSTGTTRRQGSITKAGNAHARWILIEAIQHALLPPKVSAPLALRQSGQPQPYKDLAWKIQLRLHKRGWHLLRRGVMKAKVNVALARELAGFVWALLGLVPAPKA

SEQ ID NO: 270800 - protein, 381 aa, unidentified
MRQVCGLDVHKDSVFVCILNENGIVFQDKFGVLTPELEHLASVLQEHDVGEVCMESTSIYWMPVWRVLEPYVAELKLVNPYFIKQLPGKKSDVKDAEWIATCLLKDLIKGSYVPADIIQQLRQYDRRIFDLNAECVRKLCKLDAALQRCNIRISNYVSTTDSKGYKEVVRLISEGEIDPEVLIKAIHGRTINRVGKDVILASLSGVISEADVDIIRQLREEIDLAQRHRDECQSRMDAVCRQHFPEQLKNLQTIPGIKGRSATAIIAEVGTDVSSFQDAAHLVSWCGLKPRNEESAGKIKARSITHGNRFLRKTLIECSWAAAKTQGCFLNKFSYYQTVVRKKNKMKVQVAIARKILTAVWYVMHDNVAYRDYIPDIVPAE

SEQ ID NO: 270801 - protein, 388 aa, unidentified
MIYVGIDIAKLNHYASAIDSDGVVLIEPFEFLNDNAGFYTLLSKLNSFELDDIIIGLESTAHYGNNLVSFLVTKGLHVCVINPIQTATLRKNNIRKTKTDKVDTLVIAKAVALMDHPRFVTLYDIALMQLKNLGRFRMKLVKRRSRTKIQLTAYLDQVFPELQYFFKSGIHQKTVYAILKEAPSATRIASMHLTHLKNLLVSNSHGHFKKETALELRVLAQKSVGTADRSLSIQITQSIAQIELLDSQLDAVESEMKDIVTSLDSVIMTIPGIGPINGGMIIGEIGDINRFSKPRKLLAFAGLDPSVYQSGNFIAKKTKMSKRGSSALRYALMNAAHNIVKYNQTFKEYYDSKRAEGRGHYNALGHCAGKLVRIIYKMLKDDVEFNLD

SEQ ID NO: 270802 - protein, 364 aa, unidentified
MNKCHSNTELSSHEGTRCQFNGGTGAIKLGIDVHQEFYVVVVQEGGANPKPPQRFRKEAFLHWATKLARCGTEVHAVYEACGFGFALQRQLSALSIQCHVVCPQKLDEQNRRVKTDGLDAKALCLKLDRFVEGNSSALALVRVPSEEEERSRAIHRQREQLVKARKQLEAQGRSLMVNHGLEPVQNWWKRGNFVALQVPTWMKELLGNSQPILLTLQEKIIALTLQLQSAAAPKQPRGLGLMTSVIIDREIGDWHRFSNRRQVASYTGLCPGEYSSGNTRLQSCVTKHGNPRLRAALVELAWRLVRFQPNYKPIIKWRRILSKGALATAAVRKKAIVAVARQLAVDLWRIKTGRLSAEELGLIN

SEQ ID NO: 270803 - protein, 383 aa, unidentified
MKSVCGLDVHKDSVYLCILSEFGELIEKVFGVLTYQLEEMRDLMLHHHVVEVSMESTSVYWIPIWRVLSPHFKLNLANPYFIKQLPGRKSDVKDAQWIAECTMKELIRGSFVPPETIQQLRQYDRRIFDLNEEIVRKLSKLDAVLQRCNIRLSNYVSNVDSKSYKAVVRAISQGITDPEELVKLIHGRIINHHGMDVITASLKGVVSLAEIDMISQLRDELDMAEAHKEKCQARMLEICEREFPEELKRLQTIPGIKERAATSLIAEIGTDMNKFETANHLASWSGLKPRNDESNKKIKSRSITHGNVYLCKTIIECAWAISRTKDCFFSRFSYHQTQVRKKNKMKVLVAVARKMLIAVWHVLHDNTNYIDFTTDRKTSQTRG

SEQ ID NO: 270804 - protein, 353 aa, unidentified
MNRDTNANKNAAGDVSSTPAAAATAAPAPAPARAVGVDVSRDKLDVALPGNDAVQSFANDAAGVARVVGLLSALSPALAPSCVVVESTGGLERPLVEALLEAGRPVALVHPGRVRYFAKGLGVLAKTDRIDALILRRFGELAAPRLLARRSRSEAELRDLVACRRQLCQTRAQQFNRRATTASKAALRSIDAVVAALDRQVESLERRIRDLLDADDDFRHLDGLLRSVPGVGPALSATIAAELREAGHTDRRRVCALAGVAPFADDSGNTRGRRRIRGGRTAVRCVLYMAALAAMRFNPVIRAFADRLKAAGKPGKVVVVACMRKLLTLINAMLRDGLRWDQLDVVKKLAPTG

SEQ ID NO: 270805 - protein, 285 aa, unidentified
MLYLGIDQHARQITISLRDDGGDVLQARQVSTQPDKINAFFRQLTRERLHDGESFVAVLEVCGFNDWLIRMLQEYRCHKVILIQPDQRKKCKTDRRDAAALSELLWVNRDRLLQGKPVRGLRQVDIARGTDQENRRLTTLRKDAGQARTRLVNRVRHILRRHNLQWQMPTKKFPTKAGIAWLKQLALPEIDRLEMNHLLADLERVQGRRKELEQVIAQRCGVSEEAVLLSSMPGVSYFTAVSLACRVGRVERFPRARSLANYWGLTPGCRNSGENTPPTIWPTPV

SEQ ID NO: 270806 - protein, 339 aa, unidentified
MKLYAGIDLHSNNSVVSLIDEHDRVVAEKRLPNELERILLFLAAFKQALVGIVVESTFNWYWLVDGLMEAGYRVHLANPAAIQQYEGLKHTGDEHDARWLAHLLRLEILPEGYIYPREARGVRDLMRRRMQLVDCRSQQLLAMQTQIMRSRGHSMRVSELKALELEQIEALVKGERNLSSALRANLAVAQALTTQIERLEGEILGQVKLAAQFKPLLSMPGVGNILGLCIMLETGEIGRFPGVGNFASYARCVDSHRVSNGKKKGVGNAKCGNRYLAWAFVEAAHFAVRYNARIKRFYERKAAKTNSMVAIKAVAHKLARATYHIMRTHERFEEARAFA

SEQ ID NO: 270807 - protein, 400 aa, unidentified
MPFHAGLDWGGASHAACIVDGTGRIVARLDVRHDANGLADMAARLQRIAPPAELPIAIERPSGLIVDALLAAGHPVIPIHPNVVKACRPRYRAAGGKSDADDAYMLADILRTDGHRFRPLIAASDEIKALCALVRGRGDLVAQRVALANQLRSLLEDFWPGAAAIFSAIDSPITLAFIGRYPTPNSANRLGEKRLASFMAQHAYSGRYSAAELLARLRAAPTGLAGDAEVEAKGEIVSALVAVLGRLVAEIARVSSRIEHAVADMADGRIVMSFPRAGRINAAQILAELGDVRERFPTEDQLAAEAGVCPVTHASGKSRGVVFRWACNKNLRLAITCFADNSRHACAWAAAIYNKARQRGCGHAHAVRILARAWIRVLWRAWQDRKPYDPSLHRAAASLA

SEQ ID NO: 270808 - protein, 383 aa, unidentified
MVAAIATGSGQVLSTISWKAPMQNAKVIELLKGFRGVGLKVQTVLESTGTYGDVLRFALENADIPVYRVSGKRTHDAREVFDGVPSLHDAKSAAILAKLHAEGLSSLWTQDHGDRRQLSAAIAIMDLHQERYLQLVHRLESWLARHWPESTSIFDLTSAALLALLARIGPPADVAMQKKASFRLMKGMGHGLIDEGKIESLLDTAATTVGVPCEGLERDALMAIAGEAHKSIRAYKGAKLAVERLSVNTAANTMAPVVGKTTAAVVFAEAGDPRDFKSAGAFVKAMGLNLREKSSGMTTGRISITKRGPNRVRQFLWLAVHRWVQSDPLAAQWYQRKRQRDGGFGAKATVALMRKLAKALFHVARGATFDSRLLFDREFCKPA

SEQ ID NO: 270809 - protein, 342 aa, unidentified
MEIVYVGLDMGSSGFQQVAIKTDGSIKVNRSFTTSEANLRAAFADQRGEIRVHLEAGELAPWAASIIAPLVTRVVCSHPKDNAWIAKDADKCDRVDAFKLAELLRLNRFKEVHYAPDQPRRNFKQLVQHYDELTGQQARLKTKIKARLRMQGVIVRGERLFSSKGRQEVLTRVESRDLRTAIKQLYEVLDQSVTAQEQARLLMLRAAQAFPEIKLFRTAPGVGPIGACRYSAYIHTPSRFSSKRKLWKYCRLSVSHRSSNGKPLRRPRLDYSGCGRLKDVSRKAFDVAIRSRQDNGFKRTYQRALETTHDKTHARLTVQRKIVSTLRAMWITRTPYCDELSR

SEQ ID NO: 270810 - protein, 331 aa, unidentified
MNYSHFVGLDVGKKTFDASLMSADEKELSHKSFDNTPEGIQSLLDWIAGYHLSLSKLLFCAENMGSYVTELSVSSVSMGFSLALVCPLTIKKSIGLQRGKNDRIDAKRIANYAVLHYRKLELYKLPNKDLVRLRGWIIIRDNLVKQKVSSIKLLETFSQMAKLADVTESISFLEEQLKSIKEKILEVEEDMEQLIAASTSLYTNYLLLRSIKGIGIINAIVLLCVTDNFQRFDNPRKFACYCGVAPFERTSGISIRGKTQTSPLANKEVKVYLTRAAITAISWDPQMKAYYKRKIAEGKHKASVINAVRAKIIARSFAVIRRQTPFVTLAV

SEQ ID NO: 270811 - protein, 342 aa, unidentified
MEKVATIGLDIAKSVFQVHGVSEDGEVLVRRRLTRARMLPFFAKLPPCLVGIEACNNSHYWARELIALGHDVKLMPAQYVKPYVKRGKNDAADAEAICEAVTRPTMRFVAVKSPEQQSLMMLHRVRLMLNRQRTQISNAIRAHISEFGVVAPVGRLGVERLLEVVADAGDDRVPEDARLCLQMLAAQLEVVKRQILENDRRVLASARRTELGRRLMEIPGVGPLLASAFVASVADPTVFKTGRDLAAWIGLVPKQNSSGGKDRLGSITRAGNRHLRQMLVVGAMAVIRYAERHGTRRPWLVQLLARRPAKVAAVALANKNARMVWALMTSGERYREPMPIAA

SEQ ID NO: 270812 - protein, 401 aa, unidentified
MNAVGIDVSKGKSMVCVMRPFGEVVLEPFEVLHTAQNLRDLAEKLKALDGETRVVLESTGNYHKPVAFVLHDAGLFVSVVNPVLIHDYDNNSLRRVKTDRKDAVKIANYTLDKWTRLRQYLPEDDTRLALKNCYRQYQQAVAIRTMLKNNLISSLDLTFPDANKLFSSPVKNNGCEKWVDFIGDFWHSECVSSLSANAFAKKYLKWCQKHGYVFTRSKSDEIYACAVNSASLPKSPTSKLLIQQQVAQLKAVSQSVAAFRQEMLRLSQQLPEFDTVMEMYGVGPSLGPQLMAEIGDVRRFSSKKSLIAFAGIEPQPNDSGKVVGNDKGISKVGSAVLRRTLFLIMTVILQTQPQDEPVFQFMNKKRSEGKPYKVYMMASANKFLRIYYAKVKAVMDSERSQ

SEQ ID NO: 270813 - protein, 408 aa, unidentified
MRLYVGDDWAEDHHDVEVMNEAGKVLVKKRLPEGAAGMSQLHDLIGRHVPEDADDAEVVIGIETDRGPWVAALIAAGYTVYPANPLLASRYRERHGVSGAKSDGGDAHVLADMVRTDSHQLRPTAGDSPEAEGIKVVARTHKTMIWDRTRTVQRLRHQLREYFPAALEAFDDLDAPDVLELLAKAPDPARAAKLTRAQVAAALKRARRHHVPARTDAILAALRGEHLGQPAELTAAYAATARSLIAVLVTLNEQVRFLEAQVKEHFGRHPDAEIYQSQPGMGAVLGARVLAEFGDDPYRYESAKARKNYAGTSPITRASGKKKVVAARFVRNNRLIDALMAWAFTSMLSSPGARAFYDEQRAKGFEHNDALRRLANRLVGILHGCLKSRTLYDEDAAWGHREELKRAA

SEQ ID NO: 270814 - protein, 497 aa, unidentified
MKAKKHKARSNQNTRISQAMQAPEQMDIVNRHAAGIDCGAREHYAAVPPDSVEQGEPIVRSFSAFTQGLDALVEWFKVCGVTTVAMESTGVYWIALYQKLEAAGFEVFLVNARHIRHVPGRKTDVKDCQWIQRLHSFGLLNASFRPEDLICRLRSFQRHRLNMISAGGAEIQHMQKALQQMNLHLHHVVSDISGVSGLRIIDAILAGQRDPSQLAKLRDHRVKSTLGQIEAALVGDYRPEHLFVLNQNLQAYRFYQARIEECDREIETLLEQLVERFESSSRLPKADASQLQTPKDQALQSDQTPHSPTPGPAKQKRKRKPRANEPKIDLAGYLERICGVDLTQVIGLNVLSVLLIVSEIGVDMSKWRNAKAFCSWLGLCPGNKISGGKVLDSRSCKVINRVATALRLAAQSVGRTNTCLGIFYRRKKSHLGPAKATTATARKLACLIYHLLKYKDQYREPDPVTYQLKLEKTILHKLQKQAASLGYQLLPSALVPA

SEQ ID NO: 270815 - protein, 318 aa, unidentified
MTHPLIFVGIDVSKAQLDVALRPPGRFVVPNDDSGIAQLLERLKATSPTLIILEATGGIELPLTGALATAGLPVVVVNPRQIRDFAKATGQLAKTDALDAQILAHFADVVRPEPRPLPDAQTQELAALVTRRRQLIEMLTAEKNRLASARVIVRTQLRAHITWLEQALDQANTDLAEAIRQSPVWREKEELLRSVPGIGPVLTTTLLANLPELGTLTHKQIAALVGVAPLNRDSGTLRGKRTVWGGRAQVRAALYMAAIVAARFNPVIRAFYQRLCAAGKAKKVALVACMRKLLTIVNAMLKHRTPWRQRVEWAQAGV

SEQ ID NO: 270816 - protein, 313 aa, unidentified
MTNVTFPQLIQRGCGIDVHLKVVVATIDGVGIRKETRSFDTFTSCLTEMKEWLLAKGITHVAMESTGVYWKPVMRVLEADIPNVWIVNARHIKNVPGHKTDKMDSEWICKLLLAGLLKPSYIPPKEQRQLRDLTRYRNKLIQAIAAEKNRMMRVLEDCNIKLSSVVANTSGVTATALIDMLCEGRKLTIEDIESVYHKKLSASPQELLEACTGFVEEHHVYMLQMIRKSIAQTQGLVDELSKRIKEILIKYDNVLELLKEIPGFNTKVVEDLVSEIGLDMSAFPSEKHLASWAGICPGNNESAGKKKRKNYSR

SEQ ID NO: 270817 - protein, 390 aa, unidentified
MIYVGIDVAKDKHDCCILGPDTEELFQVFTIRNNSDGYGELFHKIESVSKDKSQIKIGLEATGHYSYNILGSLLDHGYHTFVINPLHTNLYRKGQSLRKTKTDKVDARSIAEMLVTDKTLKPYTGTSYHSEELKSLTRYRFELVKERAKMKTSVSRLVNILFPELESLVPTLHMNSVYRLLQELPGAYFIASSNLTHLKALLADASKGRYGREKAIEIRETAKSSIGSLMPAKSMELRQTIRRIDTLTSDIKEVEQSIQKIMDECGSPITTIPGIKYRMGAMILAEIGDFTRFSNADQVLAYAGLSPSTYQSGKLISSYARMEKRGSKYLRYALFNAAIYVSGWDERFRLYLSKKRAEGKHYYVAISHVIKKLVRTIFRMEITHTSYQPL

SEQ ID NO: 270818 - protein, 384 aa, unidentified
MNKNSILFIGLDTHKDFFEVAYFSPDHHSAVEHYGRISSAKVALTKFIQSMQRKYPNATIHVVYEAGPCGYWVYRHLTKLGHLCFIVAPSLIPKKPGDRVKTDKRDAILLCTLLKNGDANPIYVPEPEDEAVRDLSRARERAMHDLNDARYQLKALLLRNNINYDGLANWSAKHLRWLTEIVLPHTSQQFVLQEMIVTIHERKDRLERLDNELNHHVHAWRYYPVVKAIQAMKGVRILVSTGLIAELGDLTRFDHPRKLMSYLGLVPSEHSSGGKRRLGAITKCGNTHARRLLIESASSYRYSANVSTELQIRLEGLPKQVVDIAWAAQVRLCRRYQRLMARGKNANVVKVAIAREMIAYIWAISREVVLPKIDVSKRIARVPA

SEQ ID NO: 270819 - protein, 393 aa, unidentified
MLAELVHHVVGVDPDRDWITLAVLDACSAGVVAEGRFPATRDGYDDAAVFVDGHSVDTERGWVIEGSAGYGRGLAVALSRRGEWVIEFDRPTRKTKDGAKSDALDAIRAAREMLGRKRLSVPRAHDGVREAIRVHAVTRAGAVRVRTGAINELKAIIVTADESLRSELRGLRTAGQVAACAKFRDRPRSVVHEQATRAAMRSLAQRIQLLDAEIDGHDRALRELLDQAAPQLLAERGIGYITAAQFYLAWSHPGRCHSEAAFARLGGTSPVPATSGQNQTRHRLNRGGDRQLNRALYHVAITKQRCDPATKAYIARRVAEGKTEREAIRCIKRFLARRVWRLLEHSNIKDSSGLCEGRNLTPVNGGPGSRAAGGRRSGTLEAGPVDRVASIMS

SEQ ID NO: 270820 - protein, 347 aa, unidentified
MHHIHTITGVDLAKEEIQVCVIKHNKVHSNTAMTPIEFGAWLASNKKMIIIFEACGTSNYWKQRALEYGHDARLISAKLVASVRQNQKTDKNDALAVAQAAQLSDVSFINGKSKEQQELQTLTRLRELAVKHKVALQNQLTALLLEFNIRVSSAKGGLSGVIESVLEDADNNFSMPFRDALYTGWKQYLTNLKSIQKYDLCIEKAANKNRECKRLLALEGVGPMNAINLYISLGCSEIGLFKKGRDAAACIGVTPIQHSSGGKVKLGSVGKYVKNNNIRSCLVSGAMAAVNQATRRKAKTKKDLWIQQLVERRGKRCAAVALANKTVRTAFAMLTKNTEYKAELIPA

SEQ ID NO: 270821 - protein, 344 aa, unidentified
MKKVLIGIDFSKEKFDVAIIVKSTSTQEHALFDNKVSGYRKMIKWINSVVEDVPCSSWLFCGETTGGYSRMMSDWLYAQGYDVWIENALVIKRTFPLKRLKNDTVDAFMIAEYALRFEDRVQLYEPLSQALTELREIFLYRHHLVRHRCSFEVRRIEKRFTQQKSANKNVISQSARHIITEINKEIAKCDEKIKEYIESDDQLSSIFAIVTSMPGVGTINAVSLMVYTNNFTKFAYNPRKIACYYGIAPFGRDSGTSVHTDPRVGFIANKMLKSLLTQAALASVRTCPQIAKYYQRLIERGKKPMVALNNVKNKMIAIITAMVRTGCMYQPDNICLATQSVIVK

SEQ ID NO: 270822 - protein, 368 aa, unidentified
MKQVTTYVGIDAHKKDLFVAMLIGHAPTPVTWQLANEPQAVRRLARKLEREAPGAVQVFYEAGPCGYALQRQITTTRVRCDVVAPALIPRKPGERVKTNRRDARKLVELGRAGLLTAVQPPTPEDEAVRDLARARDDAREDLQRCRHRLGKLLLRRGLHYAGRNWTRAHRQWIDSLRWMHAAERAVVDDYLLAIAHTEARLVELDARLSEIAATESYREPVGWLRCFRGIDTLTAMLILAELHDFRRFASAPALMAYLGLVPGEDSSGEKHRRGRITRTGNALVRRLLVETAWHYQHRPGVGVALARRRKGQPSRVIAIADKAQQRLCRRFRKLAAEHKPPPKIAVAIARELAGFLWGALQPTPAPAT

SEQ ID NO: 270823 - protein, 431 aa, unidentified
MPNEVPIEQEIVAYVGLDWADQQHVICWQAADSAAVQSAVVQQRPEELQAWVAELRQRFPQGLVAIALEQSRGAVIAALMHFDFLRLYPINPKSLARYREAFASSGAKDDPDDAALLLELLVKHRDRLTPWVPDDALSRELALRVEHRRQLVNLQTKLIQQLRSHLKVYFPQALDWVGELDSLQACDFLQRWPTLAAVQKARPSQLEKFYHQHHCRRPQLIQQRLEQIRQAQPLTQDTAIVPAYSQMVLALVAQLRVLIPTLQQWQQQISQLFAQHPDAALFASFPTAGPVFAPRLQAAFGSRRDRFGSAAEVLQFSGVAPVTKRSGKSRQVQRRWARPKFLHQSFVEFTGLSIPHCCWARALYQQLRARGHRHWAAIRVVAYKWIRILFRCWQDRVPYDEQKYLKSLERRNPTLWAAIQQLPAQPSRKEV

SEQ ID NO: 270824 - protein, 471 aa, unidentified
MVMLSVSTIQQRVPPSACLPGNIHSGYYGCPALFEGRPLISQAIVGQTGLKELLLFIHNKLVRCTMYYLGIDVSKASSRYIVLRDEGTTLKSFSLRNNHESFHELTNRLTALGCQQSNLLIGMEATGAFWENLYGFLTNKRFRVILLNPYHTSKFREALAKKAKTDDIDALIVAQLLRTGEYVQSQVADEDIQTLRELVSTRYEFVTQRKNYQRKVYSLLAVIFPEFATTAIKNPFSVASSAILKRFPTALHLAQAKPRHIEKLVRSIQGNNFNINEIEHLITTAQKSIYQGRAREARATTMRMLLEHIEQLTRSIEELESNIHQILSPSSTTTGSESFPGSNLLTIPGVGEKTVAAVLSYLGKNGQSFETSTKAVGYIGFFPRICESGQTRRDNKISKRGPKLLRAALYMAAVASLKHNTELRTLYHRKLSQGKTEKQALICVAKKLLQIMLAMLKSGQPYNPALVFVPA

SEQ ID NO: 270825 - protein, 352 aa, unidentified
MTLTRVHEEDFMSVIIGIDPHKATHTAVAIDRDEQPVARLEVVADRCQTERLLGWAAAFGCERTWAIESAGGLGKLLAQQLVGAGEHVVDVPPTLSARVRLLGSTKAAKNDSNDALSTAIAGLRHCELRTVRVEDHTAVIRLLIDRYDALVSLRTQATCRLHVVLRELVAGGAPRRLSANRANKLLRTVHPTGAVAVERKRLAVDLLADVRRLDQQLAATRSRIAVAVEDSKTTLLELHGVGPIVAAYILGHVGNPARFATPERFASYNGTAPIEASSGPRKRHRLNPRGNRKLNHAMHLVAVTQVRNDTAGRVYFQRKIAEGKSKREALRALKRRISDAVWRQLQVDLKLR

SEQ ID NO: 270826 - protein, 422 aa, unidentified
MQTLLSQRFTAYVGIDWADTKHDVCLQVAGETRRHFSIIDHTPQSIDRWAKSLFERYGAPIAIALELNKGPLVAALQKYEFFCLFPINPSTLAKHRKAFVGSGAKDDPTDAQWALELLLTYPQRFAQLMPQSPAMRILASLTEHRRALVDERVKVSNRLICTLKQYYPAALELFSNHDSVVFCDFLMRWPTLEQLKRSRQSTFLKFFNEHNARQAQLNQTRWEIITQAMPLTQDPGVIRPAQLYTTALASQLKGLICTLKNFDREIEETANTLSDYPIFKALPGAGQHLAPRLMVAFGEQRDRFSDANAMQQYAGIAPVTQRSGKKKVVYWRYRCSTFLRQTFVEWAAHSITQSTWAEAYYRQQRAKGCSYQAALRALAFKWIRIVYRCWKTSTIYDEKAYLQALTRHGSTLVEAPMGVVTG

SEQ ID NO: 270827 - protein, 342 aa, unidentified
MVVVGADVHKRTHTFVAVNEAGRKLGEKTVMAITAGHAEAVMWAREHFGADVVWAIEDCRHLSARLERDLFALGQKVVRVPPKLMAQTRASARTRGKSDPIDALAVARGFLRESDLPVASHDEVSRELKLLVDRREDLVAQRTATINRLLWRVHELDPAHAPKARSLDLAKHRGILRDWLDTQSGIVAELARDELADVTRLTETINALAKRIGERVRTVAPVLLALPGCGELTAAKLVGETAGVSRFKSEAAFARHAGVAPVPVWSGNTRGQVRMTRSGNRQLNAALHRIAVTQIRLDGLGRTYYRHRLAQGDSTPEALRCLKRRLAVMSREVVPLVIGEPV

SEQ ID NO: 270828 - protein, 406 aa, unidentified
MELVALHKRVIGLDVHQAQITACAILEEADGTTRIEQRQFGAFKRDRGALAAWAASLAPDEVVMESTGIYWKSPYAALEAVGIRGQVVNARHVKNVPGRKTDVGDAQWLATLARAGLLRGSFVPPMQLRELRLISRQRQKLVGQLASEKNRLHKVLTDGGIRLGVVVSDLHGQSARAMVKAIILGQAPHEVLQFASRRLKASREEIFDALQGELTDSHRFVLDELMRHIEEIEARIARFDTRLLDGLKDERNTLALLQTLPGVDLIGAAMLLVEIGSDMAAFGTADRLASWVGICPGNNESAGKRKSGRVRKGNLYVRRLLCEFAHAASRTKSVFQSKFKSLIVRRGHKRSIVALAHKILRTIFFMIKRREHYRDSATDYEALSVQRNAPRWIKALTRFGFIPAVA

SEQ ID NO: 270829 - protein, 421 aa, unidentified
MDEIQSWFAGVDWASQKHDVWLTDASGKRLGKRTFAHNGEGLAQMCDWLVATSGGKPEDIHVAIEVPHGAVVETLLDRGFKVYSINPRQLDRFRDRFSPAGAKDDSRDAETLSSSLRTDRRAFHQVSLAGPAIIELREWSRMADDLRADQIRHANRLREQLQRYYPQMLQFDSDLAEEWVLKLWEAAPTPAKAARLRQAEVEKLLKRHRIRRIGAAKVLAILKEQALIVAPGVTEAAVAHIRVLIESIRLFTQQLKEAHRQLDKLCKLLAEPIASENEQIGPEPEQTLGAILQSLPGAGRIVISTLLAEAFETLKRADYPILRKLCGVAPVTRRSGKSRAVTRRLACNPRLRNAIHYLADAARRCDEKSKAKYLALKARGCSHARALRAIGDRLLYVACAMLKNRTLFDPGSESRKFHAGK

SEQ ID NO: 270830 - protein, 399 aa, unidentified
MGQVAVGVDVAKEFHWARAIDTATDEVLLNRRVDNDPASVAAWIEELRVIEAGHGQLRVGIDVLGGIAALLSAMLLEAGIEVVHVSGLAVNRARQGTAGGENKSDPRDAATIAELIARRRDLRIVEAEAELDAEVRLLVGRRRELVVDQTRRVNRLRDLLASIHPGLEAVVDPTQKGSQRLLMRYVTPAEVRGAGRSRLVSHIAKAGRLPRAHVERLADRALAAAEAQAVALPAEAVAAGLVRELAAETWAARERIAALDGEIEAALARHPDAALIRSLPGMGATLTAEFIAEAGGIERFPTADRLAAAAGLAPVLKQSGKVRYLQRAGGGNKALKRVFFQSAFCSLNHPPSRAFYSRKRSEGKRHHQAVISLARRRVDVLHAMLRNRTPYEVRTPKIA

SEQ ID NO: 270831 - protein, 345 aa, unidentified
MIIGCDFHPSWQQIAWLDTETGETGEQRLVHADGDAERFYRQLAAPALIGIEATGNSHWLVDLLSELGHELWVGDAGQIRASYVRQQKTDKRDAAHILKLLVEGRFPRVWMPSSEVRDLRQLLLHRYKLVIIRARVKNELQHLCLNKGVQRKRKLWTKAGQQMLCELPLKRWAGRRRDDLLGLMAMLDQQIEPLDEAVKAEAQRDKMALLLQTQPGVGPITALAYVLTMGDIRRFPRGKQVASYLGLIPREHSSGGRQHLGAITKQGNRMLRMLLVEAAQTAVRLDPQFRKAYQHRCHQKAKAVAKVAAARKLAVRLYWMLRTQKPYPEVVRIESSPRVGLVGEN

SEQ ID NO: 270832 - protein, 416 aa, unidentified
MKNHESLFFAGVDWGRESHQVCLVDQKGFVIGEKSFKHSGGGLFEMAQWIQKISGSEARDIAVTVEVNHGPVVESLLEQGFGVYSINPKQLDRFRDRFCVSGAKDDRRDALVLASALRTDRPHFRRLEPQDSDTIILRELNRTREELVSERTRCVNRLRGLLWRYYPQFGELLGRKVSTWHLELWEFMPCPEAAKRKRISTVQNLLKRNRIKRFNARQVLEILRGEKINVNEATVQSCIGHIQTITERMKVIDRQHKETEDSIKQVIKTMNSKLNTEGERPTDIEILSSIPGAGPVVLATIIAEAWDLIRRRDLRALRCLGGTAPVTRQSGKSRQVVRRRAVCANLSGALHVLGGVAAIYDPVSRAKYQALRARGLGYCRSVRTVCDRLLLVACVILEKGELFDKQFKKPLEVAAA

SEQ ID NO: 270833 - protein, 422 aa, unidentified
MKNSTAKKLKQIPAGYLMVGVDPHKKKHAAVAMTQDAITHAKLKFVNSRQGYEEVLELVRAEMVKTGCRGVIFAIETASHYWRNLAYFLDERGIPFRLINPFTLKRRREGEDINRRKNDFRDAEMAAELLRTGKFIETRLPQGIYAELRATFHAYRRLVKERARYTNLLKGLLDGLFPEFTQVFKNPRGKTALTVLCQCPVPRIIANMTLEDFVDSVRKGFQGRALKVQKLHALHATAQSSVGIDAAAESVSFELSLLAQRIRLNEEQIEKMEGILVSLVDSIADSRYLLSIRGLSYISVAGMLAELGPLSSYRNARQLIKMAGSNPTESESAGKRSNHTPMSKKGRPGLRWCIWAAAVSLMRHNSDFTSWATKRQERPAHAHPLKQREVVGAVANRLLRLAYALVKKQTMYQMPQPAEAAV

SEQ ID NO: 270834 - protein, 339 aa, unidentified
MFNYIGIDVSKATLQVYIPIKDENISIENSKKALISLYSKLKKHYKKEITKLVIIFEPTGSYSALLKHFCADKNIYAFIINPRQSANFAKALDNRSKSDIIDSKMLYKFHVMLKEDDIAVPFINKAQEELSEMLTYYKFLQKQRVSFSNHLEALSAKDGSLYIIKKLNKEITKLRGQEEEMILKMKSLIISDKIMAQKFENIISVVGIGDRAAIALIHLFISYPDANRQEIIALSGLDAIENTSGTSVQRRTRISKKGSAIYRSMLFMPVLSAIQHNPYMKLFYDRLKANGKHSTSAQIAVMRKMILIAHSLYKNDVKFDNKLYEKNLGWKEQDIQKVA

SEQ ID NO: 270835 - protein, 374 aa, unidentified
MQKDIIKYVGLDTHKSSIVIALADETRDGEVRNYGTIPNTLEAVDKFVRKQLSQNIELRCVYEAGPTGFGLCRHLRGNGIDCIVVAPSKIPKKDGDRIKTDRRDAYNLARLHRAGELEAIYIPTREDEAMRDLIRSRDDARHASRKAKQQILSFLLRHGKAYSGKTNWTKAHFNWLAEIKMNHPAQQIAYQEYITAIHETISRLDRLGKEISKLAKEWKQAPLVTAIQSLRGVAELTAVTIVAELGNLERFSHPKELMAYIGLVPSMYSTGTSTRRGGITKTGNGFVRRVLVEAGWTYRLPARLTKHLLRRNQGLPSAIQDISWKAQVRLCGRFRRLQAKGKPTQVVTTAIARELIAFVWAISKELNCSERISR

SEQ ID NO: 270836 - protein, 396 aa, unidentified
MARIWAGTDIGKTHHHCVVLDAEGRRLLSRRVLNDEPELLALLADVLAVDEDVAWAVDVADGMAALWINVLLNHGQQLVYIPGLAVSRASAGYKGTGKTDAKDATVIADQARMRRDLTVLRPDDEHAIELRVLTNRRADINADRTRRINRLRGQLTSIFPALERALDLGNAGPLILLTGYQTPASLRRTGRRRLQTWLRNRKVRSPEALAEAAVEAADRQHTALPGEKIIAQVIHTLAKEVMGLNEQIAEIDKLIAARFREHELAEVISSMPGIGPLLGAEFLAATAGDMSRYGTADRLASLAGVAPVPRDSGNVSGNLHRPRRYHRGLQRVFYTSALISIRNCEASRRFYERKRAEGKRHTQAVLALARRRVNVLWALIRDRQCYQSELPVTTTA

SEQ ID NO: 270837 - protein, 356 aa, unidentified
MAKRKVRDGMAENDSVVVSEDNEVYYERCAGIDVHSGLLTVCLRIGRRSEIREFGTTTGEIRALSAWLKDSGCQMTAMESTGSYWKPLYNIFEQEGIPAMVCNAYHIKNVPGRKTDVADARWIARCLREGLLNPSYIPDREQRELRDMTRFLKSQTEDRARNINRLQKFLEGANIKLSEHVSDIEGMSATELLELVIGKADFTLDDVRSRMHKNMKSTPEQLFAALEGCITPIQRKFFEHVMCVIREQTRQIEETRALIDSVLTDNYKSAIKALDKIPGIGEASSLTIVAEVGTDMSHFRNQHAFSKWAGVAPGNNESAGKAKKAKTTPGNKTLKSALTQSAKSAARNKSSFFSAQ

SEQ ID NO: 270838 - protein, 427 aa, unidentified
MSYRIAGVDVHKRMIAVVVADVEGDGEYQFERRRFAATPHELHLLAQWLTQQEVQEAVMESTAQYWKPVWGALERYWKPDCQKREGAGPMSGTLHLAQAKSNRGPRGRKNDYADAQRLVKRLVAQELILSFVPEPEQRLWRTISHKKYQLTQQVGRVQNQLEAQLEEAHIKLSSIITDLLGVSGRRMLQALAEGETEPAKLASLADHRLRATPEQLRDALGAVTDLNPIYRRLVKMALEQLRLLEYQIEELDQESARLLSAHQNAVERVAEVPGLGVDSSQQIIAEMGPEAAPFPTAKNFSSWVGTCPGQEESAGESKSSRSPKGNRNVRRLLNQAAQSAVKVKGSIFELKFRQLVPRLGYKAAIWAIAHRLGRLVWKILHDGVRYEERGPAVSARSKKTRTARMIKELRALGYQVVPLNLQAATAR

SEQ ID NO: 270839 - protein, 392 aa, unidentified
MFFVGIDIGKNNHVASMMDDTGKVVFKAFSFPNTSDGGNAFFSKLASYSLNPSDFEIGMEATGHYWLSVYSFLFEKRFLLHVINPIQTDGWRRGTEIRKRKNDILDSVLIADLIRYGQFVDTRIADEDLFSLRTLTRFRTYLVESISDLKRKVVCVLDQVFPEYQSIFSDIFGKTSKEILLQFSSPIDFESVSSETLAELLAQLSRQKVGAAKAEQLKAAASSSFGVTFAKNSFTFQLKALIEQISFIENQVKETEAEISGIMGKLESPITTITGIGSITGAAILSEIGDISKFDSPRKLVAFAGLDATVTQSGEFEATHNVMSKRGSPYLRKAIFQAALVAAFKDPVLSAYYQKKKAEGKHHLTCVGAVARKMCNIIYAVLKNNQPYAPKA

SEQ ID NO: 270840 - protein, 470 aa, unidentified
MADWVHAHYARVRSPYAAQDKPFASGFTNPYRNGGDIMLKINYMSTLFVGIDVSSKTNSVYAMDFEENKYLSTSFGNNQPGADELVNRIVACMQKHKHLDTLLIVLESTSVYSVHISNFLASSEVLMPYKPYVFCVNPKATANYRKSYIGMEKTDPTDAYLIADFGRVGRTKKLEPWRGGLFIALKRLTRHRMHLSECITREKTYMVSNLYLKFSELQLLEGDDKPFGNLYGATSSAILTEFLSPQEIINMPEEDLLAFLAQKSRNRISDLSKTSELLRKAARDSYRLDKCMYEPLSISLASSFNCIQAYQKEIRLIEQAIDKCIKGMNTNALLILQSIPGIGPVWASGILSEIGDITAFHSSDALAKYAGLYWPKGDSGDFISEDNQMSKAGNPYLRYYLGEAANSVRKHIPEYADFYARKYAEVCKHQHKRALALTSRKLVRLVFGLLAKNQLYTGEKLDTEYNTWSN

SEQ ID NO: 270841 - protein, 367 aa, unidentified
MKKVSTAAAKATKNFSQPKLTIGLDLGDRSSWYCVLDERGEVVLEQRLGTTPGAMKEVFGGMPRSRIALETGMHSPWVSRALSELGHEVIVAHARNVRLIGESRKKDDRLDAQTLARLARIDPQLLCPVKHRSAKAQADLTVIRARAGLVRARTALVNTARGLAKSYGERLRGCNVRNMNPEKAEGLSPELQRALEPLLAGIESLSERIREYNERIEHLAQESYPQVALLKQVKGVGTLIALTFLLTLEDAHRFRKSRDVGCYLGLQPGRRNSGQSEPQMHISKEGDPYLRTLLVQGAQHILGPFGSDSDLRRWGLKLAERGGRNGKKRAIIATARKLAVLLHRLWVSGEVYEPLRNSNQRAVPVAA

SEQ ID NO: 270842 - protein, 401 aa, unidentified
MSNFSYFLGIDVSKRSFDACLIDAKEFVLMNDKYEMDSDGFEKLMLRLQKFDLDEVLVVLESTSIYHVNLFFHLEEKGFAVAVVNPLLIHNFNKSVTLRKSKTDKIDAFRIACFTLHNQDKINLNKTPTASIRSLSRERDRLSKETAKLKTEIKNHLQILFPELVNNYNVFTKTMLLLLLKAPGAFPIKKMRPVQIERIFSKTSGNKVQLSPRELVRMARKSFGIDDKHLQTVLIMKIETLLFIQKQKGEMDKVLKDYVEENLKKDFEIITSINGIGQTTAEKFLIEIGDISKYKSHNQLRAYIGTDPSIKQSGSSINVQGKISKRGNSHLRRTIWQMAVSVINYSDNFAAYFEKKMTEGKKYKQAVIAVANKLIKTLYAILKNKSKFCENYRNQSKFIYS

SEQ ID NO: 270843 - protein, 316 aa, unidentified
MSQVYIGIDVSSDQLDVAALPSKDKWRFANDEEGILKLTATLKGLPVALVVLEPTGGLEASVVASLAAEGLQVAVVNARQVREYARATGRLAKTDSIDALVMAQFAATVKPQVRSLPDEQTVEIKALVVRRRQLREMLSSEQNRLTRARRPIQGQIQLHIDWLKKEIKEADNQIKKQIMGSALWREKDNLLQSIPGVGNVLSATVLGLLPEMGRLNRKEIAALVGVAPLNRDSGKMKGKRMVWGGRAGVRTALYMATLVATRYNPVLKDFYHGLVERGKAKKVALVACMRRLLGIMNAMLKHGTMWEHATPRPTVS

SEQ ID NO: 270844 - protein, 456 aa, unidentified
MPDYFFGIDASKGYSNFVMLDSLKHYVEDDFQLDDTFDGHQKLYSILSEFCVRHPKANIFSAVESTGGYENNWFDALVRFQTHLPIRTARLNPCGVYNNSKAELNRNITDKISAENVAKYMIEHPEKVQYQQQDPLAPLRKQWGFIKMLKKQKTQMLNQLESNLYTANPEILAYCKDNTPAWVLSLLQRYPTASKLAKAKKSSVALIPYVTPQKAKKLVETAKQSVASATDETTSQIIKAIVQQIRQLSKTIDAQTKAMADKCSIPEVELLKTFIGIGNDSAVGLILEIGSIERFKRAKHLASFFGLHPVYKKSGDGSWGFHMSKKGRTVPRQILYMVAMVAIQSNPLIREIYEKHTEKGMEKKAALGVCMHKIIRIIYGMLKHNQPFDPEIDKANRKKQNPQDEKKVGLDKSRRYQAYDVKAPISRRQAKKREERKQSQSVNNAKCGIKAPVPVL

SEQ ID NO: 270845 - protein, 410 aa, unidentified
MNDQTHPVERVIGFDAHPDSFTAAVLRGRTPAEAWTEKMFNKVPLGQLQSWARKHTTPNDLVVLEASGNSFHLVRVLARLGRRALVLESTHLGKLKEAHANNDKISAVRIGKAYLAGTAREVWVPDPKTQERRDWFHAHQKVVRRSTQMRNRLLSYLSDQGVRLKKGTRLVLEPELADQQLRQAATWSPRQWQVIQGMLMELRHAEAQRAHWRSLIAQEVTGDPMLLSLIRLCGVRDLVAFALGAIIGDIQRFTEPRKLVKYIGLNPAFDDSGEGEWKGGIGGHGRKDLRSLLIEAAHAILRCSRNPLAQWGKKLLGRKGSVKLAVAAIARKLTVAIWYLMNGRWTPLSEIDKRLSIKVGKIITHVGTASLRSLGATRQQFRAQICDSLKTTKTYLLDPNKKFIPEPQRP

SEQ ID NO: 270846 - protein, 365 aa, unidentified
MKPNFEPGKWFMQCVGIDIAKGTFTACLCMYEFDQGCSTAPVVFNNDKTGFNQFVKWSRKEALKGYPLRYVMEPTGVYYEQLAAHLNKLSLDVCVVLPNKAREFAKYEGILTKTDDMDAYTLGMLGCLDKRLKTWVPPSPIYRELRQMTRFVADINKVKTELKNHLEALAHSQTAEKSIVKHYRKLINDIDKQLESNQKAIREKIKQEPGLLERINRITTINGIGFMTVVTVVAETNGFALITNRKQLARYAGLDVPAHQSGPVDSKRHISKQGNVHIRTALYFPAIVSTQCNPQMKDFYGRLCARNTQSKMIGVTATMRKLLLLIYSLWKSGEEYDPTRDRQKKEAETTEGQPHGIDVGTLAEE

SEQ ID NO: 270847 - protein, 316 aa, unidentified
MSDALYVGIDVAKDSFDVASDPAGLALSLPNDPTGRHHLLDALQNHPVAQIVMEATGGYERSLVADLLGAGHKVVVANPRQVRDFARGIGQLAKTDRIDAQVLARFASMVKPKPRQESSPQAVNLAELVTRRRQLSDLMTQESNRLPMARHAKVRKSLQKVIRLLEQQIIDLDKMIRDNIDSDDGLRRKDEIVQSFKGVGPGTSAMLLSHLPELGRINRQQIAALAGLAPWDFKSGQWAGQSKIWGGRMPVRNMLYMAALSAIRSNAVIRKFYQRLESQGKKFKVAITACMRKILVILNTLVRNDCLWSPPLPKNA

SEQ ID NO: 270848 - protein, 352 aa, unidentified
MIAVGVDVHKRQCTLAIQLENGELESFGPLANTREEWLRLLAVLPPEAEIALEVSTSGYFAMSVLEEAGWQGRAHWVHTAGIDSLRKQKTDRLEARRLARKLSVAERDPLPEAWFPPRDIRELRLRARQRCWLAVLRAQGKNRLQRLLQMHGLRPPLTDVFGVQGRAWLAKQALPGATRESVEQILRLHDFLRQELGISEGYLRQVEPQFPEVRRLRTIPGVGEILAPLLWSERGRLERFRSADAWVNYTGLVPSLYQSGEVSVRGGIPHQGSAWLRWALIAAANGAIQGRNTFAHRYRRLRRRKPANVAKTAVARSLARCVYGVVKSGGDYQEARWGQRPNGVRSGEQEQA

SEQ ID NO: 270849 - protein, 346 aa, unidentified
MAIVGGLDIHRRQITYDWIDTDTGETCRGQLSPATRVELRGWLARFTGQQADFALEATTGWRFVAEELERAGFRAHLAEPADTRALRGPKRRAKTDRTDARHLRELLRAGTLPESWMPPAHVADARTQVRLRRALVGGHTGWYQRTHAILFHHGLPDRSYLLTADGRAWLAGAELPPVARQAVDLALRMIDHIDTELDLLDTELARIARAQPGCKALMRRYGIGRLTAVAIWAELGDVRRFANARQAVRFTGLDVTISESDGKRARGHLARQGSPVLRWALHEAAMCAARPTSPDHAYYLQVKQRLGGKRAALSVARKLAREAYHTLYELGDQALAPVPAELPTAA

SEQ ID NO: 270850 - protein, 324 aa, unidentified
MYAALDLHEKSIQCVLKDDQGKIVRESKMCKDEEKILGFLDGTQAKVVMESGYNHQHIYDVLKKEGYDVTVAHPLLVKAIAYARLKNDKVDARMLADLLRAEMIPEAYVPDRDVREVRDLVRRRRYMVRLRTMMKNKVHAEIATRWIKHEGDLFTEEGKSYLRSLSIDAINDYLDTIEFLNRKIRELDEKVKQKAQPDKYSNLLVTIPGVGWYSALLISSEIADISRFPDHEHLCSYAGLSPAVRQSGETQHTTKGVGDSTLNWIMIQCTRVHVRKCESSAITKFYKQVSARRGEKIAIVAAARKLMRVVYMMLKEEQAFRLDG

SEQ ID NO: 270851 - protein, 351 aa, unidentified
MHYIGVDYHKRYSYMVVKDRDGKVERRGTVNNSSEEFRQFLEPYQPGKAVLEATRNWGLIYDWLEEILDDVALAHPLKVRAIAEARIKTDKISADILADLLRADLLPTAYVPSKETREAKNILRQRMFFVRVQTMVKNRIYTILDRHPDVLHLAPDVSDLFGASGMEWLKQTVLPGEDNRLLASELELLEVLKRKISESNGIVKEVARGDKRIKLLRSIPGLGPFFSVLVAKEIDDISRFRDEKKLCAYTGLVPSTYASGGKVFHGRITKLGNKWLRWALIEAVQPAIRSDPELFAYYQRLRIRKGNNAAKVATARRLLTIVYRVLTQERLYQKRISTQRRDLAPAALVTS

SEQ ID NO: 270852 - protein, 460 aa, unidentified
MSQRRKKQKRAGQGGGAVPSLSCIEPNAAGIDVGATEIFVAVPQDRDPSPVRSFETFTEDLQRLKNWLQQCGITTVAMESTGVYWIPLFQILEKAGMEVCLVNAQHVKHVPGRKSDVIDCQWLQYLHSVGLLRASFRPEERICAIRSLLRHRDSLVQMAAAHVQHMQKALTQMNLQLHHVLSDITGQSGLAILDAILAGERNPAVLAQLRHARVQASEEIITKSLVGDYQREHLFTLRQSLQAYRYYQSLITACDQEIEEQLQNLDSRTPPDASPLPPERYPHRPRKNEFRFDMRSELYRIYGTDLTAIPSINALTGYTVLAEVGTDWSKFRNGDAFASWTCLCPQNKKSGGKILSAHTRRSANRVNRALRLAAQTLERSTSYLGAYYRKMRARHGAPAAITAAAHKLARIIFHLVTTREAYDESLFAAEEQRQRKRMENKLKRTAKQLGYQLIPLGQTA

SEQ ID NO: 270853 - protein, 277 aa, unidentified
MNSTTIAVDVAKSVFEVAVSEQPGEVRERQRLSRERFRRFLAERPPATVLMEACGSAHHWARQAQALGHRAVLVPPHVVRPYVLRNKTDRTDTKGLLEAFRNEDVRPVPVKSETQQALAALHRLRSMWLAARTARINTVRGLLREFGLIMPIGAHHVVPHVATLLEDTDSVVPGLLRPALADAATDIREIEARLRAIERQLESVASENVVVRQLRTIPGIGLLTATALVATVGDVARFSSGRHFASYLGLTPREASTALRRRLGAISKRGTPMCACS

SEQ ID NO: 270854 - protein, 373 aa, unidentified
MGDDSVAYVAFDTAKLHHTVAIAEEGRTGEIRFLGEIENSEAAAVKLVKKLEQRYRRLMFCYEAGPTGYELHRLIERLGHECMVVAPSLIPKKAGDRVKTNRRDALSLARLLRAGELTAVWVPDTRHEAMRDLTRAREAAVADLVSKRQQVLSLLLRLGRHYEGKRHWTRMHMTWLLSQKLEHAEQRIAFEEMLLAVREAQGRVARLEQAIRTALPDWSLAEVVTALMAMRGFDLVSASAFLAEIGDLSRFATARELMGYLGLVPSEQSTGETTRRAGITKAGNRRARRILVECSWSYRHPPRLGKEKLAKVEAAPRAVREIAWKAQHRLTGRYRALTRNGKKPTVVVTAIARELSGFIWAIDRAARVAPMTR

SEQ ID NO: 270855 - protein, 418 aa, unidentified
MSRAIARRLARIEPGTLFVGVDLALDNNVAVVIDAQAHRLDRFRFPNDADGYDYFHRRLVAIQEREGAPAVLVGMEPTNYFWKLLASDLEQRQVPYRMVNPFTVKKHREGDQLSRSKDDSRDAFMIADLLRTGKFTETQLLQGQYAVLREYVVPRDRLKGDIRRQKTLIRNIAGQLFPELAHEFKDFFGLTALALLRHHAVPGVIRDMSQQALITAVRQDFTGERLPVSKLRRAHALAKRSVGVRHGTVALQEALRVHLDALDLLQEQGRNVEELLLAVFFDLPEAPYLISVPPLGSVTAAIILAEIGDPSRYSNGNQLIKLAATQPVPNLSGRKTRSKTPMSKKGRPRLRTALYFATMRMIQEDDTFARVYRRFLTRERNPLTKMQALGALMNKLLRILWALMKHQTFYDPTYEMNK

SEQ ID NO: 270856 - protein, 521 aa, unidentified
MAEGRPCIKARLCPAGESVWFAQTEPSLGLKFRLEEYEMRKRRMSTFERLNSGCVTRKPRRALARRVAAADPGLSIVHPHAAGIDVGNPSHFAAVPPDRDPNPVREFGFWTADLNRMAEWLVSCRIDTVAMQSTGVYWIPLYAILEKHGLRVVLVNAQHTQNVPGRKSDVQECQWLMQLHTYGLLRDSFRLAQHLEGVRTVWRVPGRHVEQAARSVQPMQKALTKMHVQWANVIRDVSGLTGQAIVGAILQGARDPYKLAALSDPHIQASKEEIARSLAGTWREEVRFELQQAVDSDDFAHWQIRQCDDKRKAYLASLESRVLEKPEGGAGTQPAKPKTRKTRKQGAHAPPLDLTEELVRVCGADLTSLDGIHIISAMTIISEVGTDLHQFPDEDHFAWWLGLTGTANISGGKRVKGAKRKVQNRVADVLRRGAASLLNSDRYLGARYRQLRRNAKIPAVAVKAMARYLAILVYRLLTKGQAWVDRGAELFEQQRQARDLMVLREKAQKHGLQLVPLAAAD

SEQ ID NO: 270857 - protein, 318 aa, unidentified
MAMLSYCGIDVSKDRLDVMVLPGQQSFAVRNDAAGWAELIARLRGFAIAAIGLEASGGYERGAMRALLAAGLPACQVNPFKLRQFARASGVLAKNDPLDTRMIASFVAIMPTRPAQPRPPAIERLAEMLAVRRQLNAEKVAVENAARLLEDAMLQRLSRRRIARLAADVDMLDRHLAAIVESDTALAHRYRLLTSMPGVGPVLACTLIALLPELGTMSRKQVAALVGVAPYAFESGKFTGRRCIWGGRAPVRDVLYMAAMSASNWNPVLRAFHHRLKAAGKLPKVAIVAVMRKIITTLNAMVRDDVVWADLLDGQQLR

SEQ ID NO: 270858 - protein, 417 aa, unidentified
MNAEKEIVCGADIHRDFLVATMISRSGLKLQEQFGMDQDGLLAFRSWILDHRCLRVAVESTGNYWYPIFCILEGHVEFILANAFQIRNIECKKTDRLDSERIAIYCLNNLIKPSRIYPKDYRDLRSITRSREALVNARSKLKNQIHQSLAVCCIKLSSVISDSFGKSGRYIIEQLLEGKTIEQIISKIPSKRVSKKADELRKAIRNGLDPVQILLIKTNLDAIDYLSEKIKLLDAEIAIKVKPFEEDLNIILSMPGIGLTSAATILAEMGDYRDFQNADKLAMYFGIVPSVYQSAGKLRTGKITKRGSKHMRRILVQVAKAISKTKKSSRLKRFFMRVFTRSGKKNVAAIALARKVLCIIYHLLMKREDYQEPEVKKNKPKIPSCVSPLSMMDIDEMIKTISQAGYLVKKGLKEGCG

SEQ ID NO: 270859 - protein, 344 aa, unidentified
MKEISVIGLDLAKNIFHVYGVDRRGMRVVSKKLKRRQVFTYFAQLPPCLVGMEACGGVHYWARELAALGHEVKAMSPVFVKPYLKGNKNDGNDAEAICEAVQRPTMRFIELKTPEQQAVLHLHQTRQLLLRARIAQSNHLRALLSEYGLVMARGVKAFERETPRMLGDEDNGLPVLARQVLQTLWETYCSQQRQLEELDQQLRCWHEAHEASQRLAQIPGIGIQTATALVAKVGDGRMFRQGREMAAFFGLVPKQASSGGRERLLGISKRGDGYLRRLLVQGAKSVIRHVRRRQRAGLPGGHPWVESLFLRMHPNKVAIALANKMARMAWVILARGEQYRPTII

SEQ ID NO: 270860 - protein, 338 aa, unidentified
MSSLPSPYHVFVGIDIAATSASVACATDPRTVEPAFTIAQTPAGFADLVTRLQQRHLPPAAVLVVLEATNTYWMSLALHLHDAGYAVSVINPAQAHQFAKALLKRAKTDAIDAQTLAQLAATLQPNPWKPPPAIYEELRQRLQQREDLLRALTQERNRLDALRHRPSVIASVRERSDRWIAWCKAEIATLDTELTALLDQAGEWQAAAERLRSVPGIGPITAGWLLVETLAFTTCATPQQAAAFAGLAPHAYESGTSIRRRGRIGQGGNAALRRALYMASVSAGRHNPHIKVFYERLRAAGKPVKVARCAAARKLLHLCWAVVTRDVNYDPRYGLHTP

SEQ ID NO: 270861 - protein, 337 aa, unidentified
MSTIHILGIDLGKHCFHAIGNNYSGKEVIRRKFNRSQLLRFLSVLEHTTIAFEACGGAHWLARKCQALGHRVRLIPPQYVKPYVKGNKNDFIDAAAIAEAASRPTMRFVSVKSEEAQVISAIHRAREGYVKERTACMSRIGAVLLEFGLSFPRGHAKMKALFQWLAEQDVELPQSLIAELLSIHEHYKYLNDRVSEQDQKLKSIAISNESAELLKTIPGVGDLTATLCVANISSASNFDGGREMAAWLGLVPRQFSTGGKSKLLGMSKRGNKHLRTLFIHGARAVLSRIESTGKVFGDWLVNLRATKPFNVVLVALANKLARIAWAVLYHRQAFRAA

SEQ ID NO: 270862 - protein, 400 aa, unidentified
MRTVFGIDVSKASSEVAILVNGAKVYAYTMPNDIIGFSRLLEDLKTVSNPEIIFEATGVYSRRLQAFLEEYSYDYTRLNPLEAKKQLDGLRVRKTDKIDAEKLASSQFVLNRKPTYVQEEVYQNLHDLSRFYQNLTEDIVRMKNRLHKVLQVAFPEIENLLSTPTGEQYWNLVSIFPTKHWVLELSEVELKEAIRNSTSKRISENRVGNLTEKLVGLAKQSYSGISKTSPMVEEVKYDAQELIRLTTRREKVLQQLIALAKPLPEYEILLSIPGIAETTATSIIGELGDIHRFKSANQINAFIGIDLKHYESGDFLGQEHITKRGNPYARKILYKCIHNIASASHTNPCHIADFYEKRKRQSQITSTKPHTIASIHRLIRTMYYLIMHNKLYDYTLAQSH

SEQ ID NO: 270863 - protein, 354 aa, unidentified
MKYYTTTTQFNCGIDLHARQMYVCVLDRDGKKLVHTNIKNNDFAYFLKLVAPWRHDLTVCAECMFGWYWLADACAEASIHFVLAHALYLKAIHGGKNKNDRIDSEKIAHLLRTNFIPPGYVYPAAKRPLRALLRQRLLYVWNRSELLSRIQSHQLAYNRATQRQTLYNREAWREQLLATEPDPVRQLALQNDLALVGHYDTQLASLEKELLQLTKQTASRDFTLLQTAPGIGDYLGLTILHEIGDIARFPTVKHFLSYCRLVKGTVASAGKIKGLRGAKLGNPYLRWAFGEAAVVAKRDPLVIGPLAQRLEARLNNKFKANTVLAIKLARAVYFMLKQKTVFDPERLVAALSKN

SEQ ID NO: 270864 - protein, 295 aa, unidentified
MFFVGLDLHKNYSEFAIMDNDGRLIKHGRVENSLEDMSRFSNSLPLSTPIAMESSSTWYWSYKLLSERHVVSLSNPVKNKAIASAKVKTDKVDSIMLATLLRGGFLAESYVPPREIIELRELVRHRANLVRERTRIKNLIHSYLLMNNIHIDARPFTKEFMREFIKIEDVRIKSYLRLIDALNAEIHDASDIIVQRAKDNQELRLLMTIPGISYYSALLIASEIGEIDRFKDSSSLVAYAGLAPSSYSSGGRTCHGAITKQGSRMHSWIIVESARVASTHDPRLRLFYERVRSRR

SEQ ID NO: 270865 - protein, 343 aa, unidentified
MADIFALDVSMGKSYCVWYRGKHCLKEFSLVHTKAGFNALRDMIKKAQKPIIYFEATGIYSRVIEHFCETNGLRFCHLNPLELHLKSESLRRVKTDQKDAHRIALTVQENTFRLIVPWKKDYLQLHELSRFYNQLNADWNYRLNHLHTALEQVFSELKQLFVNRTSKLALNIVELFPHPALVRPYSRIKLKNILMASTDKRISKMKAYKYADRLIDLAQKSYPTVSGDAIQVDEVCYYARQLIALTRKKEEVIKRMESIAQRLPYYILYCSFPGIGKQTAAQLMGELGDISRFDNANQLNAFVGIDIRRCQSGTYLGQDHINKRGNPIARKLLYFTVGNMIRQ

SEQ ID NO: 270866 - protein, 314 aa, unidentified
MSSPSCYLGVDVSKDTLVVAGQNRRWQFANTKEGQRKFIVQIKKLSAAGHVVCESTGPYHLPMCLALQEAGIAFTIANAARIYYFGLSEGIIAKNDPIDAALIERFAQSKRPPADPPLCREQLALSESVTHRQQLVEMIKVLRTHRQQVLHAALVTEIDRSILVLEKRLAALDRQLRAKIDAHPLWKAKFERLTQTKGVGFVTALTLLAKMSELGTLNRGQCAALAGLAPYDNDSGKYAGKRTIHGGRQEVRRALYMAALSAATHNPILKTFYQRLRGQKKLFKVAITAVMRKLLLHLNTVLKTLTAPPQTAAS

SEQ ID NO: 270867 - protein, 328 aa, unidentified
MNKGRFNVGVDVGKDELLVAVSGKKSRAFGTSLGEIKHMYRWLNKCCDGRPIHLGMEATGVYSTKVALRLIKYDRMTVSIINPAQIAAYGRVLLKRTKTDSVDAQVILDYVIKHSPPPWQPPSAAHRMLSSLVSQADAIKAEIGQWRSRQHAHEHTSGIPKEVSRSASKIMKTLQQELAKIETAIDQLCQDDRQLAENMTIMTSIIGIGACSASQILAHGGDALTRRSRRQLDAHAGLAPAQRQSGTSVRGKPHLAKQGNARLRRALYMPTLVAVHHNPILMRYYQRLLDRGKLKKVALAACMRKMLNIIRAMLIKRERFNIEYQPLT

SEQ ID NO: 270868 - protein, 391 aa, unidentified
MFYIGIDIAKKNHEASIIDSSGKSLSKSISFPNSTKGIEKFNNFIAEFGVTTNNCIIGMEATGHYWISLFSYIVDLGFTCYVINPIQSDAFRKMYVRQTKNDSVDSFIIAQIMRFGEFSISNFSDENTFALRNLTRYRFALVDECSDWKRKLVAILDQVFPEYSSLFSNIYGVASKELLSKYPLPEDMLSIPAEELGNLLYECSKGRLGINKAEEIQSRARESFGIKFAKRSFSFQIKQIISQISFLEEQLKEIEIEISCLLEDICPVITTITGIGSVLGASIVSEIGNISRFERANQLVAYAGLDTRIKQSGDFSATNTSLSKRGSPYLRRSIWLAATVAAFKDPALSIYYQGLRARGKAHGTAIGAVARKLTNIIFAVLRDQKPYTPNI

SEQ ID NO: 270869 - protein, 319 aa, unidentified
MRVGIDVAKAALVIAVRPSGERWSVTNDERGVATLVARLRALAPQLIVLEATGGYELLGVAALAAAALPVVVVNPRQVRDFARATGQLAKTDRIDADLLALFADRVRPAVRPIADAEAQELDALLTRRRQLLEMLGAERHRLGQVFGKGKRPVRKGLKAHISYLERELHMADTDLGELVRQSPAWRERDDLLQSVPGVGRVVSLTLLAELPELGRLSRRAIAKLVGIAPLSRDSGTLRGRRFVQGGRASVRAMLYMAALVATKRNTLIRAFYQRLVAAGKPKKLALVACMRKLLTILNTMVRTRQPWCPDLTTGALVSA

SEQ ID NO: 270870 - protein, 371 aa, unidentified
MSIIHYIGMDIHKENYTLCCYTIEKDELQYKQTVAPDYKMVLKYLEQLRSKRPEEVEFICGYEAGCLGYTLYHQLTERGVKCIILAPTTMGITNTGRIKTDKRDAGNIARCLAFGTYNAVHVPTEADESVKEYIRMRDDQKKALKIIKQQILAFVLRHGYRFEEGKNYWTGKHVKWLKSLELGGILQESLCEYLATYEYLTDKIERLDKRIEEFAEDQRYQENVKKLSCFIGVKTHTALSSLVEIGDFQRFAKAEQMAAFLGLVPGEDSSGGKQKRGSITKAGNSHMRRLLVEAAQSYARGAAGHKSADLKRRQSGNDPQIIAYADKANERLRRKFYRMTLKNGSKRNVAVTAVARELACFMWGMMTDHVA

SEQ ID NO: 270871 - protein, 389 aa, unidentified
MIYVGIDVAKHKHDCYIVNSDGEIIEDVFTISNDLAGFTQLLNSIPKVASEHIKIGLEATGHYSINLLNFLKDHYHHIVLFNPLQTNLFRKAHTLRKNKTDKIDARFIALMLHSNDYNSYLDISYHLQDLKSLSRHRFRLKSQSSKLKISLTRLITIMFPELPSVVYSIHQKSTYALLDQFSSKAEIANAHLTTLTNLLHKASKGKYSKDKAILIRDTARNSIGSDSRAISFELKQTLRLIRSLQDEINSLDLEIESLMNEVQSPITSIPGVSNTLGSMILSEIGDISRFDTPAQLQAFAGLEPSTHQSGNFTASNSRMVKRGSKYLRWALLEAARLIAMRDTTFKLYYQKKKAEGKHHYVAQSHVAKKLIRVIFHLLSNNLNFVPQIA

SEQ ID NO: 270872 - protein, 342 aa, unidentified
MEKRHMGIDLHRNRFTCCVRLESGRNYLSDWKLEALARFVKKLRPSDEVAVEVTGNTRFFYNAVAPHVARVVAVDPNQFRVISHSVKKTDPNDARNLALYLAKGLLPEVRMKEKTQAQIASLTQTRDTLVKLRTALKNKVNNILSAHGINLEKEALSSEKKLREVLAMRFDPMIRIELKVIVEQIRSLNESIAELEKTITEEGQKLPGHKNLTSIKGIGPLTGSILLSVIGDIHDFADEGKLAAYFGIVPRVSNSNETERSGRITKRGSKLGRTALVQCALIAQRYSPYLKRFYEKTKARRGTGKAIIALARKLLGIVYRTLKNNWVFEDFPNFVLAEEAAA

SEQ ID NO: 270873 - protein, 400 aa, unidentified
MYVGWDWAGKTHDVSVLDEQGHLVEHFAVDHDEAGFKQALRRLGRHGPAEEIPVAIERPSGLVVERLVEAGHPVIPIHPNAFNAARARWGASRAKSDPGDSYRLADYLRTDGRRLRRLRPLDEATRQLRALVRMRDDHIEARVAASNQLEALLNAHWPGAVCIFETVASDIALHFLDRYPTPDAAARLGETRLAAFLKRRCYSGRRTPAQLLERLRRAPTAASGLDPEVLAELVRHQVDLLRTLLHTCKELEHAIAAVLPDHGKVRILAGLPRIGDGVNLAQVLSEVGPILDASLNVDHAAAQCGACPVTKASGQSRGVQFRWAANTHARQALQTFADNSRHASPWAARLYAKHVAAGKRHPHVVRILMRAWLRVIWSCWHSDIPYDPARHRNELRLAGA

SEQ ID NO: 270874 - protein, 299 aa, unidentified
MMTIPSEGCWVGVDVSKATLDVCVSHPQQGLSVTNDPAGIQTLIGTLHDLHPTLVVLEATGGLERALVAELLVAQIPVAVVNPRQVRRFAEALGYLAKTDQLDARVLAHFAAAIQPPTRALPDAETQALAEQVARRRQLVEMLTMEKNRLLQTPYAAVRQDIQAHIDWLQQRLKTTEAGLRQAVEASPAWQAKADLLREVKGLGEVSILTLIADLPELGTLDRKQIAALVGVAPLNRDSGTLRGRRCVWGGVAPRSGRRCTWRPCRPCAITRSSKRFIPGCATPAKRPRSPSSRACASC

SEQ ID NO: 270875 - protein, 396 aa, unidentified
MLVLTSQKTKVRFVRPYGDVVEAPHSIDHTEQALNALIERIQSFDEDVKVVLEATGGYHQVVVTKLLSAGIFTVVVNPYIMKKYCAAALRKAKTDKIDSIRIASYGIDHWFSMTAYYPPDEIYAELKLLGRQYDRYVRLKVNCKIQLANLLDGVMPGIKTILQGTVPAYSTKDKLCDFVEKYWHYDNIKKMSEKRFIEDYGKWAKKKGYRCSESQAIAIYQLSKNNIPTLKSGTPSTKMLVLQAVKAVRDAEITLSLIISQMQEIASTLPEYSVVRNMKGVGDVLSVRLIAEIGDVRRFHNGSALVAFAGIDAPPYESGKFIGTKRNISKRGSSTLRKIGYEIMHSLKVVKPTEDSAVYDFIIKKETEGKPKRVAKIAGLNKFLRIYYARVMETYC

SEQ ID NO: 270876 - protein, 402 aa, unidentified
MTERTKEMFVGIDTSKNNHQVSFLNQTRVKEDLKVGNDRSGFEELIERLESYKEKGYRIKVACEPTGHYWENLGRHLKEKDFTVELVNPYHTSCYKELLDNSPQKDDKKDSQIISQLIKDDRTLNDNLPEAPYAELRELTHLREDLLKDRNRLKNKLHKWLDRHFPEYPKLFSDVFGTTCLGLLKEYRGPEGIREVDIKELSEKVHSLSRGQLGLGRARRIKKKAAETIGKTIAPTAAKVKLDYLLSRITSLLERINQVEKLIKEQLDQLEESRYIKSIPGVGWWGVAVFLGEVGDPTKMDRAKAVVKLAGLNLYRKQSGQSKSGLSITRRGRSLLRKVAYQLAVASLDDNQEFTNYYQRKVDRGKEKQNALVALSAKVLRVMYGVVKNGETYRPLEERETN

SEQ ID NO: 270877 - protein, 348 aa, unidentified
MTLTIVETRAVTGGVDTHADTHVAAALDSIGGMLGVREFPATPVGYAGLLGWLGGFGTVHLVGVEGTGSYGAGLARHLGAAGVRVVEVDRCDRQDRRRQGKSDPLDAVSAARAALSGRALGVPKGRDGAVEAIRALMVAKRSARGERTQTINQARALIVTGPDELRARFARHSPAALVAELAALRPRAGDVPGYATQIALRELARRVEFFDAQLQRLDALIVPLVTTHAPGLLAVYGVGPDTAAMLLVAAGDEPARLRSEAAWAHLCAVAPIPASSGKVTRRRFNPGGDRQANHALWRIVITRMSAHPPTRAYVARRTAEGLSKKEIIRCLKRYIAREVHPHLRPAGG

SEQ ID NO: 270878 - protein, 445 aa, unidentified
MNLNAAGIDVGADAHWVAVPPDRDEEPVRRFGAFTADLYALAAWLRQCQIETVVLESTGVDWITLFEVLEERGFDVKLVDAHHARQVPGRKTDVKDCQWLQELHTSGLLQGAFRPEDQVCVLRSSLRQRSMLVAMASRAVQPMQQALEQMHLKLTEVVSDMNGKTGMEIIHAILAGERDPQRLASHRDRRCQHEQATIAKALEGHWRAEHRFALQQALEQYEFLQQQLRACETQIEACLQTFVTHVEVEPPQTTPARQRRSRQRQAPSCDVHGYLHALTGVDLTQIDGMDALTALKVISEIGLDMTRWPTGKHCASWLGWCPGNKLSGGKRYRIRSKPTANRAASALRLAAQGLVNSHSALGAYERRMRARLGAPKAMTATAHKLARLVYSMLRYGTAYVDAGQQAYEQKYRDRVLTNLQRKARVLGYQLVHVADPGSAQAAATL

SEQ ID NO: 270879 - protein, 371 aa, unidentified
MKSIVYVGMDVHSSNYTLSCYMVENDRCFATVQVEPDYKEILKYLDNVQKNVGEPCEFHCGYEAGCLGYSLYHQLMDHGVDCTILAPSTMPTYKKNEIKTDKRDAMKIARCLAFNTYRAVYIPTKEDSDVKEYIRMRDAHKLALKKVKQQILAFCLRYDFRFTSGKSYWTQKHLAWLRSLALDALMREILDEYLQTYQNLVDKLERFDKRIEELAGGASYAEKVKKLSSLIGIRTHTALALVVETGDFARFAKANQYAAFLGLVPGEKSSGDKQNRTGITKAGNTHLRRLLTEAAQCYGRGRVGFKSKALKERQYGNTPETIAYADKANERLRRKFYHMVLNNNKKHNVATAAVARELSCFIWGLMTGHTA

SEQ ID NO: 270880 - protein, 309 aa, unidentified
MIHVGIDLHTRNMVNVAINDNAEQIKQAKLPTSRKALYDFFRDFDEPVQAVVECTSSWYWLSDWCRANGVPLTLAHAKMVKAISYAKVKTDKVDARTLAELLRAGLIPEAYQVGPERRALRELTRGRLRMIQRRGKLQSRLWSQAAKYNVHIDRNQWRYPDELVQWLQSQLPEVATVEAELLVDQILQLQSHIHRLEQMIERREAFSGDLELIKPIPGIGLVNGWSILAEIGDIGRFPSDKQFVSYSRLVPGSSDSGGPVGTSREARMVTSTCGWHSDRLLFAPIPITNPSNSFTERSSAAAVGMWLGR

SEQ ID NO: 270881 - protein, 407 aa, unidentified
MIFVGIDWGEAHHDAAVMDEAGRVIARERVDDGLHGVRRLHALIGDHADDAGRVIVGIETDRGLLVNALVAAGYQVYAVNPRAADRYRDRHAVSGAKSDRGDAKVLADMVRTDRHNLRQVAGDTPAVEAVKALARSHQSLIWARQRQVNQLRHALREYYPGAIDVFGADLADRDALAVLTIAPTPAAGRRLSARQITAALRRGGRQRNVDTRAAVIGDRLRAAQLTAPPEVTDAYSAIASAQLAVITTMTRQITELEAALATRFEQHPDAEILRSLPGLGVILGARVLGEFGDDPDRYANAKARRNYAGSSPITRRSGTRTVVLARFVRNRRLADALTLWAFCSLTASPGARAFYDRHRSNGDSHYQALRALANRWVGILHGCLRHRTCYDEQIAWPSATSPDSAAA

SEQ ID NO: 270882 - protein, 428 aa, unidentified
MDESHRNRLEEFRQLRKEVRHSEEYLIVGMDIAKDRHYAFFGTATGRTLLRRLVFSNDHEGFRKLLDQTEALRVQHGLKKVVYGMEPTANYHKPLGEYLINLGRTVVLVSGVTVGRNRESLDGRWDKHDGKDSANVADLISQGKCLYYEHPSAELRGLRGLLSLKRRLKKQEHGYRVRIRNQLIAQYFPEMDRYYERLGAEGLSIVKWCLAASEIAQLDVDPFIQRVTCRRIGMEKRRRLEEVWEKAGESIGCEGVPGVDHEAKVMVEGLRQIREMIKETEDKIEELCQQFPHYQYLLTIPGFGPDVSAKVLGAIGEPDRFENGKQVLKLGGLDLGADRSGKDSYKAIPEISKRGKSDLRYALYQAAFIASTKNRDFMCYYTSKLRGREKEKGIHTKMIVKLSAKMLVIAWTLMKKKEAFDPAYLTTE

SEQ ID NO: 270883 - protein, 344 aa, unidentified
MMNIQLKTNDVQVNSIHQAGIDVGAEELVMVIRKNGKLFNPQTFTNTRADRARLVMKLVKLPGIIVCMEATGVYHFDLAVALHDAGVLVMVINPKSSHNFAKVLMKNSKTDAVDANTLAEYAARMDFAAWTRPSDETIAVRCFSRRITALTTQKAAAKNHLHALTATQETPKAVLRDAKLAITQLQKRIDRLTTEALLLIGKHPKLERALTLLISIKGIAETSAISLMGELLLLPPDLTHREWVKFAGLDPKAFDSGKSVHKKSRISKAGNRNIRAALYMPALSAKQHDPHVRAYFQHLVANGKKPLQAVCAIMRKLIHAIHGMLKNDEPFDNTRFYKIPVSAV

SEQ ID NO: 270884 - protein, 346 aa, unidentified
MDVYIGLDVSLASTAICVLGEKGKIVTEAQVASAPESLVAFVSELPHEIAAIGLEAGPLSHWLHKGLTDAGFEAVLMETRQVKAALKAMPIKTDRRDAEGIARLLQMGWFRPVHCKTVSSQEMRALLTSRKSVQNALINLELSLRGVLRNFGLKLGQVSKGRYEACVRELIAGNAMLEAAAEPILRARAALRRELVGLERLARDLAGEDAVCRLLMTMPGVGHVIALTFRSAIDDPGRFRRSKDVGPWVGLTPGRDQSGERDIVGRITKCGDAGLRTALYQAATVMLNRGRPNWLKAWALRVAKFRGKQRATVALARRIGVVLHRMWRDGTEFRFTREEAMALQTA

SEQ ID NO: 270885 - protein, 399 aa, unidentified
MHYIGIDIAKKTHAVAILDERGEVKAGPFTISNTASGFQKLLERFKRTGASSDDCLIGMEATGHYWIALFDFLARHGFDVAVINPIQTDAFRKVDTIRKTKTDDIDAVLIANLLRFKAFEPSKLAEESTEALKQLTRFRMCLIKESTQLKNQATAILDRVFPEYHTLFHDTFGEASKELLKRCTTPEEILSTDVRTLARILSENSRGKLGRAKADVVKEAAKGSIGVSFASNALSFELKQIIGRLSFTRNQIDELDKEIGRILEDTSGKWLTTIPGIGANLAAQLAGEIGDPNRFEDAKKLIAYAGIDASKKESGTSIDSPGRMSKRGSSQLRYALILAADKARLFDPYFGEYYDGLRARGKHHYVALSGVARKLAGCILALMKEERAYQPQPPRMQQA

SEQ ID NO: 270886 - protein, 393 aa, unidentified
MICVGIDVAKDKHDCVILNSEGKVLAGVFTIPNNADGFDTLLQKIHGCTSPDDKIKVGLEATGHYSYNILGFLLNQGLPTYVINPLHTNLFRKSMSLRKTKTDRVDAKTIAAMLMSNVDLKSYTDTAYHNEELKSLTRYRFDKVQERAQLKQSVSRLVTILFPELEKLVPTLHMSSVYALLIEFPGAKQIAEAHLTHLKSLLKDASKGRYGRDMATEIRDAAKRSIGSVMPAKSLELRHTIRLIRELDSEIEDIEAAIEAIMEELQSPITTIPGMGFRMAAMILAEIGDFSFFDSPDKILAYAGMSPSTYQSGHLSLAGTYSHMEKRGSRYLRYALYNATKYVCHWDPGFAAYLAKKRAEGKHYNVALSHAAKKLVRLIYALEKSRQPYRRAA

SEQ ID NO: 270887 - protein, 396 aa, unidentified
MTTIGIDIGGRTHVAARCRDGQARADREILRVSQSRVGFDVLDTWLERQAGPVTLVTMESSGHYWMPLASHLCRRDIPVAVVNPLAAKYFAKSRLARTKSDPADARSLAEMAMRDTPDARDPLAGVELRQAARFAMTLVTEQAKVCQRLIRLVELGFPELGELFDDPTCRTAREVLRIAPTARAATRRRTTTLANANAGPGHRRLGQAKAERLQTAAADSIAVPELDAEVAFEVGLLLDQFDLLERQIEDADRRVAGLLDGETARRLQTIPGVGPSIAATLLAEIGDIARFDDFDQLLAYAGVHPAERSSGRKGSNPETAWRMSKAGNAHLRAAAYRMALVGVQHNPVIAAHYARKRAAGKSKMNALGHCMRKALSIVWGVWRNGADFDPDWGVET

SEQ ID NO: 270888 - protein, 324 aa, unidentified
MNYAALDLHERTVQCVLKDQDGRIVKESKTVKDEGRILAFLDGTDASVVMESGRNHQHIYDVLKERGYDVTVAHPLMVKAIAYAKVKTDKVDARVLADLLRADMIPESYVPGRDIREIRDLVRRRHYMVKLRTMQKNKVHAELATRWLKYEGDPFTEDGKNYLRSLAIDAVNDYLETIEFLNRKIHQLDEKVRRVVESDKYAKLLMTVPGISYYSALLISSEIADIRRFPDHEHLCSYAKLSPGVRQSGETQHTSKSMGNSMMNWIMIQCTRVHVRKYDSAITRFYQQVSKRRGEKVAIVAAARKLMRAIYIMLKEEQAFRLDG

SEQ ID NO: 270889 - protein, 407 aa, unidentified
MLYFGIDWSEDQHNLCIRNAAGAAISRVAFEHSLAGFERLEVERRKLNVPASDCPVAIETTYNLVVDFLLEHDYPVYIVPPQATEGYRNRQRSSGAHDDDSDAALLADILRTDRESHRRLRPNTALTQQILAQVRLIEILRRSIQRQSNQLRAVLRRTYAPAVGLFSDLTAPITLQFLSQYPTACEAQALSRQAFETFLRAHGYTRSDLIPLRYARLQEPAPAAQPAVVQAYRSQVQTLAHILLPQVRARAQVLAQLEQLFHQHPDAPLFDSLPGAGPLLAPALLAKFGDHRDRFPVAADVQALAGTCPVTERSGKRKRVKFRRGCDKEFRRIAQQFALASLSQSGWASAYWQEIRPHCHSDSHASRILANRWLAIIWKLWQTRQPYDEAYHLQQRARRRTLKSPRV

SEQ ID NO: 270890 - protein, 347 aa, unidentified
MLADQLDYVVGVDTHRDTHAIALVAAATGTLVLEAEVGADRPGYARALALARQHGSGGLLWAIEGSGSYGAGLARFLAERGELVVEVERPQRNERREGKSDRIDALRAARAALGEAKLALPRAGGAREALRALVTTRAGAVASRRAALNQLRALIVIAPESLRAELRQLTRAKLLARCARLRPDRHTDPQLRGTAFALRACARRAQAANAEERELKREITRLVDELAPQLLAEPGIGPISAAQLIVSWSHRGRFGSESAFAHHAGATPIPASSGQVVRHRLDRGGDRALNRALHTIIVSRRKHDPATIAYIQRRTAEGKSVREAIRCLKRYLARHLFRTLEAEPMTA

SEQ ID NO: 270891 - protein, 408 aa, unidentified
MELEPIYKRVIGLDIHQTQITACALIEQADGAVHVEQRQFGAFKKDRRALAQWAAALLPEQVVMESTGIYWKSPYGALEAVGIRAKVVNARHVKNVPGRKTDIADAQWLAMLARAGLLRASFVPPAMLRELRLIARQRQNLVGQLAAEKNRLHKVLTDGGIRLGGVVSDLHGQSARAMVQALTEGKSPPEILRYASNRLRASREDIFDSLQGDLSASHLFVLQELLSHIQEIEARIGRFDARLLQGLATQRHALALLQTIPGVDQIGAAMLLAEIGTDMEAFGSADRLASWAGMCPGNNESAGKHKSGHMRKGNRYVRRLLCEFAHAASRTQSVFKSKFQALVIRRGHKRSIIAIGHKLLRTIFFILKRGQHYRDSTTDYEALSVQKNAPRWIKALVKFGYINPPTGA

SEQ ID NO: 270892 - protein, 344 aa, unidentified
MGEVSTIGLDIAKSVFQVHGVDVAGAVVIRKRISRAKVLEYFGDLPPCLVGIEACPSAHHWGRELQALGHTVRLIPPSYVKAYLKRGKNDANDAAAICEAVTRPSMRFVPIKTKDQQTALMLHRTRQLLVRQRTMLSNALRGHLAELGIVSAKGRNGTGELLRIVADSADSRLSPAVRGILDVLAGQYGAIGAEIASIDKSIMVLHRGCEASRRLAEIPGIGPIGATALVAEIGDWNTFSSGRSLAAWIGLVPKQHTTGGKDRLGSITKQGNRYLRWLLIVGAMAVIRYARKHGTQKRPWLGRLMERRPTKVAAVALANKIARMAWAIMVRGERYKEPRLLLAA

SEQ ID NO: 270893 - protein, 423 aa, unidentified
MSYRIAGIDVHKKILAVVVADVSAEGEYDFERRQFGSSPDQLRLLTEWLIEQKIQEVVMESTAQYWRPVWQTLEQHWKAECQTWEGAGPMAGTLHLAQAQSNRGPRGRKRDFVDAERLLKRLVAQELILSFVPDAEQRLWRTVVRRKYQLTCDRVRLQNQLESVLEEAHLKLSSLVSDLLGASARRMLKALADGETNPAALAALADRRLRATQQQLCDALGASKELNPVYRRLVKMALEELQLIEQQMDQLDHEIADLLSQHQIAVQRLVEVPGLGVDSAHQIIAEVGAAAATFPSEKHLASWVGVCPGEEESAGVSASNRSPKGNRFMRRLLNQAANAAVKVKGSIFEIVFRRLLPRLGYQQAIWAIAHRLCRLIWKILHQGVRYDERGPAVSQRSRGARTAKMIRELRSLGYNVELTGNPA

SEQ ID NO: 270894 - protein, 342 aa, unidentified
MYYIGLDVHKKKISYCVKDGSSNVHAEGAIPATRWDLDRWMKTLPQPWTAAMEATIFTGWIYDYLKPHAAALKVAHPLMLRAIAAAKKKNDRIDAHKISDCLRCDFLPECYMASTEIRERRRTLRYRNLLVHQAVQLKNKISGLLMEAGVSYNKQKLHKVGYFKELLATNPDIHEGLRPLLRLCRETLVRLQKTESALVRSLQRDSLLAERVERLMTIPAVGPITALTWALEVGDVKRFSSIKKAIRYCGLCGAEKSSSETIKSTPISKQRNKHLQSVLVEAAKMAPRLSPELALIYDREKQKGNANRATLAVARKLVAYLVAIDRSQRDFLVVEKENRAAA

SEQ ID NO: 270895 - protein, 403 aa, unidentified
MNAVGIDVSKGKSMVAAMRPLGEVVFAPREVVHTADNLESLGWELISLGEDTRVVMEATGRYHEPVAAALHEMGIYVSILNPIVIKQSGAGSVRKIKTDKKDALKIAKYGLDNWTALREHTPMDTVRQQLKLFSRQYNLYMKTVVSLQNNLISLLDKTFPGANELFDSPARADGHQKWVDFVITFWHCDCIARYTPKTFTERYQKWCKRKGYNFSLSKAEDVYASSAGHFTTLPKNDNTKLLITSAAKELTAVIKTLMPVKAEVIRLAKSLPEYETVFAMYGVGEITAAQLIAEIGDVRRFDNRGALIAFAGVDPSPFQSGSYDSKSNPSSKRGSPHLRKTLFQVVSTHVKRSPANEPVYQFLDRKRTEGKPYYVYMTAAANKFLRIYYARVKEYLLSLDVSN

SEQ ID NO: 270896 - protein, 479 aa, unidentified
MTAGRMNRKQRKELTRQLRSEDPGLDVVHPRAAGIDVGNGAHYAAVRPDQDREPVRRFECFTVDLHRLADWLQACGVKTVAMQSTGVYWIPLYEILEKRGFEVYLVNARHTKNLPGRKSDVQESQWLLKLHTYGLLNNSFQPTAEIRRVRTYWRQRAEHVRAASTCIQRMQKMLTQMNVQLANVISDLSGLTGQTIVRTILAGEHDPQKLAELSHPRIKASREEIAKSLEGNWRSELLFVLKQEVEMYDIYQQRIAECDRELEAHLKRFADNVQQKPAEAGPVSEEQKDKKVRAKLPRSGKRAQGNAPCFDLRSELYRISGVDLTRIDSINVVVAQTVISEVGLDMSRWNTEAHFASWLGLCPDNRISGDKVLSKGTRHVISRAATALRMAATTLLRSRSYLGAQYRRLRSKLGAPKAITAMAHKLARLVYRMLKYGQDYVDKGMQYYEDRHRRQQIELLQKSAAKLGLQIVEIQAVGG

SEQ ID NO: 270897 - protein, 404 aa, unidentified
MYYVGIDIAKEKHYVCILDEQQEMICKPFWIYSDILGLRELIKRFSEISLNNDDFIIGVESTGAFSENLYEYVTDSDYPCVLLNSYQTAKYRDFSTMKKVKNDTIDAYVIAELLSTGKYKQSHISSDAFHSLKVLGRVKRSLADKIKTIKREISTVMATVNPEITRVFPNIFTKTALAVIKVYPTATQMEKATPKKLTKLFRHIKGNNFSEDKANFLIDLASTSVYAGRAYQARALMITTNIKILELLSQEKDEIEYQISLLIATTNDEALEAPMENLQSIPGVSEKTIVAVIGECGDLKRFTSAKAFIAYLGLYPTQYQSGNSIVVGHLAQRGIPIAKHALYMAAVASVRHNEQLRKIFIDKVSRGKSKKEALIIVAKKLATMMYSIVKYNKPYEPNRVLVSR

SEQ ID NO: 270898 - protein, 402 aa, unidentified
MKASKQYLRFCGIDVAKQKHVACIIDDSGRYLVRPKSIRNDAVGYQQILNCLKQSGRKKTILAGMEATGHYWYGLHDFLTRNGYAVAVLNPIQTAQQAKQAIRKCKTDKYDAFHIANLLRCGQYKAAVVPGELAMTCRLLTRLRYRMIRQSAMIKQLVNSRLHPVWPEYDGLFSNTFGTTSMEILQTTPTPKELLGLDVDDLGERIRKSSRGRFGPAHTQRILNSAKNSVGMQRGLYGVSTGIKFLLEQIVATEPIRKKLDVEIQKLAARLPEYLFTLPGATELTIVSLYGEVDPIETFERPSQLVAFAGLDPKVFQSGQYDAPGRHVSKRGSPYLRRTLWQMAYRAVCTEGDLRDFWRKKHRQNKHHLVAVTAAANKLCHIVWRIMIDKRDYIPKGYNPKS

SEQ ID NO: 270899 - protein, 345 aa, unidentified
MELHTIGIDLGKTVFHLVGLNPRGEVVVRKKYSRAQLLRFTANRQVHLIGMEACGGAHFLGRALREQGHEVRLIPAQYVKPFVKTNKSDFIDAEAIAEAVGRPTMRFVPIKSDDQLDLQSLHRVRERWVMRRTAVINQIRGLLLERGMTVRKGRRHLEAALPAVMEDAAGKLSATLRLLLAQLKLELDQLATRLEEAEALIQFTAQQSEACRRLDAIPGIGPVTATALIAAIGNGAAFGKGREFAAWLGLVPREHSTGGRQKLLGISKRGNAYLRRLFVQGARAVLQQRSKQSSGLSAWLKQLTARAHHNVVCVALANKLARIAWAVLATGQAYRPPAITAVAAA

SEQ ID NO: 270900 - protein, 375 aa, unidentified
MATNRTVLRDQLMAKPGDLYMSFELGDKHWHISIGGDRRSVSHYIVEAGHTEEVADCIAKAAARLHTARVHSCYEAGRDGWWLHRWLTELGVDNIVVDPASIEVNRRARRAKTDRLDADKLLAMLVRHHSGERVWSVLREPSPSDEDARRAHRELQRLTHERIAHTNRISSLLVLHNLRPRIVIGGRDWPAWWNANREQVPPTLRAELEREAARLKVVKEQVRAIEAARAKELAEGKQPLVAQLVRLRAIAAKGAWVLVKEVFGWRHFANRRELAGSLGLVPTPYASGDSEIEQGISKAGNRRVRALLVELAWSWSRLQPGSALTQWFNRRFAGGGKRMRRVGIVALARRLAIALWRYLQTGEIPIGAQLKPTRI

SEQ ID NO: 270901 - protein, 339 aa, unidentified
MLYVGIDIAKNKHDVTALNVPGKTVLKPLTFSNNKAGFELLDLSLRQLNQDCLIALENTGHYAFNLLNFLHEQGYKVYTYTPLLIKEFAKSLSLRKTKTNKKDAHGIALKLLSDPNREQFQHDNRQVELKILARHIHRLKKKQSDWKVQYTRCLDIIFPELDKIVEKHSEYTYQLLTCYPNPQKRLEAGFDKLIEIKRLTASKIQDILSVAPRSIGTTSPAREFEIIKHYKRLIDKAKKCVNDLMAEFNSVITTVTGIENRLGAVILAEIRNIHAFDNPAQLQAFAGLDSSIYQSGQIDLAGRMIKRGSPHLRWALIQAAKACPRFSPAFKAYLKTKLE

SEQ ID NO: 270902 - protein, 355 aa, unidentified
MDGTKYIGMDVHKESISIAVMNSAGKLVMECVIATKANTVLQFVAGLRGELRFTFEEGTWAAWLYDLLRPHVTKIVVCNPRRNALLKDGNKNDRIDAQKLAELLYLNKLKPVYHGEHGLRAVKELVRSYLTITRDFTRVMTRVKALYRSWAIPCTGKQVYGLRHRAEWLAKITEPGVHRRAEFYYQQLDALRTLRQDVRRELLKESKKHRAWKLLCQIPSIGPIRAAMLMGILQTPHRFRTKRQLWTYSGFGIETRSSADHRSVEGQLRRARKPASIRGLNENHNHDLKNLFKSAAIIASSKPGAFHEFFTALLAKGMRPEMARLTLARKIAAITLHVWKKGECFDARYLKPQTA

SEQ ID NO: 270903 - protein, 405 aa, unidentified
MNAAEVFAGLDWATRAHAVCIIDAAGRVLERFEATHDRDGLAELRRRLARYGSRVRIAIERPSGLIVDALVDAGHQVFPIHPNAVKASRPRYRSHGAKSDASDAYLLADLLRTDGHRWAPLSPQSDSIRALRALVRARDDLVASRIALANQLRTTLEAFWPGAASIFAAVDSPIGLAFLRRYASPAKAARLSEAQLGRFLRVQHYSGHRSASQLLARLRSAAPGHASELTAAAMADVVLALVAVLKPLLKQLAAITARIERFVESLPDGQIIMSFPRAGRVCAAQILAEMGDVRERYPSDDRLAAEAGVVPLTYESGKTRCVGFRWACNHRLRRAITTLADNSRHANLWARGIYMAARQRGCDHPHAIRILARAWLRVLWRAWFDRKPYNPTLHLGALNASKQGG

SEQ ID NO: 270904 - protein, 350 aa, unidentified
MYFAGLDAHLKYVTVAVLDRLGALVLETTVSTRDPERLLAVLAPFRPLAVVVETCPFWPWLYDLLVPAGIGFHLAHAKRLRAIATAPQKNDRVDARLLARMLLSGLIPEAYPRPGDQRDLLRLLRHRTTLVRYRTRLAGRIHSQLHQQRLLLPREQLLRQATRAWLRETAWPRLTAEQQAIVTTHLTLIDQLTPLIQALERRIDTAASAHPTAVLLATIPGIGPYRSLLLTAELLPLTRFPRVEHLASYAGLAPVTRSSGGHTRHGSIPQGANRWVRGALVSTIPSHVRAAPHSPVTRAYAQLTARLGWRVARVAAARKLLRIIYLMLRRGEPWRGADRGEADVRDEVHA

SEQ ID NO: 270905 - protein, 362 aa, unidentified
MQVRHIFVGIDLGDKNSVARIAVDREKSERLGFMNTGAGRARLFREVKKRAGQAGGAKILMAYEASSCGYILRDEAKAADIECWVLAPTKMEKSVEQRKHKNDDRDADDVLEKLRGHVLAGNRLPTVWVPDQQTRDDRELVRARMELAEKQTGIKSQIQMLLKRYGLEKPSGIGSGWTVGYWRWLEHLCESEAQGWGMRQTLGSLLRQLRFVETEIQQMEKPLEQLANAARNKPIIEELMQESGVGLLTAMAYRTEIGHAGRFRRGRQAGKYVGLTPTSHESGQQNDRKGHISRQGPPRLRKMLCQASWVHIAHDPTARQIYQELVLRNPKKKKIALVAVMRRLAVRLWHRMRNVELQMVGA

SEQ ID NO: 270906 - protein, 339 aa, unidentified
MKRTTIGIDIAKNVFEIYVEDGATQSVERKRLARKKMLPWLANRPPALVGMEACGGAHYWARELTKLGHEVRLMAPQYVKPWVQTNKSDQADARAICRAVQEPGMRFVRIATEAQQDVQAMHRVRSRLIGNRTALVNQIRGILLEYGVAVPQGVASLRKVLPTLLAEERWSPLMRQFLTAQQAELTVCETQVAAVTGAITRASATQPVCQRLEQVRGIGPLGASALWLKLAGGAYQNGRHVAAALGLVPKHTGTGGKVRLGGISKRGDRYLRQLLIHGARAVVAQVGEKPDALSGWLRRLVARRGMNKAVVALANKNARVAFALLHGEQPYEVTKMCQA

SEQ ID NO: 270907 - protein, 424 aa, unidentified
MKFKMQDKQNQLIERITDKHLVVGVDIAQQFHVARAVNFRGIVVGDPITFENNEEGFAELLNWIYKIKRIHKLKATMVGMEPTGHYWINLSKWLIKQDIEVVTVNPHLVKRNKENRDNTQSKSDKKDALVIADMVKNGYYAFVRNTSESFEKLRVLMSNRDVIVKRFVSSVNQLNRWVDIVFPELRQVFKDITAKGAVATLRLFPSPMELGSMKPEEIVIGWKSLMKRQPGLKKAYLLLNVARKSVGTRQAIDAYKLHLEQLLEEYDLAVQQLERVERAIKDELPKIPFANKLLLIKGISEISLAGILGEAGDLSGFSHGNSLLRHAGLHLAEASSGKWKGQIIISKRGRSRLRRFLYLATMSLVMNNPEFKAIHSNNVKVKKMKKMKSIMKLVGKLARIFVGIARKNESYCAKKVQPLTELTA

SEQ ID NO: 270908 - protein, 388 aa, unidentified
MANCIMVGCDLHNKTMVLRHAVGLGPVCGRTFANNPSGRQAMIKWLHEFSPAKAGSRILFAYEASSEGFGLYDELRANGVECYVLAPTRIARSPKHARGKNDGRDALQLLELLRAHVLAGNALPSVWVPDLHTRDDRELVRMRQDLAQKTTAIKNQIQALLKRNELRRPDGTGRGWTHGYWDWIKDLSTAPAGGLGAGGRAALSSLLRQLVSIESEIETLDEQVLHLSRSDRYESKVKALRTVKGVGVLTAMVFLAELGDLTRFSNRRQLAAYLGLTPTSNESGEQSDRKGHITRQGPSRVRKVLCQAAWSLVRTDPRAKAIYASLAGQKTDKRGKLALVAIMRQMSIVMWHRVLDGGPPADRPGRFSRTSGAAAPASSPPESTGKAA

SEQ ID NO: 270909 - protein, 402 aa, unidentified
MNSVGIDISKGRSTVAVMRPFGEVVISPFEVRHTDSELSELARQLKSLDGETRVVMEATGNYHAPVAKLLHDAGLYVSVVNAKLVHGYGNNDLRRVKTDRKDAVKLANYGLDRWLTLPRYVPEENTRLLLKNCYRQYRQYSKVQTVLKNNLISLLDMTFPNANRLFVSPARADGSEKWVDFVAEFWHCECVSERSLKSFVNKYWRWCRKHGYNFSEEKAHAIYDEASGHIGVMPKSETTKLLVEQAVSQLSATSAALAALKQEMQSLSSQLPEYPVVMGMFGVGPILGPQLIAEIGDVRRFYSKKALVAYAGIDAPPNDSGDVIGRHKSMSKVGASSLRRTLFLIMSAYLQNSPPNEPVYQFMDRKRSEGKPYRVYMMASANKFLRIYYATVKAYLETLEQF

SEQ ID NO: 270910 - protein, 411 aa, unidentified
MEVIYKRCCGLDVHKETVVACLLIRDGGKVVKEIHTFLTMTVDLVVLHDWLKAHQVTHVAMESTGIYWRPVFNLLEEDFTVLLVNAAHIKTVPGRKTDVKDCEWIADLLSHGLLRGSFIPPEPIRDLRDLTRYRKTLTDERVREVNRLQKFLEAANIKLSSVATDVMGVSGRAMLEALVFGGTDPQALSELAKGRLRKKLPELKKALEGRFRPHHRFMVAEILTHLDFLDESIERVSQEVSSRIVPFSTKVDLLDLIPGINQRVAEGVLAEIGVDMSCFPTDGHAASWAGLCPGNNESAGKRKSGKTRKGDQWLRRYLMEAAWAAIRKKGSYLSALYHRLVVRRGKKKAIVAVAHRLLVIIYHMLKDQGTYRELGSDHFNKLNVAYVQRHHVKRLESLGFKVILEPLSKAA

SEQ ID NO: 270911 - protein, 343 aa, unidentified
MSTYYYIGLDIHKRTISYCIKAIDGSLIGQGKIEADRKSLDGWAKGLPGPWVGAMEATIFTGWVYDFLKPYAVDLKVAHPEMVKAITAAKKKNDRADAEKIADLLRVNLLPECHMLSEEIRELRRVLRYRNHIVRTAVKMQNKISGLLMEVGVSYSKRRIHGKKYFHEILERVEEIPPSVKELLKLSRSSYEMFRTFQKRLVETLHTNNLIHDRVQRLMTIPGVGELTALTWVLEIGDSGRFTSIRKAVSYYGLCSAQRESAGKEQRGPISKKRNKHLQTMLIEAAKLAPHWNEQLAIVHERELKRGDRNRATLAVARRLVAYMLAVDKKQADFKLPAAMQAA

SEQ ID NO: 270912 - protein, 331 aa, unidentified
MFPVGIDVSKNTLDLCILYDGIKGRIKTRNIQNNRHSVENILRWLRLQHCGPEDVHVVMEATGVYHERLATELHDAGFRVSLANPHRSREFARGMGIMTKTDKVDAYMLACYAFLKKPHHWEPPSPEIRYLAALLRRRDVLLGDALREENRLEKYLSTDTPADIISSCRRMAQLLREEVSNIERQIKAHIKASPALRRDYTLLNSIKSVGPQLGMHMLVELRSHNFASAEQAAAFLGVVPIEKRSGTSVRSRPRMSKIGPPQLRARLYMSALCGKIYNKRMRNIYDEMCLRGKPKMVAIGALMRKLVHWCYGVLKTGTVFNDESLKQVLST

SEQ ID NO: 270913 - protein, 440 aa, unidentified
MEHVIIGVDPHKLSATIEVVNDQEKLLGSGRFATDRVGYAAMRTYARTWPDRVWAVEGANGVGRALAQRLLEAGEDVVDVPAKLAARVRLFDTGHNRKTDARDAHSIAIVAVRTDGLRVLKVDGELEALRMLTERREALTRRRVQSVNRLQALLAELLPGQAKKDITPLQAKAMLAGVRPRDVAGKTRRRFAAEELAELIAVDAKIKKATTELKAMILARDSRLMEIHGVGPVVAARILADVGDVARFADRNRFASWTGTAPLDASSGEQNRHRLSRAGNRRMNHMIHIAAVTQIRLNTEGRAYYRRKCVDGKKPMEAMRCLKRRISDVVYRQLVADAQRVALAASCQKDCASPGGHCGASYESSAVDLPPHVDTSDQPLPGPAHPTLPGTKPHANPCAASAPRPSRRRAGAVKVERPTGRTTLTATSAGAHSAAPKPPS

SEQ ID NO: 270914 - protein, 407 aa, unidentified
MRLFVGDDWAEDHHDVEVMDEAGKVLAKARLPEGVAGMARLHELTGRNLGEDAEDAEVSVGIETDRGPWVTALVAAGYTVYPVNPLQASRYRERHGVSGAKSDGGDSHMLADMVRTDSHQLRRTAGDSPEAQGIKVVARTHKTLIWERTRHLNRLRHQLREYFPAAIGAFEDLAAADTLELLGKAPDPARAAKLTRAQVSAALKRARRHHIADKTTAILAALRSPQLGQPPALTAAYAATVRSLTAVITTLNEQVKALEEQVGDHFGRHPDAEIYRSQPGMGAILGGRVLGEFGDDPHRYVSAKARKNYAATSPITRASGKKKLVTARWIHNDRLIDALMTWAFTALNASPGARAYYDELRAQGLEHNDALRRVANRLVGILHGCLKTRTLYDEATAWSHRESSLAA

SEQ ID NO: 270915 - protein, 331 aa, unidentified
MYVGVDYHKRYTVATQMDPQGVILGQVRLKNDPDSLRTFASSLPPGSKIALEATEGWYYFYEMLESYCPEIYLAHPLKTRAIAEARIKTDKIDSTILAHLLRANLLPTSYIPPREIRDIREILRYRASLVSLRTSIKNKVHAILSKNGVVMTYSDVFGKKALHSIELLPLRDCYKQELQGYLQCIETLKRLIAEVSETIKRLAEESPQAKLLITIPGISYYSSVLILSEIGDIGRFPSAKKLCSYAGLVPRVHSSGGKTRYGSITKQGSKWLRWILVELSHHFIKGSPRLKCLYARIAKSHGRNTARVAVAREMLKIMYVMLRDNRAFVIR

SEQ ID NO: 270916 - protein, 334 aa, unidentified
MLYAGIDIHKAVFQAAVLDPDSGELRESRFEPSCERLNDWAIEWKDRLAAVAIEATTGWRWVARELQAHGFEVHLVDPGRASALRGRRRQPKTDRLDARWLALLLARELLSECEAWLPPAEIQRLRDRTRLRKALAGDRTGWAQRLHALLAHEGWPCSRGRLLTGEGQRWVAALELDPHVRGQVDVIVAVMAALDQQLELVEGELRLLARADRRCQALQTIFGVGPILACHLLAEIGDVRRFKRPRQLVRASGLDPSVTESAESKRRGRLAKQGSRHLRWALVEAANHSHRHSAPDHELYRRTVRRCGRGRARLTVARKIARRSYHVLLATEAA

SEQ ID NO: 270917 - protein, 390 aa, unidentified
MVFVGIDVAKDKHDCFIISSEGEVLAEVFTITNNKAGFKCLLQKIRSCAGKSQKIKVGLEATGHYSYNILGFLLDNGLDSVVINPLHTNLYRKSLSLRKTKTDRVDARTIAAMLMSDVNLKSYTDTAYHNEELKSLTRYRFDKVRARAKLKQSVARLVNILFPELEKLVPSLHGAAVYALLSELPGAYQIAACNLTHLKTILADASKGRYGRDKSIEIRDAARQSVGSRMPAKSLELQHTIRLIQEMDMEIGEIEVQIEAMMVEIHSPIITIPGIGTRMGAMILAEIGDFSQFDSPDKILAYAGLSPSIYQSGQYISGHAHMEKRGSRYLRFAIYTAARYACLWDPTFAAYLAKKRAEGKHYNVAISHAAKKLVRLIFAMEKSGQVYQVT

SEQ ID NO: 270918 - protein, 337 aa, unidentified
MQESIVSLEDSCVCVIDANGKVVREGKVSSEPTALIAWLSEVGVTLTRIGLEAGPLSQWLYAAMRQAGLAVELLETRHVRNAFKIMPVKTDRKDARGIAELMRLGWFRPVHCKSMEAQETRAMLTARKLVQKELLETESSLRGILRGFGLKVGKTTPVGFDGRIRELVAGHPSLEVITSALLSVRAVLRRQFNEFERRLRAIARTDTRTRLLMTTPGVGVIVALTFACAIDDPSRFKSSKAAGPYFGMTPRRYQSGQTDYSGRISKNGDSSVRAALYEAGHVILTRPLKGCTALKSWAMRIAKRAGMKKATVALARKLAVIMHRMLADGTPFTTQPA

SEQ ID NO: 270919 - protein, 327 aa, unidentified
MGSHHKERSTKMNKHNMLCAGIDTGKRKLEVALTSGLRLQIDNNAEGHAALSGWLRKHRIKRVGIEASGGYEREVVAQLRRWRFVVVVFQPAQVRAYAKFHLQRAKNDKIDAALIALCTADVRKIHAPPDARLIPLAERLTFMEQITEDMARAKNRHESCRDPRTKRHWEAEIARLKGVLRIELKALVADIRQHSDLSKRLDLIASVDGLGIRTALAIAVRMPEIGRVTREQAAALVGLAPFDHDSGDQVGVRHIEGGRERLRKALYTAALPAVFLWNHQLKLMYRRLIAAGKPHKLALVACARKLLIYANTVVERGTSWTSLRAAA

SEQ ID NO: 270920 - protein, 366 aa, unidentified
MIVIGADTHKASHTFAAVQAQTGRIVGTRTVRADAEGLLAAWQWAHSLSETCERVWALEDCRHVSGRLERMLIGQGERVVRVAPRLTGELRRGERRPGKSDEIDAVAAARAAIREGVENLPVAFLDEQALEIRLLNDYRAQLVAERTRHQNRLRWHLVDLDPELEHRVPDRALAREQWVGRIGRRLARLPQSVRVRIARDHLKRIRELTRSERSLERELIVLIEAHRPDLLAEPGIGPITAATLIGRTGGAQRFPTDGHYARQAGVAPIPASSGNTNRVRLNRGGDRQLNCALHRIAFTRARTCPHTRAYLDRKQAEGKTRAEAYRCLKRHIARHVWHLLNQTPDPTPQPTLSIHCNTPTGTLTLT

SEQ ID NO: 270921 - protein, 345 aa, unidentified
MPIVGGLDIHRKQITFDYLDTVTGQVRRGQVAPADRAHLRAWLARFAGRDDVAFAVEACTGWRYIAEELAAAGIAVHLAEPADTAFARGRKRHAKTDKTDSRHLRMLLAEGRLPECWIPPGHILEARALLELYHDLRAEHTAWVQRIHAVLFHHGAPALGEGTLRTERGLAALRAAAAGCLSPAGQLQVATALEVLEALETRMHAVRHQLLAAARHLRGAKVLAARLYGVGPVTALAMTCWLAGAGRFSSSRQAVRFAGLDITVRSSDRKGPPGRLSRQGPPVLRWAVYEAGKTHARSSAPDHRYYATVKDREGGKRAALSEARKILRQACHILAELGDDALSAA

SEQ ID NO: 270922 - protein, 386 aa, unidentified
MPQPNDLSRSLIALDPNSTIIAVVELSHSSWLVGGVVPGIERQPRKKLEPSPERLLALLHRWRDEAVRAGRTITRIVAFEAGRDGFWLARWLEARGVEAHVIHASSLAVSREHRRAKTDRLDTELLKRGFLGWLRGERGHCSMARVPTIAQEDAKRPNRERDCLVGERTRIVNRIKSTLVRLGIRTFKPTLRKAAERLATVHTPEGMPLPPNTLAELQREMARLSLVVSQIKEIEDARQKRLEQQHETGSHTMVRLLARIVGIGVETADMLVHEVLSRPMRDRRAVARYAGLTGSPDESGAQRREQGLARAGNARVRRGMIQLAWRFLMFQQESALAMWYRARTADSRSGTRKTMIVALARKLIIALWRFVTTGEPLEGVVLRPAS

SEQ ID NO: 270923 - protein, 358 aa, unidentified
MKYVGIDVHKKMCQAAILDEDGSLLEEARFANTPEEIEEFAGKLSTFRDEVKAVVESTGNLWIQIHDRLEKHGFTVALSNPYKTRLIAEAKVKTDKVDARTLAALLRADMIPTCYVPGEEVRSRRELLRHRVNLVKNRTMVKNRIHGILDKHGLRMPGAYPFSRGNVEWLRGLSLGFMDDAILRSDLALLGALSEQVEGIEAKIAALAVEDKRTRLLMTMTGVGYFTAMLIVSEVGDVGRFRSEKAFASWMGLAPVVRQSGERTWIGGVPRRSNGRLKSALVECAQTAVRYDARLGGMYERVSRRRGPGCAVVAVAHEMARIMYYMLVRGEPYRDMNRGLTERKLKSMSKRAYDGLRN

SEQ ID NO: 270924 - protein, 371 aa, unidentified
MAESSRTLYVGLDVHKDSIAVAYAPEDRGAEVVSLGAIGPRQCDIDKLIRKLQAKGATLVFVYEAGPCGYWLYRYLTRIGLVCHVVAPSLIPRKAGDRVKTDRRDAITLARLMRSGDLSSIYVPQVEDEALRDLSRGRDDAMQDLKRSKRRLKSFLLRQDIRYEGRANWNAAHLRWLSEVVCPTPPQQIVFQEYVRAVTEQQERLQRLERELHEAVKGWRLYPVVEAIQALRGVELTGAVILMAELGDLTRFDTPRQLMSYLGLTPSEYSSGARRRQGGITKAGNSHARRALVEGAWAYRYPAKVSRHLQLRLEKLPAEVQAIGWKAQVRLCKRYRQLTARGKHVNQVVVAIAREMAAFAWAIARIVPLAA

SEQ ID NO: 270925 - protein, 402 aa, unidentified
MNAVGIDVSKGKSMVAIMRPFSEIVSPPFEIKHTTSDINSLVDLINSIEGESRIVMEHTGRYYEVLAHQLSEANLFVSAINPKLIKDFDNDSLRKVKSDKADAVKIARYALDKWQNLKQYSVMDELRNQLKTMNRQFGFYMKHKTAMKNNLIGILDQTYPGVNTYFDSTARSDGSQKWVDFASTYWHVDCVRKMSQNAFTCHYQNWCKRKKYNFSQSKAEEIYGKAKELVPVLPKDEITKLIIKQAADQLNSTSTTVESLRTLMNETASKLPEYPIVMAMKGVGLSLGPQLMAEIGDVSRFTHKGAITAFAGVDPGVNESGTYEQKSVPTSKRGSSDLRKTLFQVMDALIKTKPQDDPVYQFLDKKRAQGKPYYVYMTAGANKFLRIYYGRVKEYLASLPKS

SEQ ID NO: 270926 - protein, 348 aa, unidentified
MNILKQTVGIDASMDDFEARFGTIDSNQDECISKAEKFDNNFKGFNKFLKWALSLRTSKLLPVSFVMEVTGVYHENLAYFLHSKGFQVVIVLPNKIRNYAKSLETKSKTDPIDAMVITRFALERKLTAWSPPEPFIRAIKELSREYVALKTMMTEVKNQIHAKQFANFTDKDVIKRKRRLLKELQKQIDEILMQIKKLFQSKPGLYEKITKVATIKGIGEITAIIILAETNCFEHVTSISQLISYAGLDVVLNESGKKKGKTTISKKGNKFIRRALFMPAMSACRSNQKMKETFAHLVSKGKNKKAALIAVARKLLVLIYTLWKNDTEYIQDYKRTKPENKNLVACNA

SEQ ID NO: 270927 - protein, 461 aa, unidentified
MSKSRKRKKGLCFEDRPVEQPCAAGIDIGAREIFVAVHHDPEERPVRRFATFTEDLEQMADWLERCGVTTVAMESTGVYWIPLYEILDRRGLKPCVVNARHMKNVPGRRTDWHECQWIQFLHPVGLLRAAFRPEDQVCVVRAILRHRQQLVEMAAQHVQHLHKSLTQMNLQIHHVISDITGTTGLAILDAILAGERDPATLAKLRDQRIKATSETVIKSLHGNWREEHLFTLRQSLELYRFYVGQIATSDLKIESLLADFTPRVDPEQKPLPADGKKNRSAAKRRKKAGLSAGFDLRTEGYKLFGVDVTQIPGLEGNILPLFSEVGRDMTRWPDAEHFVSWLALCPDNDISGGRVLWRGMRKANNRAGQIFRLAAQSLHRSQTPMGDYLRRLKAKLGPAGATTATARKIATLFYILVRRQVEYDPSLWAQLDQQREKRLEARLHRQAAQRGYKLVPLKTAA

SEQ ID NO: 270928 - protein, 426 aa, unidentified
MNEQGGSRQHKKRCWAGLDWGGSGHAVSVVDDRRRVLASFAVGASLEDLESLSQRLRACGEVAGVAVEATRHPVVGHLLSAGFTVYAVNPKQSKNWRGCASVSASKSDARDGLVLAVELAGRHESLRPLRREDPAVAELAGLCEKVRDLVDERTALVQRLKATLGQYYPGALCFFSDWTSPVAWRFVKRFPRPKTLAQARKQTLCAFLKSNRVGLRPVWLERIEARGDAARWPLPADSEALEAVALATVAQLLALQPHIDKMDRLIAEQSKKVPQTTLMKSLPGAGKRLAPALAAMAALTTTGKKQNLEALRCVSGVAPVEDKSGKRQRVRARRRCNRHWRDVLYLFAHCSINCCDWARAFYDMHREQGDNHAGALRKLADKWLKIIHHMVEANEPYSDVRHVQSLRKHASWFPPEPGGKPGGKLH

SEQ ID NO: 270929 - protein, 351 aa, unidentified
MSHNLNDAVAVVGIDIGKNSFHVVGLDSRGAIVLRQKWSRGQVEARFANMPSCLIGMEACVGAHHLSRKLRTLGHDARLMPAKYVRPYSKGQKNDFRDAEAIAEAVQRPTMKFVATKTAEQLDLQALHRVRERLVSQRTGIINQIRAFLLERGIAVRQGLRFLRAELPRLLAAPPDVLSPRMVGVIEGLAEDWRRLDERIEHLSGEITALAHQDAGCKRLVSVPGIGPIISSAMVAAIGTGDAFSKGRDFAAWLGLVPKQISTGDRTILGKISKRGNRYLRVLFVQAAWVVLIKPQSWERHGLKPWIEAAKKRLHRNVLAIALANKLARIAWSVLARGRSFEARPVMASAA

SEQ ID NO: 270930 - protein, 348 aa, unidentified
MTMIGGFDVHRQQITFDCVDDDGLVHWGQIRPATRTRLRDWLAKHCPDGNGEFGLEGCTGWRYVSEELLAAGARVHMGDPAEVAALRGPKKRAKTDRSDARLLRTLLLEGRFPESWIPPAQVMEVRTLGRLYCALMDERRSWQQRIHAQLFHQGCPPITALLSHAGREALAGAELSAAGRQYVGTTMRCIDQLNAEIVPLRAQLVDFARHQPGCQALQARHYGVGWLSAAIMWAEIGDARRFHSSDQLVRFAGVDITVYSSDAKRAPGHLARQGSPELRWAAFEAAKCAARPGSPDYAYYHQVAARKDGKRPTLAVERKILRRCYHTLRELGDTALAVPSTKINHIAA

SEQ ID NO: 270931 - protein, 341 aa, unidentified
MRKTLHCGVDLHSNNAMYVITDERDRQVLRRRLPNELPVVLKVLAPFRPRLKVVAVESTYNWYWLVDGLQEKDYPVVLAHPSEMDQYDGIKEADDLTDAAFLARLARLNILPTGYIYPKEDRPVRDLLRRRMLVVQHRTGIILSLENMAQRQTGQNVGWRALRKLADEERRELLGDHDCLAFVTAEQVDLIEQLNEKIKRFEKKILEHVQLRPAYQCLQTLPGVGPILALTIMLETGDIGRFPTVGDYTSYCRCVRATHTSNGKKKAHNNGKNGNPYLAWAFVEAVHHALRVCPQAKSFYDRKKAKRNGALATKALAAKWSKAAYYMMKRQENFDRTRVFG

SEQ ID NO: 270932 - protein, 402 aa, unidentified
MPMLSIGIDVSKGKSTVCGMKPGGEIVYTPFEVQHTREGMSELVSLLRSSGEEVRAVLESTGSYHCPVVAALLENGIFVSVVNSLRMKRFCSQSIRKVKTDRIDAMQIALYGLAYWQELQPARLPEDTYRELQLLARQYYQMTSMLIKAKVDFNALCDQVLPGMQELMNDHAGRHKLSDFVLRYHHTTHILEMGETRFRKDYCKWAEKKGYRNCERMAALIFATAQNGIPVLPNAPSTQIVITEAIRVLHTVEASRDTILAQMQALAKTLPEYSLVREMPCIGDTLAPRLIAEIGDVRRFHSKRALIAYAGIDAPPYQSGKFCANNRHISKRGNRYLRKTGYEVMQSYVMHKPANDPIFTFIEKKRGEGKSGKLAMVAGLNKFLRIYYGKVTELYRSSSAIE

SEQ ID NO: 270933 - protein, 357 aa, unidentified
MSETVPTLDVIIGVDTHKLTHAAAAINALGARLGTMTIPVSGKGYQALEAWAQSLGPVRAFGIEGTGSYGAGLSRFLCQSGHAVLEVNRPNRQRRYQHGKNDPLDAESAARAVLSGQATALPKAGTSSVEMIRHLKVARDTAVKGRSQAMLTLKALIVSSPSALREQLDRVVGKMTLVRHLAALRPGLLTSTVASAKIALRAIARRWLALDEEIKGHDVHLEALTAARAPELVEAHGMGTGTAAEMLLLVGDNPERIRSEAAFAKLCGACPIPASSGKTNRHRLNRGGNRQANAALYRVVVTRLRGHQPTLDYIRRRTAEGKTRPEIIRCLKRYVAREIFGYLCAAPEPANTPSGAA

SEQ ID NO: 270934 - protein, 409 aa, unidentified
MSYCATNQSATTPSELKSARPPSLGGEGRVVGLDVHPDTFAAAILQGREPLKARVLHSITRQPLDALVAWATRHTSVHDVLVIEASANTFAITERLQAIGRQVFILESHRAGQIGKSYLANDKLDAAKVARIYLSGLAIKVWAPDPETRQRRELLSTYQRCVKESTRGQQHLRSFLNEHALRLPKGFRLCRPEALPRLLALNGWSSRQQLLLQEMHGSLIATRERRQRLRRMMALEIDERPDFLRLYKLAGLNLITTYALIAIIGDIERFTHSKKLVSYLGLNPSVVESGEFEGSGALRQHGRGSLRALLIQASKRLLTTHNPLQKWGLAVALRRGVNKAAVAVARKLTVAVWHVLKGHWNRALDENTTLITKLAKLATELGVATLKQLGYEGKSAFQQQKLEVLRTYA

SEQ ID NO: 270935 - protein, 348 aa, unidentified
MKFYVKQHKYYCGVDLHARSMYVCIIDEKGTIVKQKNMEAGPGEFLKIIEPYREDIVVAVECMFAWYWLSDLCRAEGIPFVLGHALYMKAIHGGKAKNDRIDSHKIAALLRGGMIPMAYVYPSEMRATRDLMRRRNHLMRKKAELLAHIQNTNHQYNLSPFHKSICYKGNREGIAERFGEECVRKSIEVNLSLIDHYDKLLRKLEYYINQKAKAHDPESLFRLLSVPGIGQTLSLIILYEIHEINRFPRVQDFVSYCRLVKPSKESAGKLYGHSGAKIGNAHLKWAFSEAAVLMLKQSPEIKKYKARLVKKHGKAKALTILAHKIGRAVYYMLKRKEVFNLEDFLKKK

SEQ ID NO: 270936 - protein, 341 aa, unidentified
MNHYAGIDVSLECSSVCVVDANGKILREAKVASEPEALITWFRSSGLDFERIGLEAGPLSQWLFAAMRQAGLAVELLETRHVRKAFEAMPVKSDRNDARGIAQLMRLGWFRPVHCKSMSAQETRTLLTARKLVQSKLRDVENSLRGILRGFGLKVGKTTEREFAGRIEELVAGHPHLQVIAKALLSVRAVLRSEFAAFEKQVRKMARSDMRTRLLMSTPAVGPIVALTYASAIDDPTRFKSSKQAGAHFGLTPKKYQSGETDYTGRISKIGDASVRTALYEAAHVMLTKPVKGCSQLKSWAMRIAKRAGMSKAKVALARRLAVILHRMLADGTPFNAAAAT

SEQ ID NO: 270937 - protein, 387 aa, unidentified
MKKIYLNVACAGMDVHYKFSNVTFRDPNGRVVRRQRLDHRHREELQERLNRWPKGIPVVMEASFGWGWLSDLLEEAGQEVQLSNCYKVEQMREARGWVKTNKKDADLISLLPFEQSDWWKVWRASPEVRNRREQMRFRGDLVGLQTMVKSRIHAIFHRHGIFHEFSDLFGGKGRKFLAELCLHNPTNLSSQGLLALRGQVKLLDHLRRQLADVERILHKQLVKTPLIMRLKTIDGIGLILAHVLAAEIGMIERFRNQKALACYSLLAPRSDDTGQDDPRHSPLGRHLGHRGNRTLKWAFIEAAHGAVRSGGRWRAIFDRVTNGGKRDRNRGYIKVARELVKVVYAVWAKGVDYHTVPPVRPGRNKNKKKSRSETGQLLHPMVHALPA

SEQ ID NO: 270938 - protein, 462 aa, unidentified
MPRREERETSDRSTRPIEGLPLIRASVAGIDLGSERHWVCAATRDRSAREVASFGATTAELLRMAEWLKIRQVESVAMESTGVYWIAPHEVLEGQGLQVLLVDTRQLARVPGRDKKTDPTDCEWIQRLHSCGLLRGSFRPKEAVCMLRTLVRDKANLVAESGDWLRRMQKSLDQMNVRVHRAVSDIDGVTGMAILRAIAGGERDAQKLAKFRNARCSKTEQEIAEQLNGHWREDHVFSLQQGLKMYDAVQERIVAYEQEILRRLGEMEADEPPQPTAPPLQNTNKAKAIKKRGQEAKRQALYRMSGVDMTQIDAVGVETVEVVLSEYGPDLSRFPTEKQFVSHVTLAPRVPQSGAKPVKKKKRNSASTRVAAALRMAALSLRHSQTALGSYYRRIAQRCGGDIAVFATARKLATLVYRLLRWGQPYVDEGAAAYENRYRQHRIARLAATAKQLGYQLTPVTA

SEQ ID NO: 270939 - protein, 362 aa, unidentified
MDVHKKFVVATIAFTDFRGVTIYKKKRFATFNSDLRALKKWLLDHHCSEVCMESTGKYWIPIFNILEDSCHVVVANPKYVRAIKGQKTDDKDSEWIADLFKFDIVPSSYIPCREIRALRELFRYRQKLIGHRSSEKNRFQNALTVSNIALSSVLTDTFGKSATAIVDYILTCETFDPEYCKSLLLKKAKDKADDVVKSILGYELRGDQSLKIKVCRKHFDQINECVRTLDDAISDLAKPYHKFIDLATTVPGITEKSATYIIAEIGVDMAVFKSSKRLCSWAGLTPQNNESAGKKKSVHISRAGVYLKPLLVQCANAAIKDKKNPYFKYKYDRIKKRRGHKRAVIAIARMMLTCLFHMFSKQ

SEQ ID NO: 270940 - protein, 345 aa, unidentified
MEQHAGIDVSLKLSSVCIVDTSGKIVRETKVASEPEALIAFFKGLSVPVTRIGLEAGPLSQWLHAELLRAGFEAVLLETRHVKAALSAMSTKTDRNDARGIAQLMRMGWFRAVHAKSVGSREVRALLVARKQLLSKLMDLEASMRGILRGFGLKMGVVTRKGFEARVRELSAGQAMLERITNAMLDARAALWREFEQLHREMLRIVRDDEICRRLMSIPGVGPLVAVTFKSAIDNPGRIVKSKSVGALFGLVPKKYQSGERDFSGSITRTGDESVRTALYEAANVMLTRTTRFSSLKRWALEVAKRRGLKRARIALARKLGVVLHRIWVDGTTFQWTKPNPAIAG

SEQ ID NO: 270941 - protein, 307 aa, unidentified
MSQVYIGVDISKNWIDISHPVHGCARHAMDDLDGFAAQASAEQAIVIFEATGRHDRPLALALRTAGARFVRLTPTAPKDLARVLGIKAKSDRADAVLLRRYGELLQPAPQDAAPQDTATLREYIVRRRQLVSLRQIERTRAAEHMPAQVAASGERVIALLSAEIAAIDVLIAAEIKRSERLSRKARRLQTAPGVGPVTAATLLAELPELGQLNARKLAALAGLAPMDNDSGQRHGRRRIKGGRCTVRRALYSAGMHASRGAGALRPFRDTLVERGKPPKVAITAAARKLLTILNAMIRDQKDFSYTT

SEQ ID NO: 270942 - protein, 382 aa, unidentified
MGLVEGNAYIGLLVGESNTLLDWGNMVDVSSEAKSSATGVTHPYRRTEHCDKIHEYRCDKEVGVIGIDVSKDYLITSRGRVRKYENSKKGYEEILKIKPCVIVLEPTGVYAIRPSQYFKEKGIKVLQVSPNMLSREKEFRGKKTDFYDAEKLENMVNKAKEYDYNPLKELVTLYLFLKDIETKYKNRLKRALFLVSDNDKVSKDRLEKLAKGDFTQEELYQLEYTPLVLEEIKILAKNLLETQERLKEVRRMIEGQVPQDHVLLTIPGVGRLAAGIIIGIVGDVKRFPKPESFVAYCGLDPVVERSGKAVVSRGISKRGNKYLRSLFYFLAMRSYSRNPTSLKFYETHKDRLKGKKLYVALARKLARVVWSVWYNNKPYEPK

SEQ ID NO: 270943 - protein, 350 aa, unidentified
MLHAGLDLSRKRLDVCLLSEEGELVEEFAVPPDADGLRGLVRRVGDHGAPVRGVIESMTGARFVHDTLERMGWEVLIADAQKVKGLAPLACKTDKIDARVLAVLSERELVPAIWLPDPRVRAEREQARFRLHLVKHKSMLKHRIHSTMLSFGHPCPVSDLFGVEGRALLGRLEMPDPWRETVDASLQLIDYLECQIAEVNRALKASGAEHPYVPLLLTVPGIGWVLAFTIASEIGDINRFASAKKLCGYTGLCPRVNQSGEKDRRGPLTKQGPKYLRWAMLESTTHALRHPAYAERYQRNKKRLGKQRGARVAQIDIARKLTEAIWHMLTNNQPFAPTPASGGAAFRLAA

SEQ ID NO: 270944 - protein, 310 aa, unidentified
MENIVVGIDISKDQLDIHVLPSQASFCVARDAIGLEELVQRLLVLKPKLVVMEATGGFETIVASTLAAAGFPLAVVNPRWIRAYAQALGRLAKTDRIDAAIIAAYGRDAKIEAQKVPDEAAQMLGELVARRRQIVETMGVERNRRRSLTRSKLIKGLDRILAALQKELSDLEQDIDQAIRGTTAWREKDELLQSVPSVGPRISSMLIAELPELGTLTRRKIAALVGVAPMSDDSGKHRGRRHIKGGRIRVRCALYMAALVASRRNPVIAAYYQRLIAAGKKPKEALTACMRKLLVILNAILRDHRPWQPT

SEQ ID NO: 270945 - protein, 417 aa, unidentified
MNSFPETIPIQRYIAIDSHKEYVFIGGMNDQQKWILRPRRVQMSRFRDWALKNLKPGDSVILETTGNVWDIYDVVAPLVTKTVVAHAGKVRQIAEARVKTDKEDVKRLLTVLIGNIVPEVWVPPMHVRELRSLISFRWRLSKQITMSKNRLHSVVQRFNLNPPEGQLLADKNLSWWDQQEFSDLTGFQVKSDRDIVDHLEAQKANVDHKLAELSNTEPWASDMVFLMQIPGFGLLFSMITLAAIGDISRFDSPKKLVGYAGLGAGVHDSGKKHQDMSITKEGRKELRWALVEAAWAAVRSDPYRKAQYEHFKQTKHPNKAIVAVARKMLVSVWYILTHREPYRHIDDDTLAYKMVIWSQRMDPNALRGMTRQQFVKYGLLRLGTGQDLTRIERNGVPRRIAPTNEVLALRPELRSPS

SEQ ID NO: 270946 - protein, 354 aa, unidentified
MIIIGADYHPGFQQVAYVDTDTGELQERRLEHREDAEKFYRDLAAQEVKVRVGMEASGHARWFERLLAELQFELWIGDAAEIRTKRVRKQKTDRQDAQLILRLLLENRFPQVWVPSWENRDLRQLLWHRHRMVQARTRIMNQLQAVALNEGLRCKKKLWRDAGREQLESFRLAPWASRRRHDLLELLDRLTPTIAELTQAIEQEAEKCPAAQRLQTHPGVGALTALAFVLIIGRADRFECGKQIASYLGLVPLEDSSGQRRRLGHITKQGNSLLRFLLVEAAQVTVRSDQEWRNRYFHLVLRRGRKIAKVAMARRLAVRLYWMWRKGWIYEQLKNFGSHAGEPGHPDGVQSSTE

SEQ ID NO: 270947 - protein, 348 aa, unidentified
MKNKSFVGIDISKKVIDVSIFREDTNIKMFPHEVFNNTRKGFGDMCSWLKKSRVVLSQALFGMEFTGCYSLDLEKFLTSKNYSFCMLSTRIVKHHPMGTIDKSDKNDSAKIADFLYRYDGTECAKPYKLPNKAMQQLKQLVNERKFLVEQRTNFMNRMQMFETKEDSAMYESYIKKLNHDIEKIDQEECELMSKEEDVFDTFQNLLTIPGIGFVNATNIIAITRNFTAFDTARQYARYVGVAPCSHTSGTSVKWRARPSAHCNGQVKADLSMAALRAVEYDVEMQMFYNRKLGGRKDSDTKRKALNAVKFKLIRRMFAIGKQKRKWEVLNTSDDRKNLHIEKSKASEL

SEQ ID NO: 270948 - protein, 385 aa, unidentified
MTIQIEVPRFIPRDYDVFAGLDVDKKSMAVTFADHAGSQRALRMAHQVTPLLNYVRKHFAGQRVAFAYEAGPTGFGLHDELVRRAYTCVVVAPSKVPRAPGERVKTNRLDSRKLAESLRGGQLHSIHVPSAMYRNLRHLVQMRDTHVRQLTSSKLRIKSLLLFEGIAFPDPHEKWTARAMRELQTLPCSEPVRFKLDDLLDTLHFHFQAAARATKQIRQYCLQEPELQQSIEVLLSLPGIGWIVASHLVARLGNHREIKNGRQIAGFLGIVSSEHSTGDKENRGEITRSGDSRLRNKLIQSAWTAIKRDPELRAFYRRIYQRHPKKVAARKAIVAVARKLTNRIYVVLKEQRPYVIRPDSSIAPLTAEETVGPRERLDGAQNDQS

SEQ ID NO: 270949 - protein, 390 aa, unidentified
MSATHLSQSTATSAPVLYLAIELGWNSWTVAFTVGLGQRPRVRTVVGRSTSQLLFEIRRAKRRFGLAEQTPAVCCYEAGRDGFWVHRFLVANGIENRVVDSASIEVNRRKRRAKSDGLDATKLVEMLIRWHNGERKVWRVVNVPSAEDEDLRQPHRELIELKGERTEHTNRIKGLLASVGLSISVDAKLPERLLRLRQWDGAGVPPEMCQRILRELERWQLVDRQIHQLQAKRTKELRDDQTPGVEKMRQLLKLKGVGDNGAWILVREFFGWRLIRKGRELGSLAGLTPTPYDSGGTRCEQGISKAGNRRVRCMMIELGWMWLRHQPTSNLSRWYLWRFARGNRRLRKVGIVALARKLLIALWRYLETGEPPQGARLKGQKLTLRLKKAS

SEQ ID NO: 270950 - protein, 407 aa, unidentified
MEVLYPRCAGLDVHAGSVTACARIATGATVTYEHRTVSTTTRGLLELVEWLTAHGCTHVAMEATGVYWKPVWHVLEEHVTLVLANAMHIRNVPGRKSDMNDATWIADLLAHGLIRSSFVPPAPIQELRDLTRTRRQLVHEVARHVLRIQKTLEDANLKLTQVMSDIVGVSGRAILNPLIAGETDPDRLADLTRGRLKATRADLLDALHGRVTDHHRFMIKLHLTQIDALETAVATIEARIGDALGPFRAAVSLLTTMPGLSETTARVLIAEIGTDMTRFPSVGHLISWAGFCPRLDESAGKRRSTRTRQTSPWLKPTLINAAWAATRKKDCYLRAQFLRIKSRRGAKKAILAVASSMLTAAYFMLRDGVEYHDLGPHHFEQRDKEQLAKRLIQRLRDLGVAVEVKAA

SEQ ID NO: 270951 - protein, 318 aa, unidentified
MKTTMNQSINVGVDTGKYQLDIYIRPLDIYFTVSNDESGIKEAVNIIKKHKIERIIIEATGRLEMPFIMACAKANLPFVIANPIHIKRFAGAIGQRAKTDKLDAQLIAHYGESIKPALSKLKPDIMQTMSDLVARRSQLLAMQTMEKNRLQVLPKELVMTIKPILTAFKNQIEKIESKITRLIEKTPDYQAKSLILQSMPGIGKIAAASIIGNLPELGYINSKQASALVGVAPINRESGRFKGIRKIQGGRHQVRTVLYMAMMSAMQCNPVFKATYQRLVEGGKPKKVAIIACVRKMIVILNSMLRDGVMWDASTVKN

SEQ ID NO: 270952 - protein, 456 aa, unidentified
MKASVFARPEERKINQNLKMNQTKLNRKTTAASGRGDFAALIGLDWASQRHALCLYDCATEKRENSTLEHTPEAIAQWAQGLEQRFGGKKIALCLEQAKGPLIYALLEYSFFVLYPVNPATAARYRQAFKTSRAKDDPADAQVCLELLLHHREKLTPWLANDGTTRELSRLLEARRSLIDLRTLLTNMLRDALKSYYPQALELAGQDLFAPLGCQFLLKWPSLEQLQKARTESVRKFYYAHNCRRMDVIEKRLHTIAEMKPLCRDRALIEPARIQVKMLARQLLQFGTALTEYDSRIEHLFAQHQDASIWQSFPGAGPTLAPRLCCAFGSERSRYQSALSIQEYSGIAPVQERSGKNQHWIHRRWARPHFVHQSFFEYASQSALHCPWAKAFIQDQLARGKTHPTAVRALAFKWQRIMFVCWRDRVLYHETIYLDSLKHRGSYLARKLDQELPKAA

SEQ ID NO: 270953 - protein, 293 aa, unidentified
MALRRVPNRSSGLSVLKRILSRYTVSLVLLESTGGYENLAVTYLQSLGYDVCVINPRQARDFARSMGRLAKTDKIDAQILCRLADVIDASPERARFVKPLTDERRQRLVSMVRRRRQLCDLMIAERNRRAKTDAYGSESISTVLDFLTDEVARIDRDIAEHVDSSFSDISSLLQTFTGIGPVTASTLLGELPELGKLNRRQITALVGVAPFNRDSGYMRGRRRISGGRSGVRNVLFMAVLSAVRFNPVLKAFFARLVAAGKPKKVALVACMRRMVCILNAMLRDGSRFEVAPG

SEQ ID NO: 270954 - protein, 337 aa, unidentified
MKYCGIDLHSNNSVVSVIDETDRVVAEKRLPNDSAKILAFLDPWQAELTGVVIESTYNWYWLVDGLQAAGFIVHLANTTAIKKYEGRKHSGDETDARYLAHLLRLGILPTGTILPPKARSVRDLARKRMQLVQNRTPHILAIENITARQHGMRLSGAQVHRLTAEAIDQMGLPAEVALAMQSSLAVIQTLSTQIGLLENRLAENVEARAEYALLKTVPGIGPILATVILLEVGSIERFDSAGNFASYARCVDSRHMSNGKKKGEGNTKNGNKYLSWAFIEAANFALRFCAEAKRFYERKKAKTNPILARKALAHKLARACFHILKERRPFDTTRCFV

SEQ ID NO: 270955 - protein, 390 aa, unidentified
MKKSTTAKRSLKGLPKGKQTHLRQLAANQRLTVALDLGDRTSRYCVLDEAGQVVSEDQLPTTRAGLDSLLGKMPPSRVSLEVGMHSPWVSRHIAGMGHEVIVANPHKVKLITQSLKKNDRMDAEQLARLARVDPKLLSPIRHRGEEAQADLAVIRARAELVDTRTGLINCARGLAKPMGERLKPCDADQVKESLADGLGEALQKVIRPLLRSVEEISKQIGVYDQEIEEIGQRYPEKKVLTQVWGVGTLIALTYILTIEDPERFEHSRDVGPYLGLTRKQRDSGESQPELGISKAGDQLMRRLLVQGAQCILRQGAPDSDLKAWGMARLPNGGKKDGKKGSKKGSKATKKKAVVAIARKLAVLLHRLWVTGEVYDPQYNRKAAQAGKVAA

SEQ ID NO: 270956 - protein, 368 aa, unidentified
MKMNAIKAAPAASAIALKNEKSAKAKRILIGTDVHLRGYQAARKVDNGVIGVVENFRSEEALLLHVEKQCERAEQVVVVYEAGPLGYTLYRKLTARGVLCYVCAPDSSEQKRKRRKNNKIDARNLTSKLFNYLNGDEGALQLARVPTEAQEQLRLASREHDQMVEERKRLGAKGNALLLTQGFGSWSNWWRPKAWAQLSSLVPEWLLERLKIWVDVLKMLDEKICLAKVALARTCSGPRPKGVGALSQIQLQSEVLDWSLYTNRRKIACLAGMVPSEWSTGDTERRGSITKVGVPAIRRIIVEMVWRIVLFQPQYKPVQKWQKVLQGTNPALKKKAVVAIGRQLIVDLWRLQTGRVTAQELNLLMVGA

SEQ ID NO: 270957 - protein, 422 aa, unidentified
MKNTAARKLKQVPEGYLIIGVDPHKKNHAAVVITQDLTIRDRFKFDNTREGLEFLLRRVRTDMVKSDCRGIMFAIETGGHYWRNIAYYLDEKGIPFRFINQYTLKRRREGKDLNKRKNDYRDSEVAAQLLCTGEFVESVIPQGVYAELRTAHNAYRRLVKERTRITNLVKSLLESLFPEFVHVFKDPCGLTALSVLSTCSIPGVIAGMTEDEFIAVIEAQHHGRRLMRRKLRGLHGVAKTSIGIEAGAQSVSAEISFLVEKFELIRGHIQAIERTLIKLVDASEEGKYLLSIRGLNYIAVAGLLAELGSFKSYRSAKQMIKMAGSNPTESESGGKRRSRTPMSKQGRPVLRYCAWTSVIPMLRLNPDFRAWAKERRERPAHANPLNGREVVGAALNRLLRLSFALVKNKTYYQSPQLVQVTG

SEQ ID NO: 270958 - protein, 345 aa, unidentified
MKIVGCDLHTRYQQVAMLDQETGEFIERRLEHESGQARGFYAALIGPVRVGIEATGHTRWFERMLRELGHELWIGDAAQIRAAMVRKQKTDARDAAHVLDLLLSGRFPRIWRPTMAERDLRQLVWHRQKLVWMRVAVSNQLHALAMGEGVCRKKKLFTQKGRMELEALTLDPWASRRRHELLQMLDQFDTTLDELDGAVAEQAEQNPAAALLMTHPGVGPVTSLAFVLTLGPVERFERSQQVVSYLGLNPREHSSGGRQRLGAISKQGNPMMRSLLVEAGHTAARLDSQLRQDYQRLKLRRGNGVAKVAIARKLAVRMYWMLRGPASYAQLVRMQASPWATLVRK

SEQ ID NO: 270959 - protein, 316 aa, unidentified
MNVIGFDISKDTIDVTLLRNSGQIDYIKIANACEGFEKLNDWIRSKRIRKISISMEATGIYYEEAADYFSEIYQVFVINPLKIKEYSKSQFSHTKTDKADSRLIAEYTKRHLDKLTPFKPSENPTLYKLISLLQQLKQQQNESQNRLHAAKDAFIRATHEAIILLLAKQIDQTAKRIDLMIQQQDSLNMHYKNLQTIPGIGKDTAAILLHHLTDKQFKTANQFVSFAGLSPRIEQSGTSVNKKGRLSRYGHRRLKRALFMPALVAYRIKAFPKLVQNLSQKPKMIVIVALMRKLAKIAYYIHKTQKPFEKMRYQIA

SEQ ID NO: 270960 - protein, 406 aa, unidentified
MDVIYPRCAGLDVHKQTVVACARLSGDGAPKQEVRTFPTTTSGLLALADWLESLGVHHVAMQATGVYWKPVWHVLEGHFTLVLANAAHVKNVPGRKTDVNDATWLADLLAHGLIRASFVPPTAVQELRTLTRTRKQFVRERGSHAQRIEKILEDANLKLSGVISDVLGKSGRAVLQALIDGQDDPERLASCVGRVKATRSELVEALRGRITAHHRFMLKLHLDHIDTLDKAIAQIETEVGLGLEPFRQAAKLLSTMPGISSVSAHVVVAEIGIDMSRFATPAHLLSWACLCPRNDESAGKRRSTRLRRGGKWLKTTLVQAAWAAIKVKGSYLQAQFHRLRARRGANKAIIGVAASMLTAAWHMLRNGTEWHDLGAAHFDRADATKTANRLIRRLQQIGYTVEATPA

SEQ ID NO: 270961 - protein, 309 aa, unidentified
MEAIAVGIDVSKDRLDVHVHPAGTVLNFSRDSAGIEALVGGLSGVGAQRVAVEATGGFESVVVAALAAAGLPVVVVNPAQVRAFATALGRRAKTDPIDAAVIAQFVAATKPQVRALPDAATQALADLVARRRQIIQMIVAEVQREKRAAARTKRSIARLLKTLRRELSEIDADIDETVRGSPVWCEKEDLLASVPGVGAVTARTMLAELPELGSLGRRQIAALAGLAPFTRQSGRWRGKSFIGGGRASVRSVLFMAAMAAMRWNPMLSAFRQRLLAAGKPKMVALIAVARKLLTILNAILRDKTKWQNA

SEQ ID NO: 270962 - protein, 422 aa, unidentified
MLEQTHDEQEIIQRVAALDIGKAELVCCVRVPDPKGGSRRLEEVKTYSTMTRSLQLMADRLLDLGVTRVVMEATSDYWRSPFYLLEAHGFQTWLVNAKDVKHLPGRPKTDRLDAVWLCKVAERQMLRPSFVSPVPIRRLRDVTRYRIALVSDRNREKNRVEKLLEDAQIKLSVVASDIFGMSGRDMMAALIAGERNPQALAQLARSRMRGKIPQLEEAFVGYFTDHHRFLLAKMLTRIDALNADIDELETKIESQLAPFAPAVARLDEIPGVGVTAAAVIIAEVGEDMTRFPTPAHLSSWARFAPGVKESAGRKKGNGSTGHGDPYLARVLGEAAVGASRTNTFLGERYRRIARRRGKKKAVVAVGRSILVIVWYLLSDPEIGYHDLGPGFYDSRINPERKKRNHIRELEALGYKVTLQPAA

SEQ ID NO: 270963 - protein, 337 aa, unidentified
MIVVGVDVHKHSLTAVAVDEAGRALAERTVAAAQELLAWSASLGPERLWALEDCRQLTRTLERALLAADERLVRVPPKLMAPQRRAGRMRGKSDPIDALAVARAALREPRLDHPRPGEQRLREVKLLVDHRDDLIDERRRAQQRLRWHLHDLDPELAVPLGALDRGVWLDRLGRRLARLEQKAQVRIARELVSRCRSLTRAILQLDRELEHRAAATAPRLLELPGCGAISASKLLGEIGPIARFETDAQLARHAGVAPLEASSGKHRRHRLDRGGNRQLNCALHRIAITQARIHPPARAYLERKQAEGKSRREALRCLKRQLARVVFNTLKASPALT

SEQ ID NO: 270964 - protein, 421 aa, unidentified
MKSASTTPMTQLPEEPPNGVTGGLDWARDDHAVSVVDARGREVIRRSVEHSAAGMRELVTVLADAGCREVAIERPDGPVVDALLDAEMTVVVISPNQVKNLRGRYGSAGNKDDRFDAFVLADTLRTDRARLRALVPDTPATVALRRTCRGRRDLVAHRVGVANQLRAHLRAVFPGAVGLFAEIDSPISLSFLTRFTTQDQADWLNPARLGAWLAKMGYSGKVDPAVLHERLLAAPRGALGAEATANAPTTRALVAVLVTLLEQIKTLSAEIDTQLAAHADAHIFTSLPRAGRVRAARLLAEIGDCRARFPTPEALTCLAGVAPSTRQSGKIRAVGFRWACDKQLRDAVCDFAGDSRRANPWANDLYQRARARGHDHPHAVRILARAWLDVIWHCWQAGETYDTTRHGALQRLLNQDQQPAA

SEQ ID NO: 270965 - protein, 343 aa, unidentified
MKHIGMDIDSTNTHISVFSDRGRELKRTHVATREADLVAFLMSIPGPKQVALEESQMADFVTRILEPHVAKVVRCLPQYNRLISESEKKCDPEDARCLAELLYLNKLKAVHHAPWDYRQLREGVRAYWKVSRSLTRSKNQLKAFYLFNSVHCVGEKVYSGRHRTGFIKEIDKRSGNKKLLQQLYAQMDFFRGSKAQHVKILKELAEPLRQNVLCLVTHPGIGFIGACTLTAYLENGWRLKKRSKLWQYSGVGVRRHESAGKGHRGGSRKGNRYVKNAVMTAAAAISARRNADNALTRMWRAGIEAGIDPDRVKRNLARKVVVIAQRLLRFQEEYNDDRVVTTQ

SEQ ID NO: 270966 - protein, 371 aa, unidentified
MKESSKTLYVGLDVHKDAIAVAYAPEDRGAEVVSLGAIGTRQCDIDKLIRKLQSKGATLVFVYEAGPCGYWLYRYLTRKGLSCHVVAPSLIPRKPGDRVKTDRRDAIMLARLMRSGDLTSIYVPRVEDEAIRDLSRGREDAMRDLKAAKYRLKAFLLRQDIRYEGRANWNAAHLRWLSEVVCPTPAQQIVFQEYVRAVTEQVERLRRLESALHDEVKTWRLYPVVEAIQALRGVELTGAVILVAELGDLTRFDNPRQLMSYLGLTPSEYSSGERRRQGGITKAGNTHARRALVEGAWAYRYPAKVSRHLQLRLEKLPADVQAIGWKAQVRLCRRYRQLIARGKHANQVVVAIAREMAAFAWAIARIVPLAP

SEQ ID NO: 270967 - protein, 386 aa, unidentified
MHDSTNFPVPERTGIRGDCATLFVSLELSRSSWVATSLAPGSKKMSKHTLVGGDGRKLLDLLARLKTRAEQRIAAPVKVVAIQEVGLDGFWIHRLLEANGVESHVVDPASIAVPRRHRRAKTDAIDGETLLRTLMAWQRGEPGVCAMTVPPSPREEDCRRVSRERATLLRERIQHTNRIRGLLFGQGIANYNPLHKNRRECLEELRTGDGRSLPTHVKAEILREIDRLELVLRQISEVEAERDEMLRPAEASSPAALLMRLKGIGAEFATVLYFEGLFRHFQNRRQLAAYAGLAPSPWKSGSIDHEQGISKAGNPRLRTTMVELAWMWVRYQPDSALSGWFRRRVGSERGRTRRISIVALARKLLIALSRYIPHGEIPAGAVMKPV

SEQ ID NO: 270968 - protein, 403 aa, unidentified
MNNVAGIDVSKGKSMVSVLRPFGEVVAKPFSIGHTGSELKELADYLKSLDGETRVVMEHTGRYYEPVARFLHEEGVFVSAVNPKLIKDYGNNTLRKVKTDKADARKIARYGLDNWAELRQHTPMDTIRMQLKTLNRQQSLYAKTKTMMKNNLIALLDQTYPGVNALFDSPVREDGSQKWVDFATAFWHVDCVRNMSLTAFAERYRKWCKRHGYNFSQSKAVEVHTGAQDLIAMLPRDALTKTMVRQAIDALNAVSASLERLKAEMQALAAQLPEYPVVMAMHGVGDSLGPQLMAELGDVARFTHRNAITAFAGVDPGADQSGTHEAKSTRVSKSGPPELRRALFLVMDCLLKTQPQDDPVYRFMDKKRAEGKPYLVYMTAGANKFLRIYYGRVKEYLASLEEN

SEQ ID NO: 270969 - protein, 339 aa, unidentified
MIGLDISKHVFHAHGVDGRGRAMFRKRISRGKLLDFFATQPSCTVALEACGGAHHWARQLAQLGHQVRLIPPAYVKPFVKRQKNDAIDAEAICEAAQRPSMRFVAVKSEEQQAAGMVFRTRDLLVRQRTQLINAIRGHLTEYGWVAPKGPSHVAMLADLIDEEEMASSLPGAARMMFRVMLDLLSGLSRKIADLDKEIARRAREDEVSRRLMTVPGIGPISATAIVALAPPAESFAKGRDFAAWLGLTPLQRSTGGKQKLGAISKMGERTLRRLLIIGSSAVVKQASKRGAPRGSWLEQMLARKPRMLVTVALANKMARIVWALLVKQETYRAPVATRA

SEQ ID NO: 270970 - protein, 455 aa, unidentified
MTGAKSPGSDALSMVNPGAAAIDIGSTMHMAAINPQVDDNPVRAFGTFTGDLHEMARWFKSCGVTNVAMESTGVYWIPAYEVLEQHGFNVILVNARYAKNVPGRKTDVSDAAWLQRLHSYGLLRGSFRPEAGVATMRAYLRQRERLIEYTASHIQHMQKALMEMNVQLHHVVSDITGVTGMRIIRAIVAGERTPNTLAQMRDVRCHASVDKICAALSGNWRDEHIFALCQALALYDFYQTKILECDRKLEAALKALQIGKGHDVRDLPKVRTKKRQVNTPDFEVRSTLYRVLGVDLTQIHGIGPSLALKLVGECGTDLAAWPSSKHFTSWLCLAPGNKISGGKLLSSKTRRSSSRAAALLRLAATTLGRSDTALGALYRRLSARAGKAKAVTATARKIAVLFYNSLRYGMAYHDPGATQYEERYRSRVIGNLQRRAKTFGFSLQELPPEPDMAVS

SEQ ID NO: 270971 - protein, 330 aa, unidentified
MKQYNHFFGVDVSKKTIDVTHAENQQFTHRQFSNDDDGMKLLSNWMIEIKSIFEDSLFCMEATGLYCFPLTQFLTTNCIDTWIEHAAQIKNATALARGKNDKVDSQRIAVYATKNLDRLRLWKPMDTTLDKIKHLAKLRDRLVETKKRLATPIKEFEDVGNTEMAKLLTKTIKSSLAAIDKDLKNIESKIISIINEDDNLKVLYRIITSVVGIGFVTATNLMIHTNGFAVLNDTRKLACYCGVAPFAYSSGSSVRGKTKVHYMANKKLKSNLHMASLTAIKLDVDIKIYYERKVAEGKNKMSVLNAVKNKLLARVVAVVNKRQDYVQKTA

SEQ ID NO: 270972 - protein, 327 aa, unidentified
MGVLFNSAVIKNRKVSRDKLLHEVRQFPPNTLIAMEACLSSNYWGETIQNMGYQVKLLPAQHVKPMARRQKNDANDTLAICEAAFRPNIHAVPIKTREQRDIKALRTVRSTLVVRRTATVNQLRALAAEYGVIFPKGLKTLQEQLPATLEDADNGLSTVIRSLLQGLYDDIKIISRDIDSLTDELTRLAKHHPRYQALLKIPGFGPIVTASVLSELGTGEQFTNGRQFSAWCGLVPRQHSSGGKATLMGMTKNGNRELRTLLIHGARAVLRFAAKRQDAMGRWLNGLVARRGKVKAIVALANKLGRIAWRIISGDQEFQLSRAFKTA

SEQ ID NO: 270973 - protein, 308 aa, unidentified
MSLELQSLLPYPNSCQGTSPHQQERGPKMLSFCGIDVSKDRLDIIVLPEEQCSSVSNDRAGWADLVERLRGCSIAAIGLEASGGYERGVMRALLAAGLPVRQVNPFKLRQFARASGILAKSDPLDARMIASFVAIMPTRPAQRQAPATKRLIEMLAVRRQLSTEKVATENASRLLEDAMLQRLSRRRIGRLAADILLPELGRMNRKQVAALVGVAPYAFESGTLKGRRCIWGGRANVRQVLYMAAMSASNWNPVLKVFHGRLKATGKLPKVVIVAVMRKMITTLNAMVRDDVVWADHHSGRHSVTTVR

SEQ ID NO: 270974 - protein, 343 aa, unidentified
MEYGAIDLHLRRSQIRIVDEDEGVVLDRRIDTTREALTQVFGARERMRILLESSTESEWVAQHLETLGHEVVVADPNYAPMYGSRSRKIKTDKRDAAALGIACRRGIYRAAHRASRAARTQRQQLRVRRHLVQVRTGLISLLRSTLRQEGLRLPSGSAERAVARLDRLGVPATVAAVVAPLRTTLADLTATLTTIDAAVEAQATGDATAQRLMTAPGVGPILSLTFTAVLDDPARFGGDAGRASAFLGLVPSEDSSAERHHKGHITKTGPGDLRALLVQASWVIWRGRSTAAHALRTWAQTVGARRGRRIAIVALARRLTRILYAMWRDQTPFAPPGRVAVAA

SEQ ID NO: 270975 - protein, 403 aa, unidentified
MNSVGIDISKGRSTVAVMRPFGEVVISPFEVRHTDSELSELARQLKSLDGETRVVMEATGNYHTPVAKLLHDAGLYVSVVNAKLVHGYGNNDLRRVKTDKKDSVKLANYGLDRWLALTRYVPEEDTRLLLKNCYRQYRQYSKVQTVLKNNLISLLDTVFPNVNRLFSSPAREDGSEKWVDFVAEFWHCRCVSEKSEKAFANKYQRWCRKYGYNFNEAKAHTIHAEASGHIGVMPMSETTKLLVEQAVAQLRATSTALAALKHEMQALTSMLPEYPVVMDMFGVGPTLGPQLIAEIGDVRRSYSKKALVAYAGLDAPPNDSGDVTGRHKSMSKIGASSLRRTLFLVMSVYLQTAPLDEPVYQFMDRKRAEGKPYRVYMMASANKFLRIYYATVKAYLESLEHTA

SEQ ID NO: 270976 - protein, 319 aa, unidentified
MAQNDLVVAGIDVAKDKVDVCIRSLSLRRTFASTAEGRRELATWLRRKKVAKAVMEASGGYEREWAKALRNAGIEVRIVDPKRVRSFAQSAGRLAKNDTIDAEMIAWFAETFDEARGQAYDATREQLHQMVHARQALKDMQSKLASQGEHAVPAAVQRIHARISKTIAVELVKIEAEITALIQATPHFAELAEIIESVPGLARTTSAALIADMPELGQVNNKIVASLLGVAPYDDDSGRRRGERHIKGGRRRTRNIFYMACLGAATQHNPVLKAFYDRLVAKGKLKKVALTACMRKLISILNIMIERRQKWDAKRYVVS

SEQ ID NO: 270977 - protein, 374 aa, unidentified
MPRHQRYWVGLDAGHLETAVCLVDAEGHVFFEAMTETRAAPIRDILRRFGVEPVQSITIEAGVGTQMVRDLCSFGFPVQVVDVRKSSKFLAIRRQKTDANDAKGLAELGRLAQSFGPHVFIKPVEHQDIRIMINIRRNLLKHRARTDALLQSIFRLHGASIKLLNGRGSLAAEVANQLRLLSANGVTIRVDLDPLVRMGEYLRSQIWDMDRKMRTMAASIPVCARFQTIPGVGTITALSFYSAVGDPYRFRSNRDVGPYLGLTPNLYQSGATARRGRISRYGNKLTRSHLITAATVLLRTIKTESSLRTWGLRLATKIGFLKARVAVARKLAVIMMAMWKTGASFDPDKSKRRLLHPEQAGLDPVRISGTKIPL

SEQ ID NO: 270978 - protein, 362 aa, unidentified
MAESTTFVAFDQHAATTVAAVLLPGQRTPALHPMTSDLGELRRFVRRLGAPATLRCCYEAGPCGFELQRALVADGVPCDVIAPALIPRRPGDRIKTDRRDAAQLAVLYRAGALTAVHIPTDQEEAARDLLRCREDIRADLLRARHRLSKFLLRHGRRFTGTKKAWSLRHETWLRAQTWPIPALDQTHRAYLRTVDEAVARLRAVEADLQALLDLEPLRARVTRLRCFRGIDDLTALTIAAELGDPRRFGTAPATMAFVGLVPSEHSSGSQRAQGAITKTGNAHLRRVLVEAAWHYRHHPFVGRALRQRQVDAPADVVARSWTAQQRLHRKYARLAARGKPKQHVVTAVARELTGFVWAALTQ

SEQ ID NO: 270979 - protein, 359 aa, unidentified
MDDGSKQTQRMTVGLDLGDRYTYLCLLDTESGEVIEERRLRTTPGALKRRFESEQRLRIAIEAGTHSPWVSRLLEQECGHEVLVANARKVKLIYAAKNKSDKLDAENLARLARVDPKLLYPLKHRGEDSQAHLAIIRSREALVGCRTQLVNHVRGAVKSFGHRLPKCPARSFHKKAPSHIPEALWAALGPILEQIGSLTERIRDYERQLEAISKEHYPETDLLRQVEGIGLLTALSFVLTLEDPSRFAKSRSVGAYLGLVPATDQSGDRDPQKHISKEGDEMLRKLLVGSAHYILGPFGSDSDLRRHGQRIASRGGKNAKKRAVVAVARKLSVLLHHLWITGELYERLHNTQRSEGRAA

SEQ ID NO: 270980 - protein, 394 aa, unidentified
MILVGIDIGKLKHTFSIINREDGESLVEPTFFNNNKEGFDHLLSHFTSYSKDHLLIGMEDTGHYHFALLKYLLNKHYTVALMNPVVTDMTRKMQGGISKNDKLDTLTIGDVLCSSQRKKSYRISKVDSFDLYEQKQLTRYHHNLKEEINGYTNRLQKCIDIVFPEYNSLFHSKYGIVYRNILRTFGSAEKLANTDIRTIRKCFEVPSQGRRIALTPEELKEAAKNSIGISSMADEIQIKHLINQIELIDEQLAEIDKKIEEFSVESNSPIISIPGISHFSGTSILAEIGNISNYSKASKIIKFAGVAPYEYESSQFRAQHTAITKKGSKYLRKTLYQIITPVIQHNQVFKEYYNLKRSQGKGHRCAQGHCVRKLLRIIYHLLSTGETFNPTLLR

SEQ ID NO: 270981 - protein, 356 aa, unidentified
MSRDIKYIGMDVHKEAIVIAVLNGSGKLVMETIVETKASSILQFIHGLRGELHVTWEEGTWAAWLYDLLQPQVQQVLVCNPRRNALLKEGSKSDKVDARKLAELLRTGMLRPVYHGENGLRTLRELGRSYQTLSQDLTRVMNRLKALYRGWGIACAGTQVYAPRYREEWLSKIAQAGVRRRAELLYQQLDGLQALRRNLRPEFLAESRKHKAVKLLRQIPCIGPIRAARLIALMQTPHRFRSKRQLWTYSGLGIETRDSAQYRFVGGQLQRSKKPQQLRGLNQNHNHEMKEIFKSTATRASCGTGPFHDFYAALLAKGMKPEMARLTLARKIAAITLTLWKKGEGFDAEQLKTQTA

SEQ ID NO: 270982 - protein, 394 aa, unidentified
MKLVGIDVGKNSHHFCVMDKETGEFNVAPSSFSNNKEGFDFLINSLKPYSKKSILLGMEDTGHYHVALLKFLLSNGYTVALINPKTTDLTRKMEGGITKNDKLDTITICDVLDTPERKKQYRITKVDRFDLYEQRQLTRHHHNLKEELNVYCNRLQKSIDLVFPEFNTLFSSKYGAVYMNLLKTFGSAEAIASTDIHTIRKCFEIKGKGNRISLTPEKLKECAKNSIGISSEVETIQIKHLVSQIMLIKEQIAEIDKKIEEFSITNNSPILSIPGISHFSGTSILAELGDIGNYSKPSQIIKFAGVAPYHYESSQFNAQHTGITKKGSKYLRKTLYQIILTVINNNPVFKKYYLLKISQGKGHRCAQGHCIRKLLRIIYHLLETGQSFDPALLR

SEQ ID NO: 270983 - protein, 352 aa, unidentified
MQYIAFDAHKHYTLASVASRDGRMIREERVEHQRDALRQFLERCERGSPVAVETTGNWYWIVDEIEAAACVPKLVHARKAKLMLGMINKTDKLDARGLNRLQQAGTLPTVWIPPGELRDQRDLPRTRMVLVRQRTQLKNRIHATLAKYALQCSEVTDLFGRRGLTLLRQRIDQLPPHTAFATRHLLTQVEALDRQVREFEREIRAVFRPTPEVAWLMTLPGVGFTLAVVIALELGDVTRFPTDEKLAGYAGTTPRVRSSGGKTRYGPLRPDVNRYLKWAFIEAANVVCRIRRRHPDRHASRRYERIARRKGHHKAIAAVARHLAEATYWMLTRHESYREPTRVRQSVSSTEA

SEQ ID NO: 270984 - protein, 458 aa, unidentified
MKDLSVSQPSVQSEQAFAGRKVSALALGASMRKAPPTRFVGLDIGNSVELCIVAHDQVIRRATITREDDYKEHIGPGTERALVVLEACREAWYLYDLFVGWGHEVWIVDTTRARKLGIGEHKRKNDRIDAETLARAAYEGRVPRAWVLSHSSQALRADLQTRRLLVSTRTSFVVAIRGQLRAQGLRIASCKAHDFVKKLDKTELSPLLREQIEPLVAVLRTLNPQIDQIDKKLDEHLAELPVVGLLTTAPGVGRIVAAAFISVIDTPGRFQNAHQVQSYLGLVPSEYTSGKRKLGAITKMGNAYLRAMLVQAAWALMNMRRSDPLKYWGMRISKKRGKRVAVVAVARRLAGILWAMWKNNKAYDPELLGKQSARGKRKEAAETQTSATHLAICAEQARSHKQTAESQTSTVAKPGTVTGAAGSRSKSAAGSRSKSAAGSRSKSAAGARSKSAKTRATA

SEQ ID NO: 270985 - protein, 358 aa, unidentified
MKDKGIALLGIDLAKSCFQLHGVDANSKVILNKKLSRNKLIELVANLPKCTIAMEACSGASWFTRKFKAFGHDVKLIAPQFVKPFVKGNKNDQADAQAIVEAALRPSMHFVAPKETWQQDIQMLHNIRSRLVHNKTALMNQIRGFLTEYGIVVAKGAMSLKKSLIEILQRSISCGDVSHLGVRMLQKLYSELLRLEIEIKEYEKELKDMAKRSEECQRLLSVKGFGFLTVTSLISAIGDPSQFKNGRQFSAWLGLVPKHAGTGGKNRILGISKRGNKYLRCLLIHGARSYVRVVVSKAKNNEPLDDLSCWIDRLHRKIGWNKTCVALANKNARIAWAILNFKEEYKPEKTSKIQKQAA

SEQ ID NO: 270986 - protein, 350 aa, unidentified
MLIIGCDYHPSFQQIALVDSETGELGERRLMHREEAEQFYQGLKRGGSAVRVGMEASGHSRWFERLLHELGFELWIGDAAKIRAKRVRKQKTDRQDAQLLLQLMREDRFPRIWVPDAENRDLRQLLWHRHRLVQMRTRVMNQLHVVALNEGLRRKKALWRAAGRQELESFGLAVWASRRRQDLLDLLDQLTPKIQELTQALEEEVEKRPVARRLRTHPGVGALTALAFELVIGTAERFHCGKQIASYVGLAPAEESSGDRRRLGHISKQGNVLLRFLLVEAAQVTVRSQPEWRRRFFHLAMRRGRKIAKVAMARKLAVHLYWMWRQGWDYGQLQKLGSHAGEPGNRDEVQ

SEQ ID NO: 270987 - protein, 440 aa, unidentified
MQKVTVFETIYEHAAGIDIGAEKIFVSVDGREVVSFGTFTSDYYQCAEYLQQKGIRHVAMEATGVYWMALYAMLESCGLKVCLVNPKETKQVKGRKTDVKDCQWIQKLFSSGILRQSFIPEVKYMEVRQLVRERLDIIEMGSTYVNKMQKCLELMNIKVKQVISQIHGASGIKMIQAIIAGNRDKDYLLSLCDKRIISKKGGAVLKALEGNYNDTYLFILEQNMRMWEKHQEQIQIIDDRINELLGQMCKEKEPMEIKSKPKPIRHHPPKIKDLHGMLIRLYGVNLSNISGINDYTLLRLLGETGIDMGRFPSEKHFVSWCGLSPKHHSSGKMNKRVKGTRCNKAGQILKEVAQGLLNSKYIAIGCFMRKLRARKDSAIAIKAGARKLAQAYYNALTKGMDYVEQGTKKYEEHIKQREKAVLYKLAKKHNMQLTEKHEVV

SEQ ID NO: 270988 - protein, 353 aa, unidentified
MVQYLGLDWAYRRAAWCAVGEGGAVSGEGVVAADEDGLARLVLAVGVEVRACVEMMSGAVWVRDRLEAAGWEVQVAHPRKVRDVAPLACKTDKVDARVLAELCRRDLVPALWIPSIDDRALRERLRRRMHLVRMRASAQNRIFGLLTQWGLRVSLKRLREPDAMAMLEARGVPEAWRASIAEALAVIDLLDARAAPFERELRALAAADRRVMLLRTIPGIGDLLGLTIASEIGDVSRFSSPRKLIGYAGLAPRVSQSGDRSRTGALSKAGSRTLRWAAVEAAHQSWRPTNPWHELYSDITKHAGKNPAKSAVARKVLIAAWHVLSREQPFKPARPRTNDSTNVSASSRCFLAA

SEQ ID NO: 270989 - protein, 348 aa, unidentified
MSEPITEVIVGVDTHAEIHVAVAIDHVGRVLGELEIPTTRRGYRQLCTWARQFGDVRRAGVEGTGTYGAGLAAFMAADGIEVIEVNRPNRQHRRRHGKSDPTDAHAAAKAVLSGEATATPKARDGIVESIRVTQVVRRSAIKARTQATLQIRDLVLTAPDAIRDDLRDLKAPQRAERATRWRPGDDTDPVSATRRAIRSLAKRWLELTAEIDRLDSELDRLVHLATPTLLDEFGVGPDVAAKLIVAAGDNPGRCATEASFAALCGVSPIPASSGKTTRHRLNRGSDRQANNALWTVALVRLAHHPETKTYAARRTAESLSRTEIMRCLKRALARRFHRILLDDLARLT

SEQ ID NO: 270990 - protein, 362 aa, unidentified
MTIMPTPTPAGRVIIGVDTHKQFHVAAVLDERGAVLSTATFDADRAGYRALINWSGRFGLPARFGIEGTGSYGRGLASAVRRNGHDVIEVMRPDRQDRHRRGKSDALDAENAARAVLAGQAQSIPKNAEGIVEMIRHIKIAKDAAVKARSAAMQSLKAVLVTAPAEVRQALEPLPNMTLLHRCAGLRPGQLTSVGAAVKHTLRAIAQRWLILNAEITGHEKLLGTLVGQLAPQLIEGFGIGPDHASELLLALGDNAERLSSEAAFAKLCGVCPIPASSGKIQRYRLNRGGNRRANAALHGIVVVRMKYHEPTRTYVTRRITEGKTKPEIMRCLKRHITREIWARTKHLRQQPHTPQTTTCHL

SEQ ID NO: 270991 - protein, 323 aa, unidentified
MNHKVGKDNTVARFIGIDVSKQWLDVACLPERETRRFGNDCAGLEQLCAWIVPLAPELIVMEATGGFETNVATALAARGLALAVVNPKHVRDFARAFGILAKTDRIDALVLAGFAQKVHPPVRPLPDEERRELIDLVDRRRQLVTMRAEEKTRLTQATPAARQDIKEHIEWLNERLRRLDIDLTAKLRSSSLWKTKEQILTSAPGVGRVTVATLVARLPELGTLNRRAIAALTGVAPFARDSGQHRGRRMIWGGRADVRNVLYMATVTAARINPVIRSFYLRLKQAGKPPKVALTACMRKLLTILNTMVRNNQPWQIPPTQTI

SEQ ID NO: 270992 - protein, 322 aa, unidentified
MAEDEVMAGVDVSLAQLDVALWPGGESFSVSNDPQGVGQLLERMGKLRVQAVVIEASGGPEDLLVSELCAAGIPVAVVNPRQVREFARSLGQLAKTDRLDALVLAQFGQSAQSHGRLTLTQLPDTAAAELKALVRRRRQLIGMLVAETNRRQRASKVVKRSIVATIRALKRSLVELEQQVRETLKNSPVHQQKIAMLQEVPGIGPQLARTLIAEVPELGQIGRRQIAALIGVAPHAHESGKFKGRRMIWGGRTGVRTTLYMAMLSATRCNPLLVPFYRRLLQRGKSKKLAFIACARKLLVILNAMLCDGTSWRPDLAFQHSR

SEQ ID NO: 270993 - protein, 310 aa, unidentified
MFSYPAGIDVSKDSLEARVHQVDVGVNCANAEEDFPGLIGWLLLHQVGRVVLEATGGYERKVMKALQAAGLNVICVNPRRAKSFSRAMGQHAKTDPIDAKSLAQFAAVLDSPSSRITSPEHDELRALVQQRENFVQQRDDDRRRLKTASCDVVKPALQSHIDYLSKAVNAIEQLIRETANRLDREKVERLCSVKGIGLITAASLMAYLPELGEIGRRPITALAGLAPYNNDSGKHQGARHISGGRFSVRRSLYMACWVVIREQPEFQARYKALRDKGKRAKVALIACMRVLLVRLNAMLRYRAEWKEHAA

SEQ ID NO: 270994 - protein, 345 aa, unidentified
MEIRTIGIDLGKTVFHFVGVNARGEVVIRKKGSRTQLLRFTSNLRECLIGMEACGGSHFLGRALREQGHDVRLMPAQYVKPYVKTNKNDYIDAEACAEAVTRPTMRFVPIKTDDQLDLQSLHRVRERWVVRRTAVINQIRGLLLERGITIRKGRHHIEESLPRILEDPDNKLSGALRVLLRQLQLEMQYLHGQVEESDQLIVRIAGELGPCRRLIAIPGIGPITATATIAAIGNGAAFKKGRGFAAWLGVVPGEHSTGGKQKLTGTSRRGNKYLRKLFVQGAHSVLLQRTKQSSGLSMWLANLVTRKRKQVATVALANKMACMAWAVLFKGEAYRPPLLPQTVAA

SEQ ID NO: 270995 - protein, 345 aa, unidentified
MREGSVGRYIGVDLHHDSFVVCVRSGKGQQWRRWKMEEIADFVNHLEWEDAVAVEATGNTRWFCRQLGERVGRVVVVNPHQFRVISQSVKKTDRRDAALLAEYLEKDLLPEVRVKTDQESEVAQLAASRDQLVKMRTMLKNQVHGLLRSHGVRVIKQQLASRKGQRQLAQIPLPGLANLQRQVLLQQIAGLTGSILQLEKALAEAARHLPGYRNVRSIKGIGSLSAAILLSRIGKVEDFADAGKLAAYFGLVPRVEQSNQKQHSGRITRCGNKLARTALVQCALIAKRYSPFLKNFYQAIQRRRGSGKAIVATARKLLTIVYYTLKNNWVFDDFGSFSLAEAPRC

SEQ ID NO: 270996 - protein, 366 aa, unidentified
MKKISTVQVFGKEILKEQKLTIGVDLGDRWSFYCVLEEAGKIILEQKVPTTPEAMKQTFSRIPQSRIALETGTHSPWVSRLLTELGHEVIVAHAQKVQLITKSNRKDDRHDARTLARLARIDPELLGPIRHRSVQAQIHLTVIRARAELVSARTALVNAARGLVKSYGQRLPKCGTQQVSRELAAALSTELRDVLEPLFKEIESLNERIKEYDERMEKIAKEVYPEVSLLKQVKGVGTQIALTYVLTIEDPHRFLKSREVGCFLGLKPGRRNSGESEPQKSISKEGDRYLRTMMVQGAHYILGPFGADSDLRRWGLKLAERGGKNAKKRAVVAVARKLAVLLHRLWVSGEVYEPLRNSQKAMRAVA

SEQ ID NO: 270997 - protein, 342 aa, unidentified
MNNVAIAAIDLGKHSFHLHAQDDRGHEVHRKKFTRAALTQYLAKLEPCTVVMEACGGAHFMAQEVAKLGHTPKLIAPHLVRPYVKSNKNDFADAEAICEAASRPTMRFVHPKTQAQQALAMLNSVRESFIKDRTATVNRIHAALLEVGISLAPGFKSIKELPALLEMSSFSGSIKKILMGLHEHFNYLDGKVKALDKEVECQAAEDDLAARLMTMPCVGPITSSALAAELGDGKQFKCGRGYAASIGLVPKQHGTGDKTVLLGISKRGDRNQRRLLIQCARVYLIQLERQKGALADWVRQLLATRHHSNLVVCALANKLARIAWAIAAHHSEFDAGPAAMNA

SEQ ID NO: 270998 - protein, 301 aa, unidentified
MSSVEDRVIIGMDPHKRSVTIEVMAGDETILGGGRFDTDRDGFQQMLASVKAWPNRVWAIEGCSGIGRHVARRLLGGGDEVVDVPPKLSARTRVVATGRGRKTDATDAHSVALVGTRMAGLRPVVNDEQLAVLRILVDRRRSLGEEHTRMASQLHQLLLELIPGGAKRALSAAQAKALLAKVRPRDIAGKTRRRVAAELIGDLERIYQPKKAANKELRELVAETGTTLMDLHGIGHSGAARLLVEVGDITRFPDRAHFASWNGTAPIDASSGDQVRHRLSRAGNRQINRVLHMMATVQLRN

SEQ ID NO: 270999 - protein, 361 aa, unidentified
MKKPEHHLIAEVPCMDPRIGLTIGVDLGDVWSHYCTLNQDGGVVDRGRFRTTAKAIEKWFKDLPPTRVSMEAGVHSIWISEQLQQLGHEVIVANVRELRAISHSDGKSDQVDAEKLARYARLDPEILRPISHRTVEQQEALTLIRARELLVRLRTAAVNAVRGLTKACGYRMPASSTKCFAQRGQAAMPPGLKLALGPILAQIAEMTLKIKQYDREIQRMTQTEYAETQPLLTIHGVGHITALTFVLTLGDKERFGRSRDVGCYLGLRPKRSQSGERDPQLGITKTGNAYLRSLLIECANHILRSHGRDSALRQWGLHLAARGGKQAKNKSVVAVARKLAVLLHHLWTTQESYIAFHTAAA

SEQ ID NO: 271000 - protein, 346 aa, unidentified
MNQITRIGMDTSKHFFQLHGVDAAERPVLRRKLRRNQVLAFFAKLPPTVIGMEACGGAHYWARELRKLGHEVKLMAPQHVKAYVKRNKNDGRDAEGLCEAMSRPTMQFVPVKTEEQQAALMLAGVRQQLIARRTQLSNAIRGYAAEFGLTAAKGLDKIEPLLAQIAQDESLPALAREIFAIEGREYAQLQVKLKAIEAKLMAWHRANAASRRLAQIPGVGPIGATALVMKAPDPGAFPSGRHFAAWLGLTPKDHSTAGKTRLGKITRAGDEVLRSLLVAGATAVIQQVRHGRGHPSPWLVALVKRKPPKLAAVALANKIARIAWKLMTTGESYDSARMPGASAAAA

SEQ ID NO: 271001 - protein, 383 aa, unidentified
MTDPAQVSSFIPRDYDVFGGLDVDKKGIAVTFTDHGTMRKSLKLPYSASQLLNYTRKHFPGQRVAFVYEAGPTGFGLYDELTAASHPCLVVSPSMVPTAPGQRVKTNRLDSRKLSEGLRGGQLRSIHVPAESYRELRHLVQLRDTQVAQLKATKCRIKSLLLYEGIPFPAANGRWSGQVLRELAALPCSATVRFKLEQLIDALQFHFQSAATVQKEIRRFCQDDPELRQSVSFLASLPGIGAITATHALARLGNWREISNVRQIAGFLGLVSSEHSTGDKENRGSITRSGDSRLRNKLIQCAWVAIDKDPELRAFYRRIYERQPKKVAARKAIVAVARKLTTRMYAVLKEQRPFVIRVDSSIAPLTAEETVGPRVRLDTAQSD

SEQ ID NO: 271002 - protein, 323 aa, unidentified
MEHYSEAFVALDAAKLRNAVAIADAGRNGEIRYLGEIDNTEAETRKLVAKLASKHARLTFCYEAGPTGYGLYRLIKSIGHDCIVVAPSLIPSKPGDRVKTNRRDAINLVKLLRAGELTAVWVPDERHEAMRDLVRARDAAVKDYRIKRQNVSSLLLRLGRHYPGKKTWGRAHINWLTSLKLEHREQRIAFEEMLLAVRQVRERIERLEQAMREAVADWTLAPVIEAVQAMRGIDMVGAIAFLAELGDLSRFENPRQLMAYLGLTPSERSTGESVKRGGITKAGNTRARRLLIEAAWSYRFPPRVSKDMQTRIGAAPRTAREMP

SEQ ID NO: 271003 - protein, 348 aa, unidentified
MRNRPLGAVVYGIDLGKTRFDVVGCDAAGQPIQRVKFSRDTIFTFFAVAPKALIGMEACPGAQWMARKLSELGHTVRIIPAQFVKPFVKSNKNDARDAEAIAEAVIRPTMRFVEIKSCEQIDLQALHRVRDRIVGNRTQLICQMRAFCLEYGIPIRPGTGAFKLDITRIISDETNDFTSAIRVLLKELWDELKIVDIRLASVSRQVELLAAKHDAARRLMTIPGIGPIGATALIAAVGDGRQFRKARDLAAWLGLVPRQYSTGGKTTLLGISKRGNPYIRRLLIHGARSCMIHLDRSRDRMGVWLNGLDGSMHRNKAIVALANKIARIAWVLLRRPHTLYERIAPARP

SEQ ID NO: 271004 - protein, 347 aa, unidentified
MKKINTKQVTVMGIDLAKNVFQLHGINDEGEVVIKRQLKRHQMLAFFARLPACLIGMESCGGAHYWSRVLSQYGHCVKMMAPVFVKPYLKGNKNDSNDAEAICEAVTRPSMRFALAKTPEQQAILHLHHSRQLLVKQRVATSNHMRGVLLEYGISLPVGVKILSQRLPEILEDAENDLPMLTRSLLNTLKLSHDEFNDKIKQLENDIHSWHRQSDVSQQLVTIPGVGILSATALAATIGDASNFKNARQLAAYLGLVPRQHSSGGKDKLLGISKRGDGYVRSLLVHGARAVISHINRRLKAGQAGGNAWVEQCLTRMHVNEAAVALANKMARMAWALLAHNENYQAA

SEQ ID NO: 271005 - protein, 402 aa, unidentified
MVSDFMKGRYNLMIYVGIDIAKLNHFASAISSDGEILMEPFKFTNDGDGFSLLESNLASICDDKDNIIIGLESTAHYGDNLVRYLVASFYKVCVLNPIKTSTMRKNNIRKTKTDKVDTYIIAKTLMLQESLRFVTFYDLDLMDLKQLGRFRQKTIKQRTRLKIQLTSYIDQVFPELQYFFKSGLHQKSVYALLKEAPTPKAITSMHMTHLANLLKVNSHGHFTKEQAKELRVLAQKSVGASDSALSIQITHTISQIELLDSQLEQVEAEMTDIMKFNDSVIMTIPGIGYINGGMILGEIGDVHRFSNPNKLLAFAGLDPSVYQSGNFQARRTKMSKRGSRVLRYALINAAHNVVKNNATFKTYYDKKMAEGRSHYNALGHCAGKLVRIIWKMMTDNVEFNLD

SEQ ID NO: 271006 - protein, 377 aa, unidentified
MQSIIYVGMDVHTENFTFASYEFGKGDVFAVDQVIGATWKDAIKYMKTLQKQRPKEDIHFVCGYEAGCFGYSLYNELMAAATDEKNLSLQCVIMAPSTMAIQGNRKKTDRRDARMIATNLAHGTYSSVYVVSKEDNGVRDYIRMRDDTKKKIRSTKQQINALCLRHGKNYTANKWTVKHYDWLHKVVLEDMYSNITLREYLHQLSQLEENLVRYDKEIEEIATRDRYAKAVEKLCCLKGINTITALSLVTEIGDFNRFSSADKFAAFLGLVPGEYSSGGSINRTGITKHGNTYLRRLITESAQGYSKGTPYTKSWRLKARQSGQEKEIVDYCDRARIYLGKKYFRLKQNGKNGNVCKTAVARGLACFVWGLMTDNIS

SEQ ID NO: 271007 - protein, 322 aa, unidentified
MNKYKETFGVDISKDVFDVYGSCEGHNQYKNDEIGFNKFLKELPEGALVVMEATGYYHYRLAQFLYKNGVIVSIVNPLSIKRFIQMKLAKVKTDKSDAKAICEYALINEVPLYNALTDTQSECLQLFRLLDTYLKQRTATKNKIHGEAVLGIPSKFVYRSLIRNKKQLNKEVVAIESKILSLVKEDQQEQLTLLTSIPGIGQKTALFLIVVTDGFSKFENASQLCSYVGITPTIRESGSSVRGRARISKVGNRKLRNLLFLCSFNACKHNKACKEVYERIVNKGKSKKLALIAVANKLLKQSFAIAKSGRPYDETYVSIMPR

SEQ ID NO: 271008 - protein, 416 aa, unidentified
MLHPKMKYTYVGIDSHKDTHTAVFLDCFFEKRGEIAFENLPSKFGAFLSQAEELMTDGTTLLFGLEDVTAYGRTLVSFLKANNQPVKHVNAMLVAKERKNQNITQKTDAVDAECAARVLLSRFSELPDAIPEDNFRTLRTLVVRRDFIVKNNMCLKSQLHHQLTQHYPNYRKFFGNIDCKTSLTFYDRYPSPSKLIGTTVEELTKFLFTPSQGKIGAKKAQEILDGVHDTAVEYQEIEDMTVRSIIRQIRFNMEEIKLIETTLAEVLTRFNTTLTTMTGIETVTACQLLSCIGDIRKFPTSAKLARYAGIAPVTYASGKKDVQFANQRGNRELNSLIFNLAVRISAPVGPKRTVINPYFYEYYHRKLTEGKTKRQALKCVQRRLVNIIWNMLTHKKPYLNPEMYCEPKKTTKSNEM

SEQ ID NO: 271009 - protein, 366 aa, unidentified
MDAIYIGVDFHARQQTICYLKTETGELVISELKHQDKEQVRAFYAQFTGQVIIGLEASGYSPWFEIMLEQLGREVWLGDASEIRRRARWRQKSDRRDAELIWDLMVHNEFPRLHQPAAQSREVLRMLRYRQKLIKVRTMTKNSLQAIALQAGLAKGSRLFTKAGQAEFKVAEMSAVLQWQRDHWSDLLKPLNEQLLQTMVWFKAQSKDDVRIKRLRTHPGIGLLTSLCLWHTLQPVSRFGQQRKVVAYAGLDPVVRSSAERASHLGISKAGSRMLRYLLVEAVHTAIRYDDDLKRFYKRVAERRGRPKAKVAAARKLLIRAYIMLRDEIDYAEFRRRAVAVDLPAEVKGQAKVPEVLIGQSASPGA

SEQ ID NO: 271010 - protein, 342 aa, unidentified
MKDTMIGVDLAKNVFQVHGASMTGQVKFRKKLSRPQFHKFMADHPPCVVVLESCGGAHYWARQMVKLGHKVKLIAPQYVKPFLKRQKNDAADAEAIVIAAQRPEMRFVEPKTEDQQARVVLFRARERLVRQRTELVNALRAVMYEYGYVFPLGIANVKRIEASLEEPNGGLPELAIEECRDLILQISEKTIRIEAKTKKAKVLSKKADLTRQLQTMPGVGPLTSLAIEAFAPPMDCFKCGRDFSAWLGLVPRQRSSGGRARLGRISKAGQADIRRLLIIGAMTRLNWLGQKSIRPGSWLARMLERKPRMLVAIALANKMARAIWAMITKNEDYRDPTQAAAA

SEQ ID NO: 271011 - protein, 318 aa, unidentified
MNTNTLQNINIGVDTGKAQLDIFIRPLNLFFTVSNDEKGIKDAIKTIKKHSPERIVIEATGRLEMPFVLACAEAKLPIVRANPIHIKRFAGAIGRRAKNDRLDAQLIAHYAEAIKPDISIIKAENIRLMSDLVIRRNQLLSMQTMEKNRIQVLPKSLHSTIKPMLTAMKKQISNIEDKLVKLIESCPDYQTKNDILQSVPGIGNIASASIISNVPELGYITNKQAASLIGVAPITRESGRYKGKRVIQGGRAQVRTVLYMAMMSAMQCNPVFKATYTRLVHSGKPKKVAIIACVRKMVVILNSMLRDGVMWDENIAKN

SEQ ID NO: 271012 - protein, 378 aa, unidentified
MNRIIKIGMDVHTTNYTLCIFEPSFEHDGTVHYVTQVKPEVKNIIRVIETFKKKHEDDKLNIVCGYEAGCLGYSLYHELKEKGIECVILAPTTMKTEKGGRKLKNDYRDAKMIAECLAYGGYSAVHVPTELDNSVKEFIRMRDDIHENLKRIKQQIIAFMTRNGKQFDGKSYWTKKHLDWIKATSFNEVLLQDTLKEYMIEYNRLCDRVEELDKQIEEISVKEEYVEKVQQLQCLIGIKTHTALSLIVETSDFNRFKKGNMYSAYLGLIPGDDSSGDKENRLGITKAGNSHLRRLLVEAAQGYTRGKLGFKSKDLKSRQSKCSSEVVAYADRANERLRRKYYRMIARGKKYNVAKAAIARELACFIWGIMTEHIDLCS

SEQ ID NO: 271013 - protein, 403 aa, unidentified
MNAVGIDVSKGKSMVAIMRPFGEIVSAPFEIKHTASDIHSLVELINSVEGESRIVMEHTGRYYEVLAHQLSKANLFVSAINPKLIKDFDNDSLRKVKSDKADSVKIARYALDKWQNLKQYNVMDELRNQLKTMNRQFGFYMKHKTAMKNNLIGILDQTYPGVNTYFDSPARSDGSQKWVDFASTYWHVDCVRKMSLNAFIDHYQNWCKRKKYNFSQSKAEEIYGKAKELVPVLPKDAITKLIIKQAVDQLNSASTTVESLRTLMNETASKLPEYPIVMQMKGVGSSLGPQLMAEIGDVSRFTHKGAITAFAGVDPGVNESGSYEQKSVPTSKRGSSGLRKTLFQIMDVLIKTHPQDDPVYQFLDKKRAQGKPYYVYMTAGANKFLRIYYGRVKEYLSSLPESE

SEQ ID NO: 271014 - protein, 309 aa, unidentified
MATSSYVGIDVSKDRLDVAVLGKGQEKQVNNTQAGIAELVAWMQELQPELIVVEATGGYQRAVVEALFQAGLPVAVVNPARVRQFARACGLLAKTDKLDARVLAEFGQRVQPRRYEGKNEAEKQLSALLVRRKQLEGMLKAEQNRLRTIAPSLRGSVERMIAVLKEEKKRLDAQIREAMKEQKAWQEQSEILRSAPGVGPVTTATLLAELPELGKMDRKKIAALVGVAPMNYDSGRKRGYRKTKGGRGEVRSVLYMATLVATRRNPVIRTQYQHLLKRGKEKKVALTACMRKFLTILNAMQRDQLPFRG

SEQ ID NO: 271015 - protein, 347 aa, unidentified
MAHFVGLDVSVKETSVCVVDDAGKVILEQKVLTEPDTIIALLTSLGTTYGRIGIEAGPLSQWLVNALTAAELPVICVETRHMKALLTAQQINKTDRNDARGIAQMMRVGLFKPVHVKTLVAQEQRMLLTSRKLLQRKLLDIESDLRGTLRNFGLKVGVVSGGRYEARVRELVAGFPRLAAIVEPLLSVRRVMRQQLAVLHKMLLDTVRDDPVCRRLMTAPGVGAVVALTYRATVDQPQRFVHSRAVGAHVGLTPKRYQSGEIDYDGGVSKCGDALLRTMLYEAAHSMLTQSRKWSWLKAWGMRVAQRRGMRRATVAVARRLAVVLHRMWVDGSEFRWRRDGAVPAVA

SEQ ID NO: 271016 - protein, 348 aa, unidentified
MTLVGCDLHSRKQQVAVLVTDTGEVLEQELLHGGDAVERFYRALPRPVTVGIEATGYTLWFHAVMQKLGHTLLVGEAAKIRAMVVRKTKTDRRDAQHLLDLLKHERFPTVWMPDPTTRDLRALIAHRVRLVRMRTMVKNGLHAIALNQRVALGPSLWTKRGLAQLRALSLPPHTANRRADSLELLTWLTTHIDQLDAQIAEAAAADARAQRLLTHPGVGPLTALITVLVLGPAARFPTSKHVGLAPAIHSSADKYHLGKITKQGNALLRWILGQAAPLAARADGELRRAYFAVLHRRGRPKAKVALARKLLVRLYIMLRDQIDYEEFRRRGRVRRSRIAVNPVSATTM

SEQ ID NO: 271017 - protein, 366 aa, unidentified
MDTIYIGVDFHARQQTICYLKTETGELVTCELKHQHKQALRAFYAQFSGQVIVGLEASGYSPWFERMLEELGCEVWLGHATEIRRRARWRQKNDRRDAELILDLMLHNEFPRLHRPAVQSREVLRMLRYRQKLIKMRTMSKNSLQAIALQAGLAKGSRLFTKAGQQELGTAEMTPVLHWQREHWLQLMEPLNQQLLETMGWFKAQSKGDVSITRLRTHPGIGLLTSLCLVHTLQPVSRFRNTRKVAAYAGFDPIERSSGERKCFLGISKAGSRLLRYLLVEAAQTAVRKDEDLKRFYKRLADRRGRPKAKVAAARKLLIRAYIILRDEIDYAEFRHRAVAARLARRGQGPSNVPEVLIGQPASPEQ

SEQ ID NO: 271018 - protein, 353 aa, unidentified
MKTYYVGMDVHRASIVIVVLNGAGKVVMQSVIETGAERVRGFLKQLRGKVYVTFEEGTQANWLHEVVRGLVTEVVVCDPRHNKLLQSGNKNDRVDAQKLAELLRNGALKAVYHGDNGMRELKELVRTYDCLVSDTTRVMNRLKAIYRGRAIGCAGHDIYRQDRREQWLEKLTERGAKQRASFLYQQLAALKPLRHEAKGMMVKEARRQPAYPWLMSVPQFGSVSVAQLLAIVSTPHRFRSKRQFWTYIGLAVVTRTSADHEVVNGVLRRSKRPVSTRGLNRNHNHLLKRVFKNAANSACHSGPFKAAYDLRVAQGMAPSLARLTVARQLAATTLAVWKRGEQFNHERMKKQAA

SEQ ID NO: 271019 - protein, 366 aa, unidentified
MKKTSTIQVNGNMIFKGHKLTIGLDLGDRWSNYCVLDEAGEVLLEQKLATTPEAMKQTFERIPRSLIALETGTHSPWVSRLLKELGHAVLVAHAQKVELITKSKRKDDRHDARTLARLARIDPELLGPVRHRSAKAQIHLTVIRARAELVSVRTALVNAARGLAKPHGERLPKCGTEQVSRELASDLSAELREVLEPLLKEIESLNERIKEYDARMEKIARESYPQVALLKQVKGVGTQISLTYVLTLDDPHRFLKSRDVGCFLGLKPGRRDSGQSQPQMHISKEGDRYLRTMLVQGAHYILGPFGEDSDLRRWGLRLAERGGKNAKKRAVVAVARKLAVLLHRLWVSGEVYEPLRNSHKAMRAAA

SEQ ID NO: 271020 - protein, 435 aa, unidentified
MEKKKMLAGKRIAGIDPAKEKHQAAVLNEEGIPMGRSFSFPVSHEGYSEKLWKEIGKILGDYDTEDLAFAVETSCALWKTLTDYLSQRGYTVLMVNPLTTYHSRPLMNHDFSKTDPKDALLIATNARNGNYTVYQNFTPEINKLHRLSITYDKLTKDRQKAIARLRAFMEEVFPEFLNCIPVDIETSLYLLDQYFLPEHFRSLSVHEEELNVRRISNGNHGTETLKKLKEYAQKSIGSSVHGEEDALRLTLDIWIMQVRQSGSGLAAIAKAIIELARKTEYFEILTSLKGISDISDARFIGECRDLSLYAHYKQIEKHAWANLRLMDSGKYHGARRISGIGNKRLLKLIYLMTTQTARFIPEVRIKFIKRQLKKKCYRKNIIASSSQLLKLLMALIKERRPYAFREEAAQELEKLEMKYSEIQNTQKKEAVRKAA

SEQ ID NO: 271021 - protein, 335 aa, unidentified
MEGETVIAGVDTHKDVHVLCLLDGLGRKIRSGSFGADPEGYDRLAEAIGDPGSCVVVGVEGTASYGAGLTRRLVELGYNVVEVLRPKRDKARPGEGKSDPLDAERAARKAASGRGCSVPKSQDGWVEAVRQLYVARRLAVATSTSCVACAKSMLTTAPGALRERFRGRERPKDLMPLLARGRKAGDALEESVLASLRSVAAVWKEARSQVESLDERIRALLEANAPALLGVEGCGTTTAAALVVAAGDNPGRLKGEAAFSMLCGTSPIPASSGKTERHRLNRGGNRQANWALYEIAIKRMAYDERTRRYVARRTSEGKSRREAVRCLKRYMLALL

SEQ ID NO: 271022 - protein, 398 aa, unidentified
MLSIGIDVSKGKSTVCGMKPGGEIVYTPFEIQHTREGMSELVSLLRGSGEEVRVVLESTGSYHCPVVAALLENGIFVSVVNSLRMKRFCSQSIRRVKTDQIDAMQIALYGLAYWQELQPTRLPENTYRELQLLARQYYQMTSILIKAKDDFNALCDQALPGMQELMNDHAGRHKLSDFVLRYRHTTHILEMGETRFRKDYCKWAEKKGYRNHERMAALIFATAQNGIPVLPNAPSTQIVITEAIRVLHTVEASRDAILTQMQALAKTLPEYSLVREMPCIGDTLAPRLIAEIGDVRRFHSKRALIAYAGIDAPPYQSGKFSANNRHISKRGNRYLRKTGYEVMQSYVMHKPANDPIFTFIEKKRSEGKSGKLAMVAGLNKFLRVYYGKVTELYRSLPQ

SEQ ID NO: 271023 - protein, 329 aa, unidentified
MLDLIGAHKEKWSLPTDVRIAVSYEAGQDAFWICRALHSRHIDCYVVDPASIPVERHQRRAKTDRLDVIKLVFNLRAWLRGERDRMHVVHVPSPQDEASRQLMRERGQLQKEVLQHRDRMRKLLATLGCWDAVDHRAFAGRLERDEVRCHDGAPLPPELRKRLLRECERLALVEQQLAALEKTRQTNVPALARQRCDALARLQGIGEIGASRLALELFWRDFNNRREVGACVGLVPQPYDSGESQVDQGISKQGNRRVRALLVEMAWTWLRYQPGSALTQWFNQRTQGTGPNRRARRIAIVAVARRLAIALWRYLKDGVIPEGAQLKPV

SEQ ID NO: 271024 - protein, 339 aa, unidentified
MKLYTAFDLHSNNSYLGIIDENGKRIFKKKLRNDPAMIRETLKPFKTEIEGIVVESTFNWYWLVDLLKEEEYRVHLANPSKIQQYSGLKYSDDKHDAFWLAEMLRLKILPEGYIYPKEERPIRDLLRKRGHLVRLRTALIVSLQNIIARNLGVKLKANDIKFLTTDRVTPLLQENQDLSLAGKVSKESIDFLSRQINAIESTITGRIHLSNPYDRLLSIPGVGKILAFTITLETGPIDRFPKVGNYVSYCRKVPSARFSNDKKKGTGNRKNGNKYLAWAFSEASDHARLFDSEARRYYQRKLQKTNAPVAHSALAHKLARAAYYIMRDGVLFMPNKAFV

SEQ ID NO: 271025 - protein, 350 aa, unidentified
MTTMTPEPGSVTGGVDTHLDLHLAAAVDHLGGVIATESFPTTAAGYRRLLRWLRSHGPVHAVGVEGTGSYGSALARHLAENDVTVVEVARPNRQVRRRHGKSDVVDAIAAARAVLSGEASAAPKAHNGPVEALRLLKIVQRSANKARTQSINQLRNIVATAPDELRCRLRGLKTPDLVATCAAFRVRGDDDSLLAVTRLALRELAQRIEHLDEQLDRTNVRLRRITTAVAPELVAIKGVGPDVASTILVSAGDNPHRLRNERSFAALAGSNPIPASSGKTNRHRLNRGGDRQLNAALWRIAIVRLGQDQRTRHYLERRVTEGKSKLEAIRCIKRYLAREIFAALPREALV

SEQ ID NO: 271026 - protein, 317 aa, unidentified
MSSKPCNVGIDISKNRLDVAVSPQKKQRHFTNSEEGLQNLITWLKQLEPRVILLEATGGYEFLLVAALREAGLPACFVNPQRVRQFARSQGIAAKTDKLDAWVLALFAERNQPQPRPLPDAMQQELAQLMNRRRQLLEMIQMEDNRLKIAPFNRLRQSHQLVINQLQVHLKNLEKEIHDFFKQNPEWVQFDKIVQSCVGVGPNTSLCLRAYLWELGSLNRRQVAALAGVAPFTRESGLWRGQRRIEGGRHRLRQALYMATLSAVRFNPVISAFYKRLIKKGKAKKVALVACMRKLLTILNAMVRDCQPWCPPAPSNP

SEQ ID NO: 271027 - protein, 340 aa, unidentified
MKYFAGLDVSLEETAICVIDEDGRIVREMRAASAPQAISDALSTSDLPLTRIGLEACSLTAWLHDGLRDEGWPAICIETRAANAAMKAMPNKTDRNDARALAQIMRTGWFRQVHVKSRQSRLWRSLLVARRTVVNEMRSIENLVRAMLREVGIKLGTPSRTKFDHRVRELAGSDAEVMAMVEPLLAILNTMLKEFARLTKQVLDIVRHEQVCRRLMSVPGVGPITALAFRATIDRPERFASSQAVGPHLGLTPARYQSGETDIQGRISRCGDELARTALYEAAHSLLVRSKKWSSLRAWGMNIAKRRGMARARVAVARKLSVILHRMWADGIPPPRAVCR

SEQ ID NO: 271028 - protein, 410 aa, unidentified
MRVIGLDVHRSFAEVAVLDKGVIEHAGRFKLEHRRVIDFGKSLRRSDEVVLEATGNTSVIVRLLTPFVRRVVVANPLQVRAIAWAKVKTDKVDAGVLAKLHASGFLPEVWIPNEDTEALRRRTAERNQLVSQMTRLKNRVHSVLHANLIPRYAGKLFSKRGRTWLDTQPLPEDQRRQIGRHLDEHDRIAMELAALERHLAENALRDDRVRRLMTIGGVNAILALGVLAAIGDVARFSSPQKLVSYFGLNPKVRQSGDRPAYHGRISRQGRAHARAMLAEAAWSIATQPGPLRAFFNRIKQRRGQQIAAVATARKLAVLIWHLLTNEEDYAWTRPALMQWKMRELELRAGRGSRRGGNKPGPARDYSLKAVRDEEREWLGLAESDYRRFVCAWKEEAPAGRPGAAKEVRRS

SEQ ID NO: 271029 - protein, 373 aa, unidentified
MPKYSTAFGMDVHLRSTTVCALDADTGEAVTRRFPGNPWGEIAGWMGGFPGPSLAAYESGYPGFAPQRELAGLGVECVVAAVSKIPRSAADSASKNDRNDAARMAKAILAHDISPVWVPSPEVEGIRDLAGAYDGATARLATAKQRLLAFLAKRGFAYGGTTPAGNPRKYWTYDFLRWLDKVRPEDDGGVRTLAALRNEVEAAAEARADLLSEYRAAVDASPIAAEVAALQSIKGCAFALAAAFSAEVGDFTRFRSGRQVTAYFGLAPSQRSSGDSVRLGGISGAGNALVRKLAVEGSWCYAAARHQPKLMPRDTGVPLEIRMHGRKGSERLLRRREEMLARGMPQAKANAATAAELVRWLWALGMMCREGAE

SEQ ID NO: 271030 - protein, 416 aa, unidentified
MQVLYPRCCGIDVAKKFVVACLLTTAEDGTVEKDTRTYGTMTEDRLRLADWLAEVGCTHVAMESTSSYWRPIDNLLEGQFVVWVANAFHIKAVPGRKTDVRDAEWIADLLRHGLLRPSFIPAVEQRQLRDLTRYRTHLVEERARLTNRLQAVLEDANVKLAAVVTDVRGAAARAILEALVAGETDPQTLAEVARGRLRTKRDLLAQAVVGRFSAHHACLLSEHLSHLDYLEEAMARISAEIAARLQEEQAASELLDTVPGIGRRAAEIVLAEVGADLRRFPSAKHRASWAGICPGNAESGGKRLNGKTRKGDRWLRQVLIEVAHVASKTKDTYLAAQYRRIAARRGKKRARVALAHTILVIIYHILTRREPYRELGVAYVDQRERHHVRQRLVQRLECLGYAVSLQSATPDPPLAA

SEQ ID NO: 271031 - protein, 365 aa, unidentified
MKDVTTYVGIDAHKKDLFIAMVIGTQETPLTGTVPNETHAVRRLVRKLERTAPGPVRCCYEAGPCGYALQRALTTPRVSCQVVAPTLIPRKPGERIKTNRRDARKLVELERAGLLTEVRPPTPDEEAVRDLARARDDVREDLQRCRHRLGKLLLRRGLHFNGRNWTRAHRQWMHGIEWDHPTTAVVLNDYLLAIDQLEARLAELDAELTRIAATAPYAERVGWLRCFRGIDTLTAILLLAELHDFRRFTNPRALMAYLGLVPSEDSSGDKQRRGRITRTGNALARRLLVEMAWHYQHRPGVGAALTRRRKGQPSRVIAIADKAQQRLCRRFRRLTEQHKFAPKIAVAIARELAGFLWAALQPVTA

SEQ ID NO: 271032 - protein, 343 aa, unidentified
MECTTYGVDIAKSVMQVYWVDGETGEISQRTVKRSQLSSFFAKRPIGRVVMESCGSGHYWARTLAALGHEVRLVHARYVKPYVRGNKNDLADAQAIWSAAHAPGLRWVPVKSAEQQAVLSLHRARAQWVKVRTQTVNALRGLLYEFGVVLPGGRQAGLKAIRGHRAEIEDQLPVPMRELISGQLQMLATVEQRIKALEGQLEGLESQMASAQRIRQIPGVGLLSATALAALLGEDGRGYRNGREFAACLGLVPRHTGTGGTVRIGRLSKRGDPYIRTLLMHGARSVIFHARHRSAWLERLLARRPFNVVVAALANKMARMAWALVARGRDYQASGVAHVALTH

SEQ ID NO: 271033 - protein, 373 aa, unidentified
MKKRSSSEKSQKRTAKTKRTQERVTIGMDLGDKTSRYCMLSNEGEILREGQVTTTKAGMVEAFGSLGRARIAIEVGTHSPWVSRLLQKLGHEMVVANPKQVKLITESSRKDDRLDAQTLARLARIDPQLLRPIQHRSDKAQGALMFIRVRAALMAARTSLVNTARGLAKSMGERLPKCDADQMGVPQAVSLPPKLRQVLEPLLKEIESLTEKIKDSDREIEQIARKDYPETALLQQVGGVGPLIALTFILTIEDKGRFQKSRDIGCYVGLRPRRSDSGQSQPQLRITKEGDPYLRTMLVQGAHYIISRRGPDTDLKRWGLHLAKHGGKRGKKRAVVAVARKLGILLHRLWVTGEVYEPLRNHNARQEQKRIAA

SEQ ID NO: 271034 - protein, 410 aa, unidentified
MRRVIGMDIHRTFAEVVFWEAGRLRPAGRVDMTRAGLEGFGRTLSKEDEVVVEATGNAMAVVRALEPHVARVIVANSVQVKAIAHAHVKTDKIDAGVLASLRAADFLPEVWLPDAETERLRRQIARRNQVVRHRTRIKNEVHAILSAHLIPPCPHDLFAQLGRQWLGRQMLPDDERAAIERHLRELDRLGEDLNALDRDVAQAVMDDPAVKRLLTITGVNLIVAAGLVAAIGDVRRFASSEKLVSYAGLNPRVRQSGLGLAQHGRISKQGRSHARALLVEAAWAASKAPGPLRSFFLRVRARRGHQVAAVAVARKLAVLCWHLLTRDVDYQWVRPALVATKLRAMELQAGQPARKGNKPGSAYAYNVKELRNREIDIARHAEQAYETFIRNWQRCGPAKRRTGAASEERR

SEQ ID NO: 271035 - protein, 335 aa, unidentified
METRYFLGVDIAKDTFQAALTVDGVNFLDQEVENSPKAIRLYFQSIKRKLNFPFDNLTVCMEHTGIYSCPLLNFLLQGNIKVCMEPALQIKRSQGMIRGKSDRVDARRIAQYAFKNSSELRLWKPLRTALQKVKALLSVRERLIKTKTQIEVPLNESGEFIDLQIQKMVKKNCSATVKAIKKDIVKIESEIDQLVKEDPSLQHQVKLATSVPGIGKITSLNIILSTNEFTRINEVKKFACYAGVAPFEHSSGSSVRGKTRVSKMANMRLKKLLHMAAMTSIQYNEEMRIFYQRKVAEGKNKMSVINAVRNKLISRVFACIKNQRLYQKDFQHVLA

SEQ ID NO: 271036 - protein, 338 aa, unidentified
MGQYVGIDLHRRSTTIHRMTEDGETLGVEKILSQPFELAQAIAAAGPEPEVVLESTYGWYWAADVLKDAGAHVHLAHALGNNWGNRRVKNDKHDAQDLALLLRIGRLSEGWIAPPEIRELRELVRYRHSLGRHRTSAKAQIHGVMAKNGILPVVAELWGPIGQAQLDGLELPEAYALRMRSLRELLAHIEREITKIDAQLHHRLKSDPGYQALVRLPGVGKVLGAVFVAEIGDISRFDSAKKLCSWAGLTPKHKESDEVVRRGAITKQGSRLVRWAAIEAVGNYRAKGNEKLRADYRRIAERRGKYKARVAVARKMVTLVFYALRDGEVRCLETATAA

SEQ ID NO: 271037 - protein, 340 aa, unidentified
MRKYIRIGVDIAKNSFQVHALESEDCSATKRKLSRSGIVKFLAEVEPCAIGMEACGSAHYWARRFRAMGHEVKLTPPIYVKPYVKRGKNDAADAAAICEAMSRPNMRFVAVKSEDQQATLMAHKTRKLLIKQRTMSVNALRGHLAEFGVIAAKGISHVEELVERAAAADLPAMVQATLGVLLAQLRSLDAAIDELERAIVADHRRDPVSRLAASVPGVGALAASAILASAPDPQAFKSGRDFAAWLGATPKQNTTSGKEKFGSITKQGNRYIRRLLVLGAISVLRAAPKRKGALCDWPAALRARKPPKVVAVALANKLARIVWAIITTGEVFRTSIYAKA

SEQ ID NO: 271038 - protein, 355 aa, unidentified
MTRAYTMPRKIKQTKNWETLAKFIGIDYHKRSSVITVGDSDGNCLYQARFPNDETVLREFFEKLATGTSCAIESCRGYEWFIDLLTDLGFKVHVANAHAVKLIAQSRCKTDKVDSKVLMELLAKGFLPTCYQPTAAERSLRERLRWRAQLVRTCTKFKNMVHALLDKENKGFESPFSVKGRQRLNEVELLSDRADLMGEHLDVIDFFDSVLDNETAWIRNLTAELPEAGLLKTIPGVGDIVSLMFIAEVGDVGRFRNASTVSAFLGLVPSVYSSGDKHRTGRITKMGCRLLRWLLIQSAWQAIKKSDGLRARFNKISRRTGKRKAIVAIARKLAEICYRVLKDRAVFDEKKWALG

SEQ ID NO: 271039 - protein, 336 aa, unidentified
MSHNSIIYIGIDVHERESQVAVLEKSGKLLLEDRVPTGELEEFISSIEGKKHIAIESVGFIHPIYERLSSIDRCKVYVANSNKLNLISQSSTKNDRNDARILGDLLRMNYLPLAHIRDKETREKLYVVNDRVAYGLRRGELRTTIRWLLKRRGIDIEGRPFSDEWKDKVKELHIREIDLRLKELEFVESTIEELDRQIKSIVADDHRARLLDTIPGVAPYTALFLACILDDIDRFPDSKHACAYLGLVPWLDDSADTEHLGHITKKGNKWLRRNLVECARIAVRKDPHIREFYERVKHRRGEKKAIIAVARKLVSYAYWMLKRNITYEEPHPWLLP

SEQ ID NO: 271040 - protein, 324 aa, unidentified
MDVSKQSVDMCVLWGDDIFLERQISSTISCIESFLQGFLKKHSFSVSDVLVCAEYTGKYTYPLCLACERVGVDLWLENPYAIKHSGGLERGKNDRQDARKIARYEDKVCLFVLPEQAINSLRELVSEQELYIVDKKKYQGQLTDEKGFMNPQDYRQKSARLNILLKDLKEVIRQIEGKIQKIIEGDETLSRQLKLLCSIDGVGERTAVKVIVETNAFRDFTDARKFCCHAGVAPFSYTSGSSIRSRNRVSHRADKSIKALLHMGALTAATRSKGELHEYYLKKVSEGKNKMSVLNAVRAKLVHRMFAVIRNNKFYEKDYLNALA

SEQ ID NO: 271041 - protein, 344 aa, unidentified
MKTKLNVVKFFIGIDISKATFNYCLRYGGSNVVNGKVSNNVESINEFILLLKSTPEFKIAYAVFGMEVTGVYGLILINTLTKIKAKIVVEPALRIKNSLGIIRGKNDKLDAARIARYLIKNLQELKFWVPRRKIIDELSSLSTLRERMVRVKTIICTPLIEDDGFIDSTISKANIDLCSPSITHVNQLITEVDDRIKQLWNNDSHCKRLMQIMLSVMGIGDVTALQMLIHTNEFNSITTARTFASYCGVAPFEIDSGTSVKKAARVSEHANKRIKSLLHNGARTCIGHDPEIKAYYKRRVEVDKKKKRSVMNAIKFKIICRVFSCIRGDRLYERGYISKPPSRA

SEQ ID NO: 271042 - protein, 269 aa, unidentified
MADPCSVGIDVSKGTLDVAWSTNPTARWQTTNDDVGWTALVAHVRALQPTIIVLEATGGYEIGAASALSTADLPVAIVNPRQVRDFAKAFGLLEKTDAIDAAVLAAFGARIRPTPRPLPDDLQADLQALVTRRRQLVDMLTAERNRGPLARGAVRRNVLAHIAWLEKQLAKTDRDLRTQIEASPIWRARDHLLQSVPGIGPATSARLLASLPELGTLSHRQISKLVGLAPMPDDSGRRRGYRRIQGGRGDVRPALAPPTQAHLISRLSI

SEQ ID NO: 271043 - protein, 392 aa, unidentified
MIYVGIDVASQKHDCFLLKDTGEVFSKTSFTIKNDFEGYKKLHNSILQFVESTKDSNVRIGLESTGHYSKNILLYLIKQGYQTTLINPILTNMDRKASTVRKTKTDKIDAEAICKFLDKNRFDFKPYTLLSYHIDALKSLTRQRFSLVKQMTQQKLIFQRLVNVIFPELLSHFSNDYGESVLNILYSYPTPKKLAKAHKESITKLLHSRCKITSSEILELAKNSIGQSEEYLGFELKHTIDMILFYQSQIEIYNKQIEIELNETEYGKIITSIPGVGIITGAMIISEIGDINNFTTSDQLLAYAGLDPSVYESGKFESSHNKPSKRGSKYLRWAIHQASSVIWQHDNTFKDYYLKKIKESKHHYVTIGHIDKKLIRVIFSLLKNKSMFIPQK

SEQ ID NO: 271044 - protein, 370 aa, unidentified
MLDTTTFVGLDVHARSIKAVSLDVMTGEVRCATFGYDAGAVAEWVRSVDPGARCVYESGVTGFDLQKRLSGLGVDCVVGAVSKMIKPSADRRRKNDRNDAEFLARMLSVGNVVEVWVPDDECEAARDLTRALEDARDDLSRSKQRLSKFLLRHGLVFDERTPTGRRKGNWTRAHWSWIESIRFAEGADNDVLAYYVDAVRRAAEEKARLEGLVEAEARKPRWRRRVDSLRCLKGVDTATAADLVFEAGEFSRFRNARSFAAWVGLTPSEHSSGESDRRGAITKAGNKHLRKALVEAAWHYLTCSGRPKDLAKGQAPDRVARRHAAKGVRRLVERREALLARGVHGNKANVATARELACWVWAVGLMAEEA

SEQ ID NO: 271045 - protein, 338 aa, unidentified
MTVAFIGIDLAKNVFQLHGVDANGQAVLKRRLRREGLLAEIAELEPCVIGVEACTGAFYWQRQFEALGHTVKVIAPQYVKPFVKHQKNDQNDAEAICTALMLPNMKFVPTKSEEQQDIQALHRARRRLVNHRTALVSQMRDLLLDRGIPIALSTGRARRAIPEILENQTNGLSAMSREIIGDLFDFLGQIDAQITTFDRRIDAVFKSNEDCRRIARICGVGPKTATAVVAAVGDGREFKNGRHLAAWMGLVPRQHSSGDKRLLMGISKRGDRHLRTLLIHGARSVVRVAQRKTDPFSQWVNSLRERRGMNRAIVAVANKNARIIWAMLNRNEEFRAHA

SEQ ID NO: 271046 - protein, 349 aa, unidentified
MKKHTRKEEAWKQEQGLVIGIDLGDRFSGVCVRGADGEIRHEDRVSTTSVALSRWFGSLPASRIVIEVGTHSPWVSRQLEQANHEVIVANPRRLKLISESDQKSDRIDPRMLSELGVAMPRLLNPVKHRSAELQADLMVIRARARLVEARAKLWVALRGLAKSLGRRLPRRVKEEDVRHSDEALLPLWQAAVGLAEKVREYDRQIERLAKEKYPQVARLQQVAGVGPIIALTFVLTIADAQRFRRSRQIGSYLGLRPRQRDSGARQPQLSITKAGDRYLRSMLVQGAQYILGRFGPDTDLRRWGLRLAARGGKNAKKRAVVAVARKLAVLLHRLWVSGAAYEPLRNAAA

SEQ ID NO: 271047 - protein, 470 aa, unidentified
MSKGSGMTRGDRRRNARRERLRAVLPRDGAVTGIDLAEDKQAIAVIDHDVRVLARKTVQVKAFRLGEALDWAVGQARAKGFASVTVACEPAGPRWLQVQRLCAERGLPLVCIQPLMSHIAREQQDYTTHKTDEADCVLIARLAVELHCYPPEELDETWAHLRHLGRRRQQLITSATASAQRIQDFLSVAWPTVTETCAQPLESRTWLAALQVVTSRCGADPGKLAVMGPEAFTALVRGAVPGWGGKKGWGTICGRIFAALTSTEGVVVSSRRGLLRRVADELGDLQRVRAQLRAVEADMAAVLDELGLSRLADIPALTAVGAAAILAEAGDPRRYDSSSSLVKHAGMSPSDNASGAFYGEAHISRRGRPGLRLTVWRAVWPMLRYNPVMAAKYQAMTQAAGTAAQTAGAQSGAGSRQVSVAAAAVRARRAKARVACAASLLRWIYSMVVHDTSWDPAAAAGTASCPVEAA

SEQ ID NO: 271048 - protein, 320 aa, unidentified
MSRTFIGIDVSKSHLDVHVRPANLHRRFDNSKEGIAELLDWVRPHAAERIVCESTGPYQKLLIAALLSEGLPAVVANPRQVRDFAKGMGQLAKTDAVDAAIIAHFAELVPTIVRPLPSAELSELRELYDRRGQLVRILAVEKNHRHAATHGSVKVLANIDKHIDYLETQIKKLEDRMDAIVESSDAFKAQNDILQSITGIGPQVSRTLIAYLPELGQRTRQSITALVGLAPFNDDSGQHSGARHIRGGRSKVRIGLYQAAVAAIRWCPAMKAFYASLKARGKASKVAIVAVARKILVVANALIRDNRKYNVDPANSVCNP

SEQ ID NO: 271049 - protein, 387 aa, unidentified
MPISMHYPVVGVQKEAKPQTVAKEANMSKVAKRHGKEKSGQVNFNGKACWVGVDVHKVNYAVAILDEDGQRLAFATPAQPKKLLLQLMKMGMSIKALTYESGPCGYGLAWACQEMGVPVLVVAPSRVPRPVCKTGKTDRLDSMKLAEFLARDMLKGIAVPSREEFALREMERVRQGLVRKRREARQNIRAFLLRNGLAEPLGLDNWGSVALQALQAMSLPAYLRLSLDIYLEEHVTILASLAKITKQLAKAAIELGHGEQIKNLRTIPGVGETIAHTFTSEIFRPERFKRAEDICAYVGLAPITSHSGSSKEKAWLRSVGQRYLRSILVESAWRLIAVEATYRDFYNRIRNKTGLPQKAITAVARKLLVLVWRIAIEGRPYRPAEAH

SEQ ID NO: 271050 - protein, 311 aa, unidentified
MKEPERFVGIDISKQELVVAVRPTTELQSFTNTEEGLAALVRFLQPLSAHAIVLEATGGFARAAVNAMALAALPVVVVNPRQIRDFARSVGLLAKTDAIDAQIIARFAEAVRPELRPLKDLETQKLEDLNNRRRQIVEMISAEKNRLGMAPPWSQKDIRAHIAWLEKRLKRVNDDIDDMIQKSPLWRQKEKILTSVLGVGPVVTTTLLCGLPELGTLSARKLSALVGVAPFNRDSGQSRGRRSCWGGRAHVRAALYMAALTASRCNPVIRAFYQRLRLAGKPAKVALVACMRKILIILNAMIKSNTCWQQA

SEQ ID NO: 271051 - protein, 399 aa, unidentified
MKRTIVGVDIAKNVMQVHWVDPDSGEIVNKPVKRAAFLEYFANRRPCLVGMESCGGSQHWARRLIEMGHQVKLMPARFVKAFVTGNKNDSADARAIWMATQMPSKEVAVKTEAQQAILALHRMRQQLVKFRTMQINSLRGLLTEYGEVMGTGRPALDRAIAGVLERLSERLPTILIDTLREQWNGLNTLDQQIAQIEHRLQVWMKEDEAARAIAAIPGVGLLTATAAVATMGHAKSFRSGREFSAWLGLVPGQTGSGGKIELLGISKRGDTYLRTLLIHGARSVIFHAKESGAWIEQLQKRRPLNVVVVALANKMARTIWAILAHQKPYEKGYVSVRPIQTLSTTAVDVLKASRRVVGNDTAVRDTGVGAATLTTTSHARWSGVFAISGDTVTGGSPER

SEQ ID NO: 271052 - protein, 333 aa, unidentified
MKDLSTKKHFVGCDVSKDTLDFALFELGKDSRLFEHIQVPNNTEGFQAMRKWLRSLKVKLSESAVAMEHTGSYSTALAEWCHKKGYTFVFLHPLDVKNAGARGRNKTDKIDAQFIADYLYTMREKLEPSTPESPIIKKLRMLRNERRLAVYARAAFATQSKCLDDTDSAKRTSKIISELNKQISAIEAQILDVIRSDESIRRNYGLLLTLKGVGMVNALTTIIATGNFTRFQTARQYAKFCCVAPLTCQSGTSVKNGDHISKAGHNDIKATLTEAARSAIQFDSQLKHYYERKRAQGKSHGCVMNAVKFKIICRMFAVIQRQTPYIDTDKYRS

SEQ ID NO: 271053 - protein, 441 aa, unidentified
MNEKKGFPILYPNAAGIDISSKEHFVAVNPFENSTPIKSFGSFTEDLHSIAEFLKSSNVDTVAMEATGIYWISLFLVLEEAGFEVVLVNAKHVKNVRGKKTDMSDAEWIRQLHSCGLLSASFQPDKFTRTFRTYMRHRKNLIEMSATHIRMMHKALEQMNVKLQNVIADITGKSGQAIMEAIINGERDPHKLVTLCDNRIKEEKKPAIIKSLHGIWKAEHIFELKQSYEIYQYYQSQIKECDMQIEDILSVESGLGNNGNNKDYLKRNKNNLSFDAQNMLEEITGVDLTKIYGITTTNAIEVISEVGLDMNKWPTAKHFTSWLNLAPNNKISGGKILSRKIPKKRNIANQIFKMAAFSVQRSKNWLALFYHRIKSKSGPSKAIVATARKIAIIFYKMMKEKVAFNPEPIETYTQTYKEQQIKRLKRRAKNLGLQIIDPIVT

SEQ ID NO: 271054 - protein, 316 aa, unidentified
MKPSVSETFIGIDVSKQHLDLAVLPTDDTWRTPNRPKDLPALVERLAALRPTRIVLEATGGLQIPVVTALAAEGLPVVVVNPRQVREFARAAGLLAKTDRLDSRILARFAKVMRPKLKPIPDTEAILLKQLVSRHRQLTGLLVMEKNRRGSALPDLQAGINRTIRHLEKELKKLEEKMDQHLRQNPLWCATEKLLLTVPGVGPVVAKTLIAELPELGLLSHKEVAALVGVAPLACDSGQFQGKRRIWGGRASVRQKLYMATLVGTRFNPIIRAFYLRLVAHGKPKKLALVACMRKLLTILNAMARHQQPWQQQLPA

SEQ ID NO: 271055 - protein, 461 aa, unidentified
MKAEKIENQEAGRELDGLPVLRRNVAGIDLGSQMQWVCAPSLDGQSWEEKAFGATTPELERMAEWLKQRQVESVAMESTGVYWIAPQEVLEGHGLEVLLVSTRELTHVPGRPKTDRIDCRWIRRLHSCGLLRGSFRPPEQICMLRTLVRDKGRLVEERADWVRRMQKSLDQMNVRVHRAVSDIQGTTGMKIIRAIVEGQRDPLELAKLRDPGCHKSELEIAEQLSGHWREDYLFSLQQSLKMYDAIGERIAAYEKEILRQLGEMEKPDLPDRSAPELKNKNKAKKIRDRGEEPVRQALYRMSAVDLTSIDAVGAGAAQAVLSEYGPDLSRFPSEKEFISHVLLAPRRGITGGQPIHKKKRNSASCRVSEILRSAALSLQHSQTALGAYYRHTAQRLGPDVAAFATARKLATMIYRMLRWGQSYVDEGAAAYEKRYQQARFNRLHAAAADLGFQLVAQTANP

SEQ ID NO: 271056 - protein, 342 aa, unidentified
MKQYVGLDVSQKETSVCVVDETGRIVFEGKAKSDPGALTELLRKRAPHAERIGFETGAMASWLWHELRRVELPVVCIDARHAHAALSVRMNKSDQNDARGLAELVRVGWYREVKVKSEESQKIRAILIARSRLVRIRRDIENQVRSMIKEYGLLFRRAIGQQFRKHVVELLGENHQLRAVIDPLLLIHKNVCEQQGKFDDEVRCLAKSDETTRRLMTVPGVGVVTALTFRHTIDDPSRFRSASTVGAYLGLTPRRNQSGETDTNGKISRWGDRLLRSYLFEAATVLLYRTKKWSSLKAWGMKLAKRIGMKKAKVAIARKIAVILHCIWVDGTSFEWGQAKAA

SEQ ID NO: 271057 - protein, 343 aa, unidentified
MYFIGLDVHKKTISYCVKDAAGRVYQEGKIGSTRRELDEWIRMMPEPRSIAMEATIFTGWIYDHLLPYAEKVKVAHPVMLRAIAAAKKKNDRIDAGKIADCLRCDFLPECHMASTEIRDRRRTLRYRSLVIKQMVQMKNRVSGLLMETGVSYNKQRLHKVGYFAELLTANEDVHESIRPLLKLSREMISRSQKLDYALVSSLERDPLLKERLRRLRTVPGVGPITALTWALEIGDFTRFSSIKQAISYCGLCGDEKSSADKMMRMPISKKRNKHIQRVLIEAAKLGPRESPELAVIRARELERGNPNRATLAVARKMVSYMLAVERRNQDFVPAEEFSRTAAA

SEQ ID NO: 271058 - protein, 366 aa, unidentified
MKRVMAGMDLHGNNVMIGIVDADGTRLRHRRLACDLEEVIAFLDPYKPLLDRVAVESTFNWYWLVDGLKAAGFPVVLANPAKIDQYEGIKHADDKNDAYFLAELLRLGILPTGYIYDPESRPVRDLFRRRMGLMRLRTTLLLSSKSLHHRTTGHSLAVGQLKALSPTDLAAFYSHPANRLTAEIQKELIEALNQCIRRIEKTVASEALKKPYYKRLQTLPGIGGILGLVISMEVGEIERFAEPGQFASYCRTVDSNRVSNGKKKGSNNEKCGNKYLAWAFVEAAHAARRYDAHCRRWFDRKSAKKGTTIATKALACKLAKAAWHVMAKAVDYDPARMFPELAAGRIEQISGRQTSASKGVGPEPED

SEQ ID NO: 271059 - protein, 341 aa, unidentified
MDKITTIAIDLAKHVFQAAAEDAKGEEMWQKRLRSRAAMYAFIEGLTPPLTVGLEAGLGAQAWARLLAARGLEVRVLPAQRVAEHRSGAKNDCNDARAILRALHDCSIHPVPVKSTTQLTMQALLRVRAGWQRRRTAVANQMRGLLLEHGVAIAQGDAALTRALERVLPDAQVPIPDRLRALLAELAGEWEGLGQRVQAMDPELAQLAHADPVARRLCTIPGVGPVTATALVCKGLDPARFRNARQFAAYFGLVPDQHSSGNKLRLGRMSRRGDRYLRGLLISGAHAVLRHTRSDAVDAGHRRILRWQQRRGGKGAAVRLANHNLRVVFALSRDHADHRAV

SEQ ID NO: 271060 - protein, 462 aa, unidentified
MKPNYRRCCGIDVHKDSVSVCVLPPVGQARAEIRRRKFRTYTRDLKQLRTWLKNCQVTDIAMESTGQYWRPLWNLLEGEFEKLILINPQHIKGLKGYKTDPKDAQWIADLLETGKLRGSLVPTRPVRELRDLTRNRVNVLDDINRVKNRIEQLCQSGNIKVSSVATDLFGVSGRRMLKAIVEGLRDPGWMADYARGSLRRKRNDLALALEGTFTAEQRWLMNRELHQLEWLEQQVELLETEIERRLIPFAEVLVRVSTIPGVDRVTAWTIVAELGPDLSAFADASHLASWAGLCPGNNESGGKRLSGRTRKSNRYIKRAMCQAAWAASHTKNTFLAAFYRRMSIRKGANRAIVALAHHMVVVIYNLITRNEEYVEFGGDYYDQRNKPRVVSRLTKRLEKLGFEVTLRELPAPVEQSVAPPESELPAKKKRGRPCKCGERGIPCRHYTSGDLNSFMQQGPLPA

SEQ ID NO: 271061 - protein, 353 aa, unidentified
MDNGSRYVGLDVHRDTISVAVCDSQGKLMLERVIPTSAAAVLELVELLRGKLHIAFEEGTSAPWLVGLLQPRVAQVLVCDPRKNDRRGSKSDRIDARELADLLRCGRLSPVFHQDCGLTSLQQLTRTYLVLTKDQTRVMNRIKALYRSWAIPCAGQSCYSPKQRQAFLSQLPDAAVRGRAQIYYQQMDSLVTLRQQVRQQLLREGRKQPALRLLSQIPYIGPMRATLLIVFIQSPHRFRTKRQLWAYCGLGIETRDSGEYRFRQGQLERKRQPTVMGLNRNHHHLLKYVLKSVAARCCSGSGPLRDFAQTLLDQGMRPEMVRLTVARKIAAIVLVLWKKGVSFDAHYLKPQAA

SEQ ID NO: 271062 - protein, 341 aa, unidentified
MGQASTIGLDIAKWVFQAHGADATGRVVFRKRLVRAKVLEFFAGQPPCLVALEACGGAHYWARELGKLGHTVRLIPPAYVKPFVKRQKNDVADAEAICEAAQRPGMRFVPVKEEAQQANTVVFRARDLLVRQRTQCINALRGHLAEYGHVVPQGPAHVDSLVALVEDPKSSVPESAREILQVLIRMLNALEEQLKELDGEIARRAKADPVARRLMTIPGIGPIAATAITALVPAPEGFRAGRDFAAWLGLTPLQKSTGGKRKLGAISKRGERTIRRLLILGASAVVLWASQRGAAAGSWLARMLARKPRMLVTTALANKMARIVWALLVKGGTYRAPAVAA

SEQ ID NO: 271063 - protein, 408 aa, unidentified
MKTLLRRCAGLDVHKVEIVACLRLVEKGKVARRVRRFPTTTQGLLELVEWLEGAGCSHVAMEATGVYWKPVWHILDGHFALILANAMHVKAVPGRKSDVNDATWLADLLAHGLIRASFVPPTPIQELRDLTRTRKQLTREIVQHVQRIQAVLEEANVKLSSVISDIMGPSGRRILTAIIVGETDAEKLAALGSERLGCGRAALSEALKGRIREHHRFLFAQHLRTIEQLEESVAAFDARIAGALAPFRDVVERLNEVPGLGRIAIETIIAEIGTDMSRFPTAGHLVSWAGLAPRLDESAGKRRSTRIRNGAPWLKPALVQAGWAATRKKNTYLQAQFLRLRSRRGPKKALIAVAASILTIVYHMLRDGTFYRDLGPEYFARRSPAKLAANLANRIRNLGYHVEISATT

SEQ ID NO: 271064 - protein, 318 aa, unidentified
MKKHSIACGGIDTGKRKLDVALNGSSDRLQVANVAAGHGEVSAWLRRHKINRVGIEASGGYEQAVVARLRCDGFEVIVFQPGQVRAYAKFHLQRAKNDKIDAALIAACTAAAKKIHPPPDPRLAPMAERQTLIDQIVDQIARFKNYRESCGGPQLRQFWQEEIKRFHGLFRKELKQLVAAIRQHRDLSERLDLIVSIDGIALRTATAILVRLPEIGRLSREQVAALGGLAPYDNDSGDQDGARHIAGGRERLRKSVYTAALAASFHWNAELIELYQRLTAAGKEHKVALVACARKLLIYANAVVARGTPWVSHAAAAH

SEQ ID NO: 271065 - protein, 342 aa, unidentified
MEQYVALDVSLKEISVCIIDSKGEVIFEGKTAAEPAMLVELIRSKAPQVKRVGLETGATSPWLFHALAAAGLPVVCMDARHAHAALSMRPTKSDRSDARGLADMLRMGWYREVHAKSVTSHEHRTILGARHQLVTMRSDLDAQIRGILKTFGLILGTGNKDTLIQRAEKLAAGHPVLSGLVAKLAEVRRHVTSQIAAIDRDIRHLVHTEPTLKRLISVPGVGPITALAFRSAVDDPSRFKHARDVGPYLGLTPTRYQSGETDRQGRISKCGDTFTRTCLYEAAHVLLTRVQRFSPLKAWGMRLAKRIGGRKARIAVARKIAVILHCIWTDGTEFWWTRKKAA

SEQ ID NO: 271066 - protein, 477 aa, unidentified
MPAGQQVEVEVDEHEEIVGRVAAIDVAKASGMVCTRVPHATKAGRRVTRVWQVPSTTNQILELAEQLAGEGIERVVVESTSEDWRPFVYVLEARGLVVWLVNARDVKHLPGRPKTDKLDAVWLCKLNERGMLRPSFVPPAQIRRLRDYTRLRADLTADRTRHKQRLEKLLEDALIKLGTVATDIFGVSGRAMLEALIAGQRDPKVLAELARGRLRVKHAALVQALTGRFDDHHAELARMLLDQIDTLGGQIDQLTARIEQMITAIPAAQPPAPATGPGGDAAATLHAGMESAESVPDHPNSDGVDPETGELLAAPLPVVDRLDEVAGIGHHAAQVIIAEVGLDMGQFPTPAHLVSWARLSPRTIQSGTRHRAGATGKANPYLKSVLGEAATAAAKTDTFLGERYRRLVRRIGKRKALVAVARSILVIVWHLLADPTARFHDLGADYHASRIDRDRKTRNLVHQLQALGHKVTLQPAA

SEQ ID NO: 271067 - protein, 338 aa, unidentified
MKVYAGIDLHSSNNYVGIIDENDRRLYQRRLPNQLYYTLKALEPFKESLEGVVVESTYNWYWLVDGLQEEGYKVHLANPSAIKQYEGLKHTDDKWDSFWLAHMRRLNILPEGYIYPKEERPLRDALRRRLLFVKQRTAHIQSVQSAITRNLGEKMSSREIKNLNESDADRLFAEPFLSLTAKCSISTIEFLGLQIERIEKAVRPLVKLKPEFKHLLTMPGIGDILGMTIMLEVGDIKRFPTVGDYSSYCRCVKSERITNKKKKGEGNRKNGNKYLAWAYVEAAHFARRHYQEPQSFYQRKEAKRNGIVATKALSNKLARASYHVMRDQVPFDMKHLFR

SEQ ID NO: 271068 - protein, 389 aa, unidentified
MRTAKMRGPGPSHVLTTPDHAGNVVGIDPHKRTLTATVVDPRGGVVASEHFRVSGEGHRELEVWARQFGSIARWGVEGSASWGRHTAVFLVARGADVRDVCANRTPRSDRARQRGKSDTLDSERIAREVLAHPLLPRAFKRAGQEQGPDEQHQLLALWHNRRRSILTSRQHLVGEAEHLLGDLPLELRDELPDSKAVRPRLAALAHRNRRRRYDAPTTVRLGMLDAYRAQISALDREEKDVVAQLRELVAANGSTLSELCGLDTRSVAELLVEVGDPRRFTEGGFARFNASAPLAASTAEGPGEPVRHRYNPGGNRRVNAVLHRMAVTQLRCEPRAQAIYANARARGHTKKEARRILKRHLSDVIYRRMIRDLAAADRASVPTQPILAA

SEQ ID NO: 271069 - protein, 313 aa, unidentified
MNEKFAGIDVSKFTFDLNVNGNNKVEHFNNDVKGVKKCSKTLVKLAPVLVVIEATGGYEMNLAMGLQQAGLVVSVVNPARIRNFAKAAGILAKTDNIDAKAISFFASVLKPPTSAMITESTRKIKSLVARRGQLIRMRTAELNRQGHDVAKFVDRSLKAIIKLLEKQIESIDEEIKGCISNDPEMNTKAKIVKSMLGIGEITASMLVTELPELGSLTRRQIASLAGLAPIARDSGTFKGKRMTGGGRGDVRAKLYMPTLVAIQHNPAIREFYQRLLKAGKTKMTAVTACMRKMLTILNVMVAKKEYWKSELYA

SEQ ID NO: 271070 - protein, 329 aa, unidentified
MEIKEVIGIDVSKLTLDCCIHGSQELKTFKNDFDRIMKMIQWSLKKSGVDRENLLFVLEHTGLYSDYLVRLLDGDDCSMSIVSGLEIKRSLGITRGKDDRKDAKRIALYGYRRREETLPSKIPGSTLTRLKRLMSMRKKLVGQRAGHMATLREQKRVLEEDSLLFWVQEDIINLLGWRINDLEREMDKLLQGDLELGQMLALLTGIKGIGKVTARFMIVYTVGFTSFATWRKFASYCGIAPFPHTSGTSVRGRTKVSRLANREGKALLHQCSLSAVRYNPEMRAYYERRLEIGKSKMSTLNIIRNKLVARAFAVVARGTPYVNTMGYAS

SEQ ID NO: 271071 - protein, 438 aa, unidentified
MAQRNRALSLTHPHAAGIDIGSASHFVAVPPDRDDEPVREFKSFTADLHALADWLKACGVETVAMESTGVYWIALYELLESRGFEVLLVNARHVKNVSGRKSDVLDCQWLQQLHAYGLLRGAFRPDEAVCALRSLSRQREMLLRGQSRCVQHMQKALTQMNIQLSNVISDVVGETGQRIIRAIVAGERDPNTLAAMKHGRIRASHDEIARSLHGNWRSEHLFALKQALAHFDFHGAQLAECDGALEASLAQLHSHAGEPGPRKRRVRTRNAPKFDLRTQLYQMCGVDLTKIDGIDVTTALAVLSEIGTDLSRFPSVKHFTSWLGLCPGTRISGGKMLSGKSKRTANRAAQALKLAAAALRTSQSALGAYFRRMCARLDKAKAITAAAHKLARLIYMMLTKGEEYVDQGQDYFAERYRQRVLHHLAKLGMKLTTAEAAA

SEQ ID NO: 271072 - protein, 463 aa, unidentified
MAKKNTTSRKSKSKARKSVLERINPNAAGIDIGANFHFVAIPEDRAEENIRKFGPFTSDLHRLADWLAEHHIETVVMESTGVYWIALFQILEQRGFEVKLVNAAHVKNLPGRKSDVSDCQWLQQLHTFGLLNGSFRPKDEVCVLRTFLRLRDTLVKDCSSHVLRMQKALTEMNVQIHRVLSDITGYTGMAIIRAILTGERNALTLAQMKHPQVKASTEQIVKALEGDYRPEHLFALQTAVELYDAYHLKITECENKIEQQLEQFETKLDFDQVLEQSGALKVRSAKVRLELQRQAYLTSVCGVDLTRLPGLSTLAVEVIISETGLDMNCWKSEKHFCSWLKVCPDNRISGGKVLSSKSRKTKNRAAGMFRLAAQGAMQSKTAIGAFIRRIRARLGAPTAINAGANKLARLFYRMLKFGAAYVEQGQTYYEQRYKDRLLHNLNKRAKELGFQLTPCQLSTVSVS

SEQ ID NO: 271073 - protein, 490 aa, unidentified
MKTGHAPADYEYSTLTLDVFRFGFESTGALGFTNEYSGLAAQSAHYIGFAEPSMHVHIHNLPLLEIMMKTHSTRSFSAYVGIDWADKKHDFCIQAADQEQREFGTFDHTPEAISLWANALHDRFGGHIAICLELSKGPLVYALQRCQFLEIFPVHPSTLAKYREAFVPSRAKDDPTDAEIALEILLRHPDKLDPIQLQSEPMRILSRLVEERRSLVNDVIGITNRLTNALKQYYPQALDWFEHKDTLIFCDFLSRWPTLKQVKLARQSTLESFFHQHNVRRAHLIERRIQGIRSATALTEDEAVIRPYQMVVQAMVEQLRALLQAIDHFDNEIDKVAKGLPDYELFAALPGAGHILAPRLLVAFGEDRDRYANASQIQRYSGVAPVLERSGNKCWVHWRIACPTFLRQTFVEWAGSTIPRSFWAGAYYQQQRNKGSSHRVAVRALAFKWIRILYRCWESRTPYDESIYLKSLRRRGSPLLENISANVKMT

SEQ ID NO: 271074 - protein, 346 aa, unidentified
MTIVEAARAVTAGIDTHGEVHVAAALDEVGGLLGTRSFQADPGGYAELLGWLEAFGVVAKVGVEGTGSYGAGIARFLTKAGVHVVEIDRQNRQARRQSGKSDPPDALEAARAALSGRAHGVAKSRDGSVEAIRVLVVAKRSARGARVKALGQMRHLTFSAPDQLQSRLKGLPIAQFVAAAQGLRPTRSPDVVTAATKAALSSLAHRVADLEEEISDLDAMITPLLEETAPELLAVYGVGIDTAAALLVAAGDNSDRLHSEAAWAHLCGVSPLEASSGKVTRHRLNRGGDRQANRALWHIVITRLASDPRTQHYMERRVKDGRSKSEAIRMLKRYVAREVYHYLPRV

SEQ ID NO: 271075 - protein, 359 aa, unidentified
MKKISSASLITFMNTCDDQKIWIGVDVHKKSWAVALYREDGEILTFSTTSNLVSFVEQLTPWKDRLQKVVYEAGPCGFVLAPALMASGIKVGVVAPSRVPRPVSHGAKTDRLDCIKLAEYGAKGQFRRYVAIPSESEEALRSLERHRFQLVDRLRQIKSRIKGLLLQFGINEPQGLSHWSYSSIEQLLSLQLTDGLRETLQSHLRELEWIANEKKQIEKQMKESFQCAGLQKRLNSLQSIPGVGQIVALAFTAEIYRPERFQRAEELTSFLGLAPIIVQSGLSKPRGYMRQVGQSRLRSLLVEASWVWKQRDAKAAEFYRLILGRTGCASKAICALARKLAVIMWRIAIELRPFKFVSG

SEQ ID NO: 271076 - protein, 353 aa, unidentified
MNDATTVAIDLAKDVFELAFGNGAGQIVERKRLSRRAFARCLENRPRLEVVMEACGSAHYWARRFQAQGHRVRLLPARDVRPYVRRNKTDRADAAGLLEAARCSQIDPVPVKSPRQQGLQALHRARELLKGQRTAGLNLVRGLLREYGIAIPAGAAKVPAAVRDALEDGENDLPMCLRATVAEQMDRIQALGAGMAAIERRLEEEALADVAVQRYQTVPGVGLLTATALRAGAGDLARFRSGRHLAAWLGLVPREHSSGQQRRLGKITKRGDSYLRTLLIHGGRAVLRSAAMRQRAGKPLDPLQAWALALQQRQGHNKAAVALANKLARRLWAIDHHGDAFNPAHISVKPNAA

SEQ ID NO: 271077 - protein, 346 aa, unidentified
MKILALDLGKYKSVACVYETASLTHKFATIVTTPQALHDLLVEEEPERVVIEICPLAGWVSDLVATLGIALEVASTTHDAWRWKNVKRKNDRQDGLKLAQLSALGQLTLVHMPEPRVRQWRALINYRQRLVSRRTRIRNHIRALLLRQAVAMGRGAGAWTRAGIAQLKALARPLCEASREELWRGELELELAALEALAEPLRQVEQKLEELGAANKGVQRLRTIPGVGARGAEALVAVLDEVRRFRRGKEVGAYLGLVPKQIQSGESNRLGRITHQGNSMLRSLLIEISWSGLRYNSWMRSVYERVRRGSKARKKIAIVAVARRLLIRCWAMLRDGTSWQPALSNT

SEQ ID NO: 271078 - protein, 428 aa, unidentified
MNTSLNHHHTPNSCAAFIAIDWADHQHVFSLQVAGQNKKETGTLDQKPEVIGPWVAQLRERFGGRPVAVAVEQSRGALIHALLSYDFIILYPLHPNTVARFREAFKSSGAKSDPLDVDQILQILTKHLELLQPLHPDTVETRLLARLVEDRRKAVDLRTGHIQAWIAALKEYFPQALELVSGNMTSRLACDFLIKWPTFEAFQQAKPSTIKRFYYGHNIRSPEVIQKVLAVASTAQPLTTDAAIVQSGCRLSQMYAQLISTLNPIIADYEAGIEKVFAAHPEADLFSGLPGAGPALAPRLLSFFGTDRSRYPAARNVQSFSGIAPVTRSSGKTKVVYFRVACPKFDRQTFHEFARLSVAKCQWARNYVDYYKAKGKKFHAIIRALAYKWIRILWKCWKERTPYNEDKYMEALKKRGSIFATLHLEKKS

SEQ ID NO: 271079 - protein, 446 aa, unidentified
MMGLSKGLITQHHQGGALTMKFKQSEEQNQRIERISTSHLVVGIDIAKETHVAQATNFRGIILSKRHLSFSNTIEGFEKLERWIEGLQQKHRLKGLIIGMEPTGHYGYNLANWLADKGKSVVMVNPATTKRNKENRDNSPSKSDPKDALVIADVVSRGFYYEYSRQAIVFQRLKTIMSDREFWVANSVRLQNRIIRWLDIRFPEYFSVFEDWTCKRSLATLKEFPSPQDLASLSVSEVITGWREHMKRAGGSTGMQKAAQLIDQAKRSVGETTALDEAKQDLGRLFQEFERIVEILERIEKDIQVLLSEIPMANQLRSIGLGTICIAAILSGAGDLRQYAHGRQLLRKAGLNLAESTSGKRKGQIVLSKRGDAMLRKYLYLAMLQLVGNNTFFRQLHKNNVQVKQMKKHQSVFKLIGKLARIIIGIVGRGETFSPEKTAPAYIQAA

SEQ ID NO: 271080 - protein, 322 aa, unidentified
MSVVVLGIDIAKQKFDVALLVEEKTKHKTCKNSAEGFEALTVWLEKQGVGKVHACLEATGNYGEDLGIYLHEAGHTVSIINPARIKGFAQSELIRTKTDKIDASLIARFCLAMKPGIWTPPAPEIRSLRALVRRVDSLIDMRSQEKNRISTAHESVVLLIKEHIVYLDKEIENIRRQIDDLIGKNPYLKQRKDLLASIPGLGKATIPHLLAELDDLNKFTHVREMVAFIGLAPKETLSGSSIKGKPRLCKIGHARLRKALFMPALVSIQCNSAMIAFHNRLKERGKNGKVIVCAIMRKLVHVIFGVLKSGKKYDPNYKPVFA

SEQ ID NO: 271081 - protein, 411 aa, unidentified
MEVLYDRVAGLDVHRDSVAACVRLPGPRGGVVADKERFTTTTAGLGRLAGWLAERRVTPVAIEATGVYWKVVVYALERDFEVWLCNAHHVKNVPGRKTDMSDAEWLADVAAHGMVRPSFVPPLPIRALRELTRYRSAQVGVRAAEIQRLEKVLQDAGIKLTSVASRVLTQSGRAMVEALIAGERDPGRLAELAKGKLRPKIGALTEALTGHFGAHHAVAARRILDHLDFLDATVAALTDQIAARTSAYEAVFDLLLPVPGLNRYTIEVVIAETGADMDRFPSAAQLASWAGLCPGNHESAGKRRRVATPPGNRWLRRALIEAARAAARTKGSSFAAQYRQIARRRGPNKAAVAVAHSLLDLIWHLLRTGECYQDLGDDFFVRRRDPARETRRLVHQLEQLGYTVTLASPAA

SEQ ID NO: 271082 - protein, 343 aa, unidentified
MSEITVIGLDLAKHVFQVHGADPDGRPVLRKRLRRGQVLEFFASLSPCLIGMEACAGSHYWGRELQALGHEVRLIPPQYVKPYVKTNKNDATDAEAISEALTRPTMRFTAVKSAEQQSVLMLHRTRELLVRQRTMLVNALRGHCGEFGIVAAQGLSRAGDLIKRIEDPADTALPDLARQALQCLTSQIRAIQEQIALIEKKLLAWHSSCEASRRLAEIPGVGLITATAVVASVGNATQFRSARQFAAWLGLVPQQHSSGGKERLGHISKRGDGYIRRLLVHGARAHLSWSRRKKQIRSAWLTGLLARRPTNVVLLAMANKTARIAWAMLSRGERYQEMFAAAA

SEQ ID NO: 271083 - protein, 351 aa, unidentified
MIIIGVDYHPSDQYIAFVDTETGEGDERRLNHSDGEAEKFYRELAARGVSVRVGIETTGYSRWFERLLAELGIELWIGDAAKIKSKRVRKQKTDRNDAQLLLQLLLDNNFPKIWVPSPENRDLRQLLWHRHRLVQMRTRIMDQLQAIARNEGQRRKKKLWSEAGRAQLEKLALAPWASRRRQDLLELRDRMNPRIQELSGAAEQEAKKRPEVLRLMTHPGVGPLTALAFVLIIGTVERFPCGKQIGSYVGRIPCEDSRAGHQRLGHITKQGSSLLRFLLGEAAQAAARCAADWRRRYMHLAMRRQRNIAKVAMARRRGVRLYWMWRKGWEYSDWIKFGSHAGQLGTGNGVR

SEQ ID NO: 271084 - protein, 338 aa, unidentified
MPTYAAIDLHSNNGVLTIIDETDRVLRQRRIPNNIEEFIKELEPFRATLQGVAVESTFNWYWLVDGLRAKKFPAILVNTAAIQQYEGLKRSDDQYDAWWLAHMMRLGILPKGYIHPREERAVRDLLRKRATLVQQRTANILSVQNLEARNRGTKISSNEVKHLTSASIAALYDNEDLALALTTTLTVIDALTKQTSLLEKAVLKKARLRSEWELLLTVWGVGKILGLTIMYEAGEMSRFAGPGHFASYCRCVDATRISNGKKKADNNAKNGNKYLAWAFVEAAHFAVRFYPEAKRFYDRKTAKTNNVVAIKAIAHKLARAAFHVLHDQKPFDPKRVFV

SEQ ID NO: 271085 - protein, 355 aa, unidentified
MKQQAIQYLALDVHQATSVATVRDESGAIRMRASVPTEAKAIVGLVKGIGRPLHVAFEEGTQAQWLHDLLQPHADRVVVCNVRGRSETVSKSDRIDADWLSEQLRLNALRSVHHGSAGVATLKELVRCYMNLVDDATRVMLRVKAIYRGRAVATAGKGVYRPSQRKAWLAKLENRGVRARAASLLEQLDTVLKLRTKARTAMIAEARRQSGWKILRAIPFLGPVRVAQLLAIIGTPYRFRTRRQLWPYAGLAVVTRSSADGEIVEGKVRRRKRAPLTRGLNRNFNRVLKNVFKGAANAAAAKAGPLKESYDRCVAGGVHEEMAKLTLARKIASIVLRLWKKGELWDPAKVTMQAT

SEQ ID NO: 271086 - protein, 369 aa, unidentified
MGCFVGIDVGKSRHAYAVVDAAGAELASGEVTGTAAGFEKLKRVLVRFDVEVIGMEATGHYWRNLWYALVHGGYECRLLNPASTVCYRRMSLTKHKTDALDALCIARYLAAVRSDRRGLDVQSQEGLRSLARAQAAIAEQITEAVNRLHKQLDLSFPEFPKLVGRLDSPKALMLLEHYPTASMMSRARKLADRRYGQQNHRIGVPLAQRLQDAARSSFGCAQSSSDALLIRQSVSHIRLLHEQSKELIREMETLVAEQDQDAANLLSVPGIAIKSAAAVIGEIGDITRFETAKKLTGYIGAHPRFHESGNKSAHPRMSKAGNKRLRRILWCQSASNFDVRRGKAAISQWVKVPPGNFCSSRKQSEQSWR

SEQ ID NO: 271087 - protein, 325 aa, unidentified
MAESASVGAVVGIDVAKDRVEVAVRPDGPRWTAATTAVGLRELAERLVTVAPRLIVLEATGGYEQPVVAALTAAGLPVSVVDPARVRHFARATGLLAKTDRLDALVLARFAEQLAPAVRPLPDAVQRELALLVQRRRQLLDMLAAEEQRLEQQALFPRSPITGSLAAHVAYLRQQLADTDQALTAHLTAHPRWDATHALVRSVPGVGPVTAATLLAEVPELGQLSRQQIAALVGVAPLARDSGRWRGQRKIGGGRAAVRQVLYMATLTAVRCRRSPLRAFYQHLRARGKLFKVALVACMRRLLVILNAMVRDGQPWNPALCMAKT

SEQ ID NO: 271088 - protein, 398 aa, unidentified
MTAVMIGVDPHKGSHTAVAIDPAEVPLGGLRVRASSSQASRLLEWAAAWPERTWAVEGAGGLGHVLAQQLVAAGEQVIDVQPKLGARVRLLSSGTSNKNDPNDARSVAVAALRSPVCHPVRADDHAAVLRVWSRRHRQLSSLRTQAACRLHAVLCELTPGGVPKNITANRAAAILAAHRPDGPAGQAWHDLADEHLADLRRIDAKLADTKKKLAAAVKASGTTLTGIFGVGPVIAATVIGDVADPTRFPTADRFASYNGTAPIEVSSGSRKIYRLSMRGNRRLNHVIHMAAVTQIAHAKSDGHAYYQRKLAEGKTPSEARRALKRKISNALYARLQADARTRTAGPGGQPGNDTETSVTGSHPERQLFRQATPEPVTTLRQPARPSRKKNPPRPRRAS

SEQ ID NO: 271089 - protein, 349 aa, unidentified
MITIGIDPHKRTHTAVAVNDVGQQLGEITIAADEAGQRDLLSWAHSLDGGEPARFALEDCRHVNGRLERFLLANGECALRVPPKLMAGARKSARTRGKSDPIDALAIARAALREESELHPASHDHAAREVKPLVDHREGLVRERTVLASRLRWHLHDLEPDLEPPARTLERPAVRRGLSQRLSRREQTAQVRICRDLLSRIGDLTRRERQLASEIGERAAAYAPELLEVPGVARLTAGKLIGEIAGAERFKTEAQLAHFAGCAPIPASSGKTQRVRFDRHGNRQLNAAFYRIALTQARIHPGARAYLAKKRAEGKSSAEALRCLKRLLVRVVWTALRASCEQRISHSQS

SEQ ID NO: 271090 - protein, 430 aa, unidentified
MSYKIAGIDVHKKMLAVVVSDVEVDGEYHFEQQRFGSNPEQLRSLAAWLLEQEVEEVVMESTAQYWQPVWAALERYWKPIREKQQGASRKSGTLHLAQAQSNRGRRGRKKDFPDAERLVKRLVARELILSFVPGAEQRLWRTVTRRKYQLTRDKVRLQNQLESLLEEAHIKLSSLVSDLLGASARRMLKALADGETNPGALAALADQSLRATPEQLCDALGACTDLQPVYGRLLKMALEQLQFLEQQIGQLDQEMARLLSQHQDAVQRLAEVPGLGVDSAQQIIAEVGATAATFPSEKCLSSWVGACPGDDESAGVNYSHRSPQGNRHMRRLLNQSANAAARTKGSIFEIVYRRSVPRLGHNQAIGAIAHRQCRLIWLILHQGVRYEERGPAVTKRSKQKRTARMIRQLRSLGYRVEPINSQLATPGLAR

SEQ ID NO: 271091 - protein, 412 aa, unidentified
MTAKDQFAAHVGLDWADKKHDVCVQFKNGDRIFHVIEHTPEALDIWLNELHQRVKGRIAIAVELKKGPVVYALQKYPFVTVFPIHALSLARYRQAFWPSGAKDDPQDAELALDLMLRYPHKIKAIEADNPDIRLLQQLVEQRRLLVEDKRRFVNRLINTLKQYYPQPLEWFSHRDSSLFCELIIRWPSLQQLKRARSDTVRHFMNAKGGPAVAYTEQRIASIASAIPLTTDKTVIEANALMATALASQIKLAGDLIRTYDERIESLFDTLPDAELFKSLPGMGPCMGPRMLAALGDNRDRFNSAEEIQNYAGIAPVTERSGQKSWVHWRWLCAKFVRQTFVEWTAKTVNSSYWARLYYQGQREKGKSHQSAIRALAFKWIRIIYRCWKTKTRYDEAKYLLALEARKSPLLKP

SEQ ID NO: 271092 - protein, 310 aa, unidentified
MGIIVGCDISKGWIDVERVGAEQQPALRLDNSARAVDCFARELPAGSLVGMEATGEMHELLAGKLVKYGHTVFVVNPRWIHQYAKAIGQRGKTDRSDAALIARFIAAEAANLHPYQPPSREQHELRKLLLRRYTVVKLRAATRQSLGDQAREIVRQFDRILERIERRIAELIKAAPDWRELAQRLRTAPGIGPVVAAHLVQVLTRFPFQKADAFVAHTGLDPRPNDSGQKHGRRRLTHHGDATLRTMLFMGAMSACKRREWRALYDASIQKGLPSTAARVVVARKLARVAFGLFKSGETYDPGRFLSTSG

SEQ ID NO: 271093 - protein, 450 aa, unidentified
MGRPQVIDDEERERVYEKVAAVDVAKDSGMVCTRLPHPSRAGTRQSTVWTVQARMGAIRELGRQLARGGIQTVTLESTSDYWRIWFFVLEGCGLAVQLVNSSQAKNLPGRPKTDKLDAMWLARLTEMGLLRASFVPPAPIRALRDYTRARTRLTQERTRCWQRLEKLLESALIKLSSVASKLTTLSAQDMVRALIAGERDPQVLAALARGKMKAKHDDLVEALDGMFGDHHGELAQLLLDQIAFLDSKIAELTARVQEQAAALPGAWGVNADGTTGPGAGTSPGDPVLPVVQRLAQVPGISEELARSIIVETGLDMSRFPDAAHLVSWAGLCPRAHQSGPRARNGKKGRGNGYLRGYLGQAAIGAAATATFLGERYHRVARRRGKAKAQVAVARSILVIIWHLLASPDARFTDLGYGYYQARTDKDKKIKNHIRQIEALLGHPVTIAKAA

SEQ ID NO: 271094 - protein, 358 aa, unidentified
MVIVGVDAHKRTHTCVAVDDRGRKLGEKTVPATSAGNASALKWALLEYGPELTWGIEDVRLVSRRLEKDLLSAGQRVVRVPTKLMARTRASARTRGKSDSIDATAVARAVLREPDLPVAQHDPVSRELGLLTERRETLVEQRTATINRVQWRIHELDPARSSTLRPLIYVKNRQPVAAWLATQPGLVAELARDELDDIARLTAAINAMEKRIAACAGMHAKNLLAVPGCGDLTAAKVIAETANVTRFKSEAAFARYIGVAPLPHSSGVTDGRVRMTRSGNRQLNAAVHRIAVSQVRRDGPGRAYYRKRLQAGDSSATALRVLKRRISRVVFSRLKADEAERHSQSDTIVNVDTADTSG

SEQ ID NO: 271095 - protein, 411 aa, unidentified
MVKENFIYVGIDLHKETHTAVMIDCYNQKLGEITFPNRPADFPKLVTKVKKCNTDAKEVVYGLENAYGYGRPLAVWLIDKGYFVKDVNTAISHRQAKHRGAMYRKSDSDDAEAIALATLNMLDKLPDACPNDAYWSLGQLVHRRDNIMKQRTRLVNQLHEQLCIAYPSYKQFFNDISRPTALYFWEHYPSRKYLKGKSVEDLRAELVPVSHNKCSTKTCEKILDAVASDKVKNNAYQDARDMVTLSIVSDLQHYDSQLTEVDKMLEQMYKMLGCTLTTIPGVNVITAVKILAEIGDIKRFGNANKLAQFAGIAPLHLSSSGKGKDVATKQGNRRLQATIYFLAIQMVQVSSKGTPRNPVVRAYYEKRKAEGKTSQQALICISRRLISIIYGMLKNGTEYRMPEVENAGENM

SEQ ID NO: 271096 - protein, 357 aa, unidentified
MRFYTKQHPFYCGIDLHARTMYVCILSQDGEIIVHRNMPTSPEALLKTIAPYRGHMVIAVECIFTWYWLADLCAQEGMPFVLGHALYMKAIHGGKAKNDRIDAQKIAVLLRGGMLPQAYVYPAAMRATRDLLRRRMHLMRKRAELLTHVQQTNSQYNLPEIGKKIAYKANRTGVAERLADPAVQKSIEVDLALIDYDDQLLRDLELAIVTTAKQHDANTLYLLQTVPGIGKILSLVLLYEMHAIARFPRVQDFVSYGRLVKCAQESAGKRSGTSGTKIGNAYLKWAFSEAAVLFLRHNPAGQKYLARFEKKHGKGKALTVLAHKLARAVYDMLKRGTAFAMDQFLHGSGSGAGEPAA

SEQ ID NO: 271097 - protein, 343 aa, unidentified
MQTVTTIGLDIAKSVFQVHGVDAAGQVVIRRQLKRRQVLAFFQRLPACLVGIEACASSHHWARELQLVGHTVRLMPPAYVKPYVKRHKNDATDAEAICEAVARANMRFVTIKTPEQQGCLILHRTRHLLIRQQTSVINAIRAHLAEFGIVAAVGRNGVEQLLGVVADANDKRLPEVARACLATLGVQLRVLKAQILEFDRMINAWHRSNETSRRLDKAPGIGPVLATALVATVADPKTFRSGRNFSAWIGLVPQQHSSGGKDRLGHISKQGDRYLRNLFVAGALAVIRYAKIHGTQHRPWLAALLARRPTKVAAIALANKIARMAWAMMVKGEHYKEPAALAR

SEQ ID NO: 271098 - protein, 442 aa, unidentified
MAQRTRLKLDIANPNAAGIDVGSASHFVAVPPDRDDEPVREFKSFTEDLERLVDWLIACGIDTVAMESTGVYWIPLFELLESRGLSVYLVNTRHVRNVSGRKSDVLDCQWLQQLMSYGLLSGAFRPKDEICALRSIMRQRGVLLSYQGQHVQHMQKALAQMNLQLANVISDVVGETGQRILRAIVAGERDPLKLAELKHARIRASKQQIAMSLHGNWREEHLFELTQEVELFDAYSQALQRCDLMLERLSRSQDQPGPSKRRRCSKVKNAPKFDVRTYLFRICGVDLTAIDGIDTTTALKVIAEIGPDLSRFKSAKHFASWLGLCPGTKISGGKLLSGTTKRTTNRVAQALKMAAISLRASQSALGAYFRRMCARLDKGKAVTAVAHKLARLIYAMLTKGASYVDQGQDYYEERYRQRVLFHLKKKAAALGLELVPVQTQPA

SEQ ID NO: 271099 - protein, 418 aa, unidentified
MLRIVYPICCGIDVHKKFVVATVGTTNKSGVTDYQTRQFSTFTENLHHLLDWLKSQSCINVCMESTGKYWHPVFNILENYCDVVVANPKYVKGIRGKKTDIKDSIWLCDLHKHGLVPRSFIPPLLIRQIRDLMRYRFKLTNFKSSEKNRIQNSLTVSNIMISSVVSDTFGVSSMKIINHILENPDDKDFDVSSMLHVSMQDKAETISKSINGNLTKPQADKMRVCLHHFENIEKHIADIESVVLGLVQPYLPQIEIILSLPSIKNIFTAIAIIGEIGSDMSVFNSSKHLCSWAGLTPQNNESAGKKKSVRVSRAGIYIKPLLVQCANAAIKSKKCTYFKIHYDQIKKRRGHKKAIIAIAHTLLNCIYHMLDKNETFNYDLYKIDSKPKQTYASQITEEMAIRYLQTLGYQIPDMRNTT

SEQ ID NO: 271100 - protein, 437 aa, unidentified
MDPSKQQLIAGKHIVGIDPAKKKHQAVILTPDGLQLGKSFCFDVSYEGYSNTLWKKVTFLVPNCNPENIVFAIETSCNLWMTLAFYLKAEGYTVVMVSPLTTHLSRPMAKHDFSRTDPKDALLVASNAHHGNFDLYQEYSSSTNAMHRLGITYDKLRKELAQNRARLRAALEHLFPEFLTILEPDTQTAHYLLKRYLFPQEFIAMDREREAKAITAISRHQHGMNTLLQLQHLAQRSIGVRKTLEECPAERLTVNCWLALIETLTAQIETIFSALVGLAQQLPEYDFLRSLKGVSHLSAALFLAEVRDIHRFRHYKQIQKNAGLNLRLSQSGQYVGARHIAHIGNRRLQWLLYCMAEETAKWIPEVRIKFLRRQLKSSKYRKNIIASTSSLLKLIMVLVKEQRPYQMRSETLDQMRALELQVAQRKEERQKQKKHAA

SEQ ID NO: 271101 - protein, 349 aa, unidentified
MVAVLLPGESRPVEWQISNDGTAVRKLVKKVQRMAMGRTRFCYEAGPCGYVLQRWIQALGEECMVVAPSLIPRKPGDRIKTDRRDARKLAELDRAGLLTEVHPPTEEDEAVRDLCRAREDAHEDLVRCRHRLSKFLLRRGRQWLDGKKAWSQGHRLWLRNLRFEHAADQVVLEDYLLAVEQVEERLRELETRIETASQAPRYVEAVGALRCFRGIDTLTAMSLVTELHDFMRFPSARGLMAYLGLVPSEHSSGGKERRGEITCAGNSHVRRLLIEAAWHYRHRPNPNGLASRRKGQPRRVISIADRAMVRLHRRFYRMLERGKARPKVVVAVARELTGFIWAALRLHAA

SEQ ID NO: 271102 - protein, 359 aa, unidentified
MQSQVNHLNFNDENIYVGFDVHLKSWKVTVMTDKLTIKTFSQNPSPDLLYQYLNKNFPGAKYHSAYEAGFCGYWIHNKLVSLGINSIVVNPADIPTTDKEKVQKEDARDSRKIARSLRSGDLVGIHVPSLKTLEDRTLLRTRSLLVKDLARYKNRIKSFLYFHGIEFPESFSKPGTHWSKRFIYWLENIPMSEESGKISLNALITSSKNLRSSILQINRQIRLLSQTSAYKEQEKLLRSVPGIGLLTAMTILTELETMNRFSSMDRLCGFIGLVPSTNSSGDKDKVGDITPRGHHVLRSALIESAWVAVRIDPALMKSYMEYCKRMEPNKAIIRIAKKLLSRIRFVLKNNQQYVCSVIK

SEQ ID NO: 271103 - protein, 322 aa, unidentified
MNKYKETFGVDISKDVFDVHGSSQGHNRYKNYEPGFRKFLKELPESSLVVMEATGHYHYRLAQFLYKNGVIVSVVNPLSIKRFIQMKLAKVKTDKSDAKAICEYALINEVPLYNALTDTQSECLQLFRLLDTYLKQRTATKNKIHGEAVLGIPSKFVCRSLIRNKKQLDKEVVAIESEILSSVKVDQQEQLTLLTSIPGIGQKTALFLIVVTDGFSKFEAVSQLCSYVGITPTIRESGSSVRGRARISKVGNRKLRNLLFLCSFNACKHNKACKEVYERIVNKGKSKKLALIAVANKLLKQSFAIAKSGRPYDETYVSILPR

SEQ ID NO: 271104 - protein, 320 aa, unidentified
MMAQNARVVVGVDVAKDKVDACIRALGLRQTFPSTTQGHRKLVAWLRKHQVNKAVMEASGGYERAWAKVLREAGIEVRIVDPKRVRSFALSAGRLAKNDTIDAEMIAWFAETFSDAPGQKHDAAHEELQVLVKARLSLIDLRMRLVSQSEHAAPGLVQKAHARILKNLACEIAKLEAAICAKIKFMPDFAERAEIIESVPGFAETSSANLVAGMPELGQVSNKIAAALIGVAPYDDDSGKRRGERHIKGGRRWVRNAIYMPCVGAATLNNPVLKAYYQRLIAKGKEPKVAIIACMRKLIIILNTMIARRQKWDLSRYALS

SEQ ID NO: 271105 - protein, 419 aa, unidentified
MSFKILKFNCCGLDVHKTWIFACIGITDSDNRTEYKQARFSSFTKGLNELCDWLAKYNCTDVYMESTGKYWIPVFNILEQHNLWVTLSHPKYTKPMKGNKTDCKDAKWICDLYMCGMVKPSFIPPADIRELRDLVRYRYKLTCMITGEKNRVQNCLTVSNLKLDDVFSDVFGKSSRSITEQILQHPGEKFDVAPFVHGRCKTPIEEIQAAVDGAISKEQAVKLRQCLNHIDELNKHISEVEQEIFRLSDKYETALNLIRTAPGFDKNPLTAIQVLSEIGGDMSVFPSAKHLVSWAGCCPRNDQSNQKIKSTRISRAGSYFKPVLVQVANALIKSKKHPEFTTRYKRIKARRGHKKAIIAMCRMILTAIWHILTDLKPYTPEGFLESRPVKEDKILSTSQALNLLRQRGYVIKDEPLPAS

SEQ ID NO: 271106 - protein, 343 aa, unidentified
MQAVTTIGLDIAKSVFQVHGVDAEGNIIIRRQLKRRYVLAFFQKLPPCLVGIEACASSHHWSRELRALGHRVRLMPPAYVKPYVKRQKNDATDAEAICEAVGRPNMRFVETKTTEQQGCLMLHRTRHLFIRQQTAVINAIRAHLAEFGIVAPVGRNGVDQLLGVVADANDKRLPAVARACVAALGAQLQMLKAQILQFDRLIRAWHRSSEASKRLDEIPGVGPALATALVASVADPKAFRSGRDFSAWIGLVPKQNSSGGKERLGSISKRGDRYLRSLFTAGALAVIRYAKIHGTKHRPWLTALLARRPTKVAAIALANKIARMAWAMMARGERYKEPAALAA

SEQ ID NO: 271107 - protein, 353 aa, unidentified
MNQEDRRVIGGVDSHADSHHAAALDERGRLLGSKSFAVSVAGYRELLAWLASFGLIERVGVESTGSYAAGLTRHLLAEGVRVLEVNQPHPHTRRRRGKTDAIDAELAARHALSLTSTVTPKQTSGIVESIRQLRVARDSAVKSRTAAIVQLGDLVRTAPSELRERLAIRSTLKGKAALCRQLRPDTDRLSEPANAAKLALRSLAGRVALLDDEIAELDRQLTPLVATAAPRTTALLGISTGHAGQLLITAGQNIDRFHSEAAFAALCGASPIPIASGKRGRYRLNPGGDRQANRALHMIAVCRLRHCPETRAYARRRSNEGKTKKEIIRCLKRYIARQTYATLRDDLRSLAIA

SEQ ID NO: 271108 - protein, 410 aa, unidentified
MELLHPHCAGLDIHKETVVACIRHLRRGKVTTEIRTFKTTTEELIALSDWLATEGCTHIVMEATGVYWKPVWHVLSDGEFELVLANAAHVKNVPGRKTDVNDAVWLAELMAHGLVKASFVPDRPTQQMRDLLRTRKQFVRERSSHIQRIQKTLEDANIKLDLVVTDILGLSGRRILQALIAGQTVPRTLAALADRRIHATSTQLEAALHGRVTDHHRFMLKLHLDQIDAQDAAIARIDKEVDGNVEPFRVALEMLNGIPGVSSLSAEVIIAEIGIDMSRFETAGHLISWAGLCPRNDESAGKRRSTRMKKGAPWLKTTLVQCAWAAARTKDSYFHAQYHRLRSRRGPKKAIGAVASSLLTTAYHMIKSGTLYEDLGANYFNHHAKDKQALHLMHRLKNLGFNVQITPSTA

SEQ ID NO: 271109 - protein, 390 aa, unidentified
MFYFIGIDIAKFKHTACVLDQNGASCVEPFDFSNDSIGYNILWEVIKPYVGKEHRVGMEDTGHYADNLRMFLLDKGCTVCMINPLTSTHLRKAEGLAKNDRLDSTVIAGILMNPRLFRSVTKENLNYLTLRQYTRLHHKRTEEMSRYKVQLQKDIDHVFPEYNSIFPTAYSKTYIAVLKEFQSAATIAHTDIRRLRSVMNPKSRGKMISLSAEDLKAAAQKSVGRPDVAIEMEIVHLISFIELIESSLAEVDKKIEEFSKTLNSPILAISGISDFSAMSIISELGDISRFRNEKCVIKFAGVNPTVYESGTYSMTHTRLEKKGSKYLRRTLYQIIDSVIRCNTVFKAFYDKKISQGKSYRCAQGHCVRKLLRVLYKILSTNCRFDPALLR

SEQ ID NO: 271110 - protein, 388 aa, unidentified
MHVYVGVDIAKELHYAAIMDSDGVVSKPFSFENNDKGFNLLLSHLAPYNKESILIGYESTAHYQENLAYFLKSLGYRTAEINPLQTAALRKANIRNTKTDSVDARLICLALMNHHIQGDQRDSVRLDDLYQLCKMRMDTMKKRTTCKIQFVAIMDRIFPELASFFDNNLHTNTIYRLIESFPLPSQIKKTRIDILTKLLHKASRGHFKKEKAQKLKDLADISVGIPSDIFAFQAQQLVHQIEFYTDQIQTIEERINTNPDVMSSPLMTIPGIGTFCVACILSAIKNINDFGAPCKILAYAGLDPVIRQSGKFTASHTRMSKRGNSLLRYALVWSAGNVVKNNHTFAEYYRHKTEDQGKSHYQALGHCAKKLVKSIYHMLKCNESFNLD

SEQ ID NO: 271111 - protein, 402 aa, unidentified
MNAVGIDVSKGKSMVAIMRPFGEIVSAPFEIKHTASDINSLVELINSVEGESRIVMEHTGRYYEVLAHQLSEANLFVSAINPKLIKDFDNDSLRKVKSDKADAVKIARYALDKWQNLKQYNVMDELRNQLKTMNRQFGFYMKHKTAMKNNLIGILDQTYPGVNTYFDSPARSDGSQKWVDFASTYWHVDCVRKMSINAFIDHYENWCKRKKYNFSKSKAEEIYGKAKELVPVLPKDDITKLIIKQAVDQLNSASITVESLRTLMNETASKLPEYPVVMTMKGVGTSLGPQLMAEIGDVSRFTHKGAITAFAGVDPGVNESGSYEQKSVPTSKRGSSDLRKTLFQVMDVLIKTHPQDDPVYQFLDKKRAQKKPYYVYMTAGANKFLRIYYGRVKEYLASLPES

SEQ ID NO: 271112 - protein, 428 aa, unidentified
MLKINPLSTLYVGIDVSSKSNYVCALDFYKNKYINSSFANNQPGAEELAEKILECLKQHPELNTIVAALESTSVYSIHIANFLSSCEELMHFKPYVFVLNPKCTANYKKSYIGLGKSDPIDAFVIADYARAGNIETEPWRGSQFLALKRLTRHRLHLVECMTREKTYLVSNLYLKFSELQMLEGDDQPFCDIYGATSSSVLTEYLSLEEIIDSSEEDLISFLARKSRNRIKDISKTAELLRKAARDSYRLDKALYEPLNVSIASSFNCIETFKKEIKLIDTAIEREIRGLNPNAFIILQSIDGIGPVFAGGIVAEIGDISAFLSSDALAKYAGLMWKSNQSGDFDGEDTPMSKAGNRYLRYYLGEAANSMRKHNVEYGAYYRKKYNEVPKHQHKRALALTSRKFVRLVYGLLARNQLYSGVSLDTSNE

SEQ ID NO: 271113 - protein, 403 aa, unidentified
MEHVIAFDVSMGKSYMVIYNAQKQCIFESEINHSKPDFEELRKRIDQLMNENKKSPHIVFEATGVYSRQLERFMQDNKFEYFLLNPLEAKLQCDSLRIHKTDRSDAHQLALTHFTASRREKTGTDNLFYQLKSLSRFYNELDDELSLIRSRMHKVIQLTFPELEQVFTTKSDLFLNFVQLFPHPDFVQNLSKTVMKNQIRKNTNKNISIRIAEKKAMEVLEAARYSYPAVRQDDVLCEQLKSYAKRYQELLHQKEQCITKMVRLAESRTEYPIILSFPGIGPNTAIRLLAEIGDITRFENHKQLNAFAGIDIRRFQSGKTFFKDKINKRGNKHLRKLLFLIIQNMIKLRRYGQNHIVEYYDKLKTQPYNKCHKVASIACVNKLLKLLFYLITHNIHYDYRLTA

SEQ ID NO: 271114 - protein, 344 aa, unidentified
MDNDTLVAVDLAKSVFEVLVSLRPGKVHKGQRLQRDQVLPFFAQQPAATVIMEACSSAHYWARAIQKLGHKVVLLPAQHVRPYVLRNKTDRTDTKGMLEAYRNDAIRPVPVKSVAQQTLASLHRIRSGRVSDRTAIINRLRGTLREYGLVIPVGAEKVVSYARAYLTNADSGIPDALRDLLGELCDEIRMLQTRVREVERKLEILGAETAAVQHLMTVPGIGLLIATSLVAFVGDSHRFPSGRHFASYLGLTPREYSSGSKRHLGRITKRGDVYIRMLLIHGARSVLAHAHRAAQPDRLRSWALELEKKVGANKAAVALANRIARIAWAVWTHDRDFEARTLVA

SEQ ID NO: 271115 - protein, 311 aa, unidentified
MTKQVVGIDVGKEKLDVGLTGQKSVQTWDNDEAGRAELSEWLVEQAPQLVVVEASGGYEAAIVSELVDCGLAVALVNPTRVRAFARAEGLLAKTDKIDARLIARFGATMKPEPQARRDQNQLELNQWVTRRRQLVLMVTAEKNRLQTAAPAMQAHISKHIAWLQADIELLEQQINQAIAANPRWAETAKRVESVPGVGSITASTLVADLPELGQLNRQKIAALVGVAPFNHESGKQRRQRRIFGGRASVRSVLYMATLSAVRHNPVIKSFYQRLLAKGKLKKVALTACMRKLLVILNAMVKTGQDWSPTIS

SEQ ID NO: 271116 - protein, 419 aa, unidentified
MEDIKAKKVKSINEKTLIVAMDIGKGVHHAYFRAPNGTEMKSFPFSNSRNSFESMWARICQFKTLHDLDDVVVGFESTGPYAEPMCHFLRKKPVRLVQVNPVHTKRLKELTGNSPNKSDRKDPRVIADIISLGHALSLVVPEGPAAQLRRLTQARERAMKRRTALSNQLQHLIFVIFPEFLALMKDISCKSAIYLIKNYPTPESVVGLGLEGLTMLLKRVSRGKVGQEKAEALFRAAEHSIGIKEGRQSLLLEIEYVVSQLGADTQFILSLEKQMEHYLEQTPWSGSLLSIKGIGPVTVAGLTGEVGDFKKFHTVSEVMKLAGLDLYEISSGRHRGQRRISKRGRSLMRKLLFFAAINAVKSKGILHKPYHEMLDRGMPKIKALVAMARKLLRVIFALARDGSVYMENHGYQEPLKLAA

SEQ ID NO: 271117 - protein, 365 aa, unidentified
MEKSTAFIGLDVHKESIEVAIADQGEARHYGRFAGNAAAVDQIARRVAARGRELQFVYEAGPCGFWIYRRLTRKGYGCMVVSPSMTPRRPGERVKTDRRDCVKLARLARSGDLTAIYVPDERDEAIRDLVRAREDSVCVQRQGRQRLQALLLRNEIRYAGKGAWSAAHRRWLASLKLPDPAQQIAFEEYLQAIEEADARLKRLAQVIACHLESWRWKPLVDALQAFRGIESIHGVRIVAELGDLTRFDCPRKLMGYLGLIPTENSSGSRRRQGAITKAGNRSARRAFVEAAHQYSHPARVSWVIARRQGGVPKEVLDIAWKAQLRLCARFRKLCARGVNRNKVTVAIARELCGFVWSVGQLVKPL

SEQ ID NO: 271118 - protein, 333 aa, unidentified
MKYIGLDIHKKDTQACVLDEKGKVIITKRVRTDVSDIGHLFGIIEAGDEKLEVVMEATGFYFWIYDLIVARGHDVMVVHPTKAKELMKSMSKTDKNDAFMLAELLCFDRLKGIYVPSLEIREMRDLTRHRESLARKKGDAKREIIAALDQRGLKVPSEFRTNFTEKYKDWARSQNDFVINEKLDVLELLLTKIHNVEKIIEQRYGKDEDVQLMRTVPGIGLVTAAVVKAEIGDISRFKTVESLAAYVGVSPTTCQSGDKTWGGPTRHGNDRVKHVLIEATLFHYNHCPDSKISSYYIRKKERIGGKKAVVASSRKLLEALYFMITRKEGFHAH

SEQ ID NO: 271119 - protein, 341 aa, unidentified
MDSIYYIGLDVHKKTIAYCIKRSDGELIRQGTVKSERKALLEWLSGLPGSWIGAMEATMFTGWVYDFLKPHALELKVAHPEMLKAITAAKKKNDRADAGKIADLLRVNLLPECYMAPSQLRELRRILRYRNMVVRTAVMMKVKISSLLMEVGASYDKRRIHGKRYFDSLLERVEDVPVSVKELLALSRSNLELFTAVQKKLLKTLKDNELIRQRVERLMSIQGVGEVLALTWTLEIGDPSRFRSSSKAISYCGLCSAQHESAGKQYRGPISKKRNKHLQTILIEAAKLAPRWNYQLAMVHAKELARGNRNRATLAVARKLVKYMLAVDRRNSDFEPLQQAV

SEQ ID NO: 271120 - protein, 355 aa, unidentified
MSQEKYVGMDVHQATISVAVLDSRGKLIMESILETKAATILEFLQGLHGSLSVTFEEGTSAAWLHDLLKPHVTRLVVCDPRKNALLKDGSKSDRIDARKLAELLRGNQLTSVYHGEHGMRTIKELGRSYLTITQDLTRVMSRIKALYRSWAIPCSGTCVYAPRHRAEWLGKILEPGVRLRAERFYQQLDLLQPVRQQARHDLLIESRKHHAVKLLRQIPSIGPIRAALLVAQLQTPHRFRTKRQLWAYSGFALETHDSGEYRYVRGKLQRNRERMTVRGLSNNHNSEVKNLFKGAAISASTHPGPLYDFYVALLEKGMRPTMARLTLARKIASITLTIWKKGVDFDATQLHRQEA

SEQ ID NO: 271121 - protein, 485 aa, unidentified
MILFRRFPRSDRLGRSRITELKLDKDMPKKSSNKAKSQRSRERALLQKVHLNAAGIDIGADAHWVAVPEDRDANPVRSFGVFTRDLILLCEWLKRCQVETIVMESTGVYWIPLYQMLERKGFEVRLVNAHHVKNVPGRKTDVKDCQWLQQLHTFGMLGGSFRPQAQMCVVRSYLRLRDTLSKDCNSLVQRMQKALTEMNVQLHRVISDITGVTGMSILRAIIAGERDCLKLAQLRHPQIKSSALDIAKALEGDYCQEHLFALQTALELYDSYLLKIMACDRHVQKALSTFEAKTSAPAPELNGMRSAEKRQEALRRHHLEQMTGADLTKLPGLDLLAVERILSEIGLDMSRWPSEKHFCAWLNVAPNHRISGGQILSSKPRKNANRAAAALRLAAQSAMQSKSAIGAFIRRIKSRLGAPTAINAGAHKLARLVYRMLKFGKAYVETGQEAYEKFFKERTLRNLQRKAHQLGFQVTPITTPTVPVS

SEQ ID NO: 271122 - protein, 424 aa, unidentified
MKSASNTTSSERPLALPEVAHNDVTAGIDWARDDHAACIVDGRGRKVATTTIEHTTGGLSDLVAFLGRHGVGEVAIERPDGPVVDTLLTAGLTVVVISPNQVKNLRGRYGSAGNKDDRFDAYVLADTLRTDRARLRPLVPDTEPTIALRRACRARKDLVKHRVAAANQLRAHLRNVFPGAVGLFADIDSPITLAFLTRFDTQDRADWLTPKRLGDWLSKQGYSGKVDPAVLYQRLLNAPRGATGEHATSQAHITASYVALLRTLLEQIKTLAAQIDRQLDAHADAHIFTSLPRAGRVRAARLLAEIGDCRAKFPTPESLTCLAGVAPSTRQSGKLRAVGFRWACDKQLRDAVIDFAADTRLANPWAADLYNRARARGHDHAHTVRILARAWLHIIWHCWQDNVPYNPEKHRVLQRLNTPQNRAG

SEQ ID NO: 271123 - protein, 374 aa, unidentified
MNAPQPQQITFFAGFDWAKDHHDVVVVDAQGSLVDEFRIDHSIDGWKLWRQKSANSPGLAVATETSSGPAVEQLLESGVTVYPVNPMNAKRYRERKCSSGNKTDRHDAWALADALRLDGHGWRALAPQDPLISELRLLCRDEVALIEERTALINQLQQTLHEYYPTALEAFDDWTSPAAWAFVETFPSAADLVKAGKRKWEKFLHTYRLGRPQTYTKRMEAFGRAGQWTAAAATVAAKSLLAVARCKQLRVLESQLDAYRKRIEALFASHPDSGMFGSLPGAGPKITPRLLAEIGSDRGQFEDAQGLQCMAGTAPVSYQSGQIHKVRFRRSYNKHLRHAMHLLADHSWSQCVWAATYYAALRKRGKTHAQALRC

SEQ ID NO: 271124 - protein, 340 aa, unidentified
MDKRYIGIDLHRNRFTCCIRLENERTYVTEWELADLDRFVKKLRPDDEVAVEITGNTRLFHDAVAAHVARIVVVNTSQFRVIRQSVKKTDPNDARTLALYLSKNMLPEVRMKDKERGQLASLTQTRDTLVKLRTALKNKINNMLSARGLNLAKEALGSEKKLNEVLELPFDEIVRIELRVIVEQIRSLNKSIADLEKTIGEEGSKLEGHQGLSSIKGIGKITGAILLSVIGDVNDFADEGRLASYFGIVPRVSNSNETEHSGRIHKRGTKLGRTALVQSALIAANYSPYLKRFYEQVKARRGAGKAIIALARKFLGIIYRTLKNKWVFEDFPNFVLAEAS

SEQ ID NO: 271125 - protein, 352 aa, unidentified
MEKYIGIDVHSESCTIAVMNSAGRQLRQQVVDTQAKVLIEFLKGLAGDRYVCIEEGQLAEWLVETLEPYAKEIAVVQPKAHQGHKSDAADAWALAEQLRVRAKGVYVFKPTRQYRPLREAVRTHGIAVKDMTRAKNRFRSLLRARGVANFDSSIYETEQRSAWIRKLPAAYRRRAEWLGKQIDSRAEAHKIAESWLKEEAEKCPEVERLQTLPGFGPIRAAQVVALVVTPHRFRTTRQFWNYCGLAIVTRASSEWKRGSSRDGWQHVRGNVQTRGLNRNCCSQLKAVFKGAATTVIGKPNPFREHFEQLVANGTKAHLARLTIARRIAAATLAIWKKKEDYDPTKHQSSKPA

SEQ ID NO: 271126 - protein, 320 aa, unidentified
MSAPSVVAGIDVAKAHVDVAVLGAELEAQRFDNEVEAHSTLASALKGLGAALVVMEATGGYETELACALQAAGLAVAVINPRRARDFAKSMGRLAKTDSVDAHMLAELAAVLARREDLERFLRPLDDPQQQWLAALVTRRRQLLSMLLAERQRLQITPVKLHPSLEAMIAAIKAQLDDVEAQMVGHVREHFGELDRLLQSTRGIGPVASATLIAELPELGRLNRREIAALVGVAPMANDSGTTRGRRRIQGGRFDIRRVLYMATLTAIRHNPAIKAFYERLLAAGKRPKVALVACMRKLLTILNAMVRSNTPWDSSLHPT

SEQ ID NO: 271127 - protein, 402 aa, unidentified
MANDFVIGMDVGKYFHHACVLDPQGNQVLSKRINQHEGSLRKLFGTYLADNTSVLVVVDQPNNIGRLTVAVAQAMGAEVRYLPGHAMRQLSRIHVGNSKTDVRDAYVIAHAGLNLPDALRSVDRVEEVFLQLKVLNGIDEDLAQAYTRLINQMRSALVGTFPAFKQFLRGQMIHRKWILHLLANYGGPTKIRRVGKARLTAFARNHRARNPEPVIDAMLAAIHGQTVTIAGAEYAELGVAKSAKDALAKLEHRKEIEAHVLKLIQDIPQTEILLSMPGIGPRSATQILMTVGNMSDFPDAAHLASYAGLSPRTNQSGTSIMLNSPNRAGNKKLKNALWQSSFASIRFHERSRQFYERKRTEGKRHNAAIVALARRCLNVLFAMMRSRELYRDISTVQETAAA

SEQ ID NO: 271128 - protein, 423 aa, unidentified
MNNLNDGQYTAFIGIDWADTKHDICLQAANSDQCEFDCIPHQVDHIEQWALSLRKRFGGPIAIALELSKGPIVYALQKYDFLVLFPINPSTLAKYREAFTPSRAKDDPTDAELALDLLLRHPDRFQPLEPQSVELRALATLVEQRRDLVNDRIRITNRLRSALKQYYPQILEWFDRINTPLFCDFITRWPTLEQVKRARKSTLERFFHQHNMRFSHVLDTRHQAIKAATPLTRDAAVVTPYRLHALVLAEQLRVTLQAIRRFDDEIAELAPQHPDYELFSTLPGAGPSLAPRLLVAFGEQRERFTNAAELQQYSGVAPVTERSGRKHWVHWRWQCPTFLRQTFVEWAAQTVNKSFWAGAYYRQQKAKGASHQAAVRALAFKWIRILYRCWQARIPYDELIYLESLRQRGSPLLDQLGAVGETT

SEQ ID NO: 271129 - protein, 401 aa, unidentified
MNAVGIDVSKGKSMVCVMRPFGEVVLEPFEVLHTAQSLNDLAGKLKALDGETRVVMEATGNYHKPVAFVLHDAGLFVSVVNPVLIHDYDNNSLRRVKTDRKDAVKIANYTLDKWTRLRQYLPEDDTRLALKNCYRQYQQAVAVRTMLKNNLISSLDLTFPDANKLFSSPAKSNGCEKWVDFIGDFWHSECVSSLSSDAFAKKYLKWCQKHGYNCTRSKSDTISACAVTAASLPKSPTSKLLIQQQVAQLKAVSQSVAAFQQEMLRLSQQLPEFDTVMEMYGVGPSLGPQLMAEIGDVRRFSSKKSLIAFAGIEPQPNDSGKIVGNDSGISKVGSAVLRRTLFLIMTVILKTQPQDEPVFQFMNKKRSEGKPYKVYMMASANKFLRIYYARVKAVMDSKHSK

SEQ ID NO: 271130 - protein, 342 aa, unidentified
MDYFAGLDVSVKETSVCIVDDMGKIVRELKVASEPKSLLAALKNPAYRFKRIGLEAGPLSQWLFSALAEAELAVVCVETRHMQAVLKAQINKTDRNDARGIAQMMRVGLYRPVHVKTLRSQKLRMLLTHRKLLQSKAIAIENDLRGTLRNFGLKVGMVGTVKFEARIKELVENLPDLAELVEPLLIVRRVLREQIVILHRRLLAIVRGDEVCQRLMTTPGVGPVVALTYRATVDVPARFRKSKAVGAVFGLTCSKYQSGEIDRSGRISRCGDEMMRVMLYEAAQSMLRSKKWSWLKAWAMQIARRRGMKKAIVALARRLAVIMHRIWVDGTEFRWTRQAAAA

SEQ ID NO: 271131 - protein, 332 aa, unidentified
MFQLHAIDQQGKTALRKQLKREQVVPFFANLEPCLVGMEACGGAHYWARKLQALGHTVKLMAPQFVKPYVKSNKNDVADAEAICEAVTRPNMRFVPIKTVEQQAILAVHRARQGFVKARTAQANSIRGLLGEFGVVLPQGIRHIVERLPDILEDHENALPGSLRQLMQRLVEHFKELDRQVVELEREIQQWHRSNEDSCRLAEIPGVGPLTATALVASVGDAKNFSNGRQMAAWLGLVPRQHSSGGKPTLLGISKRGDGYLRTLLIHGSRSMVRVVESKTDPSADWLKGLLARRHTNVAVVAQANKTARIAWALLAHGGKFRPDYTPDVTVA

SEQ ID NO: 271132 - protein, 391 aa, unidentified
MICVGIDVSKDKHDCFILSSEGVVLADVFTIPNNLEGFNTLLDKIRACSAPQDSIKVGLEATGHYSYNILGFLLDNGLATYVLNPLRTNLYRKSLSLRKTKTDRVDARTIAAMLLSDTGLKPYTDTAYHNEELKSLTRYRFDKVKERAKLKTSISRLVCILFPELEKLVPTLHMASVYALLSEFPGAKQVAAAHLTRLKTLLADASNGRYGRTMAVEIRAAARCSVGSKMPAKSLELQHTIRLIRELDAEIEEIETAIQAIVDELHSPITTIPGIGYRMGAMILAEVGDFSRFDSADKLLAYAGMSPSTYQSGQLKNCYPHMEKRGSRYLRYALYNAAKYVCHWDPAFAAYLAKKRAEGKHYNVALSHAAKKLVRLIFALEISRQPYCPAA

SEQ ID NO: 271133 - protein, 422 aa, unidentified
MLEEDLQDGEIIARVAALDIGKAELVCCVRVPHEEKPGRRLQEVATYSTMTGSLLAMSDHLRCCGVSRVVMEASSDYWKPVFYLLEAQGHQVWLVNAKDVKHLPGRPKTDKLDAVWLCKVAERQRIRPSFVPPPEIRRLRDVTRYRVDLVGVRTAEKQRVEKLLEDAQIKLSVVASDIFGVSGREMMAALVAGQTNPKMLARLARGRLCAKLDALEEAFTGHFTDHHRFLLGKMLARIDALDADIAELDATIGELIAPFALAVKKLDEIPGVGTTAARVITAEVGVDMSRFPTAAHLASWARFAPGIKESAGQNKGKGTTGHGNRYLARVLGEAAVAAGKTDTFLGERYRRLARRRGKKRAIVALGRSILVIVWHLLSDPEARFIDLGPDFYDNRIGPERKKRNHIRQLEALGYKVTLEPTA

SEQ ID NO: 271134 - protein, 338 aa, unidentified
MVLIGIDPHKATHTAVAVDKEETALGELTVKADRHQVECLLKWAIDFPERRWAIESANGLGFLLAQQLVAAGEDVVDVPPTLAARVRVLGSGKTQKNDPNDALSTAIAALRAKRLRTVVAENHGGVLRLLADHHHDLGSLRTQAVCRLHAVVRCLIPGGTGLRLSAHRAAVVLRSVRPTNAVEAERKRMAQGFVADVRRLDAEIAASKARIVTAVAASGTSVTELYGVGPVVAAFLIGHSGDMARFANRDHYASYNATAPIEASSGPRVRHRLNPRGNRRLNHAIHVIAICQIRHPGEGRKYFDRKVAEGKTTKEALRALKRQISNAVYRQLVIDSSS

SEQ ID NO: 271135 - protein, 355 aa, unidentified
MDSKKYIGMDVHKESISIAVMNGAGKIVMECVIETKASMILQFIDGLRRDLQVTFEEGTSAAWLYDLLKPHVTKLLVCDPRKNASMREGNQSDKIDARRLAELLRLNHLSPVYHGEHGLRSLKELVRSYLTITKDLVRVMTRVKAIYRSWAIPCTGKQVYAPRHRVEWLGKIGEPGVRRRAEFYYQQLDALRSVRQEVRRELLAEGKKHKAWKLLCQIPSIGPIRAAVLLGILQTPHRFRTKRQLWTYSGFGIETQSSADHRSVDGQLERVKKQSSIRGLNRNCNHDLKNLFKGAAIVASSKPGPFQEFYTALLTKGLRPEMARLTLARKIATIVLMVWKRGACFDAQHLKPQTA

SEQ ID NO: 271136 - protein, 414 aa, unidentified
MSLNDTTPTPRGATAGIDWASDNHAVCVLDPDGAVIERQTVAHTAAGLRRLIDLLSRHRVQAVGIERGDGPVIDALLATDLTIYVIPPSQVKNLRGRYGSAGNKDDRFDAYVLADTIRTDRHRLTPLVLDSGATTALRRLCRARRDLVAHRVAVANQLRAHLATAMPAAVDLFADLDSPISLRFLARFSTQDDLDWLSVKRISAWLASASYSGHTSAQTLYGRISAAPRGATGTHGQALAGITRAYLATLTTITAQIHALKQQITQAFDAHPDKPVFAALPKAGTVRAARLLAEIGDARGRFPTPDSLACLAGAAPSTRQSGKVKIVAFRWAVDKQLRDAVCDFAGDSRHANAWAADLYNRARTRGHDHPHAVRILARAWLDVIWKCWTTNTAYDPDQHRALQRLTKQDQPMVA

SEQ ID NO: 271137 - protein, 349 aa, unidentified
MNESKTIAVDLAKDVFELAAADAKWRIVERQRLTRAQLSRYFQNRTPVEVVMESCGTAHYWARTFEGMGHRVRLLPPQYVRPYRRRNKTDRSDAAAILEAARSPEIKPVAVKNVEQQTIQGLHRVRSQWMTTRTARINVIRGLLRELGYPLPVGSHIVRRKAPEVLEQLPAPLRAAIDALLDEVRSLERRIQGIEDELEQFARRNAEIEKLREVPGIGLLTATALWAAAGSAAVFKSGRHLASWLGLTPREYSSGEQRYLGRISKRGDVYIRMLITHGARSVLARAKQLMRANRPLTRVQRWAVELEQRSGHNKATCALANKLARIAWALWRHNSSYDGAHVSQRAVTL

SEQ ID NO: 271138 - protein, 430 aa, unidentified
MKSNTQNAKIEAITEKTLVLGIDVGSETHYARAFDYRGIEYSKKPFKFSNTEAGFATFKEWVLDLKERHEKDKVVPGMEPTGHYWFNLGKFLQDNEMKPVLVNPHHVKKSKELDDNNPTKNDRKDPKVIAGLVREGRYMIPYLPEGVYADLRTASNIRFQLQAELTRIQNRISRWFNIYFPEYKTVYGKPDAKSGMLILKAAPLPEDILTLGIDGVNQIWRDAKLRAVGKARAKTLIEAAEHSVGSKEGAMSARMEIRMLLEDYESRNTRLQEVMVLIEELVRKIPMAEKLLEIKGVGIRTVSGFLAEVGDISRFNNPKELQKLAGLALVENSSGKHKGETTISRRGRKRLRYLLFEVAMSLVSKNQEFRELHNYYTTRRLNPLKKVQSLMAIAAKLIRVFYAMLTKGVDYDPKKMVSDIKRPAVYLQAA

SEQ ID NO: 271139 - protein, 345 aa, unidentified
MKTFFIGIDVSKEKLDATLIHYESESDSEQQLAYTTVENNPKGFRSLVSWSKKNAGRGVKTDTMLFCCETTGGYDRALCDWLYGNGLNIWRESALQIKRSMGLRKGKDDKADSEMIAYYALRFRSQATLYKPLDGNMRSLRDLFLYRQSLVAERQAKMVSAKEKQHISSKSKVDNFIYRDAQKTIDLLTKSIKECERRMLEIIKEDEEMYRNYLHLISCKGVGLVTSVMLIVYTDNFKGWNAKKMASYCGIAPFYESSGSSVFHKANTGGYSNRRLKGILTQAARSAITHNPTLRQYYLRMKSQGKPYGVILNNVNNKLVHILFSLVLHDCDFELDHEAKRALRA

SEQ ID NO: 271140 - protein, 417 aa, unidentified
MKAHKMKLYVGIDVHSREHKVALIPVALLECHGAEWKKAASISIRNNIDDFERLDTAIKSHISTADEVAVAVDQTGGHYSEPIVYFLQNRGYKVYHLETKAIKAARERLLDEESKSDSIDAASSAYLLYLRDVHGISFRISAMTPELGSKAAALHSLVLQRWQFAKLINQATNRLRQFVLAVFPEGEARYFSQLLKVIPYYPTPKDILASNGLVKVEGLCQKHRESILELAASTVGVPSAIYQWLIRDLNAQRIDSLAKRDALTCIIRKEVAAHPYGGILLSFPYLGEIAGATIIGIIKDIDRWPNKKKFKKAMGVYSRLTQSGGDSGRTRQGREGSRHGRRVLFQVCFGCITRNAPENDFKDYYHRQVVRGKPRIKALVSTMGKLAEIVYHCLKVGEPYQYQGKYRVHQMSAEKKL

SEQ ID NO: 271141 - protein, 358 aa, unidentified
MQIIGVDLHARQQTITMLDTETGELVEKTLEHEGEKVREFYASLPGPVLVGIEATGSMQWFLKLMEELGIDCRVGHPAKIRAAEPRKQKHDRRDAALLLKLLVENRFPSIWMPSTEQRDLRTLLKHRHQWVRMRTRVQHTLQSMALANGLRRGTSLWSQAGQHALKALPLAPYAGQRRAALLTSYPRLQEQIDDLDRQVSEQAWQRPQARRLMTHPGVGSVTALATEVFLGDPARFADGRAVASYIGMIPSEHSSGRRQRLGALSKQGNALVRYLWCGAAMHAVRHDPELKRFYRRKLVQKGLGKARAAVARKLGIRLWIMLRDRIDYQEFCRRGQLRQRSGDARAGMPAFNSGPALQ

SEQ ID NO: 271142 - protein, 478 aa, unidentified
MAAGKLNRKQRKELTRQLRSEDPGLDVVHPRAAGIDVGNSAHYVAVRPDQDAEPVRRFECFTADLHRLADWLQACGVRTVAMQSTGVYWIPLYEILEEHGFEVYLVNARHTRNLPGRKSDVQESQWLLKLHTYGLLNNSFRPTAEIRVARTYWRQRAEHVHGASTCIQRMQKVLTQMNVQLANVISDLSGLTGQTIVRAILGGERDPRKLAELSHPQIRASRPEIAKSLEGNWRPELLFVLQQEVEMYDTYQRRIGECDRELEAHLKTFADKVRSKQAEAESASDERKGSKGQKTKPAQNSKRSQGNAPRFDLRSELYRISGVDLTRIDGIHSLVAQTVISEVGLDMSRWKTEAHFASWLGLSPDNRISGDKVLSKGTRHVVNRAATALRMAATTLLRSQSYLGAQYRRLRTKLGAPKAITAMAHKLGRLVYRMLKYGQEYVDKGMQHYEDQYRCQQVELLKKKAAKLGLQIVETQTV

SEQ ID NO: 271143 - protein, 355 aa, unidentified
MKYYTSITQFNCGIDLHARQMYVCLMDRDGHKLVHTNIKNNDFDYFLQRVAPYRHDLTVCAECMFGWYWLADACQSAGLTFVLAHALYLKAIHGGKNKNDRIDSEKIAHLLRTNLIPPAYVYPADKRPLRALLRQRILYIWNRSELLSRIQSHQLAYNRPTFRQTPYNREPWEKQLLAHEAHPLRQFALQNDLALIRHYDTQLALLEKELLQLTRQTANRDFTLLQTAPGIGEYLGLTILHEIGDIARFPTVKNFLSYCRLVKGTVASAGQIKGLRGAKLGNPYLRWAFGEAAVIAKRDPAVIGPLAQRLEARMHGNKFKANTVLAIKLARAVYYMLRSHTVFDADRLVAALARN

SEQ ID NO: 271144 - protein, 441 aa, unidentified
MKKHTRTPLELKDGDNNGHVRVVKSTSKGGPAIGLDVGDRYTHVSSRDETGEVVSETRIRTTLDGLRAYFAPLMRCRVALEVGTHSRWMSSELEHMGFEVYVANARKLRAIYQSDTKTDKCDANFLSEIVSLKPDLLCPIKHRGEQAQTDLALIRARAALVRSRTLLINHVRTTIKAVGARLATSSAGAFHKQAGAIPDSRQEVLDPLMNQIGELTANIRGYNKHIRERVAAYPEAALVMQVSGVGPVVALAFICTIEDPHRFRRVRTVGSYLGLRPRIDRSGRTNKELGITKAGDSDLRRLLVNSAQYIIGPLSPDCDLKRWGLKLVDRGGTAPKKKAAIAVARKLAVVMLSLWKSNSTYDPLRESKHRDAQAHQQATAPVAAATGPIRRTTVVLRPVTLKSSAIKAASAKSNTRRKGEPQLPASPLIRERPHVVRSVTS

SEQ ID NO: 271145 - protein, 341 aa, unidentified
MSIVGAFDVHRRQLTFEYLDTVTGELKRGRVAPADRAHLRQWLARFAGRGDVHFALEGCTGWRYVVEELLAAGIEPHLAEPADTAALRGRKRHAKTDKTDARHLRVHLLAGDLPECWIPPGHVLEARAVVRLYKDLLDERGAWHQRIAATLFHQGVPAIGTMARPEGRAAVAGVALSAAGRQAVETGLRQVDRLTAELEPLRRQLDMISRRQPGCRALRATQFGVGAVTSVAIWAELGDVRRFPSSSDVVRHTGLDITVHSSDGKGPPGRLSRQGPQLLRWALYESAKCAARPAAPDHGYYAAARDRRTAGLATLSVARKLARRCYHTLRELGEEALAPAA

SEQ ID NO: 271146 - protein, 425 aa, unidentified
MSFKIFKFNCCGLDVHKTWIYACIGITDSNNRTEYKQARFSSFTKGLNELCDWLAKYNCKDVCMESTGKYWIPVFNILEQHSFWVTLSHPKYTKPMKGNKTDRKDAKWICDLYMCGMVKPSFIPPADIRELRDLVRYRFKLTCMITGEKNRAQNCLTVSNLKLDDVFSDVFGKSSRSITEHILQHPGEKFDIAPFVDSRCKTPITEIQAAVDGAISKEQVVKLRQCLDHIDELNKHISEVEQEILRLSDKYEAALNLIRTVPGFNKNPLTAIQVLSEIGGDMSVFPTAKHLVSWAGCCPRNDQSNQKIKSTRISRAGSYFKPVLVQVANALIKSKKHSEFTSRYKRIKARRGHKKAIIAICRMILTAIWHILSDLKPYTPEGFLESRPVKEGKVLSTSQALNLLKQRLLCFKLIPLLSAKDTNAS

SEQ ID NO: 271147 - protein, 423 aa, unidentified
MPYRIAGIDVHKKRLAVVVADVEVDEEYQFEQRWYASNPEQMHKLAEWLIEQQVEEVVMESTAQYWKPLWSSLERYWKPSCQNREGAGKVSGALHLAQALSNRGRRGRKKDFRDAERLVKRLISQELVLSFVPDGEQRLWRTLTRAKYQRRRDKVRLQNQLEALLEEAQIKLSSLVSDLLGLSARRMLTALADGETDPAALAALAHQRLRATPEQLRDALGACAGLNPVYRRLVKMALADLQLIEQQIGQLDQEIASLLREHQDAVQRLAEVPGLGVDSAQQIIAEVGAEAATFPSAKNLVSWVGACPGEDETAGVNRSKRSPKGNRQMRRLLNQAANAAVKQKGSIFEIVYRRLVLRLGHNKTIGAIANRLCQLIWIILHKGVRYEERGPAVSQKSKRLRTSRMIRTLRTLGYRVEPPFVPA

SEQ ID NO: 271148 - protein, 342 aa, unidentified
MDTIGLDLHKRESQLCVLTEEGEIIERRIVTSRERFAAVLGNWPPARILLEASTESEWVARHLESLGHEVVVADPNFAPMYATRSRRVKTDRRDARTLAEALRLGAYRAIHRASAAQRHVRAQLAVRDALIRTRTRYVNVVRALTRRDGLRLPSGGPEHLEAKLTALPLPTLLAAEVAPLRVLLGPLNGAIVAADARLAAVVAGDPIVTQLCTAPGIGPVTAVAFVATLDVVTRFKSAHQVEAYLGLTPQESSSGERQQRGRISKTGNVRMRYLLVEAAWRVLRTKDPAAAALRAWAEGIAQRRGRSIAAVALARRLAGVLYAMWRDGTDYRAPQPAAVAVA

SEQ ID NO: 271149 - protein, 407 aa, unidentified
MATLNHNNIIPFGIDPSRANLSIVSILEKPTFFNIKNDQCGHRGFLNKVAEIAQETGKLPVFAVEGNSPFAIGFEFQVYRQGYPVYEITPYELNRMRDILCGEDQNDFRDAKTAALIITQVPQLLRPAEIDLKQFALKRMVKTRLRLVKDETRDINLLHSQLTQIWGPNYKEFFSRLSTPQALVFFANFPTPERLNVGEKEVLNCLNIYGLSYYRSNWGKKKVCQILEKVKGMNWYGDEYLRELSLEVGLIVGNALVRLRQIKEIEERLLEAAKGWKEEEIKLVRTIPGFDWILTCSVVVLIGNLARFESVSRFIAYCGLVLCAKESGKKKGKKNRKRRNKLLGYVFYQAALSSLRSSKISREYYQKKLNEGKKRKQALRALAKKLAEITYAVLRNKEPYDEQKHLN

SEQ ID NO: 271150 - protein, 414 aa, unidentified
MQKILGKSCGLDVHKETIEACVLISSNRDEPEVIRESFTTMRGDLLRLRKWLTGLGCMNVAMESTGVYWRPVYEVLEDVKGINLCLANARHMKNLPGRKTDVKDAEWIAQLYMCGLLDKSYVPEKGIRDLREITRFYSKIVQERVRQLNRIEKFLQTHGFKLSSVLSSIDGVSSRRILEKLCEEGEVSASDLRSCLARGVHKTADEIAYAIVGKLSPISRALLRLLLDTLRSHDASLEDILREMRVASAPYGSMIELLTTIPGISSLSATYIIAEIGVDLSTFANSSKLVSWAGLSPSNEESAGVIKSKKITKGNNYVKTVLCQCAWSAVYARNTRSSNWYWRNVKRLGQKKAIIAVSRKLLCYIYCMLNTGEVYDRSRDVADTERYHAFKLESAKNIVSASEKNTIDLPMTES

SEQ ID NO: 271151 - protein, 328 aa, unidentified
MFYLGMDVAKAKLDCCLLLDEVSGKRKTKVMSNTKSGIVDLLAWVAKQNISPEALHVVMEGTGVYHEQAALALADAGVTVSIVNPAQVKDFGRGLAVRTKTDGVDSFVLARYGALLKPKAWVPPAPEARILQALLARRVAIAQDLQRERNRQEKADATDTPERIQKSIADSIEFLVKQLAELQQDIDQHIDRHPSLKNDLALLQSIPAVGPQVGGNMLSVMHSHDFNSAEQLAAYLGLVPVERQSGSSVLGRARLSKAGPARIRAVLYMAAIVATRCNPHVKAVYERLLARGKSKMSALGAAMRKLVHLCFGVLKTQQPYEHDYAKKG

SEQ ID NO: 271152 - protein, 341 aa, unidentified
MKENQEIWCGIDVSKNDMTAALDIDRDLPVRKLPLKTFKRTADGLRDMMDWCASLNVPLDMLRVFMESTGVYSRELLQWFQNHFPRIPVSVGNPRHIKHFIESEHLGNKTDALDALAIARMGTIQKPKATPLPPAEYLQLQELVRSRDDLVTKMRSLEVSQKGMPDAASVSSRCFLHVVKVMAAELRKMDMAILDLTERMPEIKTAVRRMCTMPGIGLVSAVTVLSELGPFSAEYSRDAFSARTGLQPVKRQSGTSVNSSRISRNGSALLRKVLYLCSIHAVRKIPSLGSMYSRLVGRGKKPLSARCACMRKMLLILRSMVLNQRDFEENFICSQKKAKAV

SEQ ID NO: 271153 - protein, 358 aa, unidentified
MIAMKYYTSTTEFNCGIDLHARQMYVCLMDRQGKKRVHTNIRNNDFAYFLKLIQPYRHSLTVCAECMFGWYWLSDACQQAGLTFVLAHALYLKAIHGGKNKNDRIDSEKLAHLLRSNLIPPAYVYPAALRPLRALWRQRLCYVWRRAELLARIQSHQLAYNRPTLRQTRPDRDPWEKSLLAQEPDPLRQLALQNDLAMIRHYDAQIRALEERVQKLTKATAGPEYALLQTTPGIGENLGATLLYEIGDIQRFPTVKDFLSYCRLVKGTVASAGRIKGLRGARLGNPYLRWAFGEAAVIAKRDHATIGPLAQRLEAKMNGNKFKANTVVAIKLARAVYFMLKNQTVFDPQRLIRALARN

SEQ ID NO: 271154 - protein, 382 aa, unidentified
MKKNISTTKVMKPAISVDVNAAQFQPGEHGAALVTPGYQAVVGLDVGDRRSHYCVLDLDGGVVAEGEVKTTETSLRVVFEAKGRMRIGLEAGTHSPWISRLLHALGHEVVVANPRKLRLIAESDAKHDRADARLLARLAHVGPALLSPIQTRSAQTQIDLTLVRAREVAVQTRTKIVNAVRGMVKSTGHRLPASPTLTFARKATEAFPEALQSALLPLIRLVETLTADIASYDRLVVERARAYPETQAIQTIHGVGALTAVAFVLVLNNDRAGFKRSRDVGCYLGLRPKQRDSGMRSPEWGITKTGDPLLRRLATQSAQYILGPFGQDSALRRWGLSLASRGAKNAKKRAVVAVARKLVVLMHRLWITQEAYDPVRGIRVAA

SEQ ID NO: 271155 - protein, 344 aa, unidentified
MQITTIGLDLAKNVFQIHGVDATGQVLVRKSLRRSQMLPFFAKLAPCLVGIEACGTSHYWARELIKLGHEVRLMPPAYVKPYVKRGKTDAADAEAVCEAVTRPTMRFVPVKSPEQQAALSMHRTRDLLVKQRTQLINMIRGLLAEFGVDIPKGLERALLMARQIIDGKAPEVPIEAARIVTTLSQQALDIHVRLREIDRDLAVCLRGNDVARRLMTIPGIGPVGATALAASVTDPHQFRSGRQFAAWLGLTPLQKSSGGKERLGRISKMGDKYLRKLLIVGMTSLVRRAKYNPGKIDPRLADLLARKPTRVATVAMANKTARVIWAVMARGETYRPGHQPALAA

SEQ ID NO: 271156 - protein, 460 aa, unidentified
MEILYTNCAGLDIHKKIVRVCSLTQTSDGQFHKEFRTYFTTTEELLKLSDWLKEQECTHVAFEATGVYWKPVFNLLEGNFELLVVNAQHIKAVPGRKTDTKDAEWIADLLQHGLLKASFIPSSSQRELRDLTRYRVKLTQEKAREVNRVQKTLEDTNLKLGDVVSDIMGKASRMILHAIAEGETDPGRLAALAVGRVHATQAQLEAALTGTVTNHHRFLLSEHLTQIRHLEQAIERVTAEITRRLTPPPPTEEGTSSQNQQEMAPSSCSHQHQETPSEMVTDPAKPQEPASSTQAALGFSEAVVLLCSIPGIGERTAIGILAEIGTNMRQFPTAAHLASWAAVCPGNNESAGKRKSGKTRKGNPWLRCLLVQAAHSASHQKHCYLAEQYRRIAKRRGSKRAAVAVAHSILVIIYHLLRNHTTYQEKGETFFEEQERQGTEKRLVRQLSRLGYRVELQPVA

SEQ ID NO: 271157 - protein, 355 aa, unidentified
MKRGSSAVPKLTTGLDVGDRWTALCAVDETGAAIERGRIATTPAGVERRFRQGPVQRIVLEAGKQSPWMSRLLASWGHEVIVANPRRVRLIAAAANKDDPRDAETLARLGRLDPQLLRPITHRSAEAQQDLAVVRARDALVRSRTLLINHVRGVVKSLGSRVPRCSAHAFARQADRVVPDALRPALAPMIAIIEQLTGEIRRQTRAIEALVQTRYPEALPLQQVKGVGPITALAYVLVLEDPTRFATARSVGPYLGLVPRRRQSSRADPQLRITKTGDGLLRRLLVQSAHYILGPFGPDCDLRRYGERISARGGKNAKKRAVVAVARKLSAVLYHLWVTGDVYEPVHRAASQVAA

SEQ ID NO: 271158 - protein, 328 aa, unidentified
MFYLGMDVAKAKLDCCLLLDDTSGKRKAKVISNNKSGIADLLTWIGKQQIAPNALHVVMEGTGVYHEQAALALADAGVTVSIVNPAQVKDFGRGLAIRTKTDGVDSFVLARYGALLKPAAWIPPAPEARILQALIARRDAIAQDLQRERNRREKADVTDTPARIQQSISDSIEFMSGQLAQLQHDIDQHIDHHPGLKEDLSLLQSIPAVGPQVGNNLLAVMHSHNFGSAEQLAAYLGLVPVERQSGSSVLGRARLSKAGPARIRAVLYMAAIVAKRCNPHVKTVYERLLARGKSKMSALGAAMRKLVHLCYGVLKTRQPYRHDYVKNS

SEQ ID NO: 271159 - protein, 342 aa, unidentified
MDEYDGRQFVGIDLHRRRSVIVRQSESGEQLSAVRIVNDPVALGLQLEQAGSDPEVVLEATYGWYWAVDVLQACGAHVHLAHPLGVKGFRYRRVKNDVRDAADLADLLRMGRLPEAWIAPPQTRELRELVRYRAKLVAIRSGLKAQIHAVLAKAGVLIAASDLFGVTGRQRLAKVPLGAAYAQRIGSLLQLIDIFDSHEARFAAMIAEQLDTHTGYHAIQQVPGIGPVLAAVFVAEIGDVDRFTDPAHLCSWAGLTPTHRESDTVVHRGHITKQGSKAVRWAAIEAVQRHPTTAKIAADKHRIEARRGKNIAKVAAARKLLTLVYYGLRDGHIRALDRTRPA

SEQ ID NO: 271160 - protein, 341 aa, unidentified
MVGVDLAKEVIQVCIYTNKKVHSNVEMTHHEFLTWLFKTKPVIIVFEACGTSNYWKQKAIEAGHKSYLISAKLVATIRQNQKTDKNDALAIVQAAQLPDVNFIKGKNVEQQQLQSIMRLRELAIKQKTALNNQIKGLLLEFNVRVSTKSGGLKAAVQSFIEDAENELSFEFRESLNTAYGQYVLLVESIKTYESCLEKVVAQHLDCKKLLRLEGVGTINAVNLYIALGCAELGVFSKGKNASACIGLTPMQYSSGGKIKLGSIGKYVKNSLLRSQLITGAMAVVSQVTKRTAVTKKDAWIQALVARKGKKCTAVALANKTVRTAFAMLTQGTEYKAELLPA

SEQ ID NO: 271161 - protein, 337 aa, unidentified
MVYGAIDLHLRYSHIRILDADGRVLRERQVLTAPERLVAAFADVGAVRVLLESGTESEWVAQALESAGYTVVVADPNFAPMYGDMRRRVKTDRRDVAALAEANRRGWYRPAHRTSARQRARRQVLRARRHLVQLRTGTISLIRALLRQDGYRVGSGDSDTFPTRLARLRVPPALQATLAPLVRTLTHLIGEIGQLDRQLVDEARQDPVVRRLQTVPGIGPVVALTFRAFVDDVTRFRSAAHVSAALGLVPREDSSAERRHRGHLTKVGPRELRRLLVQAAWVCWRAKRHRVLRSWADQLAARRGKRIAVVGLARRLSRILYAIWRDETEFTPSRVLA

SEQ ID NO: 271162 - protein, 358 aa, unidentified
MQSKGNTINFNGQNVYVGIDVHSKSWKVTIMLEDLVHKTFSQDPNSEILYKYLKKNFPGANYYSAYEAGFCGFGAHRELIQFGISNKVVNPADVPTTDKDKKQKEDKRDSRKIARSLRNDELKGIYVPGKTMEELRGLVRYRKTQVKEIGRSKNRIKSFLHFNGIEIPIEMDTASKHWSGKFTQWLKTIKMSTPYGDMVLKETLDTAEHQREKLLKCNRVLRDINKNSEYSQKLRLLQSVPGIGLVTSITILTEVEDIMRFKNLDQLCSYVGLMPTTHSSGEKNKVGNITPRSNRFLRSNLVESAWIASRSDPSLAYSFNELCRRMQPHEAIIRIAKKLLNRIRYVMKNETEYVLSVI

SEQ ID NO: 271163 - protein, 391 aa, unidentified
MICVGIDVAKDKHDCFILNSEGVVLADVFTIPNNLEGFHTLLNKLRSCSTPQDSIKVGLEATGHYSCNILGFLLDNGLATYVLNPLRTNLYRKSLSLRKTKTDRVDARTIAAMLLSDAGLKPYTDIAYHNEELKSLTRYRFDKVKERAKLKTSISRLVCILFPELEKLVPTLHMASVYALLSEFPGAKQVAATHLTRLKALLADASKGRYGRDMAVVIRDAARCSIGSRMPAKSLELQHTIRLIRELDAEIEEIEAAIQAIMDELHSPITTVPGIGSRMGAMILAEVGDFSRFDSPDKLLAYAGMSPSTYQSGQLKNCYPHMEKRGSRYLRYALYNAAKYVCHWEPAFAAYLAKKRAEGKHYNVALSHAAKKLVRLIFALEKSGYSYCPVF

SEQ ID NO: 271164 - protein, 402 aa, unidentified
MKASKQYLRFCGIDMAKQKHVACIIDKNGQYLQRPVSIRNDANGFHKILNCLKQTGRTKSTLTGMEATGHYWYSLHDFLTRNGYDVAVLNPIQTALQAKQAIRKCKTDKYDAFHIANLLRTGQHKPAVIPDELAMTCRQITRLRYRIVKQGAMIKQLVNSRLHPAWPEYEGLFSDKFGKTSMKLLHTASTPKELMELDPDDLSELIHKASRGRFGPAQTQKILHCAKNSVGMQRGQYGMSVGIKFLLEQIEALKPVRNKMDAEIAKLTAKIPEYLFTLPGATDLTIVSLYGEISPIEAFEKPSQLVAFAGLDPKVFQSGQYDAPRRRISKRGSPYLRRSLWQMAYRALCTEGDLRDYWRKKHRQNKHHLVIVTAVANKLCHIVWRIMTDRRDYVRKDSNPKS

SEQ ID NO: 271165 - protein, 342 aa, unidentified
MNILKQTVGIDISYKSFDARFGTTNTQQQITLSPSKSFKNSPAGFKLFLRWLKKYILSDNIPLVFVMEATGVYYEHLAHFLFQQGYQVAVILPNKIRNYAKSLESKSKTDPLDAAVITRFGLERQLTLWTPPSETVKALRDLCREYHCLKTNITQIKNQLHALKSSFKPHRESFKRKSQLLKFLERQVSFIKKELRTLVKTEPELAQRLKKIKTAKGLGDITILTVLAETRCFELVSNQKQLASYAGYDIVFNDSGLKKGRTSISKKGNTFIRQALFMPALSACRANPQMKKLYLRLVSKGKNKKLAIIAVARKLLLLIYTLWKTNSPYIPNYKPASPAVFT

SEQ ID NO: 271166 - protein, 370 aa, unidentified
MKKNSKDETRRKALQAKSRKMKLTVGIDLGDEWSQCCCLGECGEVIEEFRVKTTREALRARFGDLKPMVIALEVGTHSRWVSELLQEFGHEAIVANARELRAITGSDRKSDRVDAEKLARYARVDRRILRPIRHRGKEAQADLLVIRGRAILVKTRTQLVNAVRGMVKSFGYRLPGCSAEHFGRLKEKIPAGLQEALNPLMEALEQVQQQIDSYNQQIEKLATEKYPESELLRQPWGVGAITSVSYLLTIEDKNRFEKSRDVGCYLGLRPRRSQSSQRDPELGITKAGDGFLRSLLVECAHRILSEKAPDSALKRFGERLQARGKKNAHKRAVVAVARKLAILLHKLWVTGEVYEPFPGGADPRRAQAAA

SEQ ID NO: 271167 - protein, 393 aa, unidentified
MFFVGIDIAKNSHEAAVIDGSGKIVVKPFKFPNSIGGFEKFLAAVKGVSEDLSQFEFGMEATGHYWLNLYTKLMDFNVVVHVINPVQSDALRGLYIRKTKNDAKDAFIIAELIRFGRYSETTLSDSDLLSLRELTRQRFYLVDCVSDAKRKAISFIDKIFPEYQTLFSDTFGATSVELLQTYTSPDVIAELDTELFTHFLKSVSHGRFGRSKAEEIQSVAKNTFGSFLFADSATLAIRQFIQQIKLLEEQIAEIEDFISEKFASFDCKLDTIVGVGTTLAASFLAEIGDITRFESPDKLAAFAGIDPSVKQSGEFNGTRNKMSKRGSPYLRRTFWLAAISGIRFNPALKSIYDKKCAQGKHHAVAVSAAMHKLCNIVFAMLKTNEPYKIILPE

SEQ ID NO: 271168 - protein, 371 aa, unidentified
MKQYSTFVGMDVHKNFINIAIAQRGRNGEVRNYGKIDGTLEALDKVVRKLVSKGGPLHFVYEAGPCGYEIYRHLTAKGYDCAVVAPSRIPKKSGDRIKNDRRDACMLARLDRAGELTPVYVPFAEDEAIRDLTRAREDAKIDEKKSKQRLLAFLLRSGFRYTGKKTWSQAHMRWLSDIKMPHSSQQIVLQEYIDTITECSLRVHRLTEQIRQLLPQWRMFSVVKALQALRGVSLIVSATTIAEIGDLKRFKNPIELMSYLGLVPSEHSSGEKTRRGSITKSGNGHVCRVLVEAAWAYRLPARVSRVLLKRQEGLSKDVCEISWKAQVRLCSRYRRLWAKGKPKQVIVTAIARELCAFMWAIANEIQASAAT

SEQ ID NO: 271169 - protein, 412 aa, unidentified
MIKREKIELVKGSDIYAGIDVASDIHRVRFIDNLGQEVIKGISFSNDREGFKELEEHMKKFGIDHNIIFGLEPTGDYWKPIGYYLRSKGYKVVLVNPYHIKRTKEIIDNSQQKDDRKDSYLIADLVKQGKYFFPIIPEGIYGEMRELSISWKRTKQQITRLKCYLSNFLAKYFPEYKSIFSDILGKSSFYILSHYPLPEDIKRIGKKRLTKIIKRISKGKIREEKIDRLYERARDTVGIKEGREAAKMFLKEVLKELERLMGRRKKIKEKMKELLKISGYGDYLLSIKGVGVVNACLFLGDIGDPRRYKRASQIEKLAGYNLVEESSGKKKGEKQISKRGRKTLRYVGYLVANVAIAKNKEIRELYRYKVDVLKKNRIKVMVGIAAKMLRIMFAVCKNKEYYNSEKVRANFI

SEQ ID NO: 271170 - protein, 386 aa, unidentified
MSTYDFEVGLDLHKEFSMLALLNQQGQCLRFDKLENNPMLLDKYFSQLKGSVRVTFESTRNWYWLADYLHDRDIDCILSNPFLNRAIAHVHAKNDKYDARTLAQLAQCELIATCYVPDKPVRHLRELISHRTKLVNMRTKLKNRIHLMVDKYNFKAPYDYIFGPHGIKWLDGCDFPEPIKQIVRDLLHTIEILNPQIEEYYYRIKDRVEKHPYHKLLTTVHGIGVLHSASIIARVADIKRFPTVEGFIRYSGLSVNTRASADRLTYGHLNCQADTHLRTTFVEASYLIIKHDPGLRAFYDYLRAQKGHGCAICGVARKLARSVYFMLWNSTPYRVRKVQPQYIQQQTTMLKATRLHPKDTPYRQHKPEAGSFRAVTDPTSNECGSG

SEQ ID NO: 271171 - protein, 352 aa, unidentified
MIQTQARPLSKLWIGIDFHKKTWRVHFRSDEFSGNPFSMEPQPDKLRDKVNKEYSGYSVEVVYECGCFGYWSHRKFESYGWKSIVVNPADIPRMSKDKYEKTDSIDARKLSKYLKAGLLRSVTVPDVKREQLRSLFRRRVQLVKNIRSIKVILKSQLMYFGYKIPEELDNASWSEAFRDWVKRQEWDHPTAKYMMQSNIKQVEYLHYEINDVANQLRKYCRGHYKREYDLLRTIPGIGPLTAICFISEVGKISRFKNFKQLACLVGMMPTTYQSSDTHKTQGLTPRAMRIMRSYLVESSWQAVRIDPVLREYYKSHKGKKPNDIIVKVARKLLSRIYGVLRTGVEYELGLVK

SEQ ID NO: 271172 - protein, 375 aa, unidentified
MSNHSEAFVAFDSSKLRNAVAIADSGRMGEIRFLGEIGNTATTTAKLVRKLAGKYERLTFCYEAGPTGYELYRQIKSLGHECIVVAPSLIPKKPGDRVKTNRRDAVSLAKLLRAGELTAVWVPDRHHEAMRDLTRARDTAVDDLRSKRQQISAFLLRKGLHYCAGKKTWSQAHLNWLMSQRFEYPEHRLVFEEMMMAMRQAQERLERLEQAMRAAVPDWSLAHLVTALMAMRGIDLISAATFLAEIGDLSRFQSPSELMAYLGLVPSEDSTGDHIKRGPITKAGNRRARRTLVECSWSYQHPPRVGKDKQAKVAAAPQAVREIAWKAQSRLNRRYRALVRRGKLKTVAITAVAREFAGFIWAIAREATAARAAVK

SEQ ID NO: 271173 - protein, 337 aa, unidentified
MKYSGIDLHSNNSVVTVTDDKDRVVAEKRLPNDLAKIVGFLLPWRDELVAVVVESTYNWYWLVDGLQEAGFVVKLANTGAIRKYDGLKHSSDKADARQLAHLLRLGILPTGTILPPEHRAIRDLARKRMQLVRSRTSHILAIENIMARQRGAKISSNQIKRLTADAVDQMVLPADVRLAIQSNLAVIVTLNAQIDLLEERLQESMSERPEYALLTSVPGIGRILATIIVLETGPIDRFDAVGNFASYARCVDSQRMSNGKKKGEGNTKNGNKYLAWAFVEAANFALRFCAEAKRFYERKKARTNTVVAIKALAHKLARACFHILKERKPFDVTRCFA

SEQ ID NO: 271174 - protein, 392 aa, unidentified
MRFAGIDIASETHFVAVVDEGSGTVVRPTSFTEDAKGYEKLFGLLGEPSEFLVAMEATGHYWQNLFAALAGAGYSVALLNPLRTRRFAGEDLERTKTDAIDALGIARFAAQKRPVVTRLPDSATQELRELVRFRDRLMQDFGDRVRQLHRLVDLGFPEFTRYVRSLDSELASAILHEYPTAEAFLGLPWKRLAKLCYDGRHKVGEELGKSLVEAAKTSVGRHHGPAYRVQVRCACEDLDLLRRRLREIDSDIERTLKHHEVGTLRTMLDGIGPTTAARPVAELGDIASFPSAAAIAAYVGAIPGLRQSGKRQASRAGLTPHGNARLRAKLWMPTLTAVRKNPWLRPYYEGLLRRGKLPKVALVAAMRKLLIAVYFVAKHRKPFVPVLAKAHA

SEQ ID NO: 271175 - protein, 345 aa, unidentified
MKKNYVFFVGIDISALTFDVVVGYNEKGKKHFRFANNAKGITEFITTIYRLHSNENEVLICCEHTGVYMDKLAYALQSIQIDLWVVHPLLLSNYSIELNRFKSDKADAKKIFLYAMNNCSRAVKYQRLSQDVQTLKDLFMLRKQVLKDKTAWQCRVHATSHKAIPNAFELSLQTHIIALLNSFIKQIDDAIGHLIRSSAYIKELYTILISIPGIGPVIAQHMLLLTDCFTRFPSWKAFACFIGTTAYGKQSGTTLKKKARTNKQAHRKIKADFNQGVLSICFRKPLFMLIYRHMEQKKVPHLQILNNIKNVLIKLAFTLVNKRTKYDEQLFFQNKKSWQNLLALS

SEQ ID NO: 271176 - protein, 342 aa, unidentified
MRIIGCDLHAAQQTIAMLDRATGEIIERTLKHEGTTVREFYANLPPPVVVGIEATGSMRWFLRLMEELGVTCIVGDPGKVRKMETRRQKHDRRDAALLLQLLTEDRFPSIWMPPSEFCELRELLRHRDQWVRMRARVKNALQGLALAHGVRRGAGLWTRSGQATLAALPLAPYTSDRRSALQALNDHLTKQIDELDQRVGEQARERPQARRLMTHPGVGPVTALATEVFVGDPSRFADAKALASYVGLIPSEYSSGDRQRLGTLTKQGNSMLRFLWCEAAIHAVRRDATLGRFYRRKLQQKGLGKARVAVARKLGIRLWILLRDQIDYAEFCRRAPERATAR

SEQ ID NO: 271177 - protein, 331 aa, unidentified
MNGQNFYYFIGIDISKKFFDVAIIDGDRTTSYVFENTKKGTNAFIRLLRNQKISLDNTLVCMEHTGVYGKLIIAKLVEKQAHFCVEMPIQITKSIGLHRGKNDRVDAKRIAQYAAKNHRELELYKPTAEILERMRILLKIRKKLVNTRADINKYPNELELFSPEIGKLARKNLKRINKNLEDEIKRIEVEIKKLTLSDDKLNKTVGLVTSVTGIGQITALHLTIFTNFFTKYDSPKQLACYSGVVPFEYTSGSSVHRKSRIHPMANRTLKKHLHMSALAAINHDPDIRVYYLRKVEEGKNKMLIINNVRNKLVHRVCAVIKRQEPYVKNIA

SEQ ID NO: 271178 - protein, 427 aa, unidentified
MAYRVAAVDVHKKMLAIVVADVAGEGEYQFERRKFGATPDQLHLLAQWLVQQEVEEVVMESTAQYWKPVWGALERYWKPARPKREGATKMSGTLHLCQAKSNRGPRGRKNDFGDGERMIKRLVAQELVLSFVPDAEQRLWRTVTRRKHQLTRDKVRFQNQLESLLEQAHLKLSSFVSDLLGVSARRMLKALAEGETDPAVLAALADCRLRATPEQLRDALGACTELNGVYRRMLKMALAELQLMEEQMEQLDREASTLLQEHQDAVQRVAEVPGFGVDSAVQMIAEVGPEAAAFESEKALASWVGTCPGSEESAGESKSTRSPKGNSTMRRLLNQAAQSAVKVKGSIFDITFRKLLPRLGYKQAIWAIAHRLNRLLWMILHKGVRYEERGPAVSAKSQRTRTARMIKHLQKLGYRIEGGPLPAGARA

SEQ ID NO: 271179 - protein, 343 aa, unidentified
MENYVGLDVSLAKTAICVVDGRGAVIKEGEVRSDPDEIAGFVHTYAPSVRRIGLESGPTSTWLWRELDQKSLPVICIDARHAKAALSMQINKSDRNDAVGIARIMQTGWFRKIQVKSERSHAIRGLLNSRALLVRMLRDVENQIRGLLKNLGGVIGQAKQGVFTRRVRELLEERPDMALIIEPLLAARDDLTRHLYNVDRVTKRLARLDDQARAFMTVPGVGPITALAFLAAVDDPARFKRSRTVGAYLGLTPRRHASGEVDWSGRISKCGDKLARSYLFAAANVLLTRIDKWCKLKAWGMRVAKRSGGKKARVAVARKLAVLMHRMWRDGTTFQWNEEKQAI

SEQ ID NO: 271180 - protein, 354 aa, unidentified
MPQKLNTAIAVIGIDIGKNWFHVVGHDVRGAIVLRQKWSRGQVAARFANMPPCLIGMEACVGAHHLSRRLKALGHDARLMPAKYVRPYSKGQKNDFRDAETITEAVQRPTMKFVATKTADQLDLQALHRVRERLVSQRTGIINQIRAFLLERGIAVRQGQRFLRAELPRILAAPPDVLSPRMVRLIENLAGDWRRLDERIEGLSSEIETIARQDAGCERLMSVPGIGPIISSAMVAAIGTGEAFSKGRDFGAWLGLVPRQMSTGGRTILGRISKRGNRYLRVLFVQAAWVVLIRPKSWQRHGLKSWIEAAKKRLHPNVLAIALANKLARIAWGVLAHGRDFEVRKISEAAAQSA

SEQ ID NO: 271181 - protein, 375 aa, unidentified
MKEKVRFLGLDVHAETIAVAVAEQDGEVRSLGTIANREESIRKLVKKLGPVEQLRACYEAGPTGYVLYWQLTQLGVECAVVAPTLVPVKAGDRVKTDRRDAEKLARNHRSDDLTAVWVPDEGSEALRDLVRAREAAKQDQLRARHRLSKFLLRTGRRPAMGLKAWTGRYLAWVQQIHFSQSAQEATLLDYLHEVQHMDERVQRLEQAIAEAVKLASPQVQEVIRGLQALRGVAHLSAVTIAAELGNISRFESARKLMGYSGAVPSEDSSGKRQRRGNITKTGNAHLRRIAVESAWSYRFRPAIGPRLRQRQEGVPEEIKEIAWKAQIRLHKRYLKLMAAGKDKQKIITAVGRELLGFVWAIGIKAETAGKLQMAA

SEQ ID NO: 271182 - protein, 442 aa, unidentified
MARKPSKQRFTVVHPDCAAIDVGGREHFVAVDPRHENPVQSFTSFTDDLFKMADWLESLGIKVVAMESTGVYWIPIYEILSERGFEVYLVNARATRQITGRKSDVLDCQWIWQLMTHGLLRGAFRPDDLTCCVRSLVRQRASKVKDQAQTLNRMQKAMSQMNIQLANVISDISGVTGMKILRAICAGERDPAQLAELTDRRIKAGKEAVARSLHGNWRREHLHALTQELAAYDFLEQQITDCDDAIKTALEQLPVLQNEPEPSNKPLRSPHRSGAQQTELHQALWKVLGVDLTAIPTIGVDTALVLAGEIGTDLSRFPSSQHFCSWLGLAPPTRISGGHRLAGGGPKIINRAAQALKQAASNARNDKGFIGAPHRARLTRMDTSCAIKATAHQLARLVYNLLTKKQAYVEKGLEEFEARSQDRQVRALLRKARKLGYQLVAA

SEQ ID NO: 271183 - protein, 357 aa, unidentified
MKVTTIGIDLAKDVFGVHGDDGEGRVAFRKRVVRNRLLEFLSQLPPCLVGLEACSSAHYWARKIERLGHRVRLMSPRFVKPYRKSDKNDANDAEAICEAVTRPSMRFVPIKSEAQHEVQALHRVREQLLKSRTALVNQVRGLLAEHGIVAPQRIARARRLLLEILADPQRHGLSGLFRETLQEMAERLRFLDQHMAAYDDRIERVFKQDERCKRLAKIEGVGPLVATAVVAAVGNASEFKNGRELSAWLGLVPRQHSSGNRSQLLGISKRGDRYLRTILIHGARAALRRADRKRDQRSRWAMRIKLARGYNKAAVALANKNARIIWALLTRGENYRPSAISVASPTADRISLTQVQT

SEQ ID NO: 271184 - protein, 369 aa, unidentified
MKHSITFVGLDVHKDSITVALADDGRDGEVRLYGSIGGDPGALDKAIRRFRRANAELRFVYEAGPCGYELYRHLIKQGFHCDVIAPSMTPKKSGNRIKTDRRDALSLARLYRAGELTPVYVPREEDEAMRDLVRGREDAVNATRTARQRLSALLLRHGFRYSGRKAWSIAHLRWLADIKMPHPAQQIALQEYINSIEENSERVDRLTEQILKLTPTWRMAPVVTAFQALRGVAPIVATTMVVEIGDLRRFENPRQLMAYLGLVPSEESSGQSTKRGGITKTGNSHARRMLIEAAQTYGVPAKVSRVIRARQEDLPRVIKEIAWKAQVRLCGRFRKLMAKGKSRNSTVTAIARELSGFMWAIAREVPIPA

SEQ ID NO: 271185 - protein, 411 aa, unidentified
MPGRSRELRTNQGERRIQRLARARLPEGVEGIAKLHALIAEHAPTEWVDLPADQVVVGIETDRGPWVVALQAAGYLVFAINPPSAARYRQRHSTSGAKSDAGDAHVLAEIVRLDRAHHRQIAGDSDLADAVKLLTRAYQNAIWERTRHVLRLRSALNEFFPAAVHAFPDLAAPDALILLGRAPDPARAGHLTRSQVMSALRAAGRHHVQGKAESLRNLLRTSQLRQPATIEAAYATIVSAQVKILTAINEQIAQFQVAVSEHFGRHPAAEIYLSQPGLGPVLAARVLGEFGEDTTRFSNSRARKNYSGQSPITRASGKRTLVMARYATNRRLGNALHQQAFSAISRSPGARAYYDTIRGRGIGHHAALRQLANRLVGVLHGCLNTGTPYDEATAWPHRVGDAESSIITPAV

SEQ ID NO: 271186 - protein, 417 aa, unidentified
MVRAKPYDARPTAAIATDGAAWLRDQAQHQVRHNPHMLTLPPRNVSNGMDAPTFDGINVPEWKCQQPLEPEGASTMQITTIGIDLAKNVFQIHGADQRGKAVLRKQLRREQVAPFFANLPPCLIGIEACSSAHHWARKLQALGHTVRLMAPQFVKPYVKSNKNDVADAEAICEAVGRPTMRFVPIKNVEQQSVLSLHRVRQAFVKARTAQANQIRGLLAEYGLIVPKGIGFIATRVPDLIEDASNELPGLFRQLIDRLLKHLKLLDQQVDEIEVQIKAWHRDDETSQKLQKVPGIGPITASALAATVGNAKNFDNGRQLAAWLGLVPRQNSSGGKQTLLGMSKRGDAYLRTLLIHGARSVLYRASQKNDTESWLIKLTARRNANVAAVALANKTARIVWALLAHDREFRPDYTAAAA

SEQ ID NO: 271187 - protein, 302 aa, unidentified
MEKATIIGVDLAKHVFQVHGAGADGSVAFRKKISRVKLLPFLSSQPRCVVAMEACAGAHGWARDIQAQGHEVRLIAPAYVKPFVKRQKNDMADAEAITEAAGRPTMRFVAVKSAEKQASGMVFKTRDLLVRQRTQTINALRGHLTEHGIIAPQGVFHIGRLAAEVENVNSHLPVIVTELCTLLLRHIATLDEQIASLDRRIRDRAREDETARRLMSIPGVGPVCATALEALAPPPETFARGRDFAAWLGLTPRQNSSGGKVRLGRISRMGQRDLRRLLIIGATAVVDGQPGGALPQDRGSPV

SEQ ID NO: 271188 - protein, 347 aa, unidentified
MNSVGIDLHRNRSHVAVIDEHGELALSKRIINGREAFLELLGGLEGESQIAVEATYGWEWLAELLEDSGYDFHLAHPLRTRAIAAARVKTDAVDAKTLAHLLRADLLPEAYVAPRDLRDLRELLRHRIALTAMRSALKNRVHAILAKHGITREHSDLFGKGGRQFLAALELREAPRARLDSLIALICDFDREIAATTREIDQRAKADDRVDVLCQIRGIGPYTAMLIIAEVGEISRFPDARHLCAWAGLTPTVRSSDGRARLGHISRQGSPALRWALVEAAQKCTTGSGPLREQFERIAKRRGRKIAKVAVARQILTLSYYGLRDGEIRRLARRSRASATAKLAATA

SEQ ID NO: 271189 - protein, 413 aa, unidentified
MQCLAVPGDDAMRFFVGIDWASQTHAVCVLDPRGHLHWQGTVPHTSEGLAALLGRLRRFRRRGPVRVALERPSGLLVDTLVDAGFEVVPIHPNALKASRPRYSAAGGKSDPGDAFILADVLRTDGHRLRPLHPPSDDTRALRALVRGREDLVAQRVALANQLRALLERFWPGAAAIFADIASPIALAFLTRYPTPHRAARLGERRLAQFLGQHAYCGRRPVAELLARLHRAPASQVGQAEAEASGDIVRAIVAVLGPLGAHIQHLSAAIAAALPQHPDGRLVQSLPRSGAVNAAQILAELGDDRARFSTDDQLAAEAGLAPVTQASGKHHAVVFRWACNKRLRRALTTFADNSRHASRWAALVYQRARARGCRHPHAIRILARAWARVLWRCWQDRTPYDITRHRAAQAVAAA

SEQ ID NO: 271190 - protein, 320 aa, unidentified
MNRESPYIGIDVSKTRLDVAAHPTAKGWSVSNDGEGIDQLVTHLRELSPALVVVEATGGLEYPMVAAIAACGLPIVVANPRQVRDFARGTGKLAKTDAIDSQVLANFAYMVKPTPRPLPDVLAQDLDATVTRRRQLMAMIVAERNRLHTAHQPLRQDIQDHIAWLKERLAKLDKELGNMVRQSPVWREKENLLRSVPGVGPVLTTTILAELPELGTLDRKQIAALVGVAPLNRDSGKFRGKRMIWGGRAQVRAALYMATLAATRFNPVIKAFYIRLVAEGKPKKVALTACMRKLLTILNAMLKHRTCWSYKIPQIIGPCS

SEQ ID NO: 271191 - protein, 396 aa, unidentified
MEYFAGLDVSMAETHVCVVTRNGAVIHQAKVPSTPADIAAELAQVPTCRRILFETGRMAPMLYHGLTKLGLPVVCVESRQAYQALKSLATHKTDRNDARGLAHLARTGFFKPVHVKSLPAHAVRSLIIARKKLVGQRVTLENQIRGLAVVFGVRLPRALSPAFIKQALGASEGIPGLSAAMRGLVAARAAVLAAVVAIDGDIRRMVRASDACRRLMSIPGVGQLTALAFTAAVDDPGRFRRSRDIGAYLGLVPRRYQSGEVDYTGGISKCGDRRLRTLLYEAANVMLTRYKGPLKLKDWAFAIAKRSTMRKARIALARRLAIIMHAMLRHGTEFKPILPEQHSPDRRSNRAPERSDARGREPMTAPILQHAVNLADCDFNRAALHPADPIKCHMST

SEQ ID NO: 271192 - protein, 406 aa, unidentified
MDEIIIDKGCGLDVHKETVVACVMGSGIKKDIRTFSTMTNDLLRLKTWLSRLGITHVAMESTGPYWKPVFNVLEDGFTLILANARHIKNVPGRKTDVKDSEWICRLLRSGLLSASFVPSQGIRELRDLTRYRRKLTQALSAEKNRIQKVLEDANVKISSVLSDTFGVSGNQMIEAIMEGKLREEEIADLAKGRLKSKKEEIREALVGYFHDHHRFMIKASLEHIKYLEKLISDLDRATKEKLEQYQKEYELLQTIPGVKEQGAAAIIAEIGADMDVFPSEGHLSTWAGMSPGNNESAGKKKSGKTTHGNKNLRAALTQCAWAASKTKNTYLSAKYHSLVGRRGKKRSLIAVGHKILVMAYHIIKNGVPYKELGKNYLLHRREDKIVKNHIKRLRDLGYEVELKKAA

SEQ ID NO: 271193 - protein, 391 aa, unidentified
MKVTRIGLDIAKQIFELHGVDQRERAVLRKTLKRDRVLEYFAQLEPCTVALEACGGAHYWYREISKLGHTVRLLPTNKVKPYLDGNKNNANDAAAICEASGRPSMRFVEPKTGVQQDLQALHRVRQVNVRHCTLLANQIRGLLLEYGITIARGLAALNRALPELLEYDEQRLSPMLKQLIAAQWRMLKLHRRQIEVYDRRIAGIAKNDASCRALLKIEGIGPITATALVAATGKGQQFKNGRHLSAYLGLVPGHSNTGNKTVMLPITKRGNRYLRTLLIHGARSALYAARNKDDSRSLWLQRLQSRRGNNIAAVALANKNARVAWAVLRFGQTYRPDMDHARQSSAPPPQQLQRQPQGRLTLKPHGATARVQNRHFPGPPPSGEGRAGKML

SEQ ID NO: 271194 - protein, 366 aa, unidentified
MKKISTLARSRKEIFKKPKLTIGLDLGDRISHYCILDEAGNVILEHSLPTTPMGIQQVFSRMPRSRIALETGTHSPWVSRQLTPMGHEVIVAHARNVRLIGESSRKDDQLDARTLARLARIDPGLLGPVRHRSAQAQIHLTVIRARATLVSARTALVNAARGLTKSYGERLRKCGSGQMSREIATGLSQELREALEPLLKEIESLNERVDDYDRRIEQIAKEVHPEVALLKQVKGVGTLIALTYVLTLDDPYRFRRSRDAGCFLGLRPGRRNSGMSEPQMHINKEGDGYLRTLMVQGAHYILGPFGADSDLRRWGLKLAERGGKNAKKRAVVAVARKLAVLLHKLWVSGEVYEPLRNNHKVVSAVA

SEQ ID NO: 271195 - protein, 353 aa, unidentified
MEDIKYIGCDVHQVTTVISVLNGAGREVKTAILPTQPQPLIAFLEGLRGPLHVTLEEGTYAAWLYDLLVDRVAELIICDPRRNALLQEGNKTDAHDARKLAELLRAGLLRAVYHGSRSLRDLQALAHSYEALVQDTTRAMNRLKALYRGRGIACPGRGVYQPRQRTSWLERLPRGGMRLRAELLHTQLDQVRALRRQARAALLAESRRHTVTARLREVPGMGAVRVALVMAHLQTPHRFRSRKQLWTYCGLGLVQRGSSEYRLAGGRVVRRAQALQPRGLNPNHRPALKEIFKSAALTAVRQAGPFKDYYDPRAQQGVDPARLRVTVARKLAALILTLWKKGGRYRVEGSEQA

SEQ ID NO: 271196 - protein, 421 aa, unidentified
MSYHIAGIDIHKRVLMVVVVSVAEEVTDATGAAMEFECRRFGTGASERNHLVAWLQPHQVREVVMESTAQYWKPVWLDLEPHFEKLHLAQAQSNQAPKGRKNDFRDAKRLARRLLAGELMLSFGPEPEQRTWRLMTRGRLQLVRERVRLQSQVECLLEEARIKLSSVISDLLGVSGRRILEALSKGQTDAVQLAALGDDRLKCTKEQLADALRGAPEPGHLQLLKLHLERLQLLDEQISQLSQMSATALQKHPQAVARLAEVPGFGVESAQQMIAEVGVDAEAFASAGEFASWSGVCPGSDVSAEENHSSRCPKGNQYVRRILAEAAHAAVKKKGGHFQNVFRRFLPKLGYNGAIWVVAHRLARLVWKILHDEVSYVEQGQDSDPRARKHRAAKLALALRKLGYSVTLSEINSRPVAEAST

SEQ ID NO: 271197 - protein, 345 aa, unidentified
MSESYSGQQFVGIDLHRRRSVIVRMTTDGDPLECIRISNDAERLATVMARAGESPEVVLEATYGWYWAVDALRELGAQVHLAHPLGVKAFEYRRVKNDERDARDLADLLRMGRLPEAWIAPPATRELRELVRHRAKLVGMRSNCKAQIHAVLAKCGIQVSMTDLFGLAGTELLGRLELRKPYAARIASLQRIITALDFEIDAFAGQVRGRLARDPGFVAVQSIPGIGPILGAVFVAEVGDVHRFTRAEELTCWAGLTPKHHESDKHVHRGRITKQGSRLVRWAAIESVQILPKTSVVGRIRDRVGDRRGRNIGVVAAARRQLEFVFYALRDHRVRALQGSRPVAA

SEQ ID NO: 271198 - protein, 426 aa, unidentified
MCQVDDIRLDEFRQFRKEVRGSNDYLIVGIDVAKEKHHAFFGTATGKTLFKRLIFDNTIEGFKKLLDKAQAIQSEYDLKKIVFGLEPTANYHKPLGEHLIQCAMMVVLVSGVSVKRNRELLDGRWDKHDDKDAANTADLISQGKCLFYEYPVMGIRDLRDLLMLKRKLRKQEHSYRVRIRNQLIAQYFPELDRYSGYAETESIVLWCLDPSRIAGFENDQFETIVSYGRQTLAKKKRLDDIQKLAVASIGCRMGEGANFDAKIMVEGLRHIRKAIKATEDKIEETCKQFSEYSCLLTIPGFGPDVSSKVLGALGNPHRFFNQKQVLKMAGLDLSANRSGKTSRAAVPVISKQGKADLRYALYQAAWIATTRNKDFMVYYARQLQGREKEQGIKTKRWVKISAKLLIVAWTLMKNREVFDIKHLKKT

SEQ ID NO: 271199 - protein, 344 aa, unidentified
MLAERLDFVIGVDTHADSHTLALVAAASGGLVGERTIATTARGYRDALRLAQAQAPGARAWALEGSGSYGAGLARFLAERGERVLEVERPARQQRRRGKSDGIDALAAARNALAQKRWAQPRAGGQRAALAALVSTREGAMQARRAALCQLRALLLALPPARRERLAGLTRTRLLERLAARRPRPGAELDGLELSLRSLARRLRTLDREERALKRQIAALVVELGAWLLAEPGVGPITAAQTLIPWSHQGRLWGEAAFARLGGVAPIPASSGKIVRHRLDRGGDRQLNRALHTIVVSRRKHHPPTIAYIARRRSEGKSEREAIRCLKRFLARSLFRRLEAMPAA

SEQ ID NO: 271200 - protein, 391 aa, unidentified
MRFVGIDIGAERHMVSSVDDHGTVLQRPTAFGEDAQGYQHLLTLLGPSADTLVVMEATGHDWQNLFAALAAEGFAVALINPLRTRRFAQEDLVRTKTDAIDTLGLARFGQQKRPAATLLPDLATRDLRELVRLRTRFLQDFGDRTRQLHRAVDLTFPEFTRYVAQLDTPRATALLHAFPTAAALRAASERQVAAIRGGERTVGRELASALKAAARSSVGRHDTAVYARQVRFFCEDLDLLRRRLADLERDIERLLAEHEVGRLLTTIEGIGPQTAAKLVAELGDPATFRSAAALAAYVGAIPALRQSGKQTWDRAGLSRIGHAKLRAALWMPTLVAVRRNPWLRAYYQRLRARGKLPKVALMAAMRKLLGAIYAVAKHRRPFVPVIPTPAP

SEQ ID NO: 271201 - protein, 286 aa, unidentified
MVLLLELRRWTVLNDAGGVEALVRRLSPVLPTLIVLESTGGYEVLCKATLGAASLPVVVVNPRQVRDFARVTGQLAETDRLDADVLAQFADVVLPIIRPLASDEVRASNTLLTRRRQQMDMLHGERNRLGKLFRAGQVPVHRSLVKTVTFLEGRLLTVDTALETLIASSSVWSAWDAILQSVPEIGQVVSRTLLGEVPELGALSRRAVAKLVGVAPFARDSGTMRGRRGTNGGRTTVRSALFMAAMVAARCNPIIRAFYRQLIARGKPKKVALVACIRKLLTSSMS

SEQ ID NO: 271202 - protein, 312 aa, unidentified
METKFVGIDVSKLTLDFDCLPVSAAQQFPNDAVGIVALVALLQGSGVERIVIEATGGYETAVASALAVAGLPVVVVNPKQVRDFAKAMGHFAKSDRLDAKVLALFGERIKPMLRAIPDEAQRALADVLGRRTQLVVMRAQEKARLATVAAVARKNVEQHIAWLDKCIAKLDADLGNRLRQSPVWCHKAELLDSVPGVGNVTTFSLLAQLPELGTLNRQKISALVGLAPFSDDSGKRKGVRYIRGGRADVRCALYMATLSAITHNPPIKAMYDRLTKAGKPFKLAMTACMRKLLTILNAMLKKNQTWKIQPSS

SEQ ID NO: 271203 - protein, 452 aa, unidentified
MSNKTKVDWKALDIVHPHAAGIDIGGSEHWVAIAPERDEQPVRSFQCFTADLEQMADWLVDRGVRSVAMQSTGVYWIPVFEILPQHGLEVFRVNARHTKNLPGRKSDIAECQWLLKLHTFGLLNNRFPPSDEIRTARTLWRHRGGLVAQASSAIQRMQKAWTEMNIQLANVLSDLSGVSGRRILQAILKGERDPKVLATLADPNVKASRTVIAKSLQGNWRDELLFVLQQEVAMYRMYQERMAACDQKLQGQLQAIESKVDVAAQPLGPRPKGKRARGNAPQFDLRTELYRITGVDWTLVDGIDVQVAQSVIAEVGVDLSAFPSEKHFANWLGLCPTNQTSGGKVLNRRTPKVVNRAKIALRQAASTLIRSQSYLGAQYRRLRTRLGAPKAITAMARKLACLFYRLLTHGKPYTDKGAEFYEAKYREQQIRFVLHRARQLGLEVIQPTKKLA

SEQ ID NO: 271204 - protein, 342 aa, unidentified
MQIASIGIDLGKTTFHLVALEERGKVVIKQKFSRKQLFAYTANLPSSLIGIEACSGAHFMGAALRDQGHDVRLIPAQFVKPFLKSNKNDFLDAEAIAEAVARENMRFVPIKTDDQLDLQALHRVRDRLVHRRTALINQIRGFLLERGITFAKGPANLRHQMPAILEDAEQNLTPRLRSLLAHLWQEWKTLNSDIERVSDEIDAIAGQDAACQRLRQIPGVGPLVATATVAAIGNGAAFHRGREFAAWLGLVPRQHSTGGKAQLLGISKRGNVYLRRMFIHGARAVLLCVKHDTGRLGQWMRQLELRAPRNKVIVAVANKLARIVWAVLSSGNEYRTVPVAAA

SEQ ID NO: 271205 - protein, 369 aa, unidentified
MKSSVSLSAHPIHLGLDTSKNKIAVGILRWGEQVPDVEMVFNDEASVRRLIDRFGDRGQLRVCYEAGPTGFGLHRLLTSMGVACEVIAPALVPKAPADRVKTDRRDCQRLARLHRAGELVAIRVPTEAEEAVRDLCRARADLVQDRTRTRHRLSKFLLRHDRIWRADAWTGKHAQWLVGQRFDEAALRSTYGHYRAVLAARDAELAAIEADLAHWYTHGPFTDAVARLAAYRGIAQLGALTIASEVGDWRRFPAARTFMGFTGLVPSEYSSGQSVHRGHITKAGNAHLRTQLVESAWAYQHRPSLGAVLRRRQDGVEAATAARSWTAQQRLCARFRRLSARKTSRNIVTVAIARELAGFCWAEMTATQS

SEQ ID NO: 271206 - protein, 543 aa, unidentified
MVVGSRLCSLFSLDIFAWYNKKKLAFYYTHNPLFVKFGILIYVNIIRSPPPGIEIQISLKSISGRYTMKNQNIYRNNNYALKETLSNYKPEQLLYIPIEVGKFNHKASIVNFFGDIVVKLFEFPNKKHGLDFFVKKLNFATTSSNAQKIFLGCESCGHYHLNLVHHLKQLNFPIEIINPRDTRKENPNKNSKTDNIDLGAIARVLISNKGGRQIVPEGVYYNLQRAARTRRKFVQRKTSSKNIITGLLDRIFPGLWDKDAPIFSDRWGKASMLLLERYPHPHRIIRLGEQRLARFLRKNNTKLGIDSAHKIIDAAKDSLTKPLSELHMDIFALKSHIKCLNLYNETIAQLEQEIAYLLVQTPGIYLLSIDGISVIFAGEFTAEVGDINRFAYANQIISFAGSCSKVFESAEYQAQGLHISGRGSKFLRSTLNQVALALNAWCEPFHLYYTNKALQKPDKPGIARIATGNKFVKLAFALMKYEQLYKPRGLLLDEKNYYSNLWSKIIRKLSGFNLTNISQENNYLLKIKKYLEEKYALTLPTKL

SEQ ID NO: 271207 - protein, 348 aa, unidentified
MRNQPLGAVVYGIDLGKTRFDVVGCDVAGRPIQRVKLSRYTLLAFFAAAPKALIGMEACPGAQWMARKLSELGHAVRIIPAQFVKPFVKSNKNDARDAEAIAEAVTRPTMRFVEIKSCKQIDLQALHRVRDRIVGNRTQLICQMRAFCLEYGIAIRPGTGAFKLDIARIITDENNDLTPAIRALLKELWEELRSVDIRHAVVSRQVEALAAKDDTARRLMTIPGIGPIGATALIAAVGDARQFRKARDLAAWLGLVPRQNSTGGKTTLLGISKRGNPYVRRLLIHGARSCMIHLDRSRDRIGAWLNALDRRVHRNKAIVALANKIARIAWALLRRPQTLYERIAPAYA

SEQ ID NO: 271208 - protein, 415 aa, unidentified
MEVVHPRCAGIDISKKDAKVCVRIQGGGGRRTSSTVTTWGSMTNQVLALRDHLVAAQVSVVVMEATSDYWRPFYYLLESDFQVMLVNAREAKNVPGRKSDVSDAAWLADLGAHGLLRASFVPPEPIRQLRDLTRARTVITRERTREVQRLEKLLEDAGIKLSSVASDITGVSGRLMLQALIDTGGAIDPAGVADLAKRRLRSKIDDLTEALTGHFSGHHAFMARLFLDRIDSHSRDIVALSARVEELMEPFLPIRVLLESVPGFSQIVAEIFIAETGGDMRQFPTAGHLASWSGVSPGSNESAGRIKSTKTRPGNRYLKGALGIAALTAARCKNTFLSAKYRRIASSRGPMKAVVAVEHAIIVAAWNMLTGGEFYRDPGPDFYTRRDPGRAQARAVKQLEALGFHVTIEPLSAAG

SEQ ID NO: 271209 - protein, 374 aa, unidentified
MPAACKPTTRKEECELINVGIDVGKRFCQAALKADDGRLLDELRFENTGQGVQELLEHITIHGDEARAVLESTGNYWIRIHDMLEDHSIDTLLANPRKTKLIAEAKIKSDKLDARTLATLLQGNLVFESYVPPKAKRENRILVRHRAGLVKTRTEIRNRIHAILAKHELHHNYSDLYGKQGLQWLESLQLQGVDQTVLNSNLALLKALDEQIKTVTVEIAKTACNEEDIRILITMPGIDFYSAMVIASEIGDVKRFPTQWKLVAYAGLAPSQHQSGEYERRGGITKQGSKWLRWILVQAAQHARQHDPRFKAYYERVAKRRGQQKAIVAVAKEMLVVIWFMLTRREPYRGQNLQLVERKLKRMNNLAETGLQAA

SEQ ID NO: 271210 - protein, 390 aa, unidentified
MTQVDDLSRCLAALDENSTLVAVVEMSQSSWLTAGLVPGVDRRPLKKLAPDAPTLLHLLERWREEAKTAGRMITRIVLAYEAGRDGFWLARWLRARGIEAYVIHSTSVAVSREHKRAKTDRLDAAMLLRVFLGWLRGERDHCGMVAIPTIEQEDAKRPSRERESLVGERTRIINRMKSALARLGIRGFKPELRKAPERLEALGTPEGDSIPPNTLDELRRDLARIAVVRGQIEAIEQNRLARMEQMPAQGPHAMVRLLARVIGIGVETADMLVQEILSRNLRDRRAVARYAGLTGSPDESGSKRREKGLCKAGNARVRRGMIQLAWRFLIFQKESAFAQWYREQTVATKGARTDKRKKMIVALARKLLIALWRMATTGEIPEGVMLRPAA

SEQ ID NO: 271211 - protein, 289 aa, unidentified
MLHRLNSAATLIQRTTMEAPRGDMYYIGLDVHKKTISYCVKDASGRVQQEGKVGSTRRELDCWMKTLPRPWTAAMEATIFSGWIYDHLLPHATQIKVAHPLMLRAIAAAKKKNDRIDAGKIADCLRCDFLPECHMMPAEIRDRRRTLRYRHLLVRQMVQMKNRVSGLLMETGVEYNKQRLHKVSYFRELLSTNAEVHPSLRPLLKLSRETIERCQKTEYALVSSLQRDPVLADRIKRLRTVPGVGPITALTWALEIGDVSRFRTIKQAISYCGLCGDERSSAEKSASVY

SEQ ID NO: 271212 - protein, 338 aa, unidentified
MNKRDISEPDDSMRMFVGLDVHKKYTEVAIVDEDGVVEKQERIENEPGQIEEFSNKLSNATMVLESSSSWYWLYEILSRRHRVVLSNPAKTKAIACAKLKTDKVDALMLANLLRGGYIAESYVPSRRIMGLRELVRYRANLVRMRGTIKNRVHAYLLMNNIKIDYGSFTKGFLEELRKVKDARVEGYLRIIERLNLEMHEASKIICSEASNDEAARLLMTIPGISFYSALLLVSEIGDVDRFPDSAHLVSYAGLASSTHSSGGSTYHGRITKAGSPYLRWVLNQCTWVHIRNQPGGNVALFYRRLSSKKGHAKAMVAASAKLLKIVYWVLKEKRSYQG

SEQ ID NO: 271213 - protein, 286 aa, unidentified
MQKKVRFLGLDVHAETIAVAVAEADGEVRSLGVIPNRGESIRKLVKRLGPAEHLRACYEAGPTGYVLYWQLTELGVECVVIAPTLVPVKAGDRVKTDRRDALKLARSHRAGDLTAVWVPDAASEALRDLVRARETAKQDQLRARHRLSKFLLRTGQRATAGVKAWTELYMAWVRQLRYEQAGQEATRLDYLHEVEHMGARVKRLEEAITEAVKLASPQVQEVVRGLQALRGIAEISAVTIVAELGQIARFETARQLMGYSGVVPRENSSGQRQQRGAALPRQATRT

SEQ ID NO: 271214 - protein, 357 aa, unidentified
MNRDKYVGMDVDQSTCVIVIEDKAGNFVMETYLPTKASDLRTFFKGLEGRIHVGFEEGTQAAWLYELIEPLVEEVVVCDRRGEKVRGNKGDRVDAYKLVRQLRQGELRRVYQGERGHRELKELIRGYDYLIQDIVRIKSRLKAAFRSRGISCAGQAVYRKAECEDWLRKIDVDSLRARVSSLYEQLECLTKLRKKAKDAMITGAKKHPSYKLLVKQPGLGAVRSAQILGIVGTPHRFRTKRQFWPYCGLGVVVHESSEYEIVDGQRRRRKRAVRTRGLNKNFNRTLKMVFNGAAKTVIAREPFKQYYQRLIDKNIRPEMAKLTVARKISAITLAILKSREEFDPIRVNQAVSDSGDQ

SEQ ID NO: 271215 - protein, 470 aa, unidentified
MGRKKNTTMPIINPDCAGIDVGSKTHHVAIGQSLSDVREFGVYAEDLTALANWLKSKGITSVAMESTGMYWQNLFIELVNAGIHVILTAGKFTKNINRKKTDVLDCQWIQKMHALGLLPSSFLPDETTERLRTLCRHRDNMVTQKVNCTHKMSKFLKWLNFRLDVVVRDITGLTGRTIIADICNGNLDPHSLAKHRHGNCRKSEEEIAKALVSNENPEYLFGLKQEFARFNFVLKLIEECDAEIVNLLQVIITSDPNPIDDMPCKKPDKRVNKNTIKGIDLNITAYQFFGGVDLLTIPGVSYSTVLTFMSEIGRDGIRKFDTAKRFASWLRLAPNNKISGGKTLSRHIPKGSNRLKIALRNAANAVGNLKESDLGRFFKKIAYRKGRQAAITATARKIAVILWHMLTKKEPYKPKTEYVFLDEKRRAIARLRNKISKFGIDPNDLGLFTKPEYKLAHIKRVNVNNDLGKR

SEQ ID NO: 271216 - protein, 360 aa, unidentified
MLHLGIDLHQSQITIVLLNEAGDVVRRATVSTKSPAIDAFLASVNAQAREVGGYRAIVEECGFTHWLIERLKIHECDLTVLVQPLERARHKTDKRDAAKLAEILWVNRDRLQAGRRLHGIRQVMVPTEEDRQNRLLTNARIRLVRRRTRTINQIKAILRQFNLMHECPTKGIKTNKARNWLRSIELPDADRITLDLALDQWELVDRQLARLDPEIDRRAEQSSMAQLVKTIPGAGNLTALVLASRIGSIDRFPRPSSLANMFGLTPSINDTGETTGRLGGITKHGHPNVRFLLGQMVSQLTRADARLRAIHRKIRKRRGPKTAMVAIMRRIACCLWHMLRTGEAYRIGTPVRNPASAPSG

SEQ ID NO: 271217 - protein, 486 aa, unidentified
MHLLTTNKFTPTRDVYRFGFESAGALEITNEYSGLAVAPAHLYCFRRSQACMPHSLNLAYWRDVMGAKQQGPFTAYVGIDWADSKHDVCIQPADVNAREYDVIAHRVETIDQWVHDLRKRFGGLIAVAIELSKGPIVSALQKYDFIVIYPVHPSTLAKYRETFTPSRAKDDPTDAELAVDLLLRHPERFKPLQPQGGEIRALATLVEHRRQLVSEKIRVTNRLRAALKQYYPQALEWFDHIDTLLFCDFLMRWPTLIQAKRARATTLRKFFGEHNMHRHDVLDRRLESIKTSVPLTLDEAIIVPYRLLTLVLIGQLRLMLQSIKEFDEEIESIASKHPDYAIFSALPGAGPSLAPRLLVAFGEQRDRFRSAADLQKYSGIAPVTERSGKKHWVHWRWQCSTFLRQTFVEWAGQTINKSYWAGQYYYQQREKGCTYQAAVRSLAFKWIRILYRCWQAGKVYDEAVYLRALERRGSPLLARPIMKETA

SEQ ID NO: 271218 - protein, 411 aa, unidentified
MRLFAGDDWAEDHHDVEVMNEAGKVLAKKRLPEGVAGIAQFHELTGRYLGEDAGDAEVVVGIETDRGPWVAALVAAGYTVFPVNPLQASRYRERHGVSGAKSDAGDAHMLADMVRTDSHQLRAAAGDSPEAGGIKVLARTHKTLIWERTRQVQRLRHQLREYFPAALEAFEDLDAPDVLELLAKTPDPARAAKLTRAQVSAALKRARRRNIADKATAILAALRSPQLGQPPALTAAYAVTVRSLIAVITTLNEQVKTLQGQVEEHFGQHPDAEIYRSQPGMGAILGARVPGESGDDPHRYATAKNRKNSGGTSPLTRASGKKKVVTARFIHNDRLVDALNAQAFASLNASPGARALYDELRARGIEHNDALRRLASRLVGILHGCLKTRTLYDEATAWSHRENLPQSSVAA

SEQ ID NO: 271219 - protein, 348 aa, unidentified
MSTYYIGADVHSNSTELAIEKRGKIVARYSVPTSIPAIANVLDSFQGKKHFAIEEGPMSGWLYRNLSNKVDDFISSDPRRNKLIASDGDKDDKIDAAKLASLLRGGFLRKIHQSDDAGRAELKHWVSLYHDRVRDAVRSINKIRGRCRMHGVKLSRAALRNPDSRADWLLETNNRALANQLNMLWIGYDATVQQVKLAKRQLALLGKKYEIIQFFSQLPGVGLIRATTLFAYLDTPWRFKKKNKLWKYCGVGLQRTTSGTDKKGNPKPARLKLPWAVNRTLKNAVLGAAQTAINQKKNVFKASYERMVQHGMITSNARHAVARKMLTAMWAMWKTNSPFDETIVFLSN

SEQ ID NO: 271220 - protein, 341 aa, unidentified
MQITTIGLDIAKNVFQVHGIDAAEKVVVRKQLRRGQVLKFFAALPPCLIGMEACATAHYWARELTKLGHEVRLMPAKDVKAYVKRNKNDAADAEAICEAVRRPTMRFVGAKSAEQQGRLIQHRTRDLLMRQRTQVINALRAHLAELGIVAAQGREGLKQLLTIIADEKDARLPIDARASLIVLAAQLQALQTMIGSIEKRLTVQHRANEASKRLESVPGIGIIGASAITATVSDPNAFRSGRDFAAWIGLVPRQDSTGGKQKLGPISKQGDRYLRRILVVGAHSVLRRAKQNPEKYPWLTQLLARRPFKVVAIALANKMARVAWALLARGGTYRVPALAAA

SEQ ID NO: 271221 - protein, 406 aa, unidentified
MKKRRQLKTNGTVIGIDAHSEKIVASFIEMHDGVEGKPRNLVTTVEALEPTFKKRIQGGEVAVLEASTNSFSIASRLNAIGIDVRVVTSDCLAGRQRSDKINDRIDAENLARAFISGDTQLVWQPSPKFRGMRDLFFAYRNAVKNATQASNRIWGFMNGHGFKSPSRGKQKKLSTLEKLLKERTWNADEKFLLEQMVGDYEHAIRQRDACEVKIKEHVAASEDMRRIMQVLGIRFIVAFALLAFIEDIRRFETAKSLVRYIGFNPSECSSGTKEGRHDMSRFGRHDLKGLMIQGAQAAMRTGKGNMHKWARHLCVSGKNRNLATCALARKMTVYVWHILMGHPTPNAAPDPAFVRKLSKLASELGKDALEKLGFKSAKEYVETVSNTIYANKKKPPELQTGPLASA

SEQ ID NO: 271222 - protein, 367 aa, unidentified
MFSSDYTVGCDAHKHFSLFAVLDEHGNLVERTRVGHVPGAIRAFLARFPEGTPVALESVGNWYWIVDEIQAAGCLPLLANPAKAKVMMGNVHKTDKLDAQGLATLQYLGKLPSVWIPPAQLRDERELPRTRMAFAKHRAMVKNRIRSTLGKYALAIGTDSDIFTPKWRPDLESLLEQLPPETDRCVRQQLQILDALTLHIQQLEARIVDRLQVTPTIQLVQSVPGPAKVLAIVIDREVGSIERFPSPHHFAGYCGLVPKVSASAGRAHYGRMVKQCNTYLKWAFIEAANVIVAHRHHPNWRRKYVVHLYERTRRRKGHAVAVGAVARSLAESTYWVLTKGEPYREPAPRRPAGKETTASSKQGQARA

SEQ ID NO: 271223 - protein, 449 aa, unidentified
MHGVHIGGQRAGAFLELVRGVDPKRVLLVGIDVAKATWFVVASNLLGEVVVDGVRLVADRAGLAELERMLGAASARVNAAMVVVGIEAAGHHHQTLTAHLLDRDELVVRVLNPAQVAAVRKQQGNRRRKTDWLDAAAVCELLARGEGALVHLDGSAASALRPLWSGRKDLVDTRSRLRQQAGALVDCLWPGCSAKDTAAGVTPVLCDLFATKAGRVLLELLAQGWTPARVAATSVAALRGLFAVRGCRLTRPLATRLIGRARAALPAHPAATAGKAATLAALLGTIDTLDHQIACLEAAMAPLLAGTQGAKLTQLRGVGVVAAAGFVAFVGSTDRWADWSKVWRAAGLDPARSQSGPTDARLGISREGSAWGRRAILDLAAAVCQQPGPWRDRLRIRTTQQHKPAKVALAATANAVGRTLFALMASGADFDPHFEAKRAAARKAGGRAA

SEQ ID NO: 271224 - protein, 369 aa, unidentified
MEHPTEVFIGIDVAKARNAIAVAESGRGGEVRFIGEIDASPDAMKRILRRIGAKYEVVHCCYEAGPTGYGLYRLIIELGYSCMVVAPSLIPKRAGDRVKTDRRDATMLARLLRAGELTAVWVPDAGHEAMRDLVRARAVAVETQRVHRQQVSAFMLKHGRIFPRKTTWGARHFRWLQEQHFDHPAHQIALQELVDAVRVAKERIERIEAAIEEFLPEWSLAPAVRALQALRGVELIVAVTFVTEIGDMRRFDNPRQLMGYLGLVPGERSSGDTVRRGGITKAGNGRVRHMLVESAWTYRHPPRVGKAKLYRLEQTTPKVREIAWKAQSRLTARYRELIAKGKKTPIVCTAIARELAGFMWAVAREVQPA

SEQ ID NO: 271225 - protein, 358 aa, unidentified
MKYIGCDFHPSFQQMAMLDLETGEMIERRLAHSNGEARAFYEALQGPVVVGIEASGNTLWFERLLGQLGHELWMGDATKVRREDPRKQKHDRRDAKTILKLMVEKRFPKVWIPTMEERDLRQLLMHRHHLVRMRTRVKNQLQHIALNQGVQKKYKLWTKAGMKLLRELELEPWTRLRRDTLLEMLEELEQKIRPLEQAVEREAGARPAARLLATHPGVGPVIALATVLTMGEVQRFDGSRSWVSYLGLNPSERSSGEKRRLGAISKQGSPFLRFLLVQGAAGAARGDKSLARVYARLKAKKHHGVAKVAVARKLAVRLYWMARTQKPYPEVVRMQGSQSLPVAEVMAVRLSRPPASRP

SEQ ID NO: 271226 - protein, 414 aa, unidentified
MRWLAEPHKVEGVECGMRRQSTITERSSFIGIDYHKRYSVFCVLDPQGGVLERGRIDHLWPEQFIELVRRWPGCRVVFEVCMNWHWLLEILEEAIPREDIVLANAFKTRIIAEAQIKTDKVDARILADLLRANLISKVHICGKATREVKEVLRQRCFFVRQRTMMRNRIHRLLSAQHGLKLPQCSDLFGVKGMSFLHKLELPAPAGLLLSQQLALLREIALRIREDEKGLEGMMEASPALHYVRSIPGMGPILAAVVVTEIDTIERFPSAQKLCGYAGLCPSTSSSGGKTFQGKLLPRCNKWLRWAFVEAAWVAVGCSPYFGDFYRRKRSLGKKANSAILATARLMARITWQLLTQRRVYASFPVNRELRCRPVCGSCSPTGLAKERQDFHKPRKLISSQQTFPSRSHTRLVGR

SEQ ID NO: 271227 - protein, 344 aa, unidentified
MVSIVGGFDVHRRQIMFDYVDTDTGGLQRGRITPACRAVLRRWLADRFAGRTDVAFAVEACTGWRFVVEECEQAGIAVSLAETADTSTARGPKKRAKSDVADAALLRELLAGARLPTSWIPPEQVREMRAILELYKDLRDEHTSWVQRIHATLFHHGVPQLGTGGVTTVAGRARLEAGEGLSPAARQAVLVALRVTDALDIELDALHRQIRTFARRQPGCQALQVQYGVGPITSTAIWAMMGDTRRFSASRQAVRHTGLDVTVYSSDGKRSRGHLAKQGPPLLRWALYEAACMASHTRAPDHDYYADGKDRIDHKRATISVARKIARRSHHILRELGDKAYAAA

SEQ ID NO: 271228 - protein, 330 aa, unidentified
MNYSHFVGLDVGKKSFDASLVSLDQELSHHTFPNTPEGIEELLHWIKQHGVEVETALFCAENTGSHVIDLCLSSYQYHFPLALECPLTIKKSIGLQRGKNDRIDARRIAQYASLHYRKLRLYELPDKDLVRLRNWLVIRDNLVKQKVSSLKLLELTRETSRLADLMVPMTFLENQICQIKEKISYVEEEMEKIITENITLSTNYQLLTSIKGIGPVNAIVLLCVTDNFQRFSAPRKFACYSGVAPFEYSSGTSIRGKTKTSHLANREVKVYLTRAAITAIAWDPQIKAYYKRKIAEGKHKASVINAVRAKIIARCFAVIKRKTPFVTLSA

SEQ ID NO: 271229 - protein, 340 aa, unidentified
MQTKTLFVGIDVSKLTLDIAITLDGKTIEANLKTPNNQAGFKALTSWMKRHARLQECDEIHCCIESTGIYSDAIVDYLQELGGLKVSFINPVQAKAYGRTVLLRTKTDKVDAGLLARYVAAVKPAVTLPIPMEIKELRSLIRHLDYLITRRAQEKGHLESTTDKVVINSVKDTLKHYDKQIKKLEKLIKGYLDKRPDLKEKVELLKTIPGIGETTARILLCELHVENNDEKITAKVQIAHAGLAPAQKQSGQSVRGKSMICRTGNARLRRCLYFPAIVASKFNPVITGFYQRLIKRGKHKKVAIVAAMRKLLSIAIGVLNNKVAFDPEWVVKTVKQVKCA

SEQ ID NO: 271230 - protein, 350 aa, unidentified
MKIVGCDFHPSYQQVAVFDTLTGEVEERKLIHADGQAEQFYRELEAPALIGMESVGNAQWFVRLVESLGHQLWIGDAAKIRASYVRKQKTDKRDAGHILKLLLENRFPRIWVPNQQQRDLRQLLLHRHKLVGVRTRLKTELQHLALNLGVQKKRQLWSVRGRAELEKLPLQGWTKRRRQDLLALLKVVEPQIEELDKAAAEAAAAHPQARLLMSQPGVGPLTALAFVLTIGEVARFARSKQLASYLGLIPSEHSSGSKRRLGSISKQGNVFLRTLLVEAAQSAVRHDPLFRKEYKHRCHHKPKGVAKVAAARKLAVRLYWMLKTSKPYPEVLHIEGSPRHPVAVKASPSC

SEQ ID NO: 271231 - protein, 340 aa, unidentified
MNYYAGIDVSLEASSVCVIDANGKIVREGKVASEPEALIAWLGSLGVSLTRIGLEAGPLSQWLYAAMRQAGLAVELLETRHVRNAFRIMPVKTDRKDARGIAELMRLGWFRPVHCKSMEAQETRALLTARKLVQKQLLQVESSLRGILRGFGLKVGKTTRVQFEGRIRELVAGHPSLEVIAHALLAVRGVLRREFNGFEKRLRAMCRCDMRARLLMSTPGVGPIVALTYACAIDDPSRFKSSKTVGAHFGLTPIKYQSGETDRTGRISKIGDSAVRAVLYEAAHVILTKPVKGCTALKSWAMRIARRAGMSKAKVALARKLAVIMHRMLADGTTFSTQPA

SEQ ID NO: 271232 - protein, 418 aa, unidentified
MATVDIVYPICCGMDIHKNFLVACIATTDERSNTTHQIRRFSTFTGDLRKLADWLVSNNCKDVCMESTGKYWIPVFNILEKTCNVFLTHPKYVKAIKGKKTDKRDAKWISELFKCDLIRASFIPPADIRQLRDLCRYYVKLTYMNTSEKNRAQNCLTMCNFKLDAVFSDVFGMSATRVLNAFFEHNGPGFDIAPLLHKHCKAGVEEVRAALEGELSLVQAEKLKFIRRHQECIGNLQVELENLILQLAAKYQPQIDLLLTVPGISSPLTAIRIMAEIGVDMSVFETAKKLCSWAGLTPQNNESAGKKKTTRIGRAGVYLKPLLVQIALAVGSSNKHPELKDKYQALKKRRGGKRAVIAISRKLLTAIWHILNKNEPYNAELYQKADNPPVNRVLNHEQAFAMLRSRGYLICDADGVVT

SEQ ID NO: 271233 - protein, 412 aa, unidentified
MLFVGDDWAEDHHDIEIVDDTGQVLIRRRLPEGLEGITRLHALIAERMPAQWADLEPGQAAAMVKVGIESDRGPWVAALIITGYEVFAINPMSAARYRQRHSTSGAKSDTADAHLLAEIVRLDRAHHRPVAGDSHQGEAIKLTARTHQSLVWDRTRHVLRLRSALREFFPAALTAFPDLDSPDALELLRRAPAPDQAARLTKSRISAALRRASRRDVDAKTAQLQAILGAEQLRQPPVIQSAYAAIVTSEVAVIEALSTQIDQLGAVVSAHFGPHPDAEIYASQPGLGTILAARVLGEFGDDPHRYLDAKARKSYAGTAPITRASGTRRIVLARYARNRRLGDALQQWAFCSLRGSPGARAYYQQLRDRNIGHQAALRQVANRLVGILHGCLKTQTRYDEHTAWSHHTAAAA

SEQ ID NO: 271234 - protein, 358 aa, unidentified
MAFCIPSATSVAANREETQVEHTLLAVDLAKDVFEVAVSRQAGSVDASHRLKRERLVGFFMEQPAATVVMEACGSAHHWARRLTQIGHRVKLLPPGLVRPYRRGNKTDRADAKALLEAFRNQDIREVPVKTVAQQAVGVVHRLRSTWLEARTARLNTVRGLLREHGLFIPPGAERVVPQVRSWIAADDVALAAPVRAMLASACDEILDLERRIAEAGRQLEAIAAQTPGVRLWITIPGIGLLCSTALFAFVGDPGRFRSARHFASYLGLTPRERSSGNRRRLGRISKRGDAYVRHLLIHGARAVLGAARRARQCDRLRTWALDLAARTHFNHATCALANKIARIAWAVSRQQREFVAI

SEQ ID NO: 271235 - protein, 346 aa, unidentified
MKQYIGLDVSLKETFIVVREGGKRIWRGKCPSDPEIIAQTIAKRAPSAQRVVFETGPLSVWFYHALTEKGVPAICIDARHAKAALDMAPNKTDQNDADGLAQIAEVGFYREVRVKSFDSMLVRTLIAVRDQMIKMTTKMSNQIRGLMKTFGLVVPKSSGKVFEGHVRELLASNPGLEAIILPLLEAWRAMRARVAELSKQLIASARASQQCQLLTTVPGVGAVTASSFVAAIEDPTNFAKSRSVGAWIGLTTRRYQSGEVDYDGHISKRGDNHLRAMLYEAAMVILTRTHADSALRNWGLKLREKIGFKRAAVAVARKLAVIMHIMLKTGELFNPSIEPASLEAAA

SEQ ID NO: 271236 - protein, 356 aa, unidentified
MSQTLKTSVAVIGVDIGKNSFHLVGQDRRGAIVLRQKWSRGQVEARLANLPPCLIGMEACVGAHHLSRKLQMLGHDARLMPAKYVRPYSKGQKNDFRDAEAIAEAVQRPTMKFVATKTADQLDLQALHRVRERVVGQRTSIINQIRAFLLERGIAVRQGLRFLRAELPGILATRNDVLSPRMLRIVEDLATDWRRLDERIEGLSGEIERLARQDKGCERLMTVPGIGPIISSAMVAAIGTGDAFSKGRDFGAWLGLVPKQISTGDRTILGSISRRGNRYLRSLFVQAAWVVLIKVGPKHWDRYGLKSWIEAARKRLHHNVLAIALANKLARIAWAVLNKGRAFECVRASEMTSRPA

SEQ ID NO: 271237 - protein, 286 aa, unidentified
MEHELHYIGIDTAKEKLDVDVLRPDGRHRTKKFANTTKGHDELVSWLKGHKIDHAHICIEATGTYMEPVAECLYDAGYIVSVINPALGKAFAQSEGLRNKTDTVDARMLAEFCRQKRPAAWEAPHPLERALRALVVRHQALTDMHTQELNRTETAREVQRPSIDAHLLWLEAELKRLEKQIKDLTDDDPDMKHRRKLLESIPGIGEKTSAVLLAYIGLKDRFAHARQFAAFAGLTPRRYESGSSVRGASRMSKAGHVSLRRALYMPAMVATSKTEWGRAFPRPSGG

SEQ ID NO: 271238 - protein, 370 aa, unidentified
MLDTTTFVGLDVHARSIKAVSLDVMTGEVRAATFGYDAGAVAEWVRSVDPGARCVYESGVTGFDLQKRLSGLGVDCVVGAVSKMIKPSADRRRKNDRNDAEFLARMLSVGNVVEVWVPDDECEAARDLTRALEDARDDLSRSKQRLSKFLLRHGLVFDERTPTGRRKGNWTRAHWSWIESIRFAEGADEEVLAYYVDAVRRAAEEKARLEGLVEAEARKPRWRRRVDSLRCLKGVDTATAADLVFEAGEFSRFGNARSFAAWVGLTPSEHSSGESDRRGAITKAGNKHLRKTLVEAAWHYLTCSGRPKDLAKGQAPDPAARRHAAKGVRRLVERREALLARGVHGNKANVATARELACWVWAVGLMAEEA

SEQ ID NO: 271239 - protein, 414 aa, unidentified
MVDLLVERCAGLDVAKREVVACVRTPDPGAGGRRRQAIRTFATFSAELEALADWLEAEGVTQVVMEATGQYWKPIWYMLEERGLALLLVNARHVKILPGRKTDVADAAWLAELLEHGLLRGSFVPPAAIRQLRDLTRYRKKLIQAHTAETQRVHKTLEDAGIKLDSVAADVLGVSGRAMLAALVAGERDPVVLAGLAKGKLRRKLPQLRQALTGRFGDHHALLVGLSLGHLEHLERAIARLDDRVDEVIAPFAVARDRLDTITGVGKRAAETIIAEIGTDMGAFPTAGHLASWAGRCPGNNLTGGKRRSGRPTKGNRWLGEVLTECAWAAAHTRETYLAAQFWRLARRIGKKKAAVAVGHSILVIAWHLLSDDCDYHDLGGDWFVRRSDHDRRKTHLVKQLQALGYSVTLQPAA

SEQ ID NO: 271240 - protein, 380 aa, unidentified
MQTKLYVGLDLHSNNTYVGVIDEQERRVVKGKFPNKLEVLLAVLEPYREHVAGVVVESTYNWYWLVDGLMDNGYKVHLAHPAAFQQYSGLKHTDDEHDAFFLAKLLKLGILPEGHIMPREERHLRDLLRKRMKLVSQRSTHLLSFKSLLSRNLGFTMPSNEVKKLEDDEIGDWFDNQHLALSAKVNIGAMNNLKWQINEIQSAALKAAKLKPQFEKLLSVPGIGNILAMTIAMETGDIQRFPSVGDFASYCRCVSSRRISNEKIKGSNNRKNGNKYLSFAFVEAANKARRYCPPAQAFFLRKSIKTNKIVATKALAHKLARACYYIMRDHVDFDETKIFKPSKVEKGCAREPKRGLGHQPQAPIGMAGAAPNQLDHIAAK

SEQ ID NO: 271241 - protein, 355 aa, unidentified
MTACYDYHIGVDYHKSYSHLVVQDSSGKTLRSGRVKNDRQSLGGFLERYSENSHAVVEATRNWMVMYDWLDDICDDVVLAHPLKVKAIADAKIKTDKIDATVLAHLLRADLVPEAWAPSDKARELRVALRERMFYVRLRTMTKNRIVTVFDRYPEQTALQKKLGDLFGRAGRIQLAQVKVSEIDRVQIDRGLAFIGDIDVRIKQSEATIRAMTRANANVKLLKTIPGIGEFFARLIDAEIDDIARFRNPKKLAAYAGLVPSTYSSGGKTYHGKIIKQGNKWLRWAFVEAVAPAITSDAQLRGQYEHLKIRGVNKARVAIARKLLTIAFQILRDQRAYEPRDTSTAEGASTISRLS

SEQ ID NO: 271242 - protein, 422 aa, unidentified
MIDHNNTSELPADAVIVGIDWADAEHVLCLIEPDGRPNIDTLEQSPAVIDEWAADLKRRFPGRTIAVALEQTKDALIYALMKYEHILLYSINPKQLARYREALNPSGSKDDPTDAALLAQFLQHHAGQLRPCKPDTAATRKLAAYVEHRRKIVEERKRLSQQLTSRLKLYFPLLIELFPRNIERIAALVKRWPTLAKLRRVHPQTLRTFLKQQGIRNEQKRSEIIAAIRAALPLTTDEAIVEPNALFAVSLAKQIKQLNQTIDQFDEQIAKLVAAHDDAALFRALPGAGAALVPRLIVALGTDRDRYDTAEEIQSHSGIAPVTRQSGKARHVSRRYACPKFLRKTFHEFADHARKWSAWSKAFYNMKIAAGFKHHAAVRALAYKWIRVIFYLWKTRTIYDETVYLAQLKKRNSPVMNFLETA

SEQ ID NO: 271243 - protein, 486 aa, unidentified
MERQYVGIDLHRRRSVIVRKGADGDVVGTARIDNEPLALAAEIAKAGADAEVVVEATYGYYWAADVIQDCGARLHLAHPSGNDWGHRRVKNDLRDAEDLADLLRLGRLAEAWVAPPEIRELRELVRYRAKLRGLRCGLRCQVHAVLAKEGVNVVMSDLFGVAGTQLLDTVPLGDAYTVRVESLRDLLEIYDREIAMLDGKIAARLDGDKGYHAIQAIPGVGPILAAVFVAEIGDVTRFPDARRLASWAGLTPRHRESDTKVRRGHITKMGPALVRWAAIEAVARGRGPSVLRQHWRSVAERRGNKIGRVAAARKLLTLVYYGVNANGHGLTLFPGRARCRPGPRREDAEADLDLPSRHLHLFDHESHEPLPLVEVQPIEGGQGPLRERPDALAEPVVRGQLPALVGQGGTLAVDVASAGVELLGPALQLDQLYEPRLVEVDQATTLSLGRLRLAVEPGELGLEQLVVRGRRPSSQRVLPGNQDLRP

SEQ ID NO: 271244 - protein, 407 aa, unidentified
MKLLIGLDWSKDHHHVCFMAPNGSVQASFEIPHTVTGFARLEEERAKFGVPATECLVALETAHNLVVDFLWARQYQVCVIAPTVVKGSRGRYGVSGAYTDASSAFLLADLLRTDRARFIPWRPDGAIVRQMRAKLSLIEALRKDINRWSNRLLAVLLRVYPHPIGLFSKLTTQINLHFLIAYPTPHALREMSYQEFESFGRQHGYPAAKLPALYAHLQSRRPEPDPVALLAYQDEIPFLARTLLPLVQHRLQLIREVKSLFDQHPDNFIFESLPGTGDLLAPSLLVKFGDHRERLPNANIVQALAGTCPYTKMSGKKRRVLFRKACDRDFRRIAQQLAIESVKQVVWAATYWQEAYARCHKKSQAYRCLANRWLAIIWKMWQTRKPYDEEYHLKQRLLRRQPRSQKL

SEQ ID NO: 271245 - protein, 340 aa, unidentified
MEHVAGADLHKRVTQLALLRDGQPPSQARFANDRASVEGALTRLPAGTTIAVESTGSWWWFVDTARRLGHHVVLSHPKLTKAIAAARLKSDKVDAVMLARLLKADLLPMVWIPAERERHIRELLAHRGRVVRTRTAVINELHALYSKRNLEVPRYRWHRQAPEPWQPEALGGYGPQIVHENVALLKALHEQIRGLDQALKALAQEDPEARRLMTHPGVGAVTAVAVRAWVGDIRRFASAKHLVSYFGLAPRVRQSADTERHGHISKEGNRMVRALLVQATLSAMRHTGGPVRRQYLGVVKRRGKQIARIAATAKLLGVLYQMMKQGLTYEELHQRGGSAQ

SEQ ID NO: 271246 - protein, 417 aa, unidentified
MSGKNKPKANVVVVDHRNIVGIDIGKRKHAATAITPQGAVIASLNVFENNKEGVDLLEREVLVPAGDKNKPLVALEATGMYWNALHDELTRRGYHCVVLNPIQTMRWGQKRIRKTKTDRIDSEIIARTILAGDAQATLVPDEPMWELRLLVRHRWRLIRSQNTILLYAISLADRVFPELEGVFSKPFLRSVRTLIREIGLTPDVLSSNRKKVREVLEKASRKRLSSETIDNLLQRAKTSIGTRQGKAVVNNQLRMIVDYLDFMDDQVEQIGRELRRRMEVLNSPIMSLGIGPEIAATILAESGAVERFAGPREYAAFCGLDPSVRDSGDSIHGISHISKRGSPLLRWAMYMAAITVYKKHRDFGKIYLRHTKQQPKGRRQKGHRYALIAVAHKVARVTWRIMKDNRPFTKNPPKREC

SEQ ID NO: 271247 - protein, 418 aa, unidentified
MEPIYDRCAGLDVHKKTVTACRIYPDSGGQTTKDTRTFTTMTPDLINLSDWLAQVGIHQVAIESTGEYWKPVFNILEGSFDVILVNAQHAKTVPGRKTDVGDAQWLAELLQCGLLRASFIPPQPQRDLRDLTRYRTNLVQERAMVVQWLHKVLESANIKLAAVATDVLGVSGRMMLDQIVAGNADPATMADLAKGRLRDKRVALEQALTGRVRPHHRTLIADHLTHIDFLDERIEFITQEIQKHMDKHFPDDDEALRLLDTIPGVDRKTAELILAEVGSDMSRFPSADHLASWAGLAPGNNESAGKKRSGKVRKGDRWLRSGLIQAAHAASRKATCYLASQYHRLAARRGKKKAAVAVAHSILISVYYILSRREPYRDLGPNYFDERKREATVQRLTHRLEKLGYRVSLELTSVPVPA

SEQ ID NO: 271248 - protein, 343 aa, unidentified
MKITTAGIDLAKNVIQVHGVGARGNAVFKKALKRSQVLSFFVNVPPCLIGMEACGSAHHWARKLQKLGHTVKLMAPQFVKPYVKTNKNDVADAEAICEAVSRPNMRFVPIKNAEQQAVLALHRARQGFVRARTAQANQIRGLLAEYGIVIPQGICHITKRLPGILEDGESDLPGMFRQLLQRLGEHLKELDRQVGELELQIQLWHQEHDASRKLAQIPGIGPITASALVASIGDAKSFKNGRQLAAWLGLVPRQHSSGGKSTLLGISKRGDGYLRMLLIHGARSVIRVAEGKVGYAQSWLARLIGRRHPNVAAVALANKNARIVWALLKHERDYQPNYQPSAV

SEQ ID NO: 271249 - protein, 355 aa, unidentified
MVTPPCERYADRVFFFLKGIIMQNVTLIGIDLGKHSFHVHAQDKSGHALLRKKFSRTQLTAFLSTCSAATVVMESCAGAHFMARHISQLGHQVKLISPQFVRPFVKSNKNDFIDAEAICEAASRPSMRFVTPRTEDQQAMSALHRVRDALVRERVKATNQMHAFLLEFGISMPRGIAVIRRLTAVLEEHQLPPYLTRLLLRLHQHYSYLSEQIEGLEQELKTHMADDDTAQRLLTIPGVGMITASLLATKLGDGKNYASSRDFAASTGLVPRQYSTGGKTTLMGISKRGDKNMRRLLVQCARVFMQRLEHNPGRLAEWVKVQQTRHHSNVVACGLANKLARIAWAVTVHRTAFSQ

SEQ ID NO: 271250 - protein, 347 aa, unidentified
MEHPIRVFIDTSKTLFQLHGVNVAEQVVVRRQVRRSQVLEFFTKLSPTMVGLEACGGAHYWARELRKLGHDVRLVPPQYVKAYLKRNKNDGRDAEAGCEAMSRPTMRFVPVKAEAAQAVQMLAGVRQRLVRERTRLTNEIRGYAAEFGLVAAKGLDKIAPLLARIEADEGLPQLARGAFAELGEELAGLQARIERAERRLMAWHRQDETSRRLSAIPGVGPVGAVMLTVKTPEPQAFGSGRDFAAWMGLTPKDHSTAGRSRLGVITRAGDEGLRAVLVSGAMSVIQQVKAGRRTPSPWLAELLRHKEAKEAAVALANKTARIAWKLMVSGQAYRPELELQATMPDAA

SEQ ID NO: 271251 - protein, 382 aa, unidentified
MSSTNRNTAAASTIYLGLDVHKDSITVAVLPATAAAPTRVERLPNDLPKLRRLCTRLAREGELRACYEASGAGYVLHRVLREWGYACDVIAPSLIPKRPGVQRKHDKRDAIELARLLRAGELTAVRIPSETEERVRDLVRCRETFQRELLKSRHYVLKFLTRRGFVYRDGAHWSRGHMTWLHAFAARETPLVAEDAIVFREYLALLEYKLARRVELDTQIEALALTPAFMTPTAWLQCFRGIKCHSAMVLTTEIVDWRRFDTPRQLMAYLGFVPREHSSGPRERRGGITKAGNSHCRHVLLQAAWSYRHPPQIGTSLKARQRGQPAAVVAHAWKAQHRLHKRYQHIAHRRPPQIAVVAVARELIGFLWGGMRDLDTPPMVAA

SEQ ID NO: 271252 - protein, 457 aa, unidentified
MTTTIKDGTSNTSEANEQIAVWVGLDWADKEHSVSVYEVGTGRSDRYTLKHTAEALQEWLSRLRTQYQGSKVAVVLEQSRGPVLYALMSCEFVVLYPVNPQSLANYRKTFQTSGSKNDPGDAELLQEMVRKHPDRFRAWVAEDADTRSLQLLVEGRRKLVNQTTRLTNRLTSHLKNYYPQALEWAGELNTRQACDFLMRWPTLQSLRQARPATLKKFYLSHGRPRTATLNERLKQISQAVALTDDRAVVLAGSMMVKALVAQIQPLIIAVEKYDDEIHRLFQLHPDREVFESFTGAGPVLAPRLLAAMGADRDRWQSAAEIQQLSGVAPVTEQSGRQHWVHRRWACPKFLLQTFHEFAKQTIVWCDWAKAYYEQQRERGAGHHAAVRSLAFKWIRIVFRCWKDRVAYDENLYLRGLERRGSKLAARTQLVRQAKELRRRQRSAQSVENLLPNLHIGA

SEQ ID NO: 271253 - protein, 422 aa, unidentified
MLGVGIDFAEEFHVVALGRPGDGVFAVTRVDHRPTALEALVTRINALEPDPAAVRVVLETSHGALVERLLDAGYVVVPVNPDLVARRRGPARKKDDATDARIACLLALDCHEPLRPLIPHGELAAELRAIARDDERAARDERRLLNRLRADLVATFPAALTIVGDDLGAPTMLRLLERWPTAAELGGASRDELVTFARSVHYGWPERLTGRIAEALAREEFVARDYLVRAKAATIRLAANQLLLLEAQRRAWEGRMGELLLGTPQTGRRREPRADIQSRQFPGGEIYLSFPGLGDRLAARVAGEIGDHPEMFTSPNGLQCYAGKAPVTRRSGKSELVVSTRLACNGHLRDAVQQWAFCSLRRSGWAREFYDGQVGKGKHHNAALRALGNRWLEILWYCLIRRVHYDEATHVANRNRALQQAA

SEQ ID NO: 271254 - protein, 378 aa, unidentified
MNRIIKIGMDVHTSNYTLCIFEPSFEHDGTVHCITQVKPEVKNIIHVIETFKKKHENEELNIVCGYEAGCLGYSLYHELKEKGIECVILAPTTMKTEKGGRKLKNDYRDAKMIAECLAYGGYSAVHVPTELDNSVKEFIRMRDDIKENLKSIKQQIIAFLTRNGKQFEGKSFWTRKHIDWINTVSFSEPLLQDTLKEYMIEYNHLCNRIETLDRQIEEISLKEEYVEKVQQLQCLIGIKTHTALSLIVETSDFNRFKKGNMYSAYLGLIPGDDSSGGHENKLGITKAGNSHLRRLLVEAAQGYTRGRVGFKSKDLKSRQEKCSSEVVAYADRANERLRRKYYRMTLRGKKFNVAKIAIARELACFVWGIMTDHIDLCN

SEQ ID NO: 271255 - protein, 419 aa, unidentified
MSFKILKFNCCGLDVHKTWIYACIGITDSSNRTEYKQARFSSFTKGLNELCNWLAKYNCTDVCMESTGKYWIPVFNILEQHNLWVTLSHPKYTKPMKGNKTDRKDAKWICDLYMCGMVKPSFIPPADIRELRDLVRYRYKLTCMITSEKNRAQNCLTVSNLKLDDVFDDVFGKSSRSITEHILQHPGEKFDVSPFVDRRCKSPIEEIQTAVEGSISKEQAVKLRQCLNHIDELKKHSSEVEQEIFRLSDKYEAALNLIRTVPGFDKNPLTAIQVLSEIGGDMSVFPTAKHLVSWAGCCPRNDQSNQKIKSTRISRAGSYFKPVLVQVANALIKSKKHPEFTNRYKRIKARRGHKKAIIAICRMILTAIWHILSDSKPYTPEGFLESRPVKEEKILSTSQALNLLRQRGYVIKDEPLPAS

SEQ ID NO: 271256 - protein, 347 aa, unidentified
MVTLGVDAHKRTHTIVAVDANGRQLASKTISTTTKDHLGVLTWAQQLADADGLLWAIEDCRHLSRRLERDLLAAGQSIVRVPPKLMAHVRDSARTYGKSDPIDALAVARAAQRETDLPVARLDGPDRDVRLLSDHRESLVAERTRVICRLRWHLHELDPSWEPKARSLDRISVLDQVATHIEELQGTVARLARGLVKRCRELTLEITTLTAEITAFISAMAPSLIAIPGCGAITAAKIVGETAGVDRFRSKDAYARHTGTAPMPVWSSNRARHRLSRTGNRQLNAALHRMALTQAHWHPPAKAMMDRRKAGGDSGMEALRVLKRRLSDVVYAALHADLAHGAETVAA

SEQ ID NO: 271257 - protein, 338 aa, unidentified
MFMIGIDPHKGSHLAAVLDEHETLVEELRVRADRHQRERLLQFAAPYMPRVWAIEGARGLGSLLAQQLVAAGEVVVDVPAKLSARVRSLDNECSDKNDCHDARSAAIVGMHNRRLVKVAPENHAMVLRMLAKRHHDLTARRTQSVCRLHALLATMTPGGLPRLLSADRAARELRKLRAADAVGSARRAACYELLGEVRNADRHLRELHTRIVAAVRAADTTVTNVYGVGPVVAAYLIGYTGDVTRFATKERYARYNATAPLEASSGPKPRHRLNLKGNRQLNHALHLAAVTQISHDTAGRAYYQRKLTETQNPKEAMRALKRRISDVVYARLQADTTR

SEQ ID NO: 271258 - protein, 341 aa, unidentified
MKRVSTIGLDIAKHVFQAHGVDAEGRKVFSQRLTRRKVLEFFATQPACLVALEACGGAHHWARELVKQGHDVRLIPPAYVKPFVKRNQKNDALDAEAICEAAQRPNMRFVAIKSEEQQACALVFRTRDLLVRQRTQLINAIRGHMAEYGWVAPKGPAWIASLREVIDSDNSLPAAARDMLRVMLGMLDELDLRITDLDKEITRRAREDEDARRLMTIPGIGPIAATAICALAPPAETFVRGRDFAAWVGLTPLQKSTGGKAKLGRTSKMGERTLRRLLIIGGSAVVRHASRKAPPPGSWLGSMLARKPRMLVTVAQANKTARIVWAVLTKKEEYRAPVAAA

SEQ ID NO: 271259 - protein, 460 aa, unidentified
MTLLAQLGIPLPPRYYLSIDVGYKEHVAVVISLQTFARGDDRWKRARCVHFPSTHSGLKKLQQYLDRFCSDPAAFLGLCEPTGGFYGATVFQYLLDRGYRMLLVDNATTRHMREKIFPHMPKTDEMDARVMARIGYLHEAVGEEFTLCPLELPDPDSAHLLALCRDSWKLSTTINRARNQFTQLMAVTFPELKTFFTSSVSTVAPVSLIAAYPTPALLATAPPEEVRQVLEQAGDYRHIHRVEELQVLARNSSGLPPDPGRAWRMRWVTDFLLTNFRHQAALDKRIKELVEEWEGYERIAQVPYSSPITLGVILAVTGDVSRFSNYRKYVAYTGYFAGLETSQTIDRTRMSKRGNRDLKRALFQIAAPLVWFDQGDNPYKELYQRKQAEGREWYKAMPFVCAALARHIYHCLKFKDPYRAEKAFQGSSPLPVSEQVLVDLRSDFDERFEVMEAYLCQIGG

SEQ ID NO: 271260 - protein, 338 aa, unidentified
MKQFVGIDLHKDVSQMAVLRESKSPSQLRLANDIVTVERVLKKLPKGSKIALEAMGSWWWMVDLAQKTGHEVFLSHPKQTKAIASARLKSDKVDALMLAKLLKADLLPTVWIPPEYQRHLRELLTHRARLVRQRTAVINELRAVYAKRNIDPQAKLGRVRPSVAGAEDLSGYGPRIVGEDVELLGFINRQIGGLDKELTKIALEDAQSKRLMTIPGVGPVSAVAVSCWIGEIARFSNAKKLASYFGLAPRVRQSAETERHGHITKEGNRMVRWLVIQAALVHTRRGKAPSRKHYLGVLRRRGKQIARVAVANKILGAIFHMMKEQIDYHEFLRRSGAQ

SEQ ID NO: 271261 - protein, 347 aa, unidentified
MHSTISKEPISTLAIDLAKSSFHLHGADTSGHQVVSKPVSRQKLFAYVAQLPPCTVVMEACGGANYFARQFSEQGHSVKLIAPQFVKPFVKSNKSDAADAQAICEAAQRPTMRYVQHKSINQQDIQSIHRARSLVKSQRVALSNQIRGLLSEYGIVFPVGLSVLRKQIVELLSGTDRLTPLFIEMLTHHYGTLCHLDAEIEFFDRKIDHIARADERCRRLMTIPGIGPIAATALLVALGDGSSFASGREAAAYLGLVPRQHSTGGRSNLLGISKRGDKYLRSLLIHGGRTVVLHAAKHDDYRSQWITEVAQRRNVNIASVAVANKNVRTAWALLTRNSEYKTTPLAA

SEQ ID NO: 271262 - protein, 447 aa, unidentified
MKKAILTFLIWNQLGKLEIQTEERSIAVKIKPKKNRAVNQNVLIATVDGGKDKHCGYYRCPDGPECKVFDFWNNGRGFQEFWERISSTAEKHGLAEIIIGFESTGPYMEPLVQFLRNKNGVRLVQVNPMHTKRLKELSGNSPLKTDRKDPKVIADIIELGHALTVVIPEGPAAELRRLSQGRERTMERRTALFNQLQCLLAIIFPEFLQVMKDVKTASALYLVRHHPVPQDIVTLGESALAALLREVSRGKLREDRARALFEAANESVGVKEGRDSMLLEIRLMLDMIATSDRVIEGLEAEMIRYLEQIPYSHLILSLKGIGPVTAAGLIGEVGDFTKFRTIAEVLKLAGLDLYEVSSGKHRGKLRISKRGRPLMRKLLYLAALSAVRKGGVMHEWYQRALGRGMIKTKALVAVSRKLLGIIYALVRDHSVYVENYMKQKLILQEAA

SEQ ID NO: 271263 - protein, 443 aa, unidentified
MNTSHPYDLVIGLDRSDTKADLHLIDTRTGQRRSATLDTAPEALWEWLLELRQQHPQARVAICLEQPAVHLIAFLEAYEWIALYPINPITLQKYREAFVTSRAKDDAKDALYLAELLLSHYAKLKVWAPEDSQTRALQELVFHRRAVVDERTGLTNRLQALLKQYFPQALVLCGEELWRPLATRFLLKWPSLQAAQKAKPATLKQFYHLNGSRSTKLLEQRLALVAKAVPVTDQSALIQSFVLRVQLIGRQLQLVQQTIGHYDKQIAQSFSQHPDHSIFASFPGAGPVLGPRLLSSLGSQRERFERAAQLQHYTGVAPVTKQSGGTCHVHRRYLCPKFHRQSFHEYAQISVLWSRWAAAYYLQQRTKGSHHHTAVRALAFKWQRIIWRCWQDHKPYQEKIYEAALCKANSPLVSLLDKIQLGKSPFKSCAKKHDKPLAGSPQR

SEQ ID NO: 271264 - protein, 352 aa, unidentified
MDKGIKLDFSGQHIYVGMDVHKKSWSVSIHTEQFEHKTFTQPPEVDKLTCYLARTFPGATYHTVYEAGFSGFWLHDQFKEKGIDCMVVNPADVPTKNKERAGKTDRVDCRKLARSLRNGEMKGIYVPPRVKVEDRTLVRTRQSMVRKQTRCKNQITSILFFYGITIPEESRWSRRFIHWLESIHMERASGDFALKAHLEELMHLRQIIANLNRSILSLSRTEEYRSDVLLLKSVPGISTLTAMILLTELVDISRFSSLDKLASYAGLVPDIKSSGETEYSTGITFRRNAAMRSLLIESSWVAVRKDPALMMAFNKLSMRMKKTQAIVHIARKLLNRIRFVLKNRQEYVSAVI

SEQ ID NO: 271265 - protein, 400 aa, unidentified
MNAVGIDVSKGKSMVAIMRPFGEVVATPFEIKHTEIELKKLVCILEKLPGETRIVMEHTGIYWQPIAKALHDAGLWVSVVNALLIHKYGNNSIRKGKTDKLDAVKIANYCLDHWLDLDRFTLIDPIRQELKTCHRQYDQYIKLKVNLKNNLITLLDGTFPGLNTLFKSAPRDVDGHEKWIDFAIKFWHRECVCGCTEKSFTNQYRKWCTKAGYRFNEAKAASIYAHAAAQVNTLPMSDAIKRLVILAASQLNTIIETLSVIQNEMLTLASKLPEFPVVMKMFGVGPVLGPQLIAEIGDVRRFHHKQSLVAFAGVDAPPCQSGTFESKNRHISKRGSPRLRKTLFQIMSTIIQHAPADNPVFQFLDRKRQEGKHYYVYMTAAANKFLRIYYGTVRAYLEDT

SEQ ID NO: 271266 - protein, 402 aa, unidentified
MEQDSRRQESRAASRTGELERLYVGLDVHKATIAVAVAEEGRGEVRSYGTIRNTPEAVAKLVKHLGPARRLVCCYEAGPCGYGLQRQLTGLGAACTVVAPSLIPTRPGDRVKTDRRDALKLARLLRSDELPGVWVPDAEHEALRDLSRARERARDTRHQLRQQVSKLLLRLGIVEPSETQRWSQRYWAWLKTVRLEQPLQQVVLEDAIEAVEVATARLTRLEAQVQAAATTGRQAPLIAALQSLRGVGVITAVTLVAELGDLSRFPTPRPLMAYLGLVPSEHSSGGSQRRGRITRAGNSHVRHVLVQAAWHYRHPPRTTRALAKRQAGQPQAVTEIAEAAQERLHRRYRKLAGRKGRQKAVIAVARELAGFVWALARAHAEHQDAPAGAGSVGGPATTERAA

SEQ ID NO: 271267 - protein, 317 aa, unidentified
MTQTSITTAGIDTSKAKLDIAVHGRTERWQIANTSPGWRALAANLAKASVARIGIEATGGYERGVVEYLRAAGFTVLVLQPIQVKAFGRVHLRRAKNDALDAVLIAACAAAIDQPRIAPDPRLAELAGHLTFLEQIEEDIARFKVRLEHVDEPRLRRIVTSDIERLKARRATQIRDIAKRLRSHGDLATRLDLVLSIPGIGERTALALIIRMPELGQVSREEAAALAGLAPFDDDSGTHRGQRHIAGGRGRLRRSLFSAALPAAFRWNRSLIALYARLIARGKAHNSALIACARKLLIYANTVVQRGTPWTERPAVL

SEQ ID NO: 271268 - protein, 359 aa, unidentified
MTQSTTDPNTVIIGVDTHKDTHAAVAINGLGARLGDRIIPTTPAGYQQLLEWAKTFGGVAAFGVEGTGSYGKGLSQFLRRQGQKVIEVSRPCRRGQQRLQGKDDLLDAEDAARQVLAGQATAIPKSSEGAVEMIRILKAARDTAVKAQTQVMVALKAMIVTADAELRAELEPLSTPQLIKACQQLQVGTLDTPMAAMRHALAAMAKRWTQLHEEIEVHTQHLTKLTQAAAPELVQAFGIGTDTAAEMLLTFGENADRVHSEAAFAKMCGVCPIPASSGKTQRHRLNRGGNRQANAALFRVVIVRMRWHEPTKTYVARRTAQGLSKREIIRCLKRYVAREIYHLIRKPRLTPEGSNVCPA

SEQ ID NO: 271269 - protein, 402 aa, unidentified
MNAVGIDVSKGKSMVAIMRPFGEIVYIPFEIKHTTSDINSLVELINSVEGESRIVMEHTGRYYEVLAHQLSEANLFVSTINPKLIKDFDNDSLRKVKSDKADAVKIARYALDKWQNLKQYSVMDELRNQLKTMNRQFGFYMKHKTAMKNNLIGILDQTYPGVNTYFDSPARSDGSQKWVDFASTYWHVDCVRKMSLNAFIDHYQNWCKRKKYNFSQSKAEEIYGKAKELVPVLPKDAITKLIIRQAVDQLNSVSTTVESLRTLMNETASKLPEYPVVMAMKGVGTSLGPQLMAEIGDVSRFTHKSAITAFAGVDPGVNESGTYEQKSVPTSKRGSADLRKTLFQVMDVLIKTHPQDDPVYQFLDKKRTQGKPYYVYMTAGANKFLRIYYGRVKEYLSSLPES

SEQ ID NO: 271270 - protein, 358 aa, unidentified
MKSYVGLDVSLKQTSICVVDESGSVVREGVVISDPEAIAAFVRLNAPGAVRIGLETGPTTTWLWTELKRLDLPVICIDARHAKAVLKMQINKSDRNDAAGIARIMQTGWFKEVRVKDIDSHLVKALLVSRALLVKIKRDLENQIRGLLKNLGLVIGRGKFNVFAVRTEELIEDRPELVAVIRPLLAARKAIEEQVHNLDRRVLKLARHDMQVRRFMTVPGVGPVTALCFTATIDDPTRFKRSRSVGAYVGLTTRRYASGEVDWSGRISKCGDAMLRMYLFEAAGVLLTRVPKWSALKAWGMRLAKRNGLRKAKVAVARKLAVILHRMWIDGTEFNWSKEEASGRAQKIGRSHHRHRPA

SEQ ID NO: 271271 - protein, 356 aa, unidentified
MSHDVKYIGMDVHKEAIVIAVLNGSGKLVMETILETKASSILQFIHGLRGELHVTWEEGTWAAWLYDLLQPQVQQVLVCDPRRNALLKEGSKSDKVDARKLAELLRTGMLRPVYHGENGLRTLRELARSYQTISKDLTRVMNRLKALYRGWGIPCAGTQVYAPRYREEWLSKIPQVGVRRRAELLYQQLDGLQALRRNVRGEFLAESRKHKAAKLLRQIPCIGPIRAGLLIALIQTPHRFRSNRQLWTYSGLGIETHDSAQYRYVGGQLQRSKKPQQLRGLNQNHNHGMKEIFKSAATRASCGTGPFRDFYAALLDKGMKPEMARLTLARKIAAITLTLWKRGERFDAEQLKTQAA

SEQ ID NO: 271272 - protein, 412 aa, unidentified
MEGETVIAGVDTHKDVHVLCLLDGLGRKIWSGGFRADPEGYDRLAEAIGDPGSCVVVGVEGTASYGAGLTRRLVELGYNVVEVLRPKRDKARPGEGKSDPLDAERAARKAASGKGCSVPKSQDGWVEAVRQLYVARRLAVATSTSCVACAKSMLTTAPSALRERFRGRERPKDLMPLLTRRRKAGDALEESVLASLRSVATVWKEARSQVESCDARIRELLEANAPALLGLEGCGTTTAAALVVAAGDNPGRLKGEAAFSMLCGVSPIPASSGKTERHRLNRGGNRQANWALYEIAIKRMAYDERTKRYVAKRTSEGKSRREAIRCLKRYIAREVYRVLMDPNPDGAAPEGPELAKMRKAMRVTQKQAAAELGLSAAALGHLERGKRRSTRLERMYYELLCELQGALPQTAS

SEQ ID NO: 271273 - protein, 412 aa, unidentified
MQVVHPVCCGIDVHAKMLVACLILANGEKKKRTFSTMTAELLQLRDWLVAVQCTHVAIESTGVYWKPVFNILEDALTVILINPEHAHALRGRKTDVKDAEWLADLLRHGLLQPSFIPPPVIRELRELTRYRESVVREQSSVANRIQKLLESGNLKLGQVASDALGVSGRMILKALAKGESDPRKLAALARGKLKEKSLSLEQALQGRLTGNQRFVLGELLSRWEQLEAADARVTSEIDKYVQANPKLARARELLDSIPGIGPRVAEVIMAEIGIEMASVFADAAHLASWAGICPGNKATGGKRLSGRTRKGNTYLRSALVQAAWGASLKKHCYLSSQFQRLVKRLGRKKALVAVAHSLLVIIFHVLQNDQTYTELGGDYFDRRHVEQQRDYYVRRLQLLGLKVTLEKLPQAA

SEQ ID NO: 271274 - protein, 365 aa, unidentified
MLSIGIDVSKGKSTVCGMKPGGEIVYTPFEIQHTREGMSELVSLLRGSGEEVRAVLESTGSYHCPVVAALLENGIFVSVVNSLRMKRFCSQSIRKVKTDRIDAMQIALYGLAYWQELQPTRLPEDTYRELQLLARQYYQMTSILIKAKVDFNAICDQVLPGMQELMNDHAGRHKLSDFVLRYRHTTHILEMGETRFRKDYCKWAEKKGYRNRERMAALIFATAQNGIPVLPNAPSTQIVITEAIRVLHTVEASRDAILTQMQALAKTLPEYSLVREMPCIGDTLAPRLIAEIGDVRRFHSKRALIAYAGIDAPPYQSGKFRANNRHISKRGNRYLRKTGYEVMQSYVMHKPANDPIFMFIEKKTR

SEQ ID NO: 271275 - protein, 354 aa, unidentified
MSQTSNSATAVIGIDIGKNSFHVVGHDARGAIVLRQKWSRGQVEARLANVPPCLIGMEACVGAHHLSRKLASLGHDARLMPAKYVRPYSKGQKNDFNDAEAIAEAVQRPTMKFVATKTAEQLDLQALHRVRERLVSQRTGIINQIRAFMLERGIAVRQGIGFLRTELPTILATRTDALSPRMLRVIEELAGDWRRLDQRIDGLSGEIEALARQDQACSRLMTVPGIGPIISSAMVAAIGTGDVFSKGRDFGAWLGLVPKQISTGDRTILGKISRRGNRYLRVLFVQAAWVVLVRIKNWERYGLKSWIEAAKRRLHHNVLAIALANKLARIAWAVLAKGRAFELTRTDGAGVRPA

SEQ ID NO: 271276 - protein, 375 aa, unidentified
MSNVRFIGLDVHAETIAVAVAEPDGEVRSMGTIPNRPESLRKLVKKLGPVKRLRVCYEAGPTGYVVYWQLTALDVPCEVVAPTLVPVKAGDRVKTDRRDALKLARSYRAGDLTPVWVPDAAHEALRDLVRAREAAKKDQLRARHRLGKFLLRQGRRPPTAMKAWTQTHLRWVKTVHFEHGAHEATLLDYLHEVEHLADRIERLERAIDHAVRTAPERMQAVIAALQALRGIALVTAVTIATEVGELSRFATPRQLMGYSGAVASEDSTGRRIRRGAITKTGNAHLRRVVIEAAWAYRYRPAVGASLRKRQASVSPEVKAIAWKAQHRLHARYRHLTAQGKCKQQTVTAIGRELLGFIWAIGVHVESSGRPSSIAA

SEQ ID NO: 271277 - protein, 433 aa, unidentified
MCPRVHDNSGHVDFIYLREITMNNTISDLDTDLTAVSEAEGNAAQAEAQNASDDTYAQAVQEQLAISRSSADCRYIGIDLHSNNIWLSVIVNEQRPSGPVGKVIFSRSISTQRVDGTLPEDLIKSVLEKFCKDQPHIACVEATYNWYWLANLFEKNGWNLVLADPSTVSEAKTKAADDRKDAEYLADRLRYNALRYAVIMPKELREIRDLVRTRGVAVAQRAREKIIVINKLTNQIGRKITGKELKELIKEHAEFGMEAPMLLNWGLTEAVRKSLNYHLKQVISISLGIQELEEHINAVGKNLRYTKELQKMPGCGPVISSILASEIGSIKRFATAANFVSYCRLASTSRLSNGKRKGLGNAKNGNAYLSWAFTELATLMVRYSEATKRHFEKLMRKYGQLRVKAIRVLAAKLARSVYQCLSKNEPFDVLRCF

SEQ ID NO: 271278 - protein, 411 aa, unidentified
MVGIRHVGIDCSETEHRMVLLSPGGGWEARQVVRNEHGSIQRGFQRLLSRTSGETVRVVLEGLYGFCAPVAEVSLDLGLELWQANSKALDHYRDLEGQPRKDDDRDAFLLARLSYGKMQGCRLAIAPEPETQRLRRISRLHTRLTQARGDFARRLRSRLVEWSPEVVQKSWQGPKWSSRAFLAIMRRWPGFEGLHKARPSTIERVLAKHGTDREEQGVQAQAIQAVARRLSGLEPGAIPLEITCLVAQLDALDKSLKEVDRRMAAWVEAHPIGRKLLEMPGVGHFIAAVLIGEVLPLARAVSEARTATYSGLTPLSRLSVGKGKTILARGVNKHALNACYMSAIAARRKSSLDREYYRKQYLLHQGHPVPHIVANIALARQRMKVMYKLMTTQAHYDKEVLIASHLRRIAA

SEQ ID NO: 271279 - protein, 378 aa, unidentified
MPSETTIHVAIELSVSSWLVATRPPGAEKSRLHHIEGGDTTVLLALIAELRTRASTKLGKPAEVACCFEAGRDGFWLHRVLTMHGIAAYVLEPASILVNRRARRAKTDRLDAEGMLRVLAAWLSGDRQVCSMVRVPTPEEEDAKRPHREREHLVQERLRIENRIEALLFTQGIRKRPSLRSWARDVAELRTGDGRPLPPLLWAELDRLQRRLVLALELIREVEAERAEALAATADDATTQKIAALQRIRGIGPNFATVLVREVFYRSFANRRQLASYVGIAPMPYQSGGMDRDRSISRAGNPRARTTLIQLAWLWLRYQSGSVLATWFRERVGLLHGRTRRIAIVAMARKLLIALWRYVETGVMPDGVEIGTKADATA

SEQ ID NO: 271280 - protein, 353 aa, unidentified
MRLFVGLDVSSFDIKTCILNGEGEKLDSFSVNNDLPGAIALKERLLQRIANQKVEIFKIGLESTSVYSFHPSMFLHYDKELQSFGAKVFLMNPKQITNFKKSYSDMDKTDEIDAFVIADYLRFGRNQMSIVKESQYVALQQLTRSRYQLVRMLTKEKQHFLQHLSYKCNTFSQEVDSSIFGNAMMELFLEKFSLEELADMPLNELSEFLQAKGKNRFGDPKCVASTIQKAVRSSYRLDKVVEDSIDVLLGTSIAVIRTYQQQIKEIEKSIKQIMAGLPQTLESIPGVGPVFAAGIIAEIGQIERFDDETKIAKYAGLYWRKHQSGRFTAENTSLSRNGNHYLGFLAHPLQKVH

SEQ ID NO: 271281 - protein, 417 aa, unidentified
MDVVYRRCCGIDVHKETVAACVLRWEEGGQVRKEKKVFGTMTRSLHELAAWLSQHEVTHVAMEATGVYWEPVWNVLEGQFQLLLINPEHYKGLRGKKTDLKDGERIGELLQHGLLSGSFVPPCEIRALRGLTRHRASLAQERVRVFSRIQKLLEDANIKLASVASDVLGLSGAAMLDAIAAGQDDPKKLAEMARGKLRAKLPALRLALEGRVQAHHRFLLRELLDHELHLQFQLGKIDEEIARRAVPYEKTVARWKTIPGVDQITAWSLLAEIGTNMDQFPSPQQLASWAGVCPGNNESAGKRKSGKTRKGSPWLRRVLCQAAWAASHTKGTYLAAQFRRFAAKRGKKRAIIAVAHSILVIAYHMLKNTCDYQELGGDYFDRINSEGLKRYLVKRLEHLGYKVQLDAQPQPGSTACT

SEQ ID NO: 271282 - protein, 355 aa, unidentified
MQSNKISFKGQNIYVGIDVHLKTWHVTTLTESGYKYSFAQHSDAKELFDRLNKKFPEAHYKSAYEAGFCGFSVHYALTELGFENIVVHAADIPTTGKEKTMKTDAVDSEKIAWSLKRDELRGIYIKDKCFMDDTNLMRLRQRFIMDLSRQKNRTKHLLYTQGVTYPERFHNSKTHWSRNFMKWLREEVELLSEEKMALTLLCDQVENTRMAILTVTREIRRLSTTDKYRENFSLLTSVPGFGLITSMSMLTEFDNNPTRFPNERKFVAMLGLIPTCHNSGEKKVSGEKTNRGNKQLGPLIVEASWVAIYRDYQLGAYYSSCCQSMKPHKAIIKVARKLACRAYAVLKTKTSYVLS

SEQ ID NO: 271283 - protein, 346 aa, unidentified
MVLIGCDYHPSWQQVCWFDRATGETGDEKLVHASGDAEKFYRRFSSPVRVGIEATGNCQWFLELLNRLGHEVWVGDAAKIRASDSRQQKHDKRDARLLLQLLKEDRFPRIWTPTREQKDLRQLLIHRYKLVGLRARVKNELQHLAMNQGVTKKGKLWSKAGEKVLRELPLAPWASQRREDLFKVREMLNEQIDLLDRAVVEAAEKNEKARLLMTQPGVGPITSMAFVLTMGDVKRFPRGKQVASYLGLIPREYSSGGKQHLGSISKQGNRFLRMLLVEAAQAAVRYDPGFRNEYLHRCHKKAKGVAKVAAARKLAIRLYWMLRTNTGYPEVVRVESSSRVAVVGAS

SEQ ID NO: 271284 - protein, 390 aa, unidentified
MVSVLRPFGEVVAKPFSVGHTGSELKELADYLKSLDGETRVVMEHTGRYYEPVARFLHEEGIFVSAVNPKLIKDYGNNTLRKVKTDKADARKIARYGLDNWVELRQHTPMDTIRMQLKTLNRQQGLYSKTKTMMKNNLIALLDQTYPGVNDLFDSPVREDGSQKWVDFATAFWHVDCVRNMSLAAFTERYHKWCKRHGYNFSQSRAVEIHTDAQNLIAMLPKDALTKTMIRQAVDALNAVSKSLEQLKAEMRTLAAQLPEYPVVMAMRGVGDSLGPQLMAEIGDVTRFAHRGSITAFAGVDPGADQSGTHEAKSNHTSKSGPPALRRALFLVMDCLLKTQPEDDPVYRFIDKKRSEGKPYLVYMTAGANKFLRIYYGRVKEYLASLENAD

SEQ ID NO: 271285 - protein, 339 aa, unidentified
MKYTPVGVDIAKHVIQIHFINEHTGEVVDKQLRRQDFLTFFGNREPCLIGMEACGGSQHWARELTKLGHKVRLLQARFVKAFVMGNKNDVMDARAIWMAVQQPGKEIAVKTEEQQSVLVLHRTRMQLVKFRTAQINALHGTLLEFGETIHKGRAAMEREFPEALERMKERLPPYLIMVLENQYNRLNELDSLIEDIEKQLTSVARQNETCKRLLDIPGVGPLIATAAVATMGEASAFKSGREFAAYVGLVPKQTGSGGKVRLLGISKRGDTYLRTLFIHGARAVALVAKEPGPWITELKKRRPASVAIVAMANKLARTVWAITAHDRKYDRNHVSIIPY

SEQ ID NO: 271286 - protein, 308 aa, unidentified
MLTLRFDNTAHGLKLFKKWLTAQHVSFDNNTLLVIENTGIYHRLLWRFCSTHNLQLHIGNAAHIKWSLGITRGKSDIIDSKRLCLYCCKQAEELKATPALNPVFMKLKDLMTSRSRLVAQLHSTKNYLKEIQCTEDKQLLLVLESLHKAAIEGLKKSILKIEEYITKMIKEDAAIYHNYELIKSVPGIGHLTAVYIICCTNNFASKISGKQLASYAGVVPFEHSSGISIKGKNRVHKMANKDLKKMLHLCALTAIKYYPEFSNYFNRKKAEGKNGMSALNAIRNKLVLRVVAVVNKQTPYVDYSVKVA

SEQ ID NO: 271287 - protein, 339 aa, unidentified
MKHTIVGVDIAKNVMQMHWVDPHTGEVVNKPIKRAAFLEHFANRSPCLIGMEACGGAQHWARRLIEMGHEVKLMPAKFVKAFNSGNKNDAADARAIWMATQMNSKAVAVKTEAQQAVLALHRMRQQLVKFRTMQINSLRGLLTEYGEVMARSRVALDKAVAGVLERLSGRLPAVLIDTLREQWNGLEGLDKQIAEIERRLHAWMKQDEACKAVADIPGVGLLTATAAVATMGDPKSFKSGREFAAWLGLVPGQTGSGGKVQLLGISKRGDTYVRTLLIHGARSVLAHAKQPSKWIEQLQMRRPSNVVAVALANKMARMIWAILAHRTSYQQEHVSIKPA

SEQ ID NO: 271288 - protein, 307 aa, unidentified
MDVIIDKGCGLDVHKETVVACVMGSGIKKEIRTFSAMTGDLLRLKGWLIDLGITHVAMESTGPYWKPVFNILEDSFEVILANARHIKNVPGRKTDVKDSEWICKLLRSGLLTASFVPPQAIRDLRDLTRYRQKLIQAVSAEKNRIQKVLEDANVKLSSVASDTFGVSAGKMVRAIISGNVDPVSLADLAVGRLKGKKEKLKEALQGHFRNHHGFMIQASLDHIEYMEKTIAKLDQQINEKLKDYHRERELLASIPGVKEQGSSLILAEIGADMNVFPSEGHLSAWAGMSPGNNESAGKKKWKDNPRQ

SEQ ID NO: 271289 - protein, 380 aa, unidentified
MDKACGLDVHKNSIFACIKDEKGEKIFEKRFGTLTPDLDELRKTLIENGCGRVAMESTSIYWMPIWRVLDSDFSLTLTNPYFIKQLPGRKTDAKDASWIAECLQKNSLKSSFVASEELQQMRQYTRQYRRLTKSRVRLEQQMDNQLQRCNIRFSNYVSNQGKNVSMRKIIRKMIDGARDPEQLCGLVHGRTQNRHGKQVITDSLSGIIGKADIEMLKQCMEQIELLEKQQATCLNHLEELANEHFAEEITLLCTIPGVQKLSALCILAEIGNDMSHFPKATDLVGWAGLRPRNDETAEKVKSRKILHGNKYLRQILVEISWSAGRSGKSFLGKKFKALSKRMKSQKALIAITRKILVIIYNVLKTKKPFDPNRNLQAVKA

SEQ ID NO: 271290 - protein, 297 aa, unidentified
MNIVFLGIDLAKNVFQLCGLNQAGKPVYTKRTGRKELLQTLANIPACLIGIEASTGAFYWQREFEKLGHKVKVISPQYVKPFVRGQKNDGNDAQAIAVALMQPTMQFVPPKSPEQQDIPGFYTGQGSVLSITATATVCQIRGLLLDRGIPIGSAVSRARRAIPLILEDAENGLSSRMRRTIAELYDLFNDLERRIHFFDKEIETVFRQSEACQRIAKVKGIGPKTATAVAAAIGKGTEFKNGRHFAAWLGLVPRQHSSGDRQVLMNMTKKGDKHLRTLLFMVPALSSGLPRITMMVI

SEQ ID NO: 271291 - protein, 369 aa, unidentified
MSDRITYVGLDVHKESIVVAVASGGLRGEVREYGRIANTAATLDRLLRKLGVDGMALRFCYEAGPCGYGIQRRLSAQGQECVVVAPSLIPKRAGDRVKTDRRDATSLAKLHRAGELTAVWVPDARHEAMRDLVRARLDAVHSLRRARQQLSGFLLRQGCHYGRPAWTKLHRRWLAGLKFDQAVHHIVLEDYITAVEAAEVRRDRLTAQIEAMLPDWTLAPVVAALQTMRGMALVNAATLIAELGDLSRFTNPRQLMAYLGLVPSEHSSGASVKRGGITKAGNGAARRLLIEAAWSYRFPARLSRELLLRQENQPRSIRDIAWKGQVRLCARYRRLTRAAKPANVVTTAIARELSGFVWAIARQVTVMAG

SEQ ID NO: 271292 - protein, 304 aa, unidentified
MKILKQSVGIDIAKLTFTACICIRYTDQSQKISDVREFKNSKTGFNQLIKWVAKFIDKNAKVFYAMEATGIYYEPLAYHIHSIQKPVAVILPNKVVYFGKSLNIKDKTDDIDARTIALMSCERRLNEWTPPSAVFKKLRAVTRLHESLLHDKTQNTNRLQQLECGFEPVRLTLRMLKSNIKTLDKQLKQLVVTMEEILKSDVLIWAKVKNLLTIKGLGLKTIAIVLAETQGFALFKNQRQLVSFAGYDVVRKQSGTSIKGKSRISKKGNSHIRSAMFFPAMSASNCNPKLKQVYTRINKLHSTK

SEQ ID NO: 271293 - protein, 453 aa, unidentified
MAKRKKVPKRKGSRNRPTPVINPTAAGIDVGAREVYVAVPQDRDSEPVRTFATFTPDLVELANWLAACGVTTVAMEATSVYWMPLFTILEERGIEVCLVNARHLRRVPGRKTDVLDCEWLQYLHSVGLLRGSFHPPEAVAAVRTVLRHKASLVQMASSHVQHMHKALTQMNLQIHHVISDITGVTGMAILDAVLAGERRPEVLAELRHRTIKADEETLAKALTGTWRREHLFTLRQSLGAYRHYQAQIQQCDQELHELLGNFGSRVDPDEDPLPPTPGRRGDPLGLDLRTEFYRIFGTDLTAIPGIEIHTIQTLFAECGRDLSAFPTAGDFASWLGLCPDNRITGGKVISTKTRKVNNPAANALRLAAQSLHRSPSVLGEYYRRMRYRQGPAKAITSTAHKLARILYTLVTTRQFYDETVLAQHEHQTRARKTRRLKTQAAALGFDLVPVEAA

SEQ ID NO: 271294 - protein, 359 aa, unidentified
MKIVGCDFHPKWQQIAVFDSETGEIAEGKLLNGDGEAEQFYRTLEAPARVGIEACGNSQWFLDLLERLGHEVWVGDAARIRASYVRKQKTDRRDAGHILRLLMEDRFPRLWLPTAEQRDLRQLLIHRHKLVEIRTRVKNGLQHLALNRGLQKQRALWSVRGRAYLEKLSLGGWSARRRQDLLKLLGELDGQVSELDEAVKLAAEEHAQARLLMTQPGVGPITALAFVLTIGEVSRFQHSGQVASYVGLIPREHSSGGKQRLGSISKQGNRFLRQLLVEAAQSVVRLEEGFRKQYQARCHHKAKGVAKVAAARKLAVRLYWMLRQNIGYPEIALIESRPRVPLAGENHAEGLIGRSRIQH

SEQ ID NO: 271295 - protein, 323 aa, unidentified
MNKYKETFGVDISKDVFDLYGSNSGHNQFNNDGKGFGSFLKILPEGAIVVMEATGYYHYRLAQFLYKNHVVVSVVNPLSVKRFIQMKLAKIKTDKSDAKAICDYAMANEVPLYNALTDVQAECLQLFRLLDSYLKKRTATKNKMHGEETLGIPSKFVYRSLKRDRKHLDGEIAGIEERLLSLVKKEQQHQLTLLTSVPGIGPKTALFLIVVTDGFSKFETAGQLCSYVGITPTIRESGSSVRGRSRISKVGNKKLRNLLFLCAFNACKHNRACRELYQRLVNKGKSKKLALIAVSNKLLKQCFAIANSGNPYDPEHVSVLKLQ

SEQ ID NO: 271296 - protein, 366 aa, unidentified
MNTIYIGVDFHARQQTICYLTTETGELVTAELKHQDKAAVRAFYQQFEEPVIVGLEASGYSPWFEAMLEELGREVWLGDATEIRRRARWRYKDDRRDAELIWDLMVHHEFPRLHQPAPQSREILRMLRYRQKLIKVRTMTKNSLQAIAMQAGLAKGGQLFTATGQAEFKAIAMSPVLQYQRDHWYELLKPLNQELLETMKWFKAAAKGDAAISRLRTHPGIGLLTALCLQHTLQPVSRFRNQRKVVAYAGFDPMVRRSADHAIRLGISKAGSRMLRYLAVEAVHTAIRYDEDLKRFYHRLAERRGRPKAKVAVARKLLIRAYIMMRDEIDYAEFRRRAVAARLARRSQGPPSVPEVLIGQSASPGA

SEQ ID NO: 271297 - protein, 294 aa, unidentified
MQKITTVRTGSKNVFKGQLTIGLDLGDRFSSYCVLDENGEIVLEQKLWTTPEAMKQTFGRMPRSRIAMETGTHSPWVSRVLTELGHEVIVAHAQKVRLIVKSRRKDDRLDARTLARLARIDPELLTPVQHRSAQAQLHLAEIRARAGLVSARTALVNAARGLVKSYGERLRKCGTQQVRREITGGLSPGLRGALEPLLREVESLNERIQEYDRRIEKMAKETYPETMLLKQVKGVGDLIALAYVLTLEDPHRFRKSRDAGCFVGLQPGRRNSGESEPQMRISRLENHGACAWLG

SEQ ID NO: 271298 - protein, 329 aa, unidentified
MMANQFKHSTKVGPNVSYIVNYVNELRRLYGQDAEVLCGYEAGCLGFTLYHQLQAHGIPCIVMAPTTVMKEGSKRVKTDKKDAAQLAKALAFRSYRPVHIPTAEDEQVKEYIRMRTDHKVALKKIKQQLLAFCLRHDFRYTEGRNNWTQKHVRWLHSLNPKGLYAEILTEYLLTYEKLVDQIARYDARIEQLGQSDSYQEEVSQLSCFIGVKTLTALSIVTEIGDFNRFATAQHSASYLGLTPSENSSGDKERRGAITKAGNSHVRRLLIEAAQSLAKGTIGYKSKELKRRQSGNRVEVIAYADKANERLRRRYRTLVLGKIRNKMLLK

SEQ ID NO: 271299 - protein, 366 aa, unidentified
MSSVTPAAGPIHLGMDTSKNTIVVGILLPGDEVPVIDRIWNEEGAVRHLVSRLGDPAALRACYEAGPCGFELHRLLASVGVACDVVAPSLIPRRAGERVKTDKRDASRLARLHRAGELTAIRVPAEAEEAVRDLVRARAALLADRKRAQQRITAMLLRHGRVWRSGSYWTQAHEQWIAGQRFGEPALAAALAHYRAALDTRRAELAAIEAELAPWAARPPLAEAVTRLGCYRGIAELTGLVLAAEVVHWRRFGSARAFMGCTGLVPAEYSSGERTRRGSITKAGSEPARTALIEAAWAYRFQPKIGVTLRHRQRDAAPDTLARSWRAQRRLHGKYKTMTARGKPAGVAVTAMARELAGFAWAEMTS

SEQ ID NO: 271300 - protein, 350 aa, unidentified
MIIGVDYHPSFQTIAFFVEETGECGEQELNHSDGQAEKFYRDLKQRGICVRVGMEATGYSRWFERLLAELGFELWIGDPAEIKAKRVKKQKFDREDARLLLRLLRENNFPQIWIPDPENRDLRQLLWHRHRLVQMRTRIKNQLQALAMNEGYRWKKKLFSEPGRAQLEKLALAPWASRRRQELLELLDRMNPTIEELTAAVEQEARKRPEAMRLMTHPGVGPLTALAYVLIIGTPTRFQRGKQIGTYVGMIPCEDSSARKQRLGHISKQGNSLLRFLLVEAAQAAARIHPDWKRRYIHLAMRRSKSIAKVAMGRRLAVRLYWMWRNGCEYSASLEFGSYAGQLEIGNGVK

SEQ ID NO: 271301 - protein, 484 aa, unidentified
MSKRKPSTFERLREGKSLNRQERRELERRLNAVDPGLDVIHPDAAGIDVGDKSHFVAVPAGRDPQPVREFGSWTAALREMAEWLKQCGIRTVVMQSTGVYWMAIHDVLQEYGLEVNLVDARGTKNVPGHKSDVQECQWLLKLHTYGLLRNCFLPPEEIRGVRTLWRLRSQHVADAGRCIQHMQKALIEMNVQLQHAVSDIAGVTGQAILQAMLDGERDPHKLAALRDPRCQASEEEIACHLAGNWREDSLFALEQAMASYKFYGRQMAACDKRLQRYMATLPSRNQEAEPGAVASPGKGKGKSKAKGKGRKPRKNQPAFQLEAELERIWGINATSIDGVDVMTIQTVLAEVGPDLSAWKTEGHWASWLNLVPRRDISGGKVIRHVKLGNHNRVGNAFRMCAQSLIRSESYLGAKYRYLRARLGGRRAVKAMARVLACIFYRMVTRGLNWVKRGSEEFEKKKAQRELQSLQRKARDLGLQLIPAV

SEQ ID NO: 271302 - protein, 355 aa, unidentified
MDNAKYIGMDVHKETISIAVLDSSGKLVMESVIETKGSTVVQFMRGLRGELHVTLEEGTWAAWLYDLLKPYVHEVLVCDPRKNALLKAGNKSDQIDARKLAELLYLDRLTAVYHGEQGVRALKELSRSYLTISGDAVRVMTRLKAVYRSWAIPCAGKQVYAPRYRAQWLGKIREAGVRRRAEFYYQQLDELRALRQQVRRELLAESAKHQASKLLCQIPSIGPIRAAQLIAILQTPNRFRTKRQLWAYGGLAIQTHSSADHRYVDGQLRASKRPVSLRGLNRNHNHELKNIFKGAAIIAATKAGPFQEFYAALVAKGIRPEMARLTLARKIAAITLIVWKKGVSFDAQHLKPQTA

SEQ ID NO: 271303 - protein, 329 aa, unidentified
MYHVGIDVSKVKLDICLLADGLDGKRKTKSLPNGISSAEAVINWLVMQKRDPKQARIVMEATGIYHEHLAYGLHREGLSVSVVNPCRIREFAKGMGILTKTDKVDAYVLACYSSLKQPQEWQPPSEEIRKLRALLQHRDVLLEDKLRTENRLNTLSSTQSTEEVMMSLSLMINHLKDELARIEALISKHVDNHPGLKDDLSLLTSISGVGPQTGLNMLVVLRGNTFESASQAAAYLGVVPIERRSGSSVRGKSRLSKTGPSKLRAKLYMAALTAISKNMHVKNQYERLLLKGKAKMQALGAAMRKLVHLCYGVLHTQQPYSQDFGMVTE

SEQ ID NO: 271304 - protein, 412 aa, unidentified
MTAKDQFAAHVGLDWADKKHDVCVQFKNGDRIFHVIEHTPEALDIWLNELHQRVKGRIAIAVELKKGPVVYALQKYPFVTVFPVHALSLARYRQAFWPSGAKDDPQDAELALELMLRYPNKIKAIEADNPDIRLLQQLVEQRRLLVEDKRRFVNRLINTLKQYYPQPLEWFSHRDSSLFCELIIRWPSLQQLKRARSDTVRHFMNAKGGPAVAYTEQRIASIASAIPLTTDKTVIEANALMATALASQIKLAGNLIRTYDERIESLFNTLPDAELFKSLPGIGPCMGPRMLAALGDNRDRFNSAEEIQNYAGIAPVTERSGQKSWVHWRWQCAKFVRQTFVEWTAKTVNSSYWARLYYQGQREKGKSHQSAIRALAFKWIRIIYRCWKTKTRYDEAKYLLALEARKSPLLKP

SEQ ID NO: 271305 - protein, 340 aa, unidentified
MGHVATIGLDIAKSVFQVHGVDAEGGVVIRQKLTRARLLKFFEKLAPCLVGIEACGTAHHWARELIGLGHDVRLMPPSYVKPYVKRQKNDMADAEAICEAVTRPTMRFVPVKSPEQQSVMVLHRTRSILIRQRIQISNAIRSHMAEFGMAAAVGRQGLHSLIEVVHDAADERVPVEARGCLAMLAAQLQLVNEQILETDRLIRTNARSTEIGRRLMEIPGVGPLLASALVGTIADPRAFKTGRNLAAWIGLVPKQNSSGGKERLGGITKQGDRYLRQMLVVGALAVVRYAVRNGTRRPWLVQLLARRTPKVAAVALANKTARMVWAIMTSGERYREPLAA

SEQ ID NO: 271306 - protein, 337 aa, unidentified
MEDIIYDHYIAIDWAAKNMAIARMTKKSNKITAIDVPSDIAELQFYLKNLKGTKILAIEETTTSQWLYTELKDYVDKVLICDPYRNSLLQEGPKTDKIDATKLVQLLKADLMKEVFHSTDKFIYLRRIVSGYEDLVKSGVRLKNQRYSMLRVCGKSGYEKKGIKLASRDEQYVLECLDRQTQNYEEEKKGYEKEFARLARKHPEIRHQKSIPGIGLINAVKIVARVVTPYRFSGKGHYLSYSGLIKHEKMSGGRSYGKKNPRYCRMMKCVYKSGVIAAIGENNPINDYYEYLISEKGYPAYNARNKACRRLAILSFGIFKSGKKYKPYRRDHVKKGK

SEQ ID NO: 271307 - protein, 457 aa, unidentified
MEQPTRFIGMDVHKDTIVVAVTTAGDTGKGTPYGTFPNSAAALGKLIKRLRQAGSGSLKFCYEAGPCGYGVHRTLTRLGEECMVVAPSMIPRKSGDRQKNDKRDADGLAVLHRGGLLTAVWVPDAAHEAMRDLIRSRLAAVRAVRTARQQLSAFLLRHERTYRGGGKAWTKAHRGWLADQSFAQPAQQIVLEECIEAVRLGEQRRDRVDGYLRAQIETWSLFTLVQNLGALRGLDTIASAGLAAAIGDPSRFASAPDFMAYLGLVPSEHSSGPKRRMGAITKSGDIHARTLLIEAAHSYRFPARVTRRQLAGVDTVPEAIREIAWKAQTRLCQRYRHMVAKGKPTPVIVTAIARELAGFVWSIACITSDPPAKTPAAATTSDGASPTQSTSQSRAPRRQPLKVTTRHATRPGQTGGSIELRYVTVDRPHPEADNPKASTPAARTRRSAAASARGNVI

SEQ ID NO: 271308 - protein, 290 aa, unidentified
MDGSSEQPQMTAGLDLGDKYSYLCLIDQESGEVIEEGKLRTTPEAFRRRFGSEQPPMRIAIEAGTHSPWASRVLEECGHEILVANARKLRLIYANKQKTDEIDAENLARLARVDPKLLYPLKHRGEESQAHMALIRSRQALIGCRTQLVNHVRGVVKSFGARLPKCPARSFHKRASEHIPEALWPALGPILEQIGSLTERIRDYERQLERISKERYPETDLLRQVEGVGTLTALTFVLTLEDPYRFEKSRSVGAYLGLVPATDQSGERDPQRRISKEGDEMLTRIIHEGS

SEQ ID NO: 271309 - protein, 435 aa, unidentified
MEQIIIGVDPHKLSATIEVVDKHEKRLGSGRFTTDQAGYAAMRTYAKSWPQRMWAVEGANGAGRPLAQRLLEAGEQVVDVPAKLAARVRLFDTGHNRKTDALDAHSIAIVAVRTKTLRVLKVDGELEALRMLTDRREALTRRRVQSVNRLQALLAELLPGQAKKDITPMQAKGMLASVRPRDVAGKTRRSIAAEELAELVAVDAKIKKATAELKSIVLARGSHLMEHHGVGPVVAARVLADVGDVSRFADRNRFASWTGTAPLDASSGEQNRHRLSRAGNRRMNHMIHIAAVTQIRLDTEGRAYYRRKRAEGKKPMEALRCLKRRISDGIYRQLIADQQPSAATRGTGPGGHCGASQESSAVDLPPPIDTSDQPLPGPAEPTLPGTKPPANPCAASAPRPSRRRAGAVKVQRPTGRTTLTATSAGAHSAAPKPPS

SEQ ID NO: 271310 - protein, 366 aa, unidentified
MKKSSTLAIEGMQIFKDNQLTIGFDLGDRTSRYCILNEAGEVILEQELPTTPKGIEQVFRTIPRSRIALETGTHSPWVSRQLTQLGHEVIVAHARNVRLISESSRKDDRLDARTLARLARIDPGLLSPVRHRSAKAQIHLTVIRARAVLVSARTALVNAARGLTKSYGARLPKCGSEQMNREITKDLNCELREALNPLLEEIESLNARIAEYDTRIEQMAKEVYPEVARLKQVKGVGPLIALTYVLTLDNPHRFRRSRDVGCFVGLRPGRRNSGMSEPQLHISKEGDRYLRTLLVQGAHYILGPFGQDSDLRRWGLKLSERGGRNAKKRAVIAVARKLAVLLHKWWVSKEVYEPLRNSRNQIAQVA

SEQ ID NO: 271311 - protein, 422 aa, unidentified
MTDAISELIVSLDRSDKTAALALLHVQTGTVEQSVISLQPEDLEGWWTQLQAKHPKARLIVAFEQPAPNLVAFFAARQPAAIYALNPSATWAYRQSLVVSRARTDRSDAYHQALYILNHRHDLKPWAPCPGHVEQLDRLCQGRRKLVDTRTGLTNRLQAVLKRYYPQALCLMHEDLWRSMNLAFLRRWSSPQALKKAPLSTLKAFFHQHGSRSQARWETRQSIVQNLVPLTPQEPLPDLLEVSAIVEQLEVLNKSLRRYDQTIAEHFAACPDRALIQALPAAGPALAPRLYVAFARYADHCALAEDFASAVGVAPVTDQSGKMRKVHRRLRCDKHTRQSFVEWAKETIKHSAWARAYFEQRKAAGHGFQATLRSLAYKWIRILWRCWKEHTPYDETLYLAKLRTKASPLLKYLPELNTPKAA

SEQ ID NO: 271312 - protein, 402 aa, unidentified
MAYDFVIGMDVGKYFHHACVLDPQGRQVLSKRINQHEGSLRKLFGKFLANDAEVLVVVDQPNNIGRLTVAVAQAMGADVRYLPGLAMRQLSRIHVGNSKTDVRDAYVIAHAGLNLPDALRSVDRVEEVFLQLKVLNGIDEDLARAYTRLINQMRSALVGTYPAFEHVLRGQMIHRKWILHLLAKYGGPTKIRRVGKARLTAFARGHRARNPEPVIDAMLAAIHGQTVSIAGAEYAELGVAMSAKDALAKLEHRKEIEAQVLELIQDIPQTEILLSMPGIGPRSAAQILMTVGDMSDFPNAAHLASYAGLTPQTNQSGTSIMSNSPNRAGNKKLKNALWQSSFASIRFHERSRQFYERKRKEGKRHNAAVVALARRRLNVLFAMMRSGELYRDIPTAQEAAAA

SEQ ID NO: 271313 - protein, 372 aa, unidentified
MKQNTTELENPRRRVVRKNKQRELTIGVDLGDKTSRYCVLDREGNVLFERSTATTKKGLAQAFASMGASRIAMEVGTHSPWVKRLLESWNHEVIVANAHRVRLITESTRKDDRLDARKLARLARVDPELLSPIRHRSEGAQAHLVMIRARAVLVEARTKLVNSARGVTKSFGERLASCDPDQMRVKCLVGLPSSLQSALQPLVTAVESLTRQIHEYDDKIAQIARSGYPETARLRQVTGVGELIALTYVLTLEDPQRFRRSRDVGGYLGLRPKRRDSGASRPQLRITKEGDVYLRMLLVQGAHYILGWHGVDTDLRRWGLKLAARGGKNAKKRAVIAVARKLAVLLHRLWVTGARYEPLRHSQIASSLQVAV

SEQ ID NO: 271314 - protein, 342 aa, unidentified
MDHFAGLDVSVKETSVCIVDDTGKIVREVKVASEPEALLAVLKNPAYHFKRIGLEAGPLSQWLCSALAEAELPVVCVETRHMQAVLKAQINKTDRNDARGIAQMMRVGLYRPVHVKTLRSQKLRMLLTHRKLLQSKAIAIENDLRGTLRNFGLKVGMVGKAKFEARIKELVENLPDLAILIEPLLIVRRALREQVVILHRRLLAIVRDDAVCRRLMTTPGVGPVVALTYRATVDVPARFRKSKSVGAVFGLTCAKYQSGEIDRSGRISRCGDEMMRVMLYEAAQSMLRSKKWSWLKAWAMQIARRRGMKKAIVALARRLAVIMHRIWVDGTEFRWTREAAAA

SEQ ID NO: 271315 - protein, 344 aa, unidentified
MKDVRILGVDLGKNSCSIVGLDGAGRVLLRRRTRREGVIALAAKLPGCVVAMEACCGAHHLGRLLVEQGHEVRLMSPEYVRPYVKAQKNDDRDAEAIAEAATRPTMRFVALKSEAQLDVQVLHRVRDRLVGQRTSLTNQIRSILLERGIVVPQGRRSLLEALAVLSSEPDGRRVGTRVQRLLDDMLDQWRALDARIKALDDEFAEMARNDPAARRLATIPGIGVLNATALVAAIGDGRTFSRGRDLSAWLGLVPHQATTGGRPKLLGITKRGSKYLRKLVIQGARAALPSLARTATPLGGWLRGLLARAHGNTVVVALASKLIRIAWALLRNETRFVAGGAAVA

SEQ ID NO: 271316 - protein, 398 aa, unidentified
MTESSDYESVQVFIGVDVGKDTHHAVAINRSGKRLFDKALPNDENKLRSLISDLKQHGQILLVVDQPATIGALPVAVARSEGVLVGYLPGLAMRRIADLHAGEAKTDARDAAIIAEAARTLPHALRTLKLADGQIAELSILCGFDDDLAAQTTQANNRIRGLLSQIHPALERVLGPRLDHPAVLDLLQRYPSPEKLASLGEKKLAAQLCKLAPRLGKRLAADIAQALAEQTVVVPGTNAAAVVLPRLALQLITLRKQRDEVALEVEQRVLAHSLYPVLTSMPGVGVRTAARLLTEVACRVFASAAHLAAYAGLAPVTRRSGSSIRGEHPSRRGNKALKRALFLSAFAALRDPISRAYYTRKMSQGKRHNQALIALARRRCDVLFAMMRDGTFYTPQAS

SEQ ID NO: 271317 - protein, 450 aa, unidentified
MKVFIGIDIGKEYNYASFLNNEGIEIDKRFKFKNNHLGFLSFKDNIDKLTYDCNFNYDDVLIGFESTGHYWINTDWFITEKLNIKTVMVRNDAVRHTRALNSQGKGKNDSLDSRTIAECLKNGYYFDVQGRKEDYIVLRRLTRERSELEKEIARYKNRFRAWLDVNNQIFLENFSNVFSAGALALLKVYPSPLDIIQDSYLEVREKLKEVGYKRTNNTFKIYYEEARTYKNIINGITYADRLEINEYIEALEMYMKKKESLDERIEALMNYLEGKVYNSLSQVKGMPKAQVASLLAEIGNVNNFKSARHLISYAGLNVQGEGSGKNKGYSWISKTGNRRIRKEIYVITFTLVKHNDYFRGLYCYYKSYKRPNEKSNKAMLIALACKILRVIYGMLKYNVEFDLNEMLKNYDFRNINKEKFIDEFLGNSEKKQKIISQEIENIFLSNRKSN

SEQ ID NO: 271318 - protein, 352 aa, unidentified
MTTITTIGLDLAKKVFQVHGVDAEGKVVVARKLRRKEVLAFFAKLPPCLVGMEACGSAHYWGREIAKLGHTVKLMPPKYVKAYVKRGKTDAIDAAAICEAVTRPSMSFVPVKGIEQQGLSTLHSARSQLIGQRTQLMNGVRGHLSEFGIIAARGLLGLAELAAIVRDESDQRLPVTARAALMVLVRQIEAVSAEIAALDTLLRKENKASELGPRLETIPSVGPVIASALRARVTDAKLFENGRHLSAWIGLVPQNDSTGGKVKQNGLSKKGDRYLRSLLVNGAMAVVQQALIRPNKHPGVAKLLGRMPPKQAAIAIANKTARIAWAIMVKGGVYEVGHRAPQYRAQACAATG

SEQ ID NO: 271319 - protein, 346 aa, unidentified
MLYVGLDLSRKRLDVCVLDREGVSVEVCVVPPDADGLAGLVRRLDRYGLPVVAAIESMTGSRFVRDELAERGWRVDVADAARVKGLAPLACKTDRIDAWVLAELCRRDLVPAIWLPSLQVRDERERARFRMHLVGHRTALKNRIHQTLLSFGQPRPVSDLFGARGRDLLERLDLPPAWSGSVQASLRLIDELDREISEIERELAGSGADHPYVSLLTTVPGIAWVLGYTIAAEIGDINRFASPAKLAGYSGLCPRVYQSGERDRRGPISKAGPKYLRWALLEATTHACKHPAYAARYQRTKTRLGRQRGPKVAQVELARRLTEAIWHMLTRNKPFAPAGASQALAA

SEQ ID NO: 271320 - protein, 335 aa, unidentified
MTKVMDAVSVGIDVSACTLVVALERDHQPGRQRREFPNTAAGHQVLVQWLSKSATAVQVCLEATGLYSLDLALAIHRAEGIEVMVANPRAIADFAKALLQRSKTDQLDAEVMLEFVRRMPFVPWQPPKPHRLDLRALLRRITGLKLASQQEKNRLHSVSQAAEITPLVRKDIQSHLVQLERHIEKLEQQAEAIVQADPELAQQFRHLVSVRGIARVSALHILAELVVLAPDMTARQWVAHAGLDPRHHDSGPSIHKPARISRAGNRYLTAALFMPALVATQHDPNIRAFYQKLVDRGKTKMQAIVAVMRKLLHALHGMLRTDSDFVGEKFYVIPS

SEQ ID NO: 271321 - protein, 428 aa, unidentified
MSQEDGTRLEEFRQFRKEVRGSSEYLLVGIDIAKDKHYAFFGTAQGKTLLRRLVFENNLEGFRKLLAQARRLRDQNGLRRMVFGMEPTGNYHKPLGEHLIECQHLVVLVSGVAACENRKTLDGRWDTNDARDAANVADLMSQGKCLFYEYPVGPLQELRNLLSLRRRFKRVEHGYQVRIRNHLLAKYFPELDRYYKGSSPTDLAIVRWCLDPSVIAGLEYKRFAEMVSSRRGWYSQEKRLQTIWKLAVESVGCEAGEAVEFEAKVMVEGLKQLRESMGQIEEKIQEICSQFSEYECLLSIPGFGPDVTSKVLGAVGNPHRFQNGRQVLKLAGFDLCAKRSGKSSESAVPVISRRGKADLRNGLYQAALIASIKNPGFMAYYTEKLRGREREPGIKFKMRVKLAAKLLLIAWTLMKKKESYNPDYLVTE

SEQ ID NO: 271322 - protein, 320 aa, unidentified
MQSVCGIDVSKDRLDIMVLPEQQYFSVRNDAAGWAELVERLRGLSISAIGLEASGGYERGAMRALLAAGMPARQVNPFKLRQFARASGVLAKNDPLDARMIASFVAIMPTQPAQLRAPAVERLAEMLAVRRQLSAEKVAAENASRLLEDPMLQRLSRRRIRRLAADIDMLDRHLAEIVGADTALAHRYQLLTSMPGVGPVLAYTLIALLPELGRMSRKQVAALVGVAPYAFESGRFKGRRCIWGGRAPVRNALYMGAMSASNWNPPLRAFHDRLKAAGKLPKIVIVAVMRKMITALNAMVRDDVVWADHLSGRHSVPTAR

SEQ ID NO: 271323 - protein, 412 aa, unidentified
MAYKVAGIDVHKKVLMVVVCQSSDPDRELERRRFGTTTKELRRLSVWLREQGVQEAVMESTAQYWKPVWYELEPHLRLNLAQAFSNRAPRGRKHDFADAARLVRRLVAGELILSFVPKPEQRLWRTLTRTKVQLTREQSRLQSQLEGLLEEMRIKLSCVLSDLLGVSGRRILRALAKGETDPQKLAALGDHHLKCTTEQLVEALTGNPQPIHLELLALYLDRYQMLVEQIEKLDQLIAQALKPHQEAVLRLALVPGFAADSAQQVIAEVGVEASTFPSAPQLAAWVGTCPGQEVSAEENHSSRSAKGNKYMRRILNQAAHAAVKKKGSHFQSVFRRLLPRLGSKGAVWAIAHRLCRVVWKVLHEKVAFVEQGSEPDPKRKRQRAQALLRSLRKLGYEVAITPVIPTAAEAST

SEQ ID NO: 271324 - protein, 365 aa, unidentified
MIIIGVDFHPEFQQIASVDSETGEFQEKRLAHPAEAEKFYRALVGQKVRVGMEASGHARWFERLVAELQFELCIGDAAEIRTKRVRKQKTDRQDAQLILRLLLEDRFPQIWVPSWENRDLRQLLWHRHRMVQARTRIMNQLQAVALNEGLRCKKKLWRERGRQQLESFRLAPWATRRRRDLLELLDRLTPTIAELSQAIEQEVEKCPAAQRLRTHPGVGSLTALAFVLIMGEVNRFRCGKQVASYLGLVPLEESSGNRRRLGHITKQGSAMMRFLLVEAAQVTVRSLPEWRNKYLHLVLRRGRKIAKVAMARRLAVHLFWMMRKDWNYQQLKKFGSHAGEPGNRHGDPETTEILIGHPAPHSRGV

SEQ ID NO: 271325 - protein, 364 aa, unidentified
MLAEDVPKRFIGLDIHKKYFVAAGVDKKLNQLFISREVPMRYLERWARKNLTADDAVVVEMTTNTYLVHDTLLPLVHSVTVVHPPHVALIVRAQVKTDRKAAFSLAQLHAAGLLPGVWIPPLEVRELRALIAHRRKMVKLASIAKCRLHAAAHRHGIDEPEGFEPFSDEMRVWWEALKVSPLEKRCLLSDLATLDFARGQVQDIEATIKELAAQDEQLPLLVQVTGIGLLTGITILAAIGDISRFPSAKQLVGYAGLGARVHASGETYATGRITKAGRKELRTAMVEAAHHAVQDHPYFKVEYQRLSRSIGPKKAMVAIARKLLVMVWHLLAERRPIGTPIPARWLARCSPLHTGSGQKTCRTG

SEQ ID NO: 271326 - protein, 426 aa, unidentified
MGATEIFVAVPADRDPESVRSFPTFTQDLHALADWLQQCRVDTVAMESTGVYWIPLFQILEARGIEVHLVNAQHVHHVPGRKSDVLDCQWLQYLHSVGLLKASFRPEHAVCEIRSLMRHRESLVQMACVHVQHMHKSLDQMNLQIHHVISDITGVTGLAIVDAIVAGKTNPQELAKLRDHRIKASIETVTKSLVGDYRPEHIFTLKQSLTAYRYYQQLIADCDQEVQQRVQAFDTKNTKDDDPSATAESSNTSNPFPARFDLHSHLERIFGVDLTLIPGFECLRIQTIFSELGADLSKFPTDDSFCSWLNLCPKDGFSAGRRIRAPKLKTKNRVANAFRLAAQSLQNNKSYLGDYYRSQRARHGAPKAIKNTAHKLARIFYHLVTTRQAYDESVFAKLETRNNKRRLNKLQSLARQMGYSLVEANA

SEQ ID NO: 271327 - protein, 527 aa, unidentified
MAVRFKSSIRRKARPHVLHKPRGVIHPRVQAVGPERFGILCVDCAKARSKIMLADFYGRVLIEPTTVEHNRISLDAAVRSVRGAMAQHDLKDLIVVVERTGRYHQIVQRTFTKAGFEVRILHPFATKQFRQPANPGNKTDDTDLSAIHRAAAAGFSLSEHKPDPLLVCLQLLARHRRTFVRKKVDIQLKMLEHLEAYMPGYSRCVYDLFDSDVAMWVARNVGSADAIVSAGVIDLVRRLSQAGIRKNIPVVEKIVAWARSAPPADEPAALHRRFFTELDEERVSKLRSIRAIEAELAQQLVLTPYVLLLSIPGISVVSASEFAGEAGPMERYRSARAISGRAGLYPSRYQSDQVDRCDGKLIRCANRDLRYALMVIADNLLRCNEHFRILGASWRLNGKDPRDVRVKVAGRFCRIAYQVVAGRQVFRHPCARERDYILEKLIAFAADHEIPPEQLQRILDAATDQLPPAACQEEAIPLVEKLARVRKHRGAGPQSLGEILPEVLARLGVALVRSNESGEADLTERPS

SEQ ID NO: 271328 - protein, 476 aa, unidentified
MVVPNEESKKPAKIRKPAKTRKQPERSLRVPVPASTAPLEVINPDAAGIDVHSDMHMVCVPADRDANPVRRFGANTADLHEIVAWLKKCRIKTVALESTGVYWIPLFELLESEGFEVKLVEPGQLSRCGARPKTDVLDAQWIQRLHSYGLLLGSFRPPDSVLALRAYWRQRQMQIRYAASHVQHMQKAMEEMNVKLTEVVSDITGVTGMSIIGAILNGERDPIKLAKLRDEHCRSSEDQIALALQGTWRPEHLFELRQAYDLYQFHHQQITECDQQVQAELARFPNRAGEKTRAHKPRKRGRKSNDVRFDAAGPLFQALGVDLTLIEGIDVGTALVILGEIGVDVSRFPTEKHFASWLRLCPPRDESNKTKKRRGHRKATNRVTIALRMAARSVGKTMTPLGLFYRRIRSRIGGLGAVKATAHKLACLVYRMLKYGQEYVVQSMEEYEAKVKANALKVLQRKAAAMGFQLTPSPTP

SEQ ID NO: 271329 - protein, 327 aa, unidentified
MNRIIGIDVSKHKLDCGYFVNLETGKVKTKVWPNDAAGHAQLIDWAQRQSGAQIEALTFVMEATGVYHEALAYALHEAGATVVVANPAQIRDYAKSLAVRTKNDRKDSLVLARFGETQSWRAWRPEPKEIRELRQLLARHTAVQNDLQRDRNRQEKAEVSRAGEQVQYSIGLLIEALEQESRRLEKLIDDHIDRHPRLKHDRELLETIPGIGPVVARHILALYHSRDFRSARQMAAYIAVHPIEHQSGSSIRGRPRMSKAGNAMLRAKLYLPAGVASTYNPTLKAFYQRLINKGHAKKSALGAVMRKLVHQCFGVLKHQQAYSPTAA

SEQ ID NO: 271330 - protein, 338 aa, unidentified
MNIVFLGIDLAKNVFQLCGLNQAGKPVYTKRTGRKELLQTLANIPACLIGIEASTGAFYWQREFEKLGHKVKVISPQYVKPFVRGQKNDGNDAQAIAVALMQPTMQFVPPKSPEQQDIQALHRARQRIVNHRTATVCQIRGLLLDRGIPIGSAVSRARRAIPLILEDAENGLSSRMRRTIAELYDLFNDPERRIHFFDKEIETVFRQSEACQRIAKVKGIGPKTATAVVAAIGKGTEFKNGRHFAAWLGLVPRQHSSGDRQVLMNMTKKGDKHLRTLFIHGARAVVRVATNNNDGHMNQWVNQLKERRGFNKTTVAVANKNARIIWSMLRNETGYQVV

SEQ ID NO: 271331 - protein, 411 aa, unidentified
MDVFCGIDWAEGHHDIALADRDGQLLARRRISDDAAGLAALLGLLAEHGDSAEDPIPVAIETPRGLLTACLRATGRPVYPINPMAVARYRDRHSVAGRKSDHGDSFVLANVLRTDMHAHRPLPADSELAQAIAVLARAQQDAVWTRTGAHNKLRSHLREYYPAFLAAFAGSRGGIMRPEARVILAAAPTPAAASALTLAQLRGLLRKAGRSRGIDAEATRLRGAFCAPQMRQLPLVEQAMGRQAIALLGQLDAACAAADDLEQAVIESFNQHPDAGIITSFPGLGTLTGARVLAEIGDDRSRFSDAKGLKAYAGAAPVTRASGKTKAVMHRRVKNQRLAAVGYVWAFSAITASPGARAHYDRRKDAGDRHTAAQRNLFGRLLGCLHTCLVTGQHYDEHIAFPARTKLPAAA

SEQ ID NO: 271332 - protein, 407 aa, unidentified
MEVLHSRCAGIDVHKDVVVAAVRCVSSPAHREVRSFGATTRELQALSDWLESHGCTHVVMEATGVYWKPVWHLLESHFELVLANAQHVKNVPGRKTDVADAMWLAELLAHGLVRGSFVPPAPIQELRDLTRTRKQLVRELSQHVLRIQKVLEDANVKLGSVLSNVIGKSGRAMLSAMIQGETDPEKLANLAVGHARKKRPELIESLRGRVTPHHRNMLRLHLGLIDSLQAAIAEVDTSVGKALEPIQARATLLTTMPGVSDIVANVLVAEIGVDMSRFPSPGHLVSWAGLCPRNDESAGKRRTTRVRKSGTWLKTTLVTAAWCAVRTKNSYLRAQFLRIKSRRGAKKAILAVAASMLTAVFFMLRDDLPYEDLGASHFDRHDKRKTISRLMRRLQDLGCEVEIKHAA

SEQ ID NO: 271333 - protein, 418 aa, unidentified
MTDQITIPQKRFIGLDVHKHYLIALGVDAELNVVLPAQRVELFRVEAWMKKTLTKQDAVALEMTTNTWEIYDELSPCAHSVTVVHPPHVALITRSQVMNDKMAASILARLLAKGLLVSIWVPPVEVRELRALVAQRSKMTRLATQAKNRLHAILQRHHIVPPEGNLFHADQTEWWCALPVGKLEKINLQSDLDTLRFAETQLTRLASTMNQLAVKDERVTRLIHLPGFGAVVALTVLAAIGEIARFEDAKHLVGYAGLGARIHDSGLTTRTGRITKAGRRDLRAALVEAAQVAANSHPHWKAELARLEPRLGRNKAIIAIARKLLVAVWFVLSKQTTDRFAQPEMVARKLMQFAYKVGKHNRPVNQSAAQFIRQQMDALQIGADLSAIPWGTKNRSIPLPPSALLENKMSDVPNTQPC

SEQ ID NO: 271334 - protein, 350 aa, unidentified
MARKSNATAVTLGVDPGKNTFHLIGLDARGEIVLREKVARDRIVARLANVPPCLIGIEAGMGTHYVTRELLAVGHDVRQVPPAYAKPFRQTHKNDFRDAHAIAEAVQRPTTRCVPAKTDEQLDLQALHRVRYRLVGQRTAIINQIRSFLLEHGITVRQRLHWLRHALPDILAQRTDVLSPRMIRILADLAQDWRRLDERIDAVTDEIEELSKNTDACQHLMTIPGIGPIISSAVVAAIGNGTAFTRGRDFAAWLGLVPKQMSTGDRTILGRITKRGNRYLRTLFMQAARVVLVWPSKWMKHSFGPWLAAAAQRLHHNVLATALANKLARIAWTVLAQHRAYEPRVGAGAA

SEQ ID NO: 271335 - protein, 427 aa, unidentified
MKKADLLSTLFVGIDISSRENVVCFLDFQSQKPLRSFAVSNNQPGASELAQKIVEFFSEEHELRQVVVALESTSYYGIHIANFLSSSSLLMPFHPLVYCLNPKMISNYKKSFIGLGKNDYIDAFVIADFARAGRITSSPWRGSQFLALQRLTRHRLHLAHSLTREKTYMLSNIFLKFSEFAMVEPDSQPFANNYGSTAASVLTDFLSTDEISTMPLEELVQYIGQKGKKRFLNPERTAELLQKAARDSYRLDKCLYEPLTISIASSFNLIRAYEAEMKTVNTAIVKAVRGLNPNAYNILLSIPGIGPVYAAGILAEIGYIDAFNSQEALAKYAGLTWRENQSGRFRADDTTLTKAGNTYLRYYLLEAVSHVKNLDANYAAFYQKKYDEVKLHQHKRALALTARKFVRLVFGLLAKNQLYSQSRVSQI

SEQ ID NO: 271336 - protein, 355 aa, unidentified
MQSNKISFKGQNIYVGIDVHLKTWQVTTLTESGYKYSFAQHADAKELFDRLNKKFPGAHFKSAYEAGVCGFSAHYALMGLGFENIVVHAADIPTTGKEKALKTDAVDSEKIAWSLKRDELTGIYIKDKDYMDDTNLMRLRQRFIKDLSRQKNRTKHLLYTQGVTYPERFSKNGTHWSRNFMKWLREEVVLLSEEKRTLMLLCDQVEHIRKDILAVTREIRRLSTSDKYKENFSLLSSVPGFGLITSMSMLTEFDNNPMRFPNERKFVAMLGLIPTCHDSGEKKVSGEKINRGNKQVGPLIVEASWVAIHRDYQLGCYYTNCCQSMKPQKAIIKVARKLACKAYAVMKTKKPYVLS

SEQ ID NO: 271337 - protein, 464 aa, unidentified
MPRAERAKRNQKRRHEPVKMELPVELKNVNLNAAGIDIGSRRHFVAVPEGRDTVSVRQFGVFTADLEEMAEWLYQCGVTSVAMESTGYYWIPVFELLERKGFEVKLVDARQTKNVSGRKSDMLDCQWQRELHTVGLLKGAFRPPDDVCVIRGFMRQREMLVQASTMHIQHMQKALTQMNLRLNNVVSDITGVTGTKIIKAIIGGERDPEALASYRTKECHNSQKVIAQSLLGNYRVEHLFALQQAFELYETYQQKVKDCERELMKVVQQQPHKTEDEPPPLERKLRTRDKVRGDVDVRSELYKQTGVDLYRVPGLGPETLLTLSGEVGTDMTPWQTEKLFSSWLGLCPGTKESGGKVLSRRSKRSRNRAAAAFRIAAASLRSSPTALGAFYRRIRARGGEAKAVTATAHKLAKIYYRLLKYGEQYVEAGEKAYEERYQQQRLKALSKQAALMGFVLVAATVAQA

SEQ ID NO: 271338 - protein, 457 aa, unidentified
MRKSTQKQPAARKQSSFPLLNPNAAGIDVGAREHYVAVPIDRDAQPVRHFGAFTKDLHSLAQWLKQCGIKTVAMESTGVYWIPLYQILESYGFKVKLVNARHVKHVPGRKTDVQDCQWLQQLESFGLLTSSFRPEAKICVLRSYMRQREMLIRDASRYIQQMQKALTQMNLKLQHVISDLSGHTGLRIVRAIVAGEREPGKLAALKDRRIKSDVATIAKALSGDYRAEHLFALKQTLELYDYYQQKIAECDAEILKEMQTLETRGSAGVVLKRKPRSRHNAVSFDSQAELYRIMGVDLTCIDGINESTAQLILSELGLDICQKWPTEAQFTSWLGLCPNNEISGGKLLKRGTRKVVNRVANALRMCAQSLLKSKSALGAYARRMRSRKDTPVAITATAHKLARLIYRTLKYGQEYVDAGSDLYEARYTATLVKSLQRKAKSLGYQLVSYQTLEAVVP

SEQ ID NO: 271339 - protein, 403 aa, unidentified
MKNLLCQNVGVDVSKDSLEVTFSTLEMDRRVKVKATRKFANTPAGFKQLQRWLESKRAAQVELRLLMEATGVYYEQLAWFLFQQGYQVSVVLPTKAKRYLQALGHRSKNDKIDARGLAQMGLEQLLELWQPLSPNIYQLRLLTRQLEEFTNQRTVCLNQLHALHHGALVVKQVERNLQKMVRVLENSLQELEEAIGELLYQDPLLAERVDKMLSIKGVGLKTVAVLLAETNGFATFERQGQLVSYAGYDVVEHQSGLRAGRTRISKKGNAHIRRAMHMPALSAVRFQEPRFVALYERLVKRGKTKMQAYVAVQRKLLVLLWTLWRKNEAYDPRYGQQPAEPKNNIQIQEAGASLSGVSAADKDAITQETQPETAEKEIAPAQARATQDELPVPVGPGALFQVE

SEQ ID NO: 271340 - protein, 356 aa, unidentified
MSRDIKYIGMDVHKEAIVIAVLNGSGKLVMESIVETKASSILQFIHGLRGELHVTWEEGTWAAWLYDLLQPQVAQVLVCDPRRNALLKEGNKSDKVDARKLADLLRTGMLRPVYHEEHGLRTLRELGRTYQTLSQDLNRVMNRIKALYRGWSIPCAGTQVYAPRYREEWLQKIEHAGVRRRAELLYQQLDGLQTLRRTLRPELLAESRKHKASKLLRQIPCIGPIRAARLIALMQTPHRFRSKRQLWTYSGLGIETRDSAQYRFVRGQLQRTKKPQQIRGLNRNHNHEMKDIFKGAATRASCGVGPLREFYVALLAKGMKPEMARLTLARKIAAIALILWKKEERFDAEQLKLQAA

SEQ ID NO: 271341 - protein, 448 aa, unidentified
MSRKKHTHLRGERGQAFADKLRGIPAEQILCVSLDIHKYFHVVMMHNALGEIVTPPFEVDIFQAGFDQLRQAIDAAAAQTNARVVLVGMEPTGHYFENLARHLHHDQPSPRPVTLINSFAVSRNRDQQMMQREKDDEIDVAAIGDLLRRGEGTPFQPINGLYLEMQHLARVRLSKVKIQTALKNQIVGHLDRIFPGLVIQGKAARERYEPLFVANFWSCQTLQHLIRVCPDPRRLATMTPHELRTAFHVRDFALGIQTAAELITYAQKVLLPDPEVIAIRAELLARDLAFLEEVERLIAQLEDRLHVLLQQTPYWVWTKVRGLSETQVASLAAAIGDPAHYTYAAQVFRRSGLVSGRNDSGARRHKGKGKRVVKTGDVYLRRALMNAIMSLIRHQPALHDYFNELHRSKHAGVARVATARRAMGTRSVWAMQRDQHSRTLVLKRGAKM

SEQ ID NO: 271342 - protein, 359 aa, unidentified
MIVIGIDPHKKTHTAAAVDSATGEFLAELTVPGTDDGHEQLRSWAHELARERALGFAVEDCRHVSGRLERRLIDRGERVVRVPPKLMGRARRSQRQSGKSDAIDALAVARAALREPDLPTAQLDREARELKLLLSHREDLVCERTAQIQRLRWHLHDVAADLEPNPRALRSERARRSLAQRLARREQSVEVAIARELLSRIAAISRRERALQEEIRERVRAYAPVLLELPGCGELTAAKLIAEIAGARRFRSDAQLARHAGCAPLEASSGARPRHRFSRRGNRQLNCAFHRIAVTQARIHPDARIYLERKRAEGKSTREALRALKRHLVRAVWQALRHSGRISPSPILGKSECQLQLGS

SEQ ID NO: 271343 - protein, 308 aa, unidentified
MPLWIGLDVAKDTLAVHVRPMDQLLSFPNTAQGHQRLCDHLAGQQVGNVPLEATGGYERAVMIALATAGIPVTRINPRRARAFATALGTTAKTDPLDAALLARMAELVQAPAAVPDPLREQLRMLVQRREQLVQQRDDERRRLSQTTLALVRQCLIEQIGELRRRIQRMSQAIKQTQHQLDDALARSLSAVPGIGEVTTASLMAYLPELGTLDRRQIAALVGLAPYNMDSGRHQGKRRIRRGRAAMRRVLYMACWSAVRTQACFKQRYQQLRARGKPAKVAITACMRVLLVRLNAMVRDGTPWREVAG

SEQ ID NO: 271344 - protein, 406 aa, unidentified
MSMNAVGIDVSKRKSTVAILRPGGEVVASPFDVPHLSGCFQPLIQHIRALIGQTRIVMECTGRYYEPVARQLSQAGFFVCAVNPQIIHGFQGQDNPLRRVKTDKADSIKIARYTLDNWANLKQYTLMDELRTQLKTMNRQFDFYMKHKTAMKNNLIGLIDLAYPGANTYFDSPAREDGSQKWVDFLDTYWHVDCVRKMSCNAFTLHYQKWCCRKKYNFSRLKAEEIYETAKELIPVLPKDDFTKRIIKQAIQQLNAASQTVEQLRILMNETAAKLPEYPIVMAMKGVGPSLGPQLMAEIGDVARFTHKGAITAFAGVDPGVNDSGDYSQKSVHVSKHGSPALRKTLYQVMDVLIKTKPDDPVYLFMDKKRAQGKPYYVYMTAGANKFLRIYYGRVKEYLASLPASE

SEQ ID NO: 271345 - protein, 321 aa, unidentified
MAMSVTPFEAGVDTAKDELVIQSAPDTKPFAIPNTPKAIRAWLKTLPSGSALAIEATSTYHMEMAEQAHAAGFTVYVVDGLRLSKYRESIALRAKTDAHDAALLARYLSKERSSLKAWTPPPAGHRKIQVLLRRRAKLVEIRGMLRMSWSGDKLFASELKRMEKAIKKAEMSLEKGLREVIKEAGLQDQLSRVQQLPGVGFLTAVGLVMSFMRGDFANSDAFVAYLGMDVTVAQSGKWSGKGRLSKRGDAEVRRLLYNASMSGSRTKTWKQFYAHHLGRGMKTTQAFVILARRLARLAFGLMRHQADWKPEVYTGGAKPVS

SEQ ID NO: 271346 - protein, 433 aa, unidentified
MQDVQDEPLFAERVAGLDIAKAEVEVTLRVPSDTTAGRRQQETRTYGTTRRELDSLADWLHCWAVTRAGMEATGDYWKPVFFLLESRGFDCQLYNAGQVKALPGRPKTDRADSIWLAKITERGSVASSFVPPEPVRRLRTHTRYRRHLTQARTAEKQRVEKLLEDGHLKLSSVISDIHGVSGRAMLEALAAGQRDTKALAQLARGRMRGKIRRLEEALDCSFFTAEHAAVLAMMLAAIDYYTTQIEALTARIETLIEPYLRQVEQLDEIDGIGAICAQDIIAEIGANMTVFPTASHLVSWARWSPQVKQSAGKRKGSNATGRGNPYLGAALGEAVICAGRTQSYLGAKYRRLARRMPKKKALVATGNSMLTIVHTLLSDPAARYQDLGADYYEQRMHARRQARNHVRSLERLGYKVTIQALNPDTGEFLTPAG

SEQ ID NO: 271347 - protein, 408 aa, unidentified
MNAVGIDVSKGKSMVAALRPMGEVALLPQEFLHTEIGLEQMAYAIIALGEDTRVIMEATGRYHEPVAAALYEYGIYVCVLNPLFIKQSGGGSIRKVKTDKADAMKIAKYGLDNWVDLREYTPMDTVRQQLKLCSRQYNLYMKTVVSLQNNLISLADKTFPGVNELFSSPERADGHQKWVDFVMTFWHCDCVCRVSEKAFTERYQKWCKRKGYHFSAEKALDVYAGSCGHFTTLPKNDNTKLLITTAAQQLLAGKMTLAALRAEMTRLAKQLPEYDTVRAMYGVGETTAAQLMAEIGDVRRFPRRSSIVGFAGVDPAVDQSGKHEAKSTPTTKRGSPHLRKTLYQIVCTYLKRSPVDEPVYQFLDKKRSEGKPYFVYMTAAQNKFLRIYYARVKECLEAFDARQSLAQS

SEQ ID NO: 271348 - protein, 351 aa, unidentified
MSNPTRWVGVDLHRRRSQIAIIDEQGELALSRRIVNDRDTFKDLLGDPEGTHVAIEATYGWEWLAELLEEAGYDVHLAHPLRTQAIAAARVKTDAVDAKTLAHLLRTGLLPEAYIAPPELRDVRELLRHRAVLTRMRTAVKNRVHALPARQGIRQEHADLFGKAGREFLAALELPDGSRRWLDSLMSLIGDFDREITATTREIDARAKADERVPVLCQIRGVGRYTAMLIIAEVGDVKRFPTARHLCAWAELAPTVRSSDGKARLGHISRQGSPALRWALTEAAQKIPTGGGPLRAMFERIAKRRGRNIAKVAVARQILTLCYYGPRDGEIRCLKQQPIDDHDNHELAQAA

SEQ ID NO: 271349 - protein, 424 aa, unidentified
MKNSAARKRKQVPEGYLVIGVDPHKKRHAAVAITQDFTTRDKFKFDNTREGLETMLRRARMEMVKCGCRGVMFAIETGGHYWRNVAYFLEEQGIPFRFINQFTLKRRREGKDLNRRKNDYRDSEVAAQLLCTGEFTESKLPQGVYAELRTAHNAYRRLVKERTRITNLVKGLLDALFPEFTQVFKDPCGLTALSVLFICPIPRVITGMTEDEFVATIEAQHKGRRLMRRKLRALHYSARTSIGIEAGARSVSSEISFLVEKLELIRRHIRIIEQTLVRLVDETEEGKYLLSIRGLNYIAVAGLLAELGCFKAYRSAKQMIKMAGSNPTESESAGKKRARTPMSKQGRPVLRYCAWTSVIPMLRFNPDFRAWAKQRRERPVHANPLGGREVVGAALNRLLRLAFALVKNQTYYQVSKPEPTLVAV

SEQ ID NO: 271350 - protein, 267 aa, unidentified
MEHYAGLDVSLKEISICVVDHDGKTIARGTCPADPEGVAGWFRNRSFTPHRIVHESGMLSIWLQRGMTRLGLPTTCIDARKAHKSLSARLNKSDAADAEGLAQLARTGWFTPVHIRSEEADRLRSLVGARERLIRLRKDLEGHIRGVLKTFGIRMTGMGQGRQRQAFRDQLAEAGETDPVLRAIADGFIAAHSTLCQAADDLDKAVKRKAKAHPVARRLMTIPGVGPVNALSFIALVDDPGRFSRTSDIGAFLGLTPKRHQSCHVAL

SEQ ID NO: 271351 - protein, 341 aa, unidentified
MDHYAGIDVSMEYSSVCVVDGTGKIVREGKVASEVGALIGWFGSLGLNLVRIGLEAGPLSQWLFAGMRDAGLAVELLETRHVRNAFKTMPVKTDRKDARGIAELMRLGWFRPVHCKSMEAQETRAILTARKQMQSKLHDVEMSLRGILRGFGLKVGKTTPKTFEGRIRELVAGHPTLETVAGGMLSARTALLLAFNGFEKRVRIMARQDVRARLLMSIPSVGPIIALTFAAAIDDPARFKSSKSVGAHFGMTPKKYQSGETDYSGRISKAGDASVRTSLYEAAHVMLTRPVKGSALKSWAMRLARRAGMQKAKVALARRLAVIMHRMLVEGKPFNLAAAAA

SEQ ID NO: 271352 - protein, 419 aa, unidentified
MKIIKAKKHDFVNGRTLLVAVDLGKTSNMGYCRCPNRVEVKPFEFSNNRRGFQKLSDCIWKVKAANHLEEVVVGIESTGAYGEPLVHYLSERDVSVVQVNPLHTKRLKELQGNSPGKTDRKDPKIIADIMELGHALTVVIPEGISAELRRLTHARERALERRTVFYNQLQDLIFILFPEFLQVIKKIKGRTARYLLQHYPTPQDIVRCGLEELVSVVRRVSCSRLGRARAQALYEAALHSVGIHEGRRGIILEIQEILSGIETCDGFIAEIEQEMTQLLKQIPYSRSILSVKGIGEVTVAGLIGEVGDFGNFRTLSEIMKLAGLDLFEISSGQHKGARHISKRGRSLLRKLLYFAAINTVRQGGVMYETYQRYLQRGMIKGKALIAIARKLLRILFALVRDHSQYIVNYPEINNLKMAA

SEQ ID NO: 271353 - protein, 480 aa, unidentified
MNVKATRTKKQVNVENQAIKLLSKEELGIKIEVIKKELRSYTWRDLETNGKFAKNDKLSFITDDMLIAGGDIGSETHYIRAIDVRGRELSSGAFEFRNTSEGFANAKAWVLALAAKNDKKQIVLGLEPTGHYWFALAAWMVSNGISVVQVNPYAVKQSKEIEDNSQLKDDRKDPKLIANLVKDGNYGMPYLPEKVYADMRRLSMFRDQLTEDRIRNINRLHRELKIYFPEYMDAFGKIDGAFTLEVLKVSAIPSDITALGAEGIKNIWHNEKLRGRGYSRANEIVSYAEKSVGLTDGTDAGREAVKWYAEQILRLDEQLAEIESALHEKCREIPYAENILAINGVGENILAGILAEMGDISRFDDVKEIQKLSGMGLVACSSGKHKGQTKISHRGRKRLRYWLFQAAKSAVSHADEFKQLHEYYTTRSNNPLKKMQSLVVIACKILRVIYTILKTGTTYDSQKLLKDIKYPVSAQAAMAV

SEQ ID NO: 271354 - protein, 402 aa, unidentified
MSIYNNDYFPIGIDPHKDECAVCFLHPARHVLKSFRIKNCSLPDANQLVNQAQNLAESLNLKPVFVFEATNVFWRPLFSFLKRKGFHAETVSSIQTKNARGTKMRKTKTDLIDAKFIAELFLQEKSHQTKFPEEPLMSIRELSRISKFLIDIKAKLLNRIYGFLFQIFPEFFNVISDASSNTALTLMESEAVHPFRLAKIRIDKLTNLIRKASHGKFSRNKAFQLKELAKSSFGIPEGATGFSRCLSLLASLYRFIDDLLNSLETTAILPLLNQVPQKIINLKGMSIISTASFVSELGNPNDFSNSDDALAWFGFDPSLSQSAKRSGQGKRISKCGTKYGRETMFLAAKSCMLNNPIMLAMYKKLRKNGCKDKEAKTILAAKLTKVFYAMYRDFSDFDPSKF

SEQ ID NO: 271355 - protein, 357 aa, unidentified
MFEGSWVGLDVHARSVVAGVLDAGSGELRTLGVPSGSAETVAWLRGLPGPVRVVYEAGPTGYGLARACAEAGIVCTVAAPSKIGRAPGDKVKTDRRDAERLARLLRLGELVAVRVPEPYEEAARDLVRAREDVRGDLMRARHRLSKLLLRHELVYDATAWTVAHDGWLRRQRFESRPLALAFDECYSAVLQAKTRRDALDVAIAELAAEPPFAEVVGRLCCLRGVSTLTALGLTVELGDWTRFRPQSLGPFLGLIPSEHSSGERRRQGAITKTGNTHARRLLVEAAWQQRRDLRTSTALERRRQGQPAAVRAQADRSARRLHARWQTLEQRGKRRTTVAVAVARELAGHCWALATME

SEQ ID NO: 271356 - protein, 388 aa, unidentified
MGDEMDTPKAASMRQTGICNSVKLGASIMKCRTIGIDLAKSVFQVCGVNQYLKPQFNKRLARRDFHAFMAQQSPTQVVMEACYSSHYWGRELTKLGHTVCLIPAQHVTPFVRGNKNDHNDALAIVEASQRPNIRFVPVKSQTQQEVMALHRIRERLIKNKTALTNQAHGLLSDFGIIFNQGERCFTVMAHIVATSSQVSPNIKSLVAMQHEEFLELKAKLKIIEKKLKQSLNSFPQAEILLSVPGIGYIIASALIACIDKGQAFKSAKDFAVWLGITPRQYASGSNSYMGKISKRGNRYLRKQLIHGARAVLNIYKNDKDALKIWGVAVAHRRGFNKAVVAIAHKLARIAWHLLQKNETYQPQSIKAYMKVFKKSCIYKWLLIKPLPK

SEQ ID NO: 271357 - protein, 388 aa, unidentified
MIVIGVDTHKGSHALAAVDEGTGRVRGSREIKADDSGHLAAVRWARGLDEERVWAIEDCRHVSGRLEQALLAAGERVVRVPPKMMGASRRGERERGKSDAIDALAVARAVVKDGVDRFAAAYLDERAMEIRLLFDHREDLVCERSRAQQRLRWHLLELCPEIEAKLAPGALSYPRQLERLDRRLRRLAPSARTRVAREELAHIRALTRQADRIESQLAGLIRGYRPALLAEQGCGVLTAALMIGRTAGAERFRSDACFARQAGTAPIPCSSGKRTQHRLDRGGDRQLNRALHTIAITRASHDPATKEYLARKRAEGKTDKGALRCLKRHLARRFHRLLAEPPLPVNDAPDEHAAEPVEPTSITIPQRPAPRRPVDDTIPAPAPSICII

SEQ ID NO: 271358 - protein, 421 aa, unidentified
MKTIMLLNDRTRAGQPETRWDIAVDVGQKALDWYGEAAGKAHQGHIANRSEAILACLEQLKAEALRLGFSGVRIICEPTGGYERRMLRAARQLGCATALVNGEAVNKMLVVESNDTGKSDTKDPRTILLLAKWNKTLTDRPLADEWLLLRELNARYDRLERDSTRCKNRIHKLLLSVFPDLSFKKDWLFDSRAAEAVVELYGLNAAALIADGRERCTSKLRRRHLGPKTIGRLWADAQRTMLIPADPAWLALLADDVRALFAELAVLRTRRLATREHMIALVERLHARGATRLQAHPDLISPFMLARVLAETGPLQDFSNFRQLWRYGGLNLRPHQSGAMQGQPRQAKRGRARLRHVLAQAILKRVVHGQLYGEYYHRKRDAGMGGGKAMTAVARKFLKLLYGLEHSETAFNPQRVFQPAA

SEQ ID NO: 271359 - protein, 386 aa, unidentified
MPKPNDLSRSFTAFEQDSTLVAIIEMSLTSWLVGGILPGIERHPLKKLDVDEEALLQLLHRWRDEAINAGRKITRIVLAFEAGRDGFWLARWLRARNIEAYVIHPNSVAVCREHRRAKTDRLDTELLKRVFLGWLRGESNHCSMAAIPTLGEEDARRPNRERENLLGERTRIVNRVKACLVRFGVRNFKPTLRKAPERLEALRTPEGGPLPPNSFAELRRDMVRLRFVMGQIKEIEETRLQRLENTPNEGSHAMVRLLARVIGVGIETADMLVHEILSRNLRDQRAVARYAGLTGSPDESGKRRREKGLARAGNARVRRGMIQLAWRFLMFQKESALAQWYRSVTNEARGAIRKTMIVALARKLLIALWRMVRTGEIAQGIALRTA

SEQ ID NO: 271360 - protein, 311 aa, unidentified
MEHSLFVGIDVAKDRLDVHLRPTGETFSIGHDEAGLVALTERLVPCAPAIVVLEATGGYEVTVAAALASARLPIAVVNPRQIRDFARATGQLAKTDALDARVIALFAEAVRPVARPLPDAQAQVLGEFVARRRQLVEMLGAETNRRRLVRDPQLQRRIAVHIRWLERALRDLETDLHDTIRSSPVWREAEDLLRSVPGIGPVTAFTLIADLPELGRLTRRKIAALVGVAPFNRDSGTLRGRRMVTGGRAPVRRVLYMATITAIRRNPPIAAFYQRLRAAGRPAKVALTAAMRKLLTILNAILRDHRSWQRA

SEQ ID NO: 271361 - protein, 317 aa, unidentified
MTESVKVNVGIDVSKDFLDVHVGDVALRRVPNRSSGLSVLKRILSRYTVSLVLLESTGGYENLAVTYFQSLGYDVCAINPRQARDFARSMGRLAKTDKIDAHMLCRLADVIDASPERSRFVKPLTDERRQRLVSMVRRRRQLCDLMIAERNRRAKTDVYGSESISTVLDFLTDEVSRIDRDIAAHVGSCFSDISSLLQSFTGIGPVTASTLLGELPELGKLNRRQITALVGVAPFNRDSGYMRGRRRISGGRSGVRNVLFMAVLSAVRFNPVLKAFFARLVAAGKPKKVALVACMRRMVCILNAMLRDGSRFEVAVR

SEQ ID NO: 271362 - protein, 345 aa, unidentified
MKITTIGIDLAKNVFQVHGVDEHGKAVLNKPLKREQMASFFVNLPACLIGMEACGSAHHWARKLQSMGHTVRLMAPQFVKHYVKTNKNDAADAQAICEAVTRPSMRFVPIKNVEQQGVLALHRARQGFVKARTAQANQIRGLLAEFGFIIAQGRNHIAERVPQLIEDACNELPGAFRRLIQRLLEHLQELDRQVQELEAQIVAWHRQSDLSCKLEQIPGIGPITACALVASLGDAKSFKDGRQVAAWLGLVPRQHSSGGKQNLLGISKRGDTYLRTLLIHGARSVIYHAQNKDQGNPQCGWLNGVVQRRNKNVAAVALANKNARIVWALLARDRSYEPGYVREQA

SEQ ID NO: 271363 - protein, 343 aa, unidentified
MYYIGLDVHKRTISYCVKDAAGRVHMEGKVGATRRELDAWIKTLPQPRMIAMEATIFTGWIYDHLLPHAEGVKVAHPLMLRAIAAAKRKNDRIDASKIADCLRCDFLPECHMASTEIRDRRRTLRYRELLVKQMVQMKNRVSGLLLEKGVTHTKRRLHKVGYFAELMAGSEEIDHSIRPLLKLSREHIVRAQKLDYALVSSLERDPMLAERLRRLRTVPGVGPITALTWALEMGDVARFRSIKQAISYCGLCGAEKSSADKVMRTPISKQRNKHIQHVLIEAAKLAPRLCHELALLHEREMQKGNRNRATLAVARKLVCWMLAVERRKQDFVPAEKFGGKAAA

SEQ ID NO: 271364 - protein, 346 aa, unidentified
MEYIALDVHKNYTWARVENATGDRLYESRLAHAHGSIKNFVNRWSSGSAVAVETVGNWYWVVDEIEAGGGQPQLVNARLAKLMMGSVNKSDKLDAKGMNRLQRTGTLPTVWIAPSSVRDARELPRTRMVLSRQRTQLKNRVHATVAKYGYRVEGASDAFGKKGRRIIEELLDKLPPHTQQSLRVILDELDHVTDNLKAIENQMTEVFSPCPQTPWLKSLPGVGEILAVVIWTEIGTIERFGRAEQLASYCGLVARENSSGGKIRFGAVRRDVNVYLKWAFVEAANSAVLNAERCGYGHISRLYQRIKARRGHGKAKVAVARHLAEACFWMLNKGESYREPMSSTQR

SEQ ID NO: 271365 - protein, 343 aa, unidentified
MKITTIGIDLAKSVFQVHGVDERGHVVVRKQLRRDQVAMFFANLPACLVGMEACGSAHHWARKLQGFGHEVRLISPQFVKPYVKSNKNDAADAEAICEAVARPNMRFVPIKTVEQQAVLSVHRVRQGFVKARTAQANQIRGLLAEFGLVLPQGITNVLRRVPSMIDGAADLPASMRQLIERLLENMKVLDRQVKDLEAQIKAWHQGSELSRKLEKIPGIGPLAASALVASIADARSFKNGRQVAAWLGLVPKQDSSGGKPKLLGMSKRGDTYLRTLLIHGARSAIVAAQRKGKPNAWLSGLLARRHPNIAAVALANKNARTIWALLAHEREFRPDYVPRLANA

SEQ ID NO: 271366 - protein, 429 aa, unidentified
MNYTQNEKIEQVTDSTMVVGVDIGSQIHYARAFDNRGRELTKRIFSFHNDLEGFNSFNLWAETLKTENKKTAVLIGCEPTGHYWFAFAKYVNDHQKRLVMVNPFSVKKIKELDDNSPKKTDSKDPKTIAKLVVDGRYSISYMPEGIYAEIRDLVYSRDRIMKQHNISANRIQRWLAIHFPEYLGLYTRFDAISGLAVLERAPLPKDVIALGVNGIRKIWHDKKMRGRGVTEDRAKTLVEAAHNSVGLDGGIGTKSELYMLLEEHRLWTSQLEAVNKVLEEMILKVPHVEKLLAIKGVGSITIAGFIAEVGDIRRFDSPKQIQKYAGLELVENSSGKHKGRTRISKRGRRKLRKILYQVMVPLLARNKEFRGIYDYYVTRVKNPLKRRQAMVAVSCKLIRVFYAVLTKGVEYDRFKMMSDIHRKSDIIAA

SEQ ID NO: 271367 - protein, 343 aa, unidentified
MQPATHILGIDIAKDKFDVNLRRLEASDSRWAATFPNNPKGFKALHPWLVQHGPRFSHQVHACLESTSRYGDALAQFLHQEDYQVSLVNPRRTRHYADSQLTRTVNDTIDARLIADFCAAERSTLSLWEPLSPEHRQLRDLTRARQALVEERERFANMLETASGLARKAFLKQVRQLDRQVKDLDRAIQQFVRLVPQLHQQVALADSVTGVGPITAATVIAELPPIDKIPQAAQAVALFGLDPIKKTSGSSVNTPARLSRMGSRHGRKALYMPALVALRWNPIIRQLGQRLQNKGRTGKYVVVAAMRKLLRLIYGVIKQGRPFDPNWSAPAQRDPQAQTPVLA

SEQ ID NO: 271368 - protein, 389 aa, unidentified
MSYRSESGRPVGQLDTDHCRVTLYVSLELSPSKWLVTALVSGTDKLSKHLVRGGDCGALLQLFTALKVKAEKQSGMAVVVVTIQEAGLDGFSLHRLLEANGIESWIVDAASVAAPRRARRAKSDAIDGETLLRTLLAYRRGEPRVCSMVHPTSPHDEDRRRLTRERRTLMRERIEHTNRIKGLLMSQGISGYDPLRKDRLVRLDELTTRDGHHLPPRLHAEIGREIDRLELLARQLKQVEAERDALISHVADIADSPATQLMRLKGIGVETATLLWLEGLFRPFANRRQLAAYAGLAPTPWLSGHIRREQGISKSGNPRLRTAMVELAWLWLRNQPASALSRWFADRVRGEGGRKRRITIVALARKLLVTLWKYVNRGEVPDGAALKPV

SEQ ID NO: 271369 - protein, 343 aa, unidentified
MKDTIYNHYIAIDWSIKNMAIARMTKKSNKITVIDVPSDIEDVQAYLKNLKGTKILAIEETTTSQWLYTELKEYVDRIFICDPNRNKLLNEGPKTDKIDATKLVQLLKAGLMKEVYHSTDKFLYLRRVVSGYEDLVKAGVRLKNQRYSLLRACGKSGDEKIGSTLESQGEQFVLECLDRQIEAYEEEKEGYEKEFEKLARSHPKIKHQKSLPGIGVINAVKIVARVVTPYRFPNKGHYLSYTGLIKLNKESGGRSYGKKNPRFSRQLKSVYKSGVLAAIRGNNPINDYYEHLIQEDGYPEYNARQKACRRLAILSLGVLKSGKKYQPYRRDHLKGSKEGTSGL

SEQ ID NO: 271370 - protein, 355 aa, unidentified
MSQEKYIGMDVHQATISVAVMDARGKLIMECVLETKAATILEFIQGLRGTLALTFEEGTSAAWLHDLLKPHVSRLVVCDPRKNALLKDGNKNDRVDARKLAELLRTNQVKPVYHEKHGTRALKELGRSYLTITKDGTRVMNRIKSVYRSWAIPCAGTSVYTRRHRAEWLAKLVEPGVRIRAEHLYKQLDSLQPLRLEVRRRLLLESHKHAAVKLLRQIPAIGPIRSALLVALLQTPHRFRTKRQLWAYSGFAVEVHDSGEYRWVRGKLQRNRERITVRGLNDNHNKEVKSLFKAAAISASTRPGPLHDFYVARVESGMRPTMARLTLARKIAAITLTMWKKGVSFDPKQLHRQAA

SEQ ID NO: 271371 - protein, 377 aa, unidentified
MNITNEAVSDNSEAVSRAERGGKGVLKLGLDMHYRQVTVAMQAESGPIKAVGRMSHDGFGNWVDKKLREGWEIHSCYEAGASGYWLHRDLVKVGVKNLVVAPKAMGRDKRQKTDRRDSAELADSLDRYLRSKDKRALCPVAVLTVQQEQDRALVRFHRQLMADRNRYEARGKGLLCAQGIEVSGKWWSADGWKELKTHPRFKSWMVVQLRTWRSKLLGVERHQGLVRKQIEAMAPRELPKGLGAYSAVALECEMKGITHFESARAVSSYTGLCPGIHSSNGNGKEGSINRCGNASVRWNLVETVWRMLKWQPDYEPVRQLRHDLVRSKRARKRLVVKAARQLAVDLWRLQSGKVTAQELNLVMQPITPPTKAAAKSR

SEQ ID NO: 271372 - protein, 347 aa, unidentified
MLHAGLDLSRRKLDVCLLGDDGEHLDQLAVAPDPDSLRQFARRIEEVHRQPVLAVIESMTGARIVHDTLEREGWSVEIADAQKVKGLAPLACKTDKIDSLVLATLSHRDLVPAIWLPDPSVRTRRELARFRLHLVKHKSALKNRIHSTLINFGRPCPVTDLFGIEGRRLLAHLQVPEPWRGNVAASLALIDDLEDQIAEVNARLQEGHAEHPYIPLLMSAPGIGWVLAFTIAAEIGEIERFSSPQKLTGYTGLCPRVVQSGESDRRGPLSKHGPTYLRWALLEATMHALKHPAYSDRYRRTKRRLGKQRGAKVAQVEIARRLAQAIWHMLTRKQKFAPRGATFRLAA

SEQ ID NO: 271373 - protein, 339 aa, unidentified
MDYYAGIDVSLKSSSVCVVDASGRIVREGKVASEPEAVIGWFASLELSPARIGLEAGPLSQWLYAAMREAGLAVELIETRHARNAFKTMPVKTDRKDAQGIAELMRLGWFRPVHCKSMAAQETRANLTARKLIQSKLHDVEMSLRGILRGFGLKVGAPARRQFEARIRDLVSGHPTLEPIAESLLAVRAVLLREFNSFERRVRDIARCNPRARLLMSAPGVGAIVALTYASAIDDPQRFKSSKQVGAHFGLTPRRHQSGEKDVIGRISKIGDRLVRTALYEAAHVMLTRAIKGSTLKSWAARLARRSGMKKAKVALARKLAVILHRMLADATPFDAAAA

SEQ ID NO: 271374 - protein, 357 aa, unidentified
MNSTTKNIGFQGQNFYIGLDVHKKNWSVTIRTQNTQIKTFSMNPSPTELIQHLQKNYPGGTYHSVYEAGFCGFWIHRELEFLGIHNIVIHPGDVPTTEKEKRTKTDPVDSSKLARELSSGSLEAIYVPNKSHDSFRSLVRLRHKLVRQQSRVKNRIKSYLYYLGIQWPKEMDTSNWSNRFVTWLENISFEYLPSKEYMTFCLQDLKYTQQQIQKIQDQIKKYIQKEPLNSIIKEQLMSVPGVGFTTAVTLYAELIDIHRFSSFDKLAAFVGFVPNTHSSGEKEKTTGITHRQNRYLRHYLIEAAWIAIKKDPALLLAFGQLKRHMTSQEAIVRIAKKLLNRIRHVWKNKKSYVEAVA

SEQ ID NO: 271375 - protein, 329 aa, unidentified
MITIGIDPHKSSLTAVALDETGHLLATRRITINAAAYKTLTDWAARWPQRRFAVEGAAGLGRGIAQLLAAAGEHVVDVPATLAARARLLDTGGSRKTDAADAASVAHAAMRHQRLRKVVAEDHHTRLRLLSERRDDLARERVRLLNRLHVLLRNTRPLTAADSCRRDLARELIADLRHLDRRLHTNQAQVRQVLSETHSTITEIRGVGHIIAGKILGHVGDVTRFPTADHFASYAGTSPLEASSGERRRHRLNPTGNRQLNTALHTIALVQARDEGPGRVYYQRKLSEGKTPAEARLCRVHPDAVAVSARTGAGIDDLRVELARRLRQR

SEQ ID NO: 271376 - protein, 357 aa, unidentified
MESQEVKYVGVDCGKKSIEVVRINSENSLERRQFSTTESGINNLLQWLTLNDIVGLEAGSQSFRIAKSILNKGVQVIVLNPGNLATIYQSLKKTDKEDSLKIARLIQRHPIEELPTVPIPNDEEEDNRRLCTEQENWTRQLTQSKNRLHSLFTQAGLTHITKKHLRTKANREISVALLPSRYQKEAERILKVLDLVELNLKLIEEEIQEALKKNKAYVQTIMSMPGIGMITSLAIMSYMGDCKRFSSAKQAAYYAGLVPRVDISGDTVRYGRIINRGCHSIRRVIVQAAWSLVRCQHGGKVKEFYQRLYLKKGAKKSIIATSRKMIEVLYVMIRTGKLFDSMPENILNRKLTQYGLM

SEQ ID NO: 271377 - protein, 377 aa, unidentified
MNSIKYIGMDLHSATISAAVVNDAGKLNMEATLAMEASAVVDFIAGVQGTLHVAFEEGIHAPWLYDLLLPHVAQVLVCNPRQLPRHRGENKNDKIDAQQLAQWLRLGVLKPVYHNPTGLRSLKELVRSYLSLVRDTARVMNRLKALYRARAIPAPGTRVYSPRFREAWLQQLREAGVHYRAQLLYRQLDLLLPLRHEAKRAMIAESRQHAAQKILLSIPTLGPVRVAVLMAVIQTPHRFRRNRKLWTYAGLGLVSRSSANYRIVEGQLTRAGKPALILGLNVNHNHVLKALFKDAAATAVSRPGPLREFYARQLAAGRDPEIARVTVARKLATIVLTLWKKGERFNAEHLKPQAAGASERSAAQGRSFVPVQVLRFG

SEQ ID NO: 271378 - protein, 343 aa, unidentified
MEQYVGLDVSLKETHYCVVDAAGVELARGREVTRPDLLAAVLARSAPSARVVVLETGGQSSWLQRGLEAAGVPAVIVDARRAKAALSCRLNKTDANDAEGLAQLARTGWYREVAAKRPQTRALRALLLARQQLAKQRRDLENQVRALLRGFGLAVGSVSRARFEERVWDLLRGEPRLEAAVAPLLAVRASLGAALRDLEVWIGQAAEGSEVCRRLMTVPGVGPMTALAFMTAIDDPARFARSSSLGPYLGLTPRRHQSGKADWSGRISKQGDRLARHMLYEAANSLLSRVRRWSAPKAWAARLVGRLGAKKARVALARKLAVILHRIWVDGSSFRWSAKEAAA

SEQ ID NO: 271379 - protein, 472 aa, unidentified
MGKGSGTTRGDRRRNARRERLRGLLPRDGAVVGIDLAEDKQAIAVVDHDVRVLARKTVRVKAFRLDEALDWAVAQARARGFAAVTVACEPTGPRWLQVQRLCAERGLALVCIQPLVSHIAREQQDYTTHKSDESDCVMIARLALELHCYVPEELDEAWAQLRHLGRRRAQLITAGTASVQRVRDFLSVAWPVVTGTCAYPLESTTWLAALQVVTSRCGGDPSRLAEMGPEAFTALVRDAQRGWGGQKAWGPICRRVFAALTETEGVVLSCRRGLLRRVADELGDLQRTRGQLRAVEADMVAVLAELGLARLADIPGLTAAGAAAILAETGGPRRYDSSSSLVKHAGLSPAENASGASAGQAHISRRGRPALRLAVWRAVWPMLQYNPVMAAKYAAMTRAAGAAADAAAAADAGSRQVSAAAAAARARRAKARVACAASLLRWIYSMVVHDTSWDAAAASGCQHPPRCQPEAA

SEQ ID NO: 271380 - protein, 390 aa, unidentified
MAPGDKIIRRPFDVKHTKEELQPLVDEIRVQAKYDEIKVVMESTGVYHLSIAYFLQQNGIFVSVVNALKVANFNKAENFRHTKTDSIDSTNIARYGIAYWAKLPQFDLNGDKYFLLKRLCDAYLNFSEERSRILLQLQSQLEQTMPGIFDLFGGFDINSGKDKLLDFLERYCHIEDIIAKPEAEFVASYREWAKEKGYRSNESKAATIYAQAKNGIPSIPNNPIVRETIMWYVGLLRRADEALMASLTRMEDIAKDLPEYELVGEMGGVGRVTRVALIAQIGDVRRFKNKHSLIWFAGLTPSIHESGKFRASQNHIVKKGPARLRKVLYQVMMSLVMHKIPKDDAVYRFIKKKEAEGKYKKVAKVAGMAKFLRIYYGRVMHLYRDLGLAA

SEQ ID NO: 271381 - protein, 390 aa, unidentified
MQASTAATLTVGDYGTIFVTIELSQKTWLVTLHSPDKDKMSRHRLEGGNHAELLALIDRIRERAARALGGVPAVVSCYEAGYDGFWLHRLLMAAGITNYVFDPASIAVDQRARRVKTDRVDGERMLRTLMAYLRGEPRVVRIVRVPAVEQEDARRASRERDRLIKEQTAHTNRIKALLRLLGMAVGNPRRRDWLGWLATQRDWQGQAVPPQMLSELRHEHARLMLVRERLDALAKTLAQTPAQADPSPAAAQIAERSELLLRLKCLGPAFATTLTHEVFYKDFRNRREVGSYFGLTPSPWQSGGIDRDQGISKAGNPRARCAAIELAWLWLRHQPDSVLTQEYRRRTLDASKRIKRVAIVALARKLMVALWRYLTTGLVPDGAVLKIVKA

SEQ ID NO: 271382 - protein, 374 aa, unidentified
MTMMHQRQIRYIGLDVHKATISVAIAEESGAPTSYGKIANDPAAVRTLITRLGGPAVELRVAYEAGPTGYALHRQLAAMGIDCMVVAPSLIPKQPGNKVKTDRRDALKLARLLRSGDLTPVWVPDEAHEALRNLVRARADAKADQLRAKHRLSKFLLRQGCRPPSTARNWSLRHFQWLRQLKFEHLPDRVVFADYLAEVTAGADRIKRLETALQQCAQNSSQVAVICALQAFRGIGFLSAVTLVAEAGDLRRFRTAPQFMAYVGVVPSEASSGGKQQRGSITKTGNTLLRHVLGEAAHHARHAPRVAGTLKRRQADLPREVVELAWRAQLRLHARYRHLSLRIGARKALTAIARELAGFVWAAGHVLQAVPAAA

SEQ ID NO: 271383 - protein, 319 aa, unidentified
MAHTATELQQMVQRLRRAGVAEVAIERPDGPVVDALLAAGLTVFVIAPNQVKNLRGRYGSAGNKDDRFDAFVLADTLRTDLARLRPLTPDSEATISLRMTVRARKDLVAARVAMANQLRAHLQSTLPGVIGLFRDIDSKITLQFLTPRVQITLALVAALSAIRDQIKVLDGQIAAQLATHPDRHTFTSLPRAGTNRAARLLAEIGDARGRFPTPEALACLAGAAPSTRQSGKVKIVTYRWAVDKQLRGAVIDFAGDPHHANAWAADLYAKARARGHDHPHAVRILARAWLHVIWRCWQDQVAYDPTKHHALQRVLNQAA

SEQ ID NO: 271384 - protein, 338 aa, unidentified
MTVVTVGIDLAKNVFAVHGVNVAGKAVLVKPLVRRAKLLELIATLPACLIGIEACTGAHYWAREFQKMGHTVRIMAPQLVSPYRMSGRHGKNDAADAAAICEAVARPNMRFVPIKSVEQQGQLFVHSAHQGYVSERTALINRIRGLLSELGIVLPQAFKAFLSGVAQVLEDLPGYCNQVIGDLLNELYHIEEKIKNSEKLIQQLARDNSAAQLLMQFRGIGPMTATAIVASIGNGHDFKNGRQFSAWLGLTPRQQSSGGKARLGRITKAGDSYLRTLLVLGARSVLLGAAKNDDPVSRWALQLKERRGYGRALVAIAAKNARMCWAMLHLRDEFRFPA

SEQ ID NO: 271385 - protein, 375 aa, unidentified
MEHHTEAFVALDTAKLRNAVAIADAGRNGEIRYLGEIDNTEVETRKLVAKLASKHARLTFCYEAGPTGYGLYRLIKSIGHDCIVVAPSLIPSKPGDRVKTNRRDAVNLAKLLRAGELTAVWVPDERHEAMRDLVRARDAAVKDYRIKRQNVSSLLLRLGRHYPGKKTWGRAHINWLTSLKLEHREQRIAFEEMLLAVRQVRERIERLEQAMREAVADWTLAPVIEAVQAMRGIDTVGAIAFLAELGDLSRFENPHQLMAYLGLTPSERSTGESVKRGGITKAGNTRARRLLIEAAWSYRFPPRVSKDMQIRIGAAPRTAREIAWKAQMRLCGRFRTLTRKGKRPTIVVTAIARELSAFIWAINREIVGSYAMANQ

SEQ ID NO: 271386 - protein, 387 aa, unidentified
MPQLNDLSRSLVALDQDSTIIAVVELSQSSWLVAGVLPGIERQPQKKLEPSAERLLGLLHRWRDEAVRAGKKITRIALAFEAGRDGFWLARWLNARGVEAHVIHPSSVAVSREHRRAKTDRLDTEMLKRGFLGWLRGERGHCTMARVPTIAEEDAKRPNRERECLVGERTRIVNRIKSTLARLGIRNFKPTLRKAAERLATVHTPEGMPLPPNTLAELQRDMARLGFVVSQIREIEDARQKRLEQQHATGPHAMVRLLARIVGVGVETADLLVHEVLSRPMRDRRAVARYAGLTGSPDESGARRREQGLARAGNARVRRGMIQLAWRFLMFQKESALALWYRARTADSRIGTRKTMIVALARKLIIALWRFVTAGEPLEGVVLRPAS

SEQ ID NO: 271387 - protein, 318 aa, unidentified
MTDTKYWVGIDVCKKTLDTHIRPSGQILRHANTEEGIADLVQALQSLVIERVVLEATGGMEILAAVRLSQVGIAVAVVNPRQVRDFAKATGQLAKTDTIDAAILAHFAEAIQPQIRPLATEESRLLGELVTRRHQLVEMITAEKNRLSTMHGPMQESINRHITWLKQQLSDVDKQLQQTIQQTPLWCERAELLKSVPGVGDILSSILLAELPELGQLDSRKIAGLVGLAPINRDSGKFRGRRMIWGGRASVRTALYMPTLVATRHNPVIKSFYERLLKQGKRQKVALTACMRKLLVILNAIVKSGQPWNPQQQGGLDA

SEQ ID NO: 271388 - protein, 412 aa, unidentified
MNIVYERCVGIDVHKRNVVVCAITPDAQGQRQKEQRTFSTMMPDLLRMRQWFQSLNVTHVAMESTGSFWKPIFNVLEGHMEVLVVNAQHLKAVPGRKTDLKDAEWIADLLQHGLLRPSFVPPAFQRELRELTRYRTSVIEERSRTINRLQKILEDTNIKLSAVASDLMGQSAREMLAALVAGEADPTVLAQLARGKMRAKHDLLVQALQGQFKPHHRVLISEQLAHIDTLDEEIERLSAEIAQRLRPYEAQLKRLETIPGIKRRLAEVILAEIGPDMQRFPSARHLASWAGMCPGNRESAGKRLSGKTRKGSPWLRTALVEAAHAATHCKESYLSAQYHRLVLRRGGKKATIAVGHTLLVIVYHVLADEKDYQELGGNFFDEHDRQAVQKRLVHRLEKLGYEVTLVPTSPAA

SEQ ID NO: 271389 - protein, 345 aa, unidentified
MDKIIRIGMDTSKHVFQLHGVDAAEKPVLRKKMRRKEMIDFFRICPPTVIAIEACGGSHHWARLLTSLGHEVKLIAPQLVKPYVKRSKNDAADAEALCEAMSRPTMRFVPVKAADEQAATMLVGVRDRLIRNRTQLANAMRGYATEFGISVAKGLAHIPLLLERIQSDETVPELARELFASQAEEYAQLEEKIADVDARLMAWQRADERSKRLNTIPGIGPIGAALLIMKTPAPELFRSGRQFAAWIGLTPRDHSTGGKQRLGCITRAGDEALRAVLVAGATAVIQHARRHGKASPWLAELLKRKPPKLAAVALANKMARIAWKIIASGERYNAKYASALMADAA

SEQ ID NO: 271390 - protein, 338 aa, unidentified
MTIVMGLDQHRAQIIAEWIDTETGEVMRSRISPAHRAGVRRFCERFREQELEVALEATTGWRFVADEFQRVGASVHLAEPAETAAMRGNKRRAKTDRADARHIRELLTGGRLPESWIPPGHILDLRARVRLRHTLSHQRGEWQQRIQAVLYHHGCPQRGNLITSEGRSWLAAQPLSAGAREQVTIALSVIDALDAQIVPLEKELRSFARRQAGCKALMGQFGVGELTAVTILAELGDARRFSSSRDAVRFAGLDITVHQSDQRRAAGHLSRQGPPALRWALFEASMCAARPCSPDYEYYSQAAERLGSNRARLSVARKILKRSFHLLRELGEEALAPA

SEQ ID NO: 271391 - protein, 445 aa, unidentified
MVRRTIGIDLAIRGDHVARVFDDGQPVGRPLRFRLTSASLTGFVARVTGDLAEGATITAVMEPTGMSWFPVANWLRRAGIAVIRVKGQRVKALRRYLSEHTKTDAVDAYVLGAMPGFGSVALDPVYVPSAEQHALQRLTKQRHRLDSLVCSGKRRLIDLTRWACPALEAVLPDLRTTLSLALLERYLDPHEVLRVRRATLVRFVGENASGNHPHSGPFVETLVDGLRAAARETITLHGTAVDFALLQAEVGFEVAQLRLLETQIKELDRRIEALYGALHPSDALRSIPGIGDRLAPLVLGVLHDRARFGNERHIRGFCGLFPTTSASGGAERPRQRITQAGNDRMKRALFLAADTARHIDPDLAAVYWRLMVGRGHHHKQALCAVATRLVNRISMVLRTGRAYELRDREGGPITVAQGRAIVNEHFQIPDLIRRARRRNAVPIAA

SEQ ID NO: 271392 - protein, 383 aa, unidentified
MKAVCGLDVHKDSIFLCILHSDGELFEQVFGVLTFQLEEMRKLLQKHHVFEVCMESTSIYWIPIWRVLSPHFTLRLVNPYFIKQLPGHKSDVKDAQWIAECTMKELVRGSFVPPEIIQQLRQYDRRIFDLNAEIVRKVSKVDGVLQRCNIRLSNYVSNIECKSYRDVVRRLSEGVTNPNELMKLVHGRIVNRHGVETILASLTGVVSQAEIDVLRQLHEEIDIAESHRNECQQRMLEICEKHFPEELERLQKIPGIKERAATSLIAEIGTDMSKFKTANHLASWSGLRPRNDESNKKIKSRKITHGNVYLRNTIIQCAWAASRQKDSFFSRFSYHQTIVRRKNKMKVIVAVARKLLIAVWHVLHDKTDYVDFKPDREESANNG

SEQ ID NO: 271393 - protein, 341 aa, unidentified
MREFIRIGVDLAKNVFQLHGIEREDGSPFQRKLTRTKFREFFSRVTPCRVGMEACGSAHYWARVLRAMGHEVVLIAPAYVKPYVKRGKNDAADAAAICEAMSRPEMRFVPVKSADQQAVLMLHKTRDLLVKQRTMTVNALRGHLQEFGLIAAKGVQRVRELVVLAEADQDLPEEAKQAVALLAWQSEQLAMKIDALEKTIAAAGAKRPESRLLQDIPAIGPLIASALTASLPDPSAFKSGRDFAASLGLTPSQHSSGGKERLGAITKKGNRYLRKMLVVGCTSVLRVAHKRKGALAEWIVALKAKKPERVAAVALANKLARICWAVLSTGETFREELYARA

SEQ ID NO: 271394 - protein, 460 aa, unidentified
MNRKRSKSRVDRTLPMMHPNAAAIDVGATIHMAAVRADRAPEPVRCFGTFTTDLHRLVDWFTECGVETVVMESTSVYWIPIFELLDARGFSVFLVNARDAKHVPGRKTDVSDAQWLQRLHSYGLLRASFRPKGQIAELRAYVRQRERLLEYAASHIQHMQKALTEMNLQLHHVVADITGSTGLRIIRAILAGERDPEVLACLRHYSCHSSAETIAKALTGSYRTEHLFALEQALALYDAYHEKASACDVRIEAVLKELSIHRGRDIGSVPPASRRRHRTDQANALAFDVRAALFALLGKDITRIDGLGPYLSLKLIAECGDDLSSWPSAKHFTSWLGLAPSNKVSGGKMLSSRTRRSGGRAAALLRLAAVTVGRTDTALGAFYRRLSSRIGKAKAVTATARKVAVLFYNAVRHGMQYVDPGASSYETRYRMRVVNNLHRRAKAFGFVLQPLEPKADAVVS

SEQ ID NO: 271395 - protein, 333 aa, unidentified
MRDKPIVGIDVSKGWLDVCVAGGTGVARIANNAEAVAAWLDRIGPGLVAFEPTGGHERILIEGLRVRGVSFIRVHPNDVIAFRKSRGIKAKSDPIDARLILAFLADELSRRGWRSSVIGDELLRALAARRRQLVEALQAERCRLALAAAPAVRHSLEVVITALRHSLDTLESEIAAAIAGDHETARLAELLQTIHGIGPITAATLIADLPELGLLSAKQIAALLGLAPHTRRSGTMRYREPTGHGRAGLRQALFNAARAAIRHPSPFKAFYDRLVRQNRRPGKVALTAVMRKLLITANAVARDRQPWHGLRQTMPPPAAVGTPGRPHGAPRQP

SEQ ID NO: 271396 - protein, 470 aa, unidentified
MSKGSGMTRGDRRRNARRERLRAVLPRDGAVIGIDLAEDKQAIAVIDHDVRVLARKTVQVKAFRLGEALDWAIGQARAKGFTHVTVACEPTGPRWLQVQRLCAERGLPLVCIQPLMSHIAREQQDYTTHKTDEADCVLIARLAVELHCYLPEELDETWAHLRHLGRRRQQLITAATASAQRIRDFLSVAWPAVTETCAQPLESKTWLAALQVVTSRCGADPGKLAVTGPEAFTALVRGAVPGWGGKKGWGTICGRIFAALTSTEGVVVSSRRGLLRRCADELGDLQRARAQLRAVEADMAAVLAELGLSRLADIPALTAVGAAAILAEAGDPRRYDSSSSLVKHAGMSPSDNASGAFYGEAHISRRGRPGLRLTVWRAVWPMLRFNPVMAAKYAAMTQAAGAAAQTAEAQADAGSRQVSAAAAAARARRARARVACAASLLRWIYSMVVHDTSWDPAIASGAASCPAEAA

SEQ ID NO: 271397 - protein, 320 aa, unidentified
MENIALIGIDLGKNSFHIHCQDRRGKAVYRKKFTRPKLIEFLATCPATTIAMEACGGSHFMARKLEELGHFPKLISPQFVRPFVKSNKNDFVDAEAICEAASRPSMRFVQPRTESQQAMRALHRVRESLVQDKVKTTNQMHAFLLEFGISVPRGAAVISRLSTLLEDNSLPLYLSQLLLKLQQHYHYLVEQIKDLESQLKRKLDEDEIGQRLLSIPCVGTLTASTISTEIGDGKQYASSRDFAAATGLVPRQYSTGGRTTLLGISKRGNKRSELCWFNVPGYSYKNWNTSLANWPIGSGIYCVGKATLSSLVLWQTSWPE

SEQ ID NO: 271398 - protein, 343 aa, unidentified
MEYYAGLDVSMEATAVCVVDGSGSIVSEAQVATEPAAIAEYLSAWSGSLLKVGHEAGGLSPWLHSGLVELGLPALCIETRRMKAYAKASPVKTDRRDAQLIALAMRAGMYRAVHVKSEESHKLRLALTSRQTVLRQARQLQGKVRGDLKVFGIKLGRVSSGGFAGSVKALLSDRPDLLVLVMPLLEMRGALLAEVRGYDRALRRLARADAVCRRLMTVPGVGVLTALAFRAGIDTPARFTRSRAVAAALGLTPRIDNSGEMARNGPITKCGDKLLRSLLFEAANALLTRTRRWCALKRWGVDVAKRRGMNRARVAVARRLAVILLVMWRDGSDFRWGDEARTA

SEQ ID NO: 271399 - protein, 315 aa, unidentified
MDTQVFVGIDVGKDVLFVAIRPFGDNLEIANREDGIADLVKRLRFLRPTLVVMEATAGYETPVAVAIYRSGIPVVISNPRLVRSFARATGHLAKTDKIDAGVIAHFAELIRPEPRRLEDPDEERLGRLVKRRKQLLRMIVMEKNRVAKGVPEVRKEIQKHLDWLAKDLERIDQALNDFIQSSPIWSAKNDLLQSVPGIGKVGAQAIISDLPELGTLNRKQIASLVGVAPLNRDSGNFKGRRSIWGGRAHIRTVLYMVAVVASRCNPVIKEFYERLCKAGKPKKVALTACIRRLLAILNAMMRNGTRWGEFKPAIT

SEQ ID NO: 271400 - protein, 349 aa, unidentified
MVTIGIDAHKRTHTAVAVDGNGRPLAERTVASSPAGHLELLRWARRWRDRTFAVEDCRQLTRRLEGDLLAAGQIVVRVPPKLMAGVRRSVREPGKSDPIDALAVARACLREPGLPTARLDGLERELRLLVDHREDLVADRTGHQARLRWFLVELGVGEPPARSLDRRAVLDGLAAELSDRPEPAARFARALLVLIGELSVTIDALEREIRALVGQVAPSLLALVGCGPLTAAKLVGQTAGIGRFRSRAAFARHNGTAPVPVWSGNVVRHRLSRGGDRQLNVALHRIAITQLQREGCARDYLAKRMAAGDTKTEAIRALRRKLSDEVFRRMTSDENARARARAGVTEAAA

SEQ ID NO: 271401 - protein, 335 aa, unidentified
MNSAKKIVGIDVGKEKLDVCYPDGKKETIRNIKSCRTKVIKKAAQLGAFIAFEATGPYEESLAEECLARGVKAVRLDAWGTRRFAESQGRIEKTDAIDCEMIRDYAASLKDEKLHFVKQRSEAQKRLKKSVRMRKNLLKARAIIANQFEDDLDPETARHLKSALNSLDKNIAKVEAECDAAIASDERLKELDRRFREVKGVGPCLSRTVLAQCPDIGDFNSKSIAKMCGNAPLDHESCTIKGKAKPRRGRSDLKKALYMAAVSASRNNHILREFYQRLVANGKARKVALTAVARRIAVLLNTIAKHPDFAPEKDPKDIAKATGKTQGRGRPRKAV

SEQ ID NO: 271402 - protein, 430 aa, unidentified
MNYNTQNAKIASITEKTLIVGIDVGSETHYARAFDWRNYEYSKKPLSFSNDEAGFATFKAWMEDLMEKHEKTAVIPGMEPTGHYWFNLGAYLQEQGFKPVHVNPHHVKKSKEMDDNNPNKNDRKDPKTIAALVNEGRFSYPYIPTGIHAEIRNLSNLRLQTQEEITRIRNRIARWFSIYFPEYKTVYKQPDSVSGMMVIRQSPLPCDIKKLGVDGVNKIWRDAKLRGAGLKRAKTLISAAEHSIGSCEAPESARMEIRNLLKDHEVYQGRMDELMAAIERKLAEIPYIDKLMGIKGIGIKTASCFIAEVGDIGRFDNPKQVQKLAGYAIVSCDSGKHQGESHISYRGRKRLRYALYEAAISVIGKNREFKEVYDYYRTREKNPLKKMQSVIAVACKLIRIFHMILTKGVDYDGERMLRDIMRPETAVQAA

SEQ ID NO: 271403 - protein, 352 aa, unidentified
MESITVGIDLAKQVFSVCVMDGRGRVIQRHELKRDALHAWLLKLPAGTVVGMEACSGAHYWGRYCEQQGLVPRLMAAQFVKAYRKNSAVKNDRQDAEAIATAVRQGNMRFISVKTVDQQVRLSWHRVREGYKKDALAVTNRIRGLLAEFGVVIGRSAIALRRALADLEALQLPPELVQLVRLQQRYWEAIEACEAACSKKITDHAEQDERCQRIRGITGVGALSADAIVATVGNGSDFKNGRQCAAWMGLTPGQQGTGGVTRLGKISRRGDSYLRTLLIQGARSSVQRARLTPEDKATPEQLWIVQLAARMPFGKLLVAVANKHARQIWAMLARNEAYDAEAWLKHPMVQRD

SEQ ID NO: 271404 - protein, 371 aa, unidentified
MSSISTYVGLDVHKSSISIAAAASDPRSTADFHGRLPNDMGRLLRKVALFGAPSSVRVCYEAGPTGYRLARRLIAEGYSCIVIAPAKTPKAGSDRVKTDRRDAIKLATFLRNGLLTEVRIPTEDEEALRDVIRTREDLKRDESDLRRRLMALMLRHDRIWPEKSNWTKAHMKWLEMQEFERRGTTESKVCYLEQIKHLQRTVADLDAVIKDVALTGEQANLVHAFCAFRGFSILTAATIASEIGDFKRFETPSKLMSFTGLTPSESSTGDTRRRGRITKAGNTRVRTLFVEAAMHYSHAPRESVDLKRRSEGVHQSVKDIAMKAQKRLWRRRNKMLAAGKSPKKVTVALARELVGFIWAVAQEDHLTETED

SEQ ID NO: 271405 - protein, 396 aa, unidentified
MYYLGVDIGKNKHVASMIDDEGKSVFKAFSFTNTTEGGESLLTKLSSCAVVPSDVVVGLEATGHYWLATYSYLHDRGYKIHVINPIQTDGWRKGVEIRRRKTDTIDSVLIAELVRYGGFIESGLPDEHLISLKNLTRFRSYLVDSIADLKRKVICVLDQVFPEYEDIFADVFGKTSKEILLHFSTPAELEDISPDDLANMLETLSRRRHGKFTAQKLSDAAAKSFGVTFCRDSFSFQLRMLIEQIKYIESQVKDTEAEIEAIMEEIDSPITSIPGIGKITGAVILGEIGNIERFDSPTKLVAFAGIDATVRQSGEFDGTSNRMSKRGSPYLRRALYQSAVVASIGRNPDPILHAFYNKKRSQGKHHGTCIGAVCRKLCYIIFIILKENRIYELRNS

SEQ ID NO: 271406 - protein, 392 aa, unidentified
MVTPLSFYFLLKLLKARPAGRDEMVSPRYPNRRLCAMMEKQSLTINVEREETKMKITTIGLDLAKNVFHVVCFNDHGKEIKKRMLRRNQVLEFFTQLPPCQVSMEACAGSHYWGRQLRALGHNVKLISPQHVKPYLRGNKNDYNDARAIAEAAMRPDMPVVGIKTVEEQDMQALHRMRSQCLRDRTALSNSIRGLLGEYGIVFAKGVPTLRKKIPEILEDAENGLSLGFRNLLVRRYEQLVELEDHIAFYTKDLEGLSRQDEACQRLQTVPGFGPIVASAFRSVIGDGRTYARGRDAAASIGLVPRQCSSGGKNVLLGISKRGNKYLRKQLIHGARSVVLQAAHKEDPLSCWINRIRKERGWNKAVVALANKMARIGWAVLRDETSYHPATR

SEQ ID NO: 271407 - protein, 355 aa, unidentified
MTASYDYHIGVDYHKSYSHLVVQDSSGKTLRSGRVKNDRQSLGGFLEPYRENSHAVVEATRNWMVMYDWLDDICDDVVLAHPLKVKAIADAKIKTDKIDATVLAHLLRADLVPEAWAPSDKARELRIALRERMFYVRLRTMTKNRIVTVFDRYPEQAALLKKLADLFGSAGRVQLAELKVSPIDRIQIDRGLAFIGDINERIKQSEATIRAMTKANADVKLLKTIPGIGEFFARLIDAEVDDIGRFRTPKKLAAYAGLVPSTYSSGGKTYHGKIIKQGNKWLRWAFVEAVAPAIATDPQLRAQYEHLKNRGTNKARVAIARKLLTIVFHILRDQRAYQRRGTSTMEGASTISRSS

SEQ ID NO: 271408 - protein, 424 aa, unidentified
MKRTQNEKILQMKSETLVVGIDVGKDTHYSRAIDNRGVELGKLLRFSNTKQGYEALDSWMQKIMQEHGKTEAIVGFEPTGHYWFTLGDHLQKEGHRLGIVNPFHVKCARELDDNSPTKNDRKDPKTIAMLVKDGRYRDVYIPEDLFQELREAVIERERLLEQEIALSNQVIRWLDIRFPEFNEVFKDWSGTAAWLTLKSYPTPAKVMAAGVKGIVDTWRKGMKKPSHKKAERLIKAASESIGRMAGSEAAEASLQNLMTQYELIKQQRREIESLMQELMLRIPNASKLAAIKGIGMVTAAVIVSEIGDIHRFQDPRQIQKMAGLSLRENSSGRHKGKTTISKRGRKRLREGLFRGIITMLATNQEFRVMHQKNLTREKNPLTKMESIIALCGKLIRVMYVILTKGHDYDANKMMNDMNRSMKAA

SEQ ID NO: 271409 - protein, 342 aa, unidentified
MKITTAGIDLAKNVFQVHGVDDQGKAVLRKKLDRSKMVEYFVKLAPCLIGMEACGSAHYWARKLAAMGHTVKLMAPQFVKPYVKTNKNDAADAEAICEAVNRPNMRFVPVKTDEQQAVLSLHRVRQGFVKARTAQANQIRGLLSEFGEVMPQGIAYIAKRLPEIMEKPDLPGTFRDLLQRLYDHLKELDKQVDELDAKIQQWHKASDASKKLAEIPGIGPITATALVASIGDAKSFENGRELAAWLGLVPRQHSSGGKSVLLGISKRGDTYLRTLLIHGARAVIRFAENKPVTGWLNKLLERRNKNVAAVALANKNARIVWALLMHEDRKFRADYAPAIAGA

SEQ ID NO: 271410 - protein, 526 aa, unidentified
MVTKIKTRRKRKGGRSGKFRQAVLGKPDGIIQPRVQEVGPEKFGVVAVDCAKARSKWMLADFYGNVVVPPSQVEHDRNGLGIAVLTLRQAVEKRGLKDLIVGIEMTGTYHKPVWRAFRDAGFETRLVHPFASSHYRLVEHGDVKTDDHDLAAIFRTVVNGFGLVHKTADPVYQELQILARHRRDLVIKTSKLQCQIRHHLEQCLPGFTALFKGDDLWTQATPVPLLGEIAKRGGTAAAITGVGQEGVQRWMEDAGIRCHQRTLERVVVWAANAATHDPMVEAFTRVWLTLLNDWQQKKQQISTGEQDLAGLLAATPYILLLSHPGINVVSGAELAGELGPIEHYASATAIRGRAGLFPSRYQSDEVDRGGNLTRFRNGRLRRAWMMVADNMCKCNAWWMAKAARWSSQGADPRDIRSRIANRMTRTVFQMVAGRQIYQHPSCLGRGYIMDKLLTFHREHKTSPSVILRDLQRAALQLPTTAHADEAKPILEICRKGRRSRRSGPQELGTLLVAVLARLGVHDVDSE

SEQ ID NO: 271411 - protein, 352 aa, unidentified
MERYIGLDVHAASCTMAVVSEAGRRLKDFPVETNGQSLVEAVRMIPGHKHLVFEEGLQSAWLYETLRPHVTEIVVAGVARSRGMKSDKIDAYGLAEKLRAGTLDKHIFKAPRQFTRLRELSLVHVTLVRDVVRVQARIKSLYRSRGVAVSGTEVYGARHREKWQSQLPSSVQPRASRLYLQLDFLREQKKEAEKDLLRESRKHPIVEILETAPGMGPIRTARLVPIVVTPHRFRTRRQFWSYCGFGIVTRSSSDWKQTPDGDWIRARLPQTRGLSRQYNHVLKDLFKGAATTVIQQGDRNPIYARYQRLLDGGTKPSLAKLSLARMIAATVLAMWKHEEVYEPGRTLSSNET

SEQ ID NO: 271412 - protein, 425 aa, unidentified
MRFIGMDVHRDHCEVAIAEAGKVRAAGRVPTRPKVLEAFAQSLDPNDEVVLEATFGAVAIAAIIKPHVRRVVVVDPRRLKGMGPRKTDRRDAKVLAELLAAGYLEEVWAPDGATQGLRRLVSRRAALMRARTRAKNEVHAALARNLCPRPPMKDLFGKGGRVWLAEVPLPADEQLTVDGCLRQIDALQEEIAKIDVALAERSLASSEVRRLMTVPGVSMQTAVTFMAAVGDIHRFPTPRKLVAYLGLDPRVRQSGESAARHGGISKAGNSDARHMLGEAAWSVVAAPGPLKSFYERIRARRGTQVAAMAVARKLCVLFWHLLTREEDYAFAQPSMTRKKIRTLELATGAKPQRGRQHAGGPLRNPKVREAERAVSAQAELAYRRFVTDWRQQGGEKGAGATPGRASNRPSTGQPARQDSAPDPAL

SEQ ID NO: 271413 - protein, 310 aa, unidentified
MEQMFVGIDVAKDRLDVHVRPSGEAFAVARDSEGLAALVDRLAGLAPVLIVLEATGGFETVVAAALGAAQLPLAVVNPRQIRDFARAIGRLAKTDALDAEAIALFAERIRPEPRPLPDEQSRMLAELVARRRQIIEMMTAERNRRRSLTGRRVLKGVDRLLAALQKELTSLETDLDQTIRGTPAWREKEQLLTSVPGVGDKLARTLIADLPELGQLDRKQIAALVGVAPINRDSGTLRGKRTTWAGRSKVRAVLYMGALVAAYHNPILSSFYQRLLQAGKPKKLALTAVMRKLLTILNAMIRDKTPWQNA

SEQ ID NO: 271414 - protein, 365 aa, unidentified
MRIDIGVDLHTTQFTVYARGEEKSGVNGQYLTNEEGYKSFLRKLGQWTRSGHDIRIGVESTGNTRYFKHRMEEKGYSVVVINTMKFKVINESVKKTDKHDAATIAEFLSKDMLPESRLCSEASEQLRRLLKVRSTLVRTRVTVKNQIHGLLISMGMEDTRASLQSKRGRQRILDTLAGAGNGLVVQPLFETIDRLSENVKAIEGEIEKLVAGDRVVKLLQTIPGCGPVTACTIRAYTDDIQRFSNHKKYASYAGLAPWVQCSNETEHYGRITKRGPEELRTAFVQLVMGIRRSRQSASWRLMERYEAMKRVKGSGKSIIATARKLSRIVWVMLTRGEEFNVSLMTDRTLEGLSNSMRAAVVSLSA

SEQ ID NO: 271415 - protein, 373 aa, unidentified
MSFTSNNILVALELSNSLWLVGTRMPGAQKSHMHRIDAGDTAALLSLLSGLQSRQRAQVSRAPIAVCFEAGRDGFWLHRLLTAHNIPTYVVEPASILVNRRAKRAKTDRLDAEGMLRVLAAYLGGDNQICSMVHAPTPDEEDGKRVHREREYLVQERTRIENRISALLATQGIRSRPSLRSWERDMAALETGDGRKLPRHLAAELNRLRRRLVLVRDLICELDTERDEHLAATSGDAITTKVTALSGIYGIGDNFAAVLAREVFYRHFGNRKQLASYVGLAPTPHQSGNVDKDRRIGRAGNARARKTLVQAAWLWLRYQPGSELAAWFRQRVGELKGRTRRIAIVALARKLLIALWRYTETGEIPAGTIFRAA

SEQ ID NO: 271416 - protein, 473 aa, unidentified
MAKGSGGSGMTRGDRRRNARRERLRELLPREGAVIGIDLAEDKQAIAVIDHDARVLARKTVRVKAFRLGQALDWAVAQARGKGFEQVTVACEPTGPRWMQVQRLCAERGLPLVCVQPLVSHIAREQQDYTTHKTDESDCVLIGRLAAELHCYIPEELDETWAHLRHLGRRRAQLITAATASVQRIRDFLSVAWPTVTEACAQPFESVTWLAALQVVTGRCGGDPAGLAVLGLEEFTTVVRGAVPGWGGKKGWGRIIGRVFATLTDTEGAVTWSRRGLLRRCADELGDLARTRAQLRAVEADMAMVLDELGLSRLGDIPGLSAVGAAAILAETGDPRRYDSSSSLVKHAGLSPSDNASGAFEGQARISRRGRPGLRLTAWRAAWAVILHNPVMAAKYQAMTRAADAAAAGAGPQQAPASQAAARARRARARVACAASLLRWIYCMTVHDTSWDPAVASGAASWHDTPHNQAEAA

SEQ ID NO: 271417 - protein, 455 aa, unidentified
MKEQRKKKANMSDEQFSLAVINQQSGAIDVGSTMMMVSYTDSNGKHHLVEACAYTDDLELLVTNMQAAGVQKVAMEATGVYWMVLYEILERHGLEVSLVNPKHFKNVAGQKTDVIDCQWLHQLHAHGLIRASHVAPEIYRELRTYIHERNILQKQKSDTLNRIHKLLTQMNIKVQHLISDIEGVSGMSLLRGIASGIKDVDELLSLIDVSKLKADRADLVKSLKGIFKESNICILKYTLKSYDFFKSQMREYEVLIESVLKKMMPIDKHGNKPVVKEKKAYVRKNQYSINVKEYLHRITGIDLTKIDGLDEISILEIISVTGLDMNKWPTSDHFTSWLNLSPRPKISGGKIIGYQKRFTNNQATQCFRMAAQTMWQNKGPLGQLYRRLSYQKGSRKAIKALARKLAVIFYIMLKNKKEYDKSRLQFDTEKQMLIKIARLKKEASKYGFILQSVAA

SEQ ID NO: 271418 - protein, 374 aa, unidentified
MLELIFQKKNMIALSQTRMEKSYLNLLPSQTAKKDLKPYFKELNLLQKILNRVKVGLEATGHYSYNLLGFLLDKGLPTYVINPLHTNLYRKSLSLRKTKTDRVDSCTIATMMMSDMNLKSYSDTSYHNEELKSLTRYRFDKVKERAKLKSSISRLVTILFPELEKLIPTLHMASVYTMLPEFPGASHVASAHLTKLANLLSQSSKGHYGKDTATLFREAARNSIGSVMPAKSLELKHTIKLIQELTAEIDEIEAAIKQIMDNEIKSPILTIPGISYRMGAMILAEIGDFSRFDSADKILAYAGMSPSTYQSGKLDNCYSHMEKRGSRYLRYALYNATKYVCHWDESFGAYLERNALKANITTLHYHMPRRNLYV

SEQ ID NO: 271419 - protein, 355 aa, unidentified
MKQEKYIGMDVHQATISVAVMDSSGKLIMECILETKAATILEFIHGLRGSLSVTFEEGTSAAWLHDLLKPHVTHLVVCDPRKNALLKDGSKSDRIDARKLADLLRGNQLHPVYHGEHGVRTLKELGRSYQTLTKDVTRVMSRIKSLYRSWAIPCSGTTVYAARHRAEWLAKIPQPGVRLRAERLYQQLDLLQPVRQEARRDLLRESHQHHAVKLLRQIPSIGPIRAALLVALLQTPHRFRTKRQLWAYSGFAIETHDSGEYRYVRGKLQRNRERITVRGLNDNHNHDLKNLFKGAALSASTRPGPLYDFYGALLENGMRPTMARLTLARKIAAITLTIWKKGASFDAKQLHRQAA

SEQ ID NO: 271420 - protein, 339 aa, unidentified
MYPFYLGIDLHLKRTYMVLMDAKGEIINKGRISNQEITKYLQEKVPQETYAVLEATRNWPFMYDLLNEHVGKVDLVHAKGVRAIANAAVKTDKIDASVLAHLARMNYIPKAYAASKEMRDLRQLLRHREWMVNQRSKAKNRIHAVLAAYNLISPVTDLFGVAGREYLHEVMEEDLRPSARQVVEDHLAMIDHLTERIHAIEKNISLNERQNHIVNILKSMPGVGRLIALILLAEIGDISRFHSPKALCSWAGLTPKVHSSDAVVQHGHITKEGSRYLRTAMVQAATTACRVSPKWYRVHEHMALRCGRRAARVAVARRLLTVIYYMWKKDQPYQENYGQ

SEQ ID NO: 271421 - protein, 343 aa, unidentified
MARFVGLDVSQKLTSICVVDDTGRRLWRGQCATDPEQIARVSSRHAGDDARIGIETGPMTPWLVHEFRARGLNVTCLDARHASAALKMQMNKTDQNDAEGLAQIMRTGWYRSVHVKSLDAHRARALLGARAQLVGMTTRLSNHIRGVLKTFGLLPGAMRGLPFDRRVEAMLADRDDLASIARPMLVAWRQLREQIAAFDKEVRALAKKDPTCRLLMSVPGIGVVSVLAYVSTVEDPKRFARSRSVGAHMGLTPRQYQSGEIDRSGRISRCGDTLARTLMYEAAVVILTRVKRASNLKDWAQAIAKRSGRGKARVALARKLSVILHSIWRSGETFRWSKQPAVG

SEQ ID NO: 271422 - protein, 384 aa, unidentified
MKFTRCGLDIAKQVFQLHGVDEHGVVRARKTLARAKVLEYFAQVPPCLIGIEACGGAHYWARELAKLGHIVKLMAAQFVVPYRKRGKNDVNDAEAICEAVGRPNMHFVAVKTEEQQAVLMVHRARTLAVANRTALANQIRGLLGEFGLAVPRGVAKLRRQLPQILEDAENGLPALAREVLAVLREQFRELDKLIQQYDLKIRELASASEPARRLMQLESIGSMTATAIVAGMGDPKVFKSGRNFAASLGLVPRQYSSGGTTRLGPITKQGDRYLRTLLVHGARSHLRVVDRKTDRKSAWARAVKERRHMNVAAVALAAKHARIAWAMLAKGTEYRPLQPEGAAAWRRSGPFGSHYLSGGRYFYSPGLRERSKRMEAGQTDAGRA

SEQ ID NO: 271423 - protein, 347 aa, unidentified
MRFYTRQHKHSCGIDLHARTMYLCVLDQTGAVLLHRNIPCDPVVFLDTIAPYRDDLVVAVECIFTWYWLADLCARETIPFVLGHALYMKAIHGGKAKNDKIDALKIATLLRGGMIPMAYVYPRDMRSTRDLLRRRLYLVRKRGQLLAHIQNTHHQYNLPEPSRKILYKVNRDGLAERFADPAVRRSIAIDLELVDHLDRLIRDLELDLVRTAKVHDPQTFFRLKSLPGIGKILSMTLLYEIHDIARFPRVQDFASYARLVKCARESAGKILGTGGSKIGNVHLKWAFSEAAVLFLRANPRAQAFLQKLRRKHGKAKALSILAHKLGRAVYFMLQRETVFDMHKFLAA

SEQ ID NO: 271424 - protein, 348 aa, unidentified
MLHAGLDLSRKKIDVCLLSEHAEIVEEFAAPPDADGLRALARRVAVHREPVRAVIESMTGARFVHDRLEELGWEVLIADAAKVKGLAPLACKTDKIDARVMAVLSHRDLVPEIWLPDPRVRREREQARFRMHLVKHKSSLKNRIHSTMITFGHPCPVTDLFGVAGRQLLDRLEVPQPWRGTIDASILLIDDLERQIDRVNRELRAGGADHPYVPLLLTVPGIGWVLAFTIAAEIGDISRFPTATKLVGYTGLCPRVNQSGDRDRRGPLTKQGPKYLRWAMLEATMHACRHDAYRDRYQRNKQRLGKQRGAKVAQIDIARRLTEAVWHMLTRNQPFTPSAGGSAFRLAA

SEQ ID NO: 271425 - protein, 393 aa, unidentified
MYLNIGIDVAKDVHEACILNDKGEQIGKYIRIKNFKSGIEKFRERVESTASELDLIPRIGMEATGIYWYTIYRELSKHYEIHLFNPSQIRGFAAVNIRGAKTDKIDAKTIAGMLRFGEAPKIDYGDKTRMDLKEYCRYRFKLKSNVINLKKRLIRNMHLIFPGYDQLFSSIFTRTSIAILNEAPRPLDMLEMGEEKLYELMRKTSRNHYSPEKARELLEMAKDSISSDFTEEALLFEVESLLKLIEYIEGQIKELEIRILAAWETVKDKHYLQTIPGVSDLMAATIWAELGDIENFNHPDQIVAFAGYDPKVKKSGNKEVISGPNKRGSRLLRWVLGRAVVQAKMFNPVIEQYFKKKISEGKHFNTALCAAAKKLIRIIWSVEKNKRAFQIPA

SEQ ID NO: 271426 - protein, 356 aa, unidentified
MLYLGIDQHARQITISLRDAAGDVVQAQQVSTQPEKINAFFQQLTRERLRRDESFLAVLEVCGFNDWLIRMLHDFRCHKVILIQPDDRKRCKTDRRDAASLSELLWVNRDRLLEGKPVRGVRQVDIASSCDQENRRLTTLRKEAGGARTRLVNKIKHLLRRHNLQWEMPTKTFPTGAAIAWLKGLVLSEIDRLEMNHLLTDLEQVEKRLKELERVIAQRAVASKEVAILASMPGVGSGFTAISLACRIGRIERFPRARSLANYWGLTPGCRNSGENNQRLGSITKAGSSTARWLLAQLVYKVLRRDARLREWFKRIKRRRGSTIARVAVMRKLATIIWYMLSKKMTYAECRACVAA

SEQ ID NO: 271427 - protein, 358 aa, unidentified
MKILAIDLGKFNSEVCVFDRSTGEIRFQRIGSDRLFVRRVLEVERPEVVVFEACTMAGWVFDLCRQLSLRAKVANTSGEAWKFKNLKRKTDRDDAQRLVTLESMGELPEVRVPPASVRERRSLIAYRQSVVGRRVAVQNQIRAVFLGQGIAAPRGHRAWTAAGVEELRRQARPLGDCSAGELWRGQLFELLEELDGLWRRLESVEKKLDELAKADPATLLLETTPGVGRRTAEVVAAYLDDAKRFSNGREVSAYSGLVPRQYQSGELDRRGRITRRGPSLLRKLLVEAAWCSLRYNAWARDIVARISRGQRTRKKQAIIALARKLLVRLWAMLRDGEPWRDGPPDPARAAATSMAVQT

SEQ ID NO: 271428 - protein, 343 aa, unidentified
MSGAYEGRQIVGMDLHRRRSVLVRMTETGQHLETVRISNDPEYLREVMTRAGEAPDVVLEATYGWYWAADTLAELGAQVHLAHPLGVKMFTLRRVKNDQRDAADLADLLMGRLPEAWIAPPATRELRGWVRHRAKLVGLRSNLKCQVHAVLAAAGVAVSMSDLFGASGRQLLAATRLSVESRSRIDSLNRLITALDFEIDLYTRLVAGRLRADPGYRAVQTIPGVGAVLGAVFVAEIGDITRFARPQQLASWAGLTPKHHESDTTVHRGRITKQGSRLVRWAAVEAVQRVPAHTRFGQRRDRIAQRRGRNIGVVAAARDLITLVFYGLRDHHIRCLPSGTGAA

SEQ ID NO: 271429 - protein, 344 aa, unidentified
MCSVPSQTVFVGLDYHSESIQVCVLAGNGKMLVNRSCRNDWRTVAAAVRERCGPQADVQAAIESCCGAADLADELIAKANWSVDLAHPGYVARIKQSPDKTDYSDARLLADLERVGYLPRVWLAPEEVRELRRLVRYRQTLAKERRNLKLQIGATLREARQKPPADLNAWTKAWLAWLTDAAVLSPNARLITRRRLSRLAALAKEIRSVERLLARQTAKDTLVQKLLTLKGIGLVTAVTIRAEIGRFDRFRTGKQLARFCGISPRNASSGARQADAGLIRAGNPELRTVLVEAAHRLMRYDEKWGKLAARLSLRGKPVSLITAAVANRWMRWLFHQMQPEALAA

SEQ ID NO: 271430 - protein, 356 aa, unidentified
MPVYLGVDFHARTQTVCWCSTEDGVIHQRTLDHERDNVPTFYAQFATPAIVGLESSGYALWFHRLLAEQGHHVLVGDAFAIRQFAKRRQKNDRRDAELLLDLLLRGDFPAVHVPPPASRDVLGLLRYRHRLVRMRTMLRNGLQAVALNHQLRLGPSLFTARGQQQLSALPLDGADATQRLHSLALLAALQKKILEVEEMLGARAAADPRVTCLRTHPGVGLLTALAVVHTLEPVSRFDRARRVAAYCGLDPKEHSSGETQRFGHISKQGNRLLRFLLIEAAHRAVAPGQDDDLRRFYYHLLVKKHAAVATVAVARKLVLRLYRMLRDQIAYDEFRRRGRDARRAREVSSLPIHRDG

SEQ ID NO: 271431 - protein, 465 aa, unidentified
MTPHKDAFPDPRPPAPPLPQPSVLSEALQVCHPHAAGIDIGAAEHWVAVPPGCDPQPVRRFGTFTADLDALADWLIDCGVTTVAMESTGVYWLPLFELLEARGVQVLLIDPRQAKRAPGRPKTDRLDCKWLQRLHAYGLLAGAFRPEDQVCVLRSYLRHRQMLLTSAAHHIQHMQKALQQMNLKLTQVVSDITGVTGMAIIKAIVAGERNPQRLAQLRNPHCHHDTDDIAKALQGNWRAEHLFALRQAVELYEVYHQQIAQCDQQIKRHLETFADKSAGQPLPPKARRHNKTNEPRFDARTPLYRLAGVDLTTIEGIEENTALIILSEIGTDMTRWPSVKHFCSWLGLCPQHQISGGKVLSRRVRPGAHRVTVALRLAARSLHHSQSAFGAFFRRMKARLGTPKAITATAHKLARLVYGLLKHGTAYVQQGIEAYETHYRERTVKAMVRQAKTLGYALVPLAVQG

SEQ ID NO: 271432 - protein, 359 aa, unidentified
MSDAITKETTLTVGLDLGDRYIQVCVLDETGEVVEESRLPNRRAALERRFGVCEPLRIVLEAGTHSPWVSRLLVDLGHEVLVANPRKLRLIYKNESKSDRVDAEYLARLGRLDPSLLAPLRHRSAETQKDLAVLRSRMCLVRARTRLISHVRGAVKSLGGRLPGCGADTFARKAEEHIPHGLRPALAPVLATIEKLTGEIKALDALIEKTARESYPETTLLTQVPGVGTLTAQCFLLTIEDPARFPRPRAVASYLGLRPRQAESGSLSPQLRITKAGDDHLRWLLVTAAHYILGPFGPDSDLRRWGLALCEKGGKSGKKRAAVAVARKLAVLLLRLWQTGEIYEPLRNANRQQMAPVCT

SEQ ID NO: 271433 - protein, 315 aa, unidentified
MPVATKDVFVGIDVSKDWFDVAVRPTGMAWRAAHDEAGIAALVQRLQGLQPRLVVLEATGGYEIPLVVALGTASIPVAVVNPRQVRDFARSLGKLAKTDRLDAAAIAHFGEASGAVAQPLAAPEARELEALVARRRQVIQMKVAEQQRRARALPVVRERIDRVLTVLTQELLDLDQDLTNRLRQSPLWREREDLLHGVPGVGPALTFTLLADLPELGSLTRRQIAALVGVAPLSRDSGKLRGQRTCWGGRANVRTALYMPTLVAVRHNPVLRTFYERLLAAGKPKKVALTACMRKLLTILNAMLKHQTPWSSQYA

SEQ ID NO: 271434 - protein, 339 aa, unidentified
MVIIGIDPHKATHTAVAVDENEAVLSKLEVRAARDQRDRLLRWAARFEERTWAVESAGGLGELLARELVDAGETVIDVPATLAARVRLLGSGKSHKNDPNDARSTAIAALRQPRLRAAGVDSDATTVRLVVGRHHDLGRLRTQSVCRLHRLLCTIVPGGHPRRMSADQAERMLAGIAARTVVDATRKEMALELLADVRRLDADIAVSRQRVVAAVNATGTSLTDLYGVGPVVAAIIIGHVGDVRRFPTRDHFASYNATAPIEASSGPKKRHRLNPRGNRMINYALHMAAVTQIRNDTPGRAYFDRKLAEGKTKKEALRALKRRISDAVYRQLILDLEHR

SEQ ID NO: 271435 - protein, 359 aa, unidentified
MNKNSMYFVGLDLGDKHSYIAILNQDSELIEETRLPTTIASFQRKFSSLQPCRIAMEVGTHSRWASHLLTELGHDVLVANARKLRAIYHNPRKGDRADAEILARLARLDPELLSPIHHRSPQAQADLAVLRSRDAIVRCRTLLINHARDIVKASGSRLPSCTADSFAHKVAPDIPEPLRPALDPVLDTIASLTKQIKSYDQKNEELFSERYPETRLLRAISGVGPLTSLAFILTLENPDRFRRSREVGPALGLVPRRDQSGDQDPQLRITKTGDAYLRRLLVSSAQYILGPFGPDCDLRRWGLKLSERGGKNAKKRAVVGVARKLAVLLHHLWKTAEVYDPFYQLHKEKTGSAALPAVA

SEQ ID NO: 271436 - protein, 341 aa, unidentified
MSKHRPPHESFRNPNSCWGLEPVFTRLDRLENAVFVGIDVSKDTLDVTWLPDGSYRQFSNDDDGVGELVALLEQQRPQLTILEATGGLELLVVAQLGTAQIPVAVVNPRQVRDFAKATGQLAKTDRIDSRVIAEFGRALRPSAQTLKDEQSRDLAALVARRRQLIGMIAAEKNRLLRAQSATAKDIRSHILWLEKRVRLIDDDLQKSIKSTPMWRERDRLFQSVPGVGPGTAQTLIAALPELGCLENRQISALVGVAPLNSDSGKMRGRRIIWGGRAQVRTILYMAAISAIRCNPVIKAFAERLRAAGKKPKVVIVACMRKLLTFLNAMARSGESWQPRTA

SEQ ID NO: 271437 - protein, 418 aa, unidentified
MKKDSKFSQQSEPTLKRTKAHGPVQRDAKEVLAEVLGKLTGKLDGRAVSTSAKENRRGNTVGPNRDRLTVGVDLGDRWSQYCILGLEGETLAEGQLRTTQEDVGEFFQALTPARVVIEVGTHSPWVQDVITELGHEVLVANPRLMEGSKRRKRKSDRIDANKLARLGRVDPQSLYPIRHRSREVRQDLVVLRARDALVSVRTELINTTRGLVKSMGTRLPRCSSPSFAEKVKDAIPVEAREALLPLVQLVETVNDCIEKYDQRIEELGRKKYGHTSLLRQVKGVGPITSLAYVLTLEDAQRFSSSREVGPYLGLVPKQEDSGDSQPQLGISKTGDRMLRRLLVGSSQYMLGAFGPDTDLRRYGLRLCERGGKNAKKRAVVAVARKLAVLLHHLWVSGDVYEPLRHTGAGSRTAQARAA

SEQ ID NO: 271438 - protein, 415 aa, unidentified
MNRLIERCAMLDIHKSQITACVRVPDGDGGRRQEIHEFSTTTAGLITLADWLRSYAVTAVGMESTGVYWRAVYYLLEDEFDCRLYNARHLRHVPGRKSDVQDAEWGCQLVEHGLVRASFVPPRPLRELRDLVRYRKAKIQERVREVQRVEKTLQDAGIKLSSVASEVLGVSARRMLDALISGTHDPDVLAELAKGALRKKIPALREALQGRFTGHHALLIGQMLAQIDFLDETIATLSERIEELTRPFSRELELLDTIPGVDKRAAELILSEIGPDMSRFPTEHHLASWGGMCPGQRESGGKQHSAKTRKGSKWLRGTLTECAKGVVRTKGTYLSARYHRIKSRRGHAKATIATGHKILTAAYHVLDQGVPYHELGEEFFYRRDTEATERYRRRLIKQLERLGHQVTLEPLPEAA

SEQ ID NO: 271439 - protein, 350 aa, unidentified
MGVQEMKNTVIGVDLAKKVIQVCVVQVNQIVSNDEMSCSQFTSWLAMAKPAVIVFESCATSNYWKQVAKEKGHDARIISAKLVSQIRQNQKTDKNDALAIVQASQLVDIKFINGKTFEQQELQSIMRMRELAVKHKVALRNQIEALLLEFNIRVSSRNGGLGGTIQGVLEDAENGFCLPFRQALNTSWNRYVQIIEDIAEKDKLLAQAIQLHPECEKLLALEGVSTINAVNLYIAIGCEEAGTFKTGRDASACIGLTPLQHSSGGKTKLGSIGKSMKNIALRSYLVNGAMSVIHAVNRREPRTKKEKWLKQLLERKSKKCAAVALANKTVRTAFALLTQGTEYKAEPLVV

SEQ ID NO: 271440 - protein, 282 aa, unidentified
MSAFVGLDVHTEQTFATVLDQAGRVVAQQRMLNERVPAFLGRFHVARVGLEASTHVTPLHRRLVGEGYRVAVSHPKKKTRYIAEARIKSDRVDSKTIAELVRVDALPRSYMPPPAIAALRERVRRRAFLVRERAKLRTTIRGVLTYEGATPPTGHGLFTTQGVAWLHGLTLEPVDCYLRVMDPLNDEIRRVSLALRHLARDDEEARLLMTIPGVGYYTAVLVTAEVGDVNRFGSGEQLCSYAGIVPSTHSSGGVTRHGGDHPGGEPVAPVGPSGSRLDPPQV

SEQ ID NO: 271441 - protein, 411 aa, unidentified
MTDLPPAGCPAGTPTRSEGAINQGAKGRSVMRSVALDLGAKKIAYCEVSNGKVAARATVSSLESLESLLGPEAKPARVAIEACREAWFVHATLTKWGNEVLLVDTTRSRKMGIGQHRRKNDRIDAEVMARAVETGSIPAAHVLSPHRQELRRQLNVRRALVETRAQYVTTMRGLARELGCPLPRCGAEQFGAKMRKHALSQEVRIAIEPLLALLPPLEEQLAAVEQRLEELCALEPVVEQLRTVPGVGPIVAAQFVSVIDEAKRFRRAHQVESYLGLVPSENTTGGKRRLGAITKQGNSYLRSLLVQAAWSLYRQPARTDPLQQWALAVAKRRGKRIAVVALARRLAGVLWAMWRNDTVYDPELVARAGARGLHKAAQSTEFRAAALERAAAKLRRPRRPAHATEVKKTTK

SEQ ID NO: 271442 - protein, 343 aa, unidentified
MAIVILGVDLGKNSCSVVGVDGTGAVITRRSMRRQTLIGYAAKLPACMIAMEACCGAHHLGRLFEANGHQVRLMSPEYVRPYVKAHKNDDRDAEGIAEAASRPTMRFVDIKTQEQLDVQTLHRVRSRLVAERTNLINQLRAILLDRGIIFPAGRRKLEQGVDSLLVDESSILSSRIRQLTGDLRQEWKELDVKIEALNGEFVNLTRTDDNMRRLTSIPGIGVLNATALVAAVGDGRSFAKARDLGAWLGLVPRQHTTGGKPRLLGISKRGNTYLRTLLIHGARAALPVLTQNNTPLGHWLKAMIERGVHRNAVVVALANKLARVAWAVLRRQKSFECGYPVAV

SEQ ID NO: 271443 - protein, 342 aa, unidentified
MPHYAALDVSNEETAIHIVDQTGLTVWRGKRASDPDALATALRRHASELVRVGLETGPLTPWIFHTLKQRGLPVVCLDARHARAATALQRNKTDARDAETLAQLVRTGWYREARVKSFAAHAVRHLVGARAQLMGVSIDLSNQIRSTLKTFGLMAGKGAGRTFELRVRELLTNRPTIADIVVPLLAAWQAVRAQITVLDRRLIARAKGDPTCRLLMTCPGVGVIVATSFAAAIETPAHFRRSRSVGAYLGLTPARHQSGEVDRMGGISRRGDRLLRSYLFEAAASLLTRVRQDSALKTWGRDLVKRLGFKHAAVAVARKLAVVLHAMWKADAPFQAWPQTEA

SEQ ID NO: 271444 - protein, 426 aa, unidentified
MKRTQNEKISQIKIETLVVGIDIGKETHYARAFDYRGIELAKLLIFSNTAEGFQHLDRWMRDICKQQEKTEVIAGFEPTGHYWFSLGDHLKRKGHKLAIVNPFHVKRTKELDDNSPTKNDRKDPKTIAMLVKDGRYRDVYIPDDIYQELREAVAERERLQERLNATHNRVVRWLDIRFPEFAGVFKKWTGKTALLTLKIFPTPAKVLEAGADKILATWRTVVKRSVGIKRAQALVKAASNSIGRTTGHVASDASLQNLLAEYELYHAQHERLEQLMLELLLQVPNAAKLLKIKGVGLVTATTFVGETGDIHRFEHPRQIQKLAGCNLVENSSGKHKGKTTISHRGRKRLRHGLFMAMIAILGKNPEFQELHQRNLTREKNPLNKMQSIIALCGKLIRVFYTILSKGVDYNPEKMMGDIQQPVKIAA

SEQ ID NO: 271445 - protein, 369 aa, unidentified
MADRITYIGLDVDKDSIVVAVAAGGLRGEVREYGRIANTSAALDRLLRKLGGDGMTLRFCYEAGPCGYGIQRRLSTGGHECVVVAPSLIPKRAGDRVKTDRRDAASLAKLHRAGELTAVWVPDARHEAMRDLVRARLDAVHSLRRARQQLSGFLLRQGCHYGRPAWTRLHRRWLAGLKFEQAVHHIVLEDYIAAVEAAEARRNRLTAQIEPMLPDWTLAPVVAALQTMRGMALVNAASLIAELGDLSRFANPRQLMAYLGLVPSEHSSGASVKRGGITKAGNAAARRLLIEAAWSYRFPARLSRALLLRQERQPRLIRDIAWKGQLRLCARYRRLARTGKPANIVTTAIARELAGFVWAIARQVAVTTD

SEQ ID NO: 271446 - protein, 488 aa, unidentified
MVLLTADELAELKKPKPPSKNQLKKIDREQKKQIKKLRRKNYKKKIKVDSLKQINEDAAGLDIGVSEIYACIPEGRSNKNVQKFDTFTSDLCKLAEWLSEHGIKTVAMESTGVYWIPIFEILEKRGFNVNLINARQIKNLPGKKTDILDCQWIQQLHSYGLLNSSFRPEEQTVALRAFVRNREMLVKYRAIHIQHIQKSIEQMNIKLCTVIKDITGKTGMNIIRAITDGVRDTVWLAQFRDPRCFSSEALIAKSLEGNYKPEHLFTLKQAVRLYDFYTEQIKDCDREIELNYTAVKCYKGDKKELPPLPKKRKRNLKNKPSYDLRTHLYNLCGVDLTDIDGIDALTAQTVISEIGLNMDKWKTVKHFTSWLGLCPCNKITGGKVFYSGSKKVRNRATLALRVAARSLHRSKSALGMFYRRMRAKHGSLKANLAAAHKTARIIYSMLKSKQAYKDPGETYYFEKYRKQIVNNMKRQATSLGYELKKVGA

SEQ ID NO: 271447 - protein, 418 aa, unidentified
MKKHNNSPKKSEPTSRRTKARGPVQRDTKEVLAELVGKLKEKLDGKKVAAPSAEEEHQRDELGPNLDRLTVGVDLGDQWSHYCILGLQGETLTEGQLRTTAQEVGEFFQGLNAARVVLEVGTHSAWIRDVLCSCGHEVLVANPRLMEGSKRHKRKNDRIDANKLARLGRVDPQSLHPIEHRSKEVRQDLVIIRARDVLVAARTELINATRGLVKSMGTRLPKCSSPSFAQKVEETVPVEIRDALLPLVRMTAALSDCIQGYDKKIEKLGSEKYGHTALLRQVKGVGPITSLAYVLTLEDPQRFVKSRDVGPYLGLVPRQEDSGESQPQLGISKAGDRMVRRLLVGSAHYILGPFGPDTDLRRYGLRICERGGKNAKKRAAVAVARKLAVLLHCLWVSGEVYEPLRHGMSAATAHAVAA

SEQ ID NO: 271448 - protein, 360 aa, unidentified
MKIIGCDLHARQQTLAMLDSPTGEVVNVTLKHEGDNVREFYSKLPRPVRVGIEATGSMPWFVNLMEELGIECLVGHPAEIRAAEPRKQKHDRRDADLILTLLVENRFPAIWLPTKELLDLRALLRHRHQWVCLRVKIQNALQAIALANGLRRGSSLWTQAGQHAIASLPLSPHAAYRRNELQAMYAKFETETEKLNQRVEEQARERVRARLLMTHPGVGPITALATEVFLGDPTRFTNSKELASYVGMIPGEHSSGKRQRLGGLTKQGNPFLRFLWSEAAIHAVRRDPELRHFYRRKLIQKGLGKARAAVARKLGIRMWIMLRDGIEYNEFCRRGQMQQKSGDACAGMPGRVMVRKSPAD

SEQ ID NO: 271449 - protein, 378 aa, unidentified
MGSALEVQRRLALKQDSNKPRQSPKRRTFRADMVLTIGVDLGDKNSRYCALNKQGEVVAEGSVGTTRKAIVEKFQGLPSCRVALEVGTHSPWVSRLLAELGHEVLVANARQVKLISESSRKTDRIDAEMLARMARADPSLLRPIRHRSAETQAVLTKVRVRATLVETRTSLINTVRSLAKVAGERVPACAADSLGMADLKDLPAEMQQTLEPLVRHIESLTEAILKSEKELAQIARRDYPETEQLQQIKGVGTLIALTYVLTVEDAGRFKRSRDVGCYVGLRPKRSQSGERSPELPISKEGDIYLRRLLVQGAHYILSRLGPDTDLKRWGVKLAARGGKNAHKRAVVAVARKLSILLHRLWVSGEVYEPLRNHRAQAA

SEQ ID NO: 271450 - protein, 428 aa, unidentified
MTQGLSDPLAKRGVLRLMRLPVTAGAGPASAIWPDQKPVRPTGGVTHHSLAKRIPHPGRQPIANPHEGGLRKMLADEVDSVIGVDTHRDTHTAQILAAKTGALGPSTTTGADSLGYRRMLSFAEKHAPGSRAWAIESTGSFGAGLTAHLRKQGERVVEIDRPKRPARRNGAKSDELDALRAAREGLGRNHLSEPRRRGEREAIRVVLRTRQSAVHARSVAICQLKSLIVTAPEGLRSSLRRLGDQDLASRCARLRITSAQPIDHQMTVRALRCTARRALALEAEAAELEAELQPLIKAICPQLIAERGVGTISAAELINAWSHPGRIRSEAAFAMLAGVAPIPASSGQTVRHRLNRSGDRQLNRALHTIAMSRLQHDPDTRAYAQRRQEEGKTPRETKRCLKRYLARRLFRLLEAEAKMTQDRTHATA

SEQ ID NO: 271451 - protein, 470 aa, unidentified
MKKSTRTTPLVSKGISKTEPIPKHLEQINQWAAGIDIGATSHFVAVPEGCTTTPVREFKSFTPDLYALAKWLKECGIQTIAMESTGVYWIPVYELLEEKGFEVKLVDARRVKNVSGRKTDVLDCQWIQQLHTYGLLNGAFRPDNEICALRSYVRQRSMLIRSASRYIQQMQKALTQMNLQLHHVITDITGDTGMRIIRAIINGEREPALLANHRDPRCKSSKEDIEASLTGNYREEHLFTLRQSLELYDYFQEKIQACDSEIEKSLSGFSTNTLGKDFSVEKLKFNKKKVSKNAPAFNLRKELYRLAGVDLLAVPGINNISALQLLSEIGFDMTRWKNSKQFSSWLGLCPGKKVSGGKHLSGKTKPSNNKAAATLRMAASTLYRSQTSLGAYLRRLKSRIGPMKAITATAHKLAIIIYNMLRHGVDYIESGQAYYDEKYRERMIKNLKRKATEFGMSLIENQINFDPNIN

SEQ ID NO: 271452 - protein, 382 aa, unidentified
MQTIDTINPTILLAIELSASTWLVAARVPGLEKPHLHRIDGGDTAALLALISSLQARAARGLDATIGVVCCFEAGRDGFWLHRLLAAHGVVCHVLEPTSILVNRRARRAKTDRLDAEGMLRVLAAYLRGDHQACSMVRVPTPEEEDAKRTHREREKLVQERLRIENRIEALLFTQGIRKRPSLRSWERDLAVLRTGDGREIPRHLRAELDRLRRRLVMTLELIREVEAERDQAAKTKPQDRACHKIAALSRIRGIGENFAAVLTREVFYRSFDNRRQIASYVGITPMPYQSGGMDRDRRISRAGNPRARTTMIQLAWLWLRYQPGSELAEWFRERVGTLAGRTRRIAIVAMARKLLIALWRYAETGVIPAGAEIRAETTVAA

SEQ ID NO: 271453 - protein, 409 aa, unidentified
MELTPIYKRVIGLDVHQAQISGCAIVEQADGTVTVERREFGGFKRDRKALAEWAHSIGPDVVVMESTGIYWKSPFAALESVGIVAWVVNARHVKAVPGRKTDVADAQWLATLARAGLLRASFIAKADLRSLRHIARQRQKLGGMLASEKNRLHKLLTDAGIRLGVVVSDLHGQSARAMVKALIAGKSVPNVLSLASNRLRASREDIFEALQAEEITPAHRFVLTEIMAHIEELEARMARFDLELLRSLRDAGYEMPLQLLQTLPGIDLMGAAMLLVEIGADMSVFGSAQRLASWVGMCPGNNESAGKRKSGRIRKGNAWVRRLLCEFAQAAGRSRCALKDKFQSLNVRKGHKRSIVALGHKMLRTIYAMLSKKTHYVDKTVDYEALMVARNAPRWLQMLVKHGYVPAVA

SEQ ID NO: 271454 - protein, 370 aa, unidentified
MEQRSMFVGLDVHKESIDVSVAEEGRQGEVRHYGVIAGDLEALAKVVRALRAPDRRLRFVYEAGPCGFGIHRYLTAQGEDCVVVNPSSMPKRSGDRIKTDRRDGEALTRLHRAGELTAIYIPTPDDEALRDLVRAREDAVGLSTQAKHRLKAFLLRQGRRYPGRAGWTRPYRRWLADLSFPLAPQHIALQEYRDTIDETERRVERLTDQLRHLVPTWRWAPVVEALQALRGVSFVTAVGLVAEVGDFRRFQHPRHLMAYLGLVPSEHSSGPSVRRGGITKAGNPHARRLLAEAAWAYQGIPRIGRQMLYRQEALPKSVCAIAWKAQLRLTSRFRRLVARGKAKPKVATAIARELTGFIWAIAREVPAPPA

SEQ ID NO: 271455 - protein, 454 aa, unidentified
MPVPTSKISGCDMARLSRSLLVTNPDAAGIDIGSSSHFVAVPSDRDEVSVREFSSLTCDLQAIATWLKICRVRTVAMESTGVYWIALYELLEAQGFEVLLVNARHVKNVSGRKSDVLDCQWLQQLHSYGLLQGAFRPTEAVCALRSLSRQRSMLLRGQGRCVQHMQKALTQMNVQLANVISDIVGVTGQKIIRALVAGQRDAWVLADMKNARIQASRADIAKSLQGNWRTEHLFALQQALAAFDFHGQQLAECDTAIETQLQALHLYTGEPGKAKKRSNTRNAPKFDLRVQLFKVCGVDLTRINGIDVSTALIVLSEIGPDLSRFTSVKHFTSWLGLCPGTKISGGKQLSGKTKRTANRAAQALKLAAAALKSSQSALGAYYRRMCARLDKAKAVTAAAHKLARLIYFMLTKGEEYTDQGQDYFEERYKERVLRQLQKRAEKLGMRLSPAENVA

SEQ ID NO: 271456 - protein, 351 aa, unidentified
MMIIGVDYHPSFQTIAFLMEETGECGEQELNHSDGEAEKFYRDLQQRGISVRVGLEATGYSRWFERLLAELGFEVWIGDAAVIKTKRVRKQKTDREDARLMRKLLLENRFPRIWVPSPENRDLRQLLWHRHRLVQMRTRIMNQLQAVAMNEGYRWKKKLFSQQGRALLEKLSLAPWASRRRKELLELLDQLDPKTAELTAAVEQEAKKRPEVVRLMTHPGVGPITGLAYVLVIGTPERFPCGKQIGSYTGLIPCEDSSAGRQRLGHISKQGNALLRFLLVEASQAAARCNPDWRRRYLHLMMRREKRIAKVAMARKLAVRLYWMWRNGWGYSQLVEFGSNAGKLVIGHGVK

SEQ ID NO: 271457 - protein, 415 aa, unidentified
MEIIYSRVAGIDVGKREVAVAVRMPGNIPGQRRQLVRKYKTFYQMLREMVAWLVEQGVTHVAMEATGVYWKPVFHALCEAEQIEVLLVNARHAKNVPGRKTDVKDSEWLAQLLECGLLRGSFIPPKDIAAIRELTRYRKKLIEERTRELQRLSKVLEDGGIKIDSVASSITTLSARDMIEALIAGERDPRVLAELARGVMRNKIPDLTMACAGRFGDHHALLARMHTDHIDHIATMIEVLDHRIEEVVDPFAEPLRLLRSIPGIGERAAQVIISEIGVDMSRFPTAAHLASWAGLCPGNNESAGKHKTGRTRKGNVEVRTILTECAWSAGRTGTYVGAQFRRMHRRFGKTGGGKAAIAIAHTLIVIIWHVLHDRAEYRDLGADYFTRYDNPDARKRRLIHDLQSMGYEVTIAPAA

SEQ ID NO: 271458 - protein, 355 aa, unidentified
MNNIKYIGMDVHTATISIAVLDDAGKLIMDSVMETKASTVLQFIHGLRGNLYVTFEEGTWAAWLYDLLKPYVTNIVVCDPRRNALLKEGSKSDRIDARKLAELLRANLLRPVYHGENGLRALKEVARAYLTIGKDLTRVMNRVKAIYRSWSIPCAGQSVYNPRHREEWLGKITQASVRRRAELYYEQLDALVLLRKQTRKELLAEGKKHQAWTLLRSIPALGPIRAAVLMAIIQTPHRFRTKRVLWKYSGFGVVTHTSADHRYVQGQLERSKKPALVRGLDPVHNHNLKDVFKGAAIQASTGKGPFRDFYDALVAKGMRPEMARLTVARKLAVITLTVWKKGVAFDAKYLKPQTA

SEQ ID NO: 271459 - protein, 416 aa, unidentified
MNAAGIDVSSRKSTVAVLRPFGEVVRIPFEVNHSAEGLASLVQQLKAIEGETRVVMEHTGRYYEAVANVLHEAGFFVSAVNPLLIKEYGGNSLRRVKTDKADAVKIARYALDNWADLRDYTPMDRIRYDLKTLNRQFHLASKQKTATSNNLIALLEQSFPGVRKCFDSPVRSDGTQKWVDFAHDFWHADCVRKHSLAAFTERYRKWCKRHGYHFRQGTAQQVYDLAKSVVVLVPKSDLTKVLVQEAANQLTTISKSVETYRAEMDHLASQLPEHPVVMGMYGVGDSLGPQLMAEIGDVRRFERKQSLVAFAGVDPMPNQSGEKNVRSNKSSKRGSPYLRKALFNVMTCYLQKAPADEPVFQFLDRKRAEGKPYYVYMTAGANKFLRRYYGKVMEYLSTLEDLPPVDMDSTGLPKHP

SEQ ID NO: 271460 - protein, 422 aa, unidentified
MSYCPVAGIDVSKRFSDMCILSPDNKIFAQEKIYHDETSINRANALLQKAERLFFSKPVIVMESTSHYHLILFQFFSEHGYDVIVVNPLQSNSMKDFSIRKRKTDRVDAFKLAMMYRTKTLRPSQIPQTATRALRQLCRHRAELLNDVSSYKNRLTALLDQTFPGYDKVFSDVGGVTSCAVLVRFPTPTILLVEEESELVEVIAAASKSGYSFAKKKAGLLISAAQKAQTLGIHSCADATLIVCTIQMLRTLSESVLQIEAAIDHLLAQIKEMRSNVSLLQSIPGIGSHSAALLLGEIGDISLFKKPKQLAAYFGLDPTERQSGSFRGTKNKLSKRGSPYARAALHMGVVNAICKHGKDSAANPVLLSYYEKKCKNKPAKVAQAASMHKLVFIIFAVLRDQKSFELKTPEQHAVEQGFVKAA

SEQ ID NO: 271461 - protein, 371 aa, unidentified
MDESTKMLFVGLDVHKDTIAVAYAPDDRGADVVSLGIIGTRQCDIDKLIRRLESKGATLVFVYEAGPCGYWLYRYLTRRGFGCSVVAPSLIPRKAGDRVKTDRRDAVTLARLRRSGDLTSIYVPSVDDEAIRDVSRGREDTMRDLKRAKVRLKAFLLRQDLRYEGRANWNAAHLRWLSRVVCPTPAQQIVFQEYVRAVTEQTERLQRLERELHERVKGWRLYPVVEAIQALRGLELTGAIVLVAELGDLTRFDTPRKLMSYLGLTPSEYSSGGRRRQGGITKAGNGHARRVLVEGAWAYRYPAKVSRHLQLRLEKVPAEIQGIAWKAQVRLCKRYRQLSARGTHANHVVVAIAREMAAFAWAIARTVPVAA

SEQ ID NO: 271462 - protein, 331 aa, unidentified
MEQVIGIDLVKRVFQLNIVSPLGKTIKNTVIMREKLTEFIAQQPPSKIVMEACGSANYWSRQFKRFGHEVKQISPQYVSPFRMGSKNDKNDAVAIVEADRRPGMRYVPEKTQEQPDIQCLHRVRQRLMKNRTALINQIRGLGLEYGIAIPESAHKVEQCLPDYLENAENDLTPLSRELFQELLRELKEQQQRLNVLDKRLDQLNAQQEDIRRLLTLPGIGPLGASALMVTLGDSTYFKNGRHFASYLGRVPREHSSGGKVRLLGITKRGDSYLRGILIHGARSVVYRVQKLPDEQCNGLQRWLKGVIARSGSNKAAVALANKKCPHCVGLS

SEQ ID NO: 271463 - protein, 341 aa, unidentified
MKNKSFIGIDISKNVIDASIFCEGTPIKDFPHAVFNNSRKGFGEMCTWLKKNHVVLSNCLFGMEFTGSYSMELEKFLNARKYQFCMLSTHVVKHHPMGPKDKSDKIDSAKIADFLYRYNGTECVKPYNMPDKTMQRLKALMNERKFLVEQRTCFMNRRQLCTTKEDTQLYDGYIKKLNHDIENIELEEQKLLATDDSLLATYKNLLTIPGIGFVNAMNVIVITRNFTAFETARQYASYVGVAPHFRTSGTSVRWRPRPSARCDGQAKADLSMAATVAVQYDAELQSFYNRKLGGKQDSDTKRKALNAVKFKLVLRMFAIGKQNRKWEPLDSKSSNEKLAIS

SEQ ID NO: 271464 - protein, 391 aa, unidentified
MDEAWAGVDAGKEFHWAHVLDVSGRQLLSRKVENDEADILRLIVEALSLAEEVHWAVDQPGGGAALLLALLWERGQKVLYVPGLSVDRARDTYRGESKTDARDARVIADQARMRPDLGELRPGEQELSELQLLLARRRDLITDRSRTITRLREALLSLFPALERALDLNSKGPLILLTHYQSPAQLRRAGHKRVAAYLRNRGVKGSSSVAHRALSAAGSQSVTLPAQEVASHIVAELAGEILALKERIESIDEELQKRFFARPEARILTSLPGMGAILGAEFLVCVGDISAFESADRLAAYAGLVPAARDSGKRVGNHRRMRGGNKTLKRVFYQSAFASLRGSAQSRAFYDRKRAEGKRHTQALIALGRRRVNVLWAMLRDGTTFEARSAA

SEQ ID NO: 271465 - protein, 321 aa, unidentified
MSDTTGPGGATHVGIDVSKERLDVCFIPEGEHFVVANNEAGIQSLLDRLLEACPTLVVLEASGRYERPAAAAIASVEIAVAVVNPRQARDFAKATGRLAKTDKIDAEVLARLAAAVGPRPSVLPDEEAQALQAILTRRRQLLEMLVSENNRLKMAPKAVARRIRAHIKWLEKELQRTDKDLDEAVEENAAWKENEALLRSVPGVGPVLARTLLAELPELGTLDHRRLSALVGVAPFNRDSGTFKGKREVWGGRAPVRAALYMGALVAVRHNPIPKEFYEKLLSAGKPKKVALVACMRKLLSILNAVMRDRAPWRPTHVFSP

SEQ ID NO: 271466 - protein, 324 aa, unidentified
MDLDSGEVFRGRIAPADRAQLRQWLDRFLGRTDVAFALEGCTGWRYVVEELHRAGITAHVAEPAETAARRGPKRRAKTDRSDAQLLRDLLLEGRIPESWIPPQPVLEARALVRLYKDLLDERTGWLQRVHASMFQMGVPDLDVSTMSAAGRDRITAAELSVATRTAVDVAMRQVDRLTAEMTMVREQIHAIGRRQPACRALQAAHYGIGPLTSVVIWAEMGDTRRFRSSDDAVRHAGLDVTVYSSDGRRSAGHLARQGPPMLRWALYEAAVYAGRPSSPDHAYFQQVKARLDGQLALLSMARKLARRCHHTLRNLDDQVLAPAA

SEQ ID NO: 271467 - protein, 369 aa, unidentified
MKKRIKNIGLDVHKNSISIGIANDGRDGEVRYYGKIDNDMSQLDKVIRKLVSEGAVLRFVYEAGPCGYGIYRYLTNNNMDCVVIAPSKIPQQSGNRLKNDRRDCLSLARLHRAGELTPVYVPTPEDEALRDLVRARIDATRALRVAMQQLGAFLLRHDIVFPGKTKWTKTHFNWLSSVALPHSAQVFVLQEYIDRVTDCINRVQRFTEQIRLQSCQSGRHELIKALQAMRGISLIVAATIASELGDLTRFETPGKLMAFLGLVPSEHSSGEKVKKGSITKTGNRHVRNALVEAAHAYRFSARKSRIIRKRQEDLPKNVIDISWKAQCRLCPRYQYLMAKGKKVNVTKTAIAREIAGFSWAIAMELARAA

SEQ ID NO: 271468 - protein, 415 aa, unidentified
MKSWKEITYYGGFDWAHDHHDVVIVDRGGEIVADFAIKHTAEGWERWRQQVATLGAENLAVCVETNQGLVVEQLLASAVSLYPIAPVSSKAYRERKAPSGSKSDRLDAWSLADALRLDGHAWKALAKEDPLLAELRLLCRDEVLLIEERTALVNQLQSALHEYYPAALEAFEEWTLPAAWAFVEVFPTPGALAAGGQRKWEKFLHVHKLARPQTYAKRLEIFARGSELAAGEALTRTKSRLALARIRMLRTLQSQIEVYRAEIEKLFAKHPDHHLFGSLPGAGPKIAPRLLGEMGSDRARFDDPSALQALAGTAPVSYQSGQIHKVYLRRHCNKSLRATIHLWANLSRRASPWAAVYYQALRARGKSHACALRCLGQRWLKILWKIWQTRRPYDPDLHSRNQLQHGSWILALQRP

SEQ ID NO: 271469 - protein, 422 aa, unidentified
MLEQSQDDEQIIARVAALDIGKAEVMCCIRVPRDAPAGRRRQEVQAYSTMTRSLLVMADRLRELGVTRVVMEATSDYWKPVFYLLEAHGFDPWLVNAKDVKHLPGRPKTDKLDAVWLCKIAERQMIRPSFIPPPPIRQLRDLTRYRVDLVSARTAEKNRAEKLLEDAQIKLSVVATNIFGVSGRDMMAALIAGERDPRVLAQMARVRLRAKMSQLEEAFHGHFTDHHAFLLAKMLARVDAISADIAEIDERIEAQLRPFADAVTRLQQIPGIGPVAAAVIIAEIGTDMGRFPTAGHLASWARFTPTVKQSAGHNKGNGSTGRGNPYLARILGEAVVAAGRTRTFLGERYRRLARRRGKQKAIVAVGRSMLIITWHLLSSPSTQLADLGPSFYDSRIQPDRKKREHIRQLEALGYKVNLEPAA

SEQ ID NO: 271470 - protein, 357 aa, unidentified
MQPQRTKVDFTGQHIFVGLDIGQRAWKTAILTAELEHKTFTQPPRVEVLVNYVYRTFPGAQVHCVYEAGFSGFWIHDALRQHGIDCIVVNPADVPTTNKEHVLKTDRVDARKLARQLRNGELTPIYVPPRNALEVRSVVRMRWSFVKKQTRCKNQIKALLSFYGIALPKEIQTQHWSRRFLAWVENIALLDPNGKHALLALVSELYHLRDIIAQLTKQIRQIAQDEPYQPLVAYLVSIPGISILAAMILLTELVDIHRFQNPDRLASYCGLTPGEHSSGDTELITGLTPRRNPLLRAVLVECAWVAVRRDPVLLAAFSTLSKRMLKQKAIIRIARKLLNRVRYVLKHQQPYQIQQGS

SEQ ID NO: 271471 - protein, 476 aa, unidentified
MGKGSGTTRGDRRRNARRERLRAMLPRDGAVIGIDLGDEKQAIAAVDHDVRVLARKTARVKAFRLGEVLDWAVAQARGKGFTSVAVACEPTGARWLQVQRLCAERALPLVCIQPLVSHIAREQQDYTTHKSDESDCVMIARLATELHCYIPEELDEAWAQLRHLGRRRAQLITSATASVQRVRDFLSVAWPVAPEACKHPFESVTWLAAMQVVTSRCGGQPEKLAAIGLAEFTALVRQAVAGWGGHRPAGPVCRAVFAALTSTEGVVVSHRRGLLRRCADELGDLRRIRAQLRAVEADMVAVLGELGLSRLADIPGLTAVGAAAILAETGDPRRYDSSSSLVKHAGLSPSGNASGAFEGQAHISRRGRPGLRLTVWRAIWPLLIHNSVMAAKYAAMIAAADAAAAQAAQAQSGTGSRQGSAAAAARARRAKARVACAAALLRWIYSIVVHDTGWDPDVASGAASCQHAPRCRAEAA

SEQ ID NO: 271472 - protein, 387 aa, unidentified
MKKLYSKVACSGMDVHYEFSKVTFRDKAGRVVRRERLDHRDRERLRERIARWPKGLPVVLEASFGWGWLSDLLEEAGLEPHLSNCYKVEQMRKARGWVKTNEKDADLVSLLPFETSSWWEVWRAPPEVRDQREQMRFRADLVALQTCVKNRIHAVFHRHGIFHDFSDLFGGQGRAFLSELCLHNPTGLPPQAWLALRGQVRLLDHVRHQLADIERNLHRQWTTTPLVRRLKTIQGIGLVLAHVLSAEVGRIERFGNHKRLASYSLLAPRANDTGEGDPSVAPLGRHLGTRGNRTLKWAFIEAAHGAVRSGGRWRAMFDRVTEGGRKDRNRGYIKVARELVKVVYVVWAKGVPYSSTPPARPGRGKNQKPSRSGTGQLCHPMVHALPA

SEQ ID NO: 271473 - protein, 407 aa, unidentified
MELAALYKRVIGLDIHQAQITACALIEETDGSTRIEQRQFGGFKRDRRELAEWVASLHPDEVVMESTGIYWKSPYAGLESVGIRAKVVNARHVKNVPGRKTDVGDAHWLATLARAGLLRGSFVPPAKFRELRLIARQRQKLVGQLASEKNRMHKVLTDSGVRLGVVVSDLHGQSARAMVKAIIAGHSPNEVLKLASSRLKASREEIFDALQGELTASHRFVLDELMRHVEEIETRIVRFDARLLSELESERNTLALLQTIPGVDLIGAAMLLVEIGTDMNAFGNPDRLASWVGICPGNNESAGKRKSGHLRKGNLYVRRLLCEFAHAASRTTSVFKSKFQALLIRRGYKRAIIAIGHKILRTIYFMLKQREHYRDCATDYEALSVQRNAPRWIKALIKFGFITPANA

SEQ ID NO: 271474 - protein, 341 aa, unidentified
MKIIGCDFHPRFQQIAFVDQETGEYGERRLSHPEEAEQFYRSLAGRQVRLGAEATGNFRWFRLLMQELGHEFLLGDATAIRAACPRKQKTDKRDARHILKLLVEDRFPDVWQPPEENENLRQLLMHRCRMVRMRTRLKNQLDSMAKNEGLLSKRVWCPMRRNQIEALPLAGWNVERRKDLIALLEEMNRRIEPLDEAVNKAAEQNPEACLLMTHPGVGPVVSLAYVLTIGNWERFPRGKQVGSYLGLIPVEESSSDKRRLGHISKQGNTLLRWLLVEAASTAQRYDTSWHRQYLRLSMTKHHGVAKVAIAHKLAVRLYWMLRSGEDYSKVMERGSHVGQSE

SEQ ID NO: 271475 - protein, 431 aa, unidentified
MTKKNRYRSVSVNDKRVAMLLEGLQGGDVIVGIDIAKTRQFAAFEQEGKVHGIVRWEHPRESRQFLKLLSQLKTGGDVVVALEPSSTYGDALRHAFMKAGLDVRRVSPNRTHKAAEVYDGVPSYHDAKSAAIICKMHRDGISEPWPMASEYQRGLTAALRIMTIYQKQFRDNRNRLESLTARHWPELPRVLELGSVTLLELLIEYGSAEFLARDPEKARAFMRRKGRAMLKQKKIDAVISDASDSFGLPPTRDEILMIQELARETRRCQKAMNQAKKQVEAMTDENGPANELRPVIGKTTAAILIAAAGDPKDYGSASAYQKALGLNLKEKSSGTSRGGLHITKRGSGVARHYLFLAALRLLQRDPVVRAWYLKKVARSGGSMKLKAVIAIMRKLVRALWHVAHGCIFDSHKLYDTSRLQLEPMPTTMEAS

SEQ ID NO: 271476 - protein, 345 aa, unidentified
MDVAYDGRQVVGMDLHRRRSVLVRMTEDGRKLEIARIANSPQALRAVIARAGENPRVVVEATYGWYWAADVLAAAGAEVHLAHPLGVKAFSYRRVKNDERDCADLADLLRMGRLPEAWIAPAEVRALREVTRYRHKLVQQRTSCKDQVHAVLAKLGIPVTRSDCFGPGGRIWLDGLRLPQPYAGKVASLRALIAVLDGEIARLGQQAADMLAGDPGYAAIRQLPGIGPVLGAVIVAEIGDVSRFGKPGQLCSWAGLTPRHYESDTRVIRGHVSKQGSRILRWALAGAIQHQPAGTRPRDVKDAIIARRGAGARDIAKTAAARQLLTLVFYGLRDGHIRRAISPAA

SEQ ID NO: 271477 - protein, 480 aa, unidentified
MYGPFNVASSTRIRFAVSLQLPRATAPSLVRRVEVVRVQVAQDDQEIIARVAALDIGKAEVVCCVRVPGQGPRARRMQEVRTYTTMTRSLLAMADWLTELGVTRVVMEATSDYWKPPFYLLENTFETWLVNARDVKHLPGRPKTDRLDAVWLCKVAERQMLRPSFVPPPAFRELRDLTRYRVDLITTRTSEKQRVEKLLEDSMIKLSVVASDIFGVSGRAMMAALVAGERDPKVLADMARGSMRGKTARLEEAFTGRFTDHHAFLLRTMLARIDGINTDIDIVQGRIDEQIAPFAAAVTRLDEIPGIGITTAQVIIAEVGLDMTRFPTPDHLASWARFAPGISESAGRKKGGSSTGKGNRYLARALGEAAVGAGRTKTFLGERYRRIAKRRGKKRAIVAVGRSILMIVWELLSDEEKRFIDLGPGYYDSRVNRNRSTRNHVRELQALGYKEGYSRRLGISRIPYAGKDQRTAPKIALTNR

SEQ ID NO: 271478 - protein, 315 aa, unidentified
MEFTSEIERGCGIDVHKETVVATINGKGLKKQTREFSTYTSSLTSLCKWLIENGVTHAAIESTGIYWKPVFNILGEDVKLILVNARHIKNVPGRKTDIKDSEWICKLLLSGLLKASFIPPKEIRDLRDLTRYQLKLTQQVASEKNRIIRELEDANIKLSSVLQNVSGVTGTKIINAIIEGETNPNDLIRFYHGKIKVGRGEFKEALQGTLTDHHRFMLKQMKQHMISLEKQMEEIEQEIDKRVAPYEADISLLREIPGVDRKGAVGIISEIGTDMSVFPNEHHQASWCGLSPGNNESAGKKKVEEPPKEINTSNH

SEQ ID NO: 271479 - protein, 355 aa, unidentified
MDSKKYIGMDVHKESISIAVRNAAGKVVMECVIETKASMILQFIDGLRGDLHVTFEEGTSAAWLYDLLKPHVTKVVVCDPRKNASMREGNQSDKIDARRLAELLRLNHLNPVYHGEHGLRSLKELVRSYLTITKDLGRVMSRVKAIYRSWAIPCTGKQVYAPRHRAEWLGKIGEPGVRRRAEFYYQQLDALRTVRQQVRRELLAEGQKHQAWKRLCQIPSIGPIRSAVLLGILQTPHRFRTKRQLWTYSGFGIETQSSADHRSVNGQLQRAKKQISIRGLNRNCNHDLKNLFKGAAIVASSKPGPFQEFYTALLTKGIRPEMARLTLARKIATIVLIVWKTGACFDAQHLKPQTA

SEQ ID NO: 271480 - protein, 307 aa, unidentified
MDDITYVGLDVHKATVCVAVAENGRGGEVRQIGVFENRPEILIKLAARLSKGGRPLSFCYEAGPCGYGLHRLLSGHGHDCIVVAPSLIPIKAGDRVKTDRRDALMLAKLHRAGELTPIWIPDAAHEAMRDLVRARATAGRVLSKARQHLQGFLLRHDQIYRGARAWTLAYRRWLTTVRFAHPAQQIVLQDYIHAILDAEARLDRLTRQIEELLPGWSMAPVVTALQAMRGVALVVAVTVVAEVGDFRRFANARQLMAYLGLVPSEHSSGATVRRGGITKGRQCPGSARADRRRLDLPHAGARQPQTS

SEQ ID NO: 271481 - protein, 427 aa, unidentified
MNKIEKLLLVHGFDVIFVGIDVAKKNHYARIVNHIGLEPVKPFKFNNSKDGYFRLVSKILEAEEKTKAERVIIGLEPSGHYWKPLTWFLKQQGYQVVLVNPFHVKKRKEEEDNSPTKNDRKDALIIAKLVKEGKFLNCLLPEGIYADLRNLSVARKQLINKLNSAKNKLISIIDEYFPEFQEVFKNILGKAALWVLRHCSFPSMILSYTKEELAENLKRASNKRVGIKRAEKLIEAAQKSVGVKEGLKGAYIRLHSYLDEIEFLKGQLETIEKTMEELLKKIDIAEYLLSIPGIGIVTVAGFLAEVGDLANYTHYKQIQKLAGLNIAENQSGKHKGKAKISKRGRPELRNLLYKASLTLVAKNKEFKALYNYFLKRPKNPLKSKQALVAISVKLIRVMFALAKKRENYDPQKVLGEYRRMQINQLAA

SEQ ID NO: 271482 - protein, 408 aa, unidentified
MSGKTAGIDVHKKVLMAVVINGAAPEEKPERRRFSTMPTELHHLSTWLRDRGVEEVVMESTAQYWRSVWLELEPHMSLHLAQACSNRAPRGRKHDFKDADRLARRFIAKELILSFVPGEEQRMWRNLTRMKLQLIRDRVRLHSQIECLLEEMRIKLSVVVADLFGASGLRILAALAHDETDPNNLALLGDERLKCSKEQLLDSLSGRSHPTHRQMLALQLDRLRQMNEQISTVNTLIAQAMKPHQDAVVRLAQVPGLGIDSAQQVISEVGPTAATFSSAAEFASWVGTCPGKEESAEENRTSRSAKGNKYMRRILNQAAHAAARSKGTSFQAVFRRLLPRLGYKSAIWAIAHRLCRLVWKILHEGVSYIEQGIASQPSLLIHRAKYLAQQLRKFGYDLRVTAANPVPE

SEQ ID NO: 271483 - protein, 388 aa, unidentified
MTTQIDDQSRSLVALEQDTTVIAAVELSQSSWLVGAMVPGLERQPQKKLEPDPSALVKLLERWRDEGVRVGRTMRRIVLAFEAGRDGFWLARWLQKRGIETHVIHSTSVAVPREHRRAKTDRLDLAMLMRVFLGWLRGERKHCSMVAIPTLEQEDAKRPSRERESLTGEKTRIVNRMKSALARLGIRGFKPELRKAPQKLAALSTPEGVALPPNTRAEIARDMARLVVVRGQIEVVERTRLERLQQAAADGPNAMVLLLARVIGVGVETADMLVQEVLSRKLRDRRAVARYAGLTGAPDESGSKRREKGLAKAGNARVRRGLMQLAWRFLRFQRDSALTQWYRARTDGAKGARKTTMIVALARKLLIALWRMVETGEIPAGVALRQAA

SEQ ID NO: 271484 - protein, 348 aa, unidentified
MKELMAGIDLHSNNIMVGIVDGEGKRLAHQKLPCELKRILEFLAPFKKRLRRLAVESTYNWYWLVDGLQRAGYPVVLANPAKITQYSGLKHADDKSDAFFLAELLRLEILPTGYVYDAQRRPVRDLLRRRMSLVHQRTALMLSFKSLFTRTTGEQMSLGRLKTLAVAQAQALYEHPANQLIAGLQIHHIEQLDASIGRLEKAVLNVARELPYYPQLKTLPGVGIILGLTITMEIGDIQRFAGPGPFASYCRTVAAQCTSNGKPKGENNGKCGNKYLSWAFVEAANFAKRYDEPCRQWYERKAAKTSQVVATKALACKLAKAAWHLVAEQTDYEPGRMFPQLAGAAMSK

SEQ ID NO: 271485 - protein, 368 aa, unidentified
MVGLIPQRKEHLRMESTKYIGMEVHKDTISVAVVNSAGKVVMESVLETKAATILQFIRGLRGNLLVTLEEGTWAAWLYDLLKPYVTKVTVCNPRKNALLRSGNKGDRIDAQKLAELLRHGCLSAVYHGEKGLRTLRELSRSYLTITKDWTRVMNRLKALYHSWGIACSGTQVYAPRHRAEWLSRIKEAGVRSRAEFTYHQLDGLQALRQAVRRDLLAESRKHEASKLLRQIPGIGPIRAALAVALLQTPDRFRTKRQLWAYSGLAIETHGNGEYHYVDGQLRRSQKPVVLRGLNQNHNHHLKWIFKSAAVRASSSAGPLHEFYEGLVAKGMKPAMARLTLARKIAAIILIVWKKGVRFDGEHLKPQAA

SEQ ID NO: 271486 - protein, 344 aa, unidentified
MANLNQFCDFTKLIGIDIAKSVFQIYSCDTQTGEITNVQIKRDKVLESLANCGKCLIGMEACGSSQYWARKLQALGHTVRLMDPKLVKPFVRHNKSDKADAEGVYHALVSGVRAVAVKTETERDIQALLTMRALLVKQRTARINHVRGLLAEYGHVMPRNVNQFDNKVDECINSLEGDAVQLVINMMRDTVKSIRDDQDRIKTLQREISRLANQTRNAKHFLTVPGVGETIMAYMCVLLADPTQFSSARQFAAYLGLVPMHTGSGGKTVTTKIPGRCDKALRAVLVQGAHAVARSKCRTDWVKNILAKKPKKVAMVAIANRMARQCWAVASKRQDWRRMPVTAA

SEQ ID NO: 271487 - protein, 313 aa, unidentified
MIVFVGVDVSKDFLDVYRPDTDELIKIDNSETAVADFCQQLQKKKRSLMVVMEATGGYETLLVNQLALHDLKAAVVNPRRVRDFAKGVGMDAKTDPIDAKIISKYGEVVSPKPMAVKSEHEQKHGALVARRNQLLELISQENNRLKQSWDDDAKQSIRDVLEVLKKQLKRINSQLAKMLKEDAKNQRTIEILQSVKGVGPVMISTLIAELPELGRLNRAEVAKLVGVAPINRDSGKKSGKRFIGGGRSQVRRVLYMATIVAIRHNEKIKAFYQHLKSKGKESKVAIVACMRKFITILNLLVKTDQLWENKTSV

SEQ ID NO: 271488 - protein, 407 aa, unidentified
MRPIYERCCGLDVHKKTVVACRITPEATQTRTFGTMTDELVRLREWLLAADVTHVAMESSGVYWKPVYNLLEEQGMELLVVNARHVKAVPGRKTDVKDAEWLAELLQHGLLKASFIPDRESRERRELVRYRRSVVEQRAHLIQRMQKLLEGANIKLGDVASDVMGVSGRAMLQALAEGVDDPAAVAGLAKNALRHKLPELERALTGTVRQHQRFLLRSQFRLLESLETEIAALDEEVAQRMRPFQVALERLDEIPGLGLRAAQQVLVETGVDMSRFPTVAHFVSWARMCPGNNESAGKRRNTSIGGGNRWLRTSLLEAAWSVSHSRKPSFFTARYRRLAARRGTKRAAVAIAHSLLIAIYHVLKDGVVFQDLGPAHFEQHNRDAIVRRSLRRLEGLGYKVTVEPMTA

SEQ ID NO: 271489 - protein, 406 aa, unidentified
MQVVHERCCGLDVHKKTVVACVLTSSGREVRTFGTVTRELLRLADWLGEERVSSVAMESTGVYWKPVYNLLEGQGIELLVVNAQHMKALPGRKTDVKDAEWIADLLRHGLLRASFIPDRGQRELRELVRYRRRLIDQRADVVRRLQKVLEGANIKLGDVASDVMGVSARAMLRALAEGQEDPTELTKLAKTSLRRKKAELQLALEGSVGGHQRFMLRRQLNEVEFLEAEIKAMNVEIEARMRPFEAAIAHLDSITGIGRRSAEAIIAEIGVDMSRFPTAKHLASWARLCPGNNESAGKRRSGATGHGNSWLRTTMVEVAWTAARSPNGYFGALYRHLAVRRGKKRAIVAVAHALLVAIYHMLKDGTPYQDLGPDHFDRINREALVRRSVRRLERLGFEVSIKEATA

SEQ ID NO: 271490 - protein, 410 aa, unidentified
MTQRFVGIDVALREHRVAILDGEGEAVGKSFTIAATQDGVTSLLHALRTQGVPPRDTLIGLEATGHLWENLEAALTGAGYRVVVLNPLQTRRYRELVRRKAKTDDIDAHVIAGLLRSGTAQESYVPDEAIQSLRELARLRARLMDDRQDYLRQLIAQLDVVLPEHRAVLGDLLTARARGILTQFPTARHLAPASPRAIRRAAADAGTRGFSLDDAIAVREAARHSLYSGKAAEARAHVVRTLVGQVERLTAAIDDTDRTATTLLPPSPPGTGPSDAELLQTIPGIGPQTAGTLLGELGTLARFTDARALVAYVGFYPVITQSGERLGRPRLAAVGSRIARHALYLAAVNAVRGSREWRTVYLRKRAQGKLAKQALIVVAVKLLHTAYAMLKHRSPYDPSRLLVAPATIRT

SEQ ID NO: 271491 - protein, 371 aa, unidentified
MEHATIIGIDLAKRSFQLHGARADGSVAFRKKLSRNRFLAFVASQPRCIVAMEACASAHHWGREIGKLGHEVKLVPPVYVKPFVRRQKNDAADAAAICEAASRPTMRFVAVKSRDQQSQGMLFRTRDLLVRQRTQTINALRGHFAEFGVVAPQGPAQIERLAQAIEDADSGLPSPVRELGALLFVQIAEFDEKIAELEKELRERARDDEQTVRLMSVPGIGPLCAMAIQAFAPPMESFRHGRDFSAWLGLVPRQSSTGGKSKLGKISKMGQRDLRRLLVSGAMATVSWAVRRGTKDPTRVSPYGPAAVHVPQSMRPDTRQHLTVCTERRKTLARSASTSRTVNPGCQPAPRVLRYAPALWVTAAADRAGSA

SEQ ID NO: 271492 - protein, 346 aa, unidentified
MLYVGLDLSRQRLDVHVLDEEGRTVEVVAVHPDADALHTLATHVLLQGQEVSAAIESMTGSRFVHDQLELAGWEVAIADPVKAKGLAPLAAKTDKIDAHVLAELARRDLVPEIWLPTPGVRAERERARFRLHLVHHRSALKCRIHATLMSFGHNVPVSDLFGTSGRKLLAGFELPEPWATTLATSMAMLDELDERIDECGRELTRLGANHPYVPLLLTVPGVGPLLAYTIASEIGDIARFASPKKLTGYTGLCPIVRQSGNRDVRGPLAKNGPKYLRWALVEAATHAARDVRYRDRYERNKKRLGRQRGAKVARVDIARLLAEAIWHVLTKNEPFAPAGPAMQLVA

SEQ ID NO: 271493 - protein, 411 aa, unidentified
MRIVGLDVSRSVAEIAYLEDGTLHAGGRTGLRRDELERFAAKLRATDHVVLEATGNTTAIVNVLRAHVARVAIANPLQVRLIAEARVKTDKIDAAVLAQLYASGFLPEVWMPDERTLALRRQIARRSQLVRQRTRLKNEIHAVLIAHLIERCPATDLFGKKGRAWLGVQPLPLDERLGVEQRLRELDRLGDDLREVEQALAQVTIDDARLRVMLTITGVNTTVAIGLLSAIGDIARFPSPEKLVSYFGLNPSVYQSGPAPARHGHITKRGRSYARAMLVEAAWGATQAPGPLRAFFLRVRDRRGQQIAAVATARKLAVIVWYVLTRGEPFAWDRPALTAHKLRALELQAGMPAQHGSRKGSAAAYSLKSVRQQERAVAEQSERTYQRLFNRWKQSRPKSDSAPIRWPEART

SEQ ID NO: 271494 - protein, 392 aa, unidentified
MFYVGIDIAKKNHEASIIDSNGKILDKSISFSNSQVGCNKLIALLEKFEANTSNTVIGMEATGHYWVSLYSYLIDLGFTVNVINPIQSDAFRKMYIRQTKNDSKDSFIIAQIMRFGEFSTTSLADEDIMALRQLSRYRLALVDECSDWKRKCIALLDQVFPEYSKLFSDTFGVTSRELLSKYPTPEDMLSIDTETLSKLLSEASRGRFGISKASEIQESATNTFGVNFAKDAFAFQIKQIIAQINFIEEQLKELETEISTLLHQTNSVITTITGIGDVLGAIIIGEIGDISRFESAPQLVAYSGLDVAVKQSGDFVGTQTKISKRGSPYLRRAIWLAATVAAFKDPALSVYYQSLRARGKHHLTAIGAVARKMCNIIFAVLRDNKPYVPHVK

SEQ ID NO: 271495 - protein, 393 aa, unidentified
MYLVGIDIGKLKHSFCLLEKETGEILVEPVFFENNRDGFNVLLSSFKHLPQRDILIGMEDTGHYNLALLKFLLDRNYQVALINPVATDLTRKMQGGISKNDKLDTLTICDVLSSSQRVKSYRISKYSSFDLYEQKLLTREHHNLKEEENQLLNRLQKCIDVVFPEFNSLFKSKYGIVYMDVLKEFGSADAIAHADIRTIRKCFDTGRGKHISLTAEELKEAARNSIGFPSSSEATQIKHLVARIELIKEQIAEIDKKIEEFSIQNNSPILSIPGISHFSGTSILAELGDIHNYSKPSQIIKFAGVAPLTYESSQFTAQHTAITKKGCKYLRKTLYQIITPVIQYNPVFRKFYLLKIAQGKGHRCAQGHCVRKLMRVIYHLLSTGTQFDPALLR

SEQ ID NO: 271496 - protein, 440 aa, unidentified
MEKVTVFETVHEHAAGIDIGAEKIFVSPDGVEVVSFDTFTSGYYQCVEYLQQNNIAEVAMEATGVYWIALYAMLESCGFRVCLVNPKETKQIKGRKTDVKDCQWIQKLFSAGILRQSFIPEVNYMEVRQLVRERLDIIEMGSTYVNKMQKCLELMNIKLKEVISQIHGASGIKIIKAIIKGHRDNQYLLSLCDKRIRENKADLVLKVLEGNYNDTNVFMLEQNLYMWEKHQQQVSVIDKRIEMLLQKMTKEKKAVVLNGSPKLVRHHAPQIKGLHTMLIQLYGINMSSISGINDYTLLRLVGETGTDMGRFPNEKHFVSWCGLSPKHHQSGRVSKRVKGTKCNKAGQIFKEVAQGLLNSKYIAIGSFMRKLKSKKDSAIAIKAGARKLAIAYYNALTKGIDYVEQGTKKYEEQIKQREKSFLAKLAKKHNMELVEKQPAA

SEQ ID NO: 271497 - protein, 471 aa, unidentified
MRTTPTRANRRRQVRIASKPKVPLPPQLQRVNLNAAGIDIGSEEHWAAVPPGRDREGQDVRRFGAFSGDLCALADWLQRCEIETVAMESTGVYWIALYELLVERGFEVLLVDARRVKNVPGRKTDVLDCQWLQELHTYGLLRGAFRPADQVCVLRSYLRQRSMLVAYASHHIQHMQKALEQMNLKLAHVVSDITGVTGMGIIKAILSGERDPVKLAKLRDPRCNSSEATMARALEGHYREEHMFALQQALELVEFYQGQIIACDCQIEACLQQFEERSSKTPLTARPRRRRRSGVAFDARSYLYRITGVDLTQIDSIEANTALTVIGEIGLDMSRWPTEKHFGSWLGLAPGSKVSGGKRLSGRTKPSANRAAAALRLAAQSLNQSQSALGAYFRRLKARLGAPKALTAGAYKLARILYRMLKYGAGYVDQGESVYEERYRDRLLRNLKRRAAELGFQLTSINSSTGQPVLT

SEQ ID NO: 271498 - protein, 331 aa, unidentified
MQHCAIDLGGRKSQVCLRDADGTIQFEGQWATSTLGELFRELPPCRVIVETAAEAFRTADLAKAAGHDVRVVPATLVRTLGVGARRTKNDRRDAQVLSEVSSRIDLPSVHVPSPRSREWKTMTGVHDGLVSCRTKLINNVRGWLRGQGRKLAGGTATTFAMRVRSLGELPSYMEAELRAIDTLSIEIDLSEKRIAAAARAEPVCRRMMTVPGVGPSTAVRYVAALDVVARFASAHKVEAYLGLSPGEKSSSQRQHKLGITKAGPSSVRWVLIQAAWILKTRCRGEGARPLQGWATEVEKRRGKHVAIVALARKLAGILYAIWRDGTEFETR

SEQ ID NO: 271499 - protein, 349 aa, unidentified
MEHYVGIDVSLELSSVCVVDAKGTIVREAKVASEPGALVRFLRGLGLSIERVGLEAGPLSQWLHAGLTQAGFETVLLETRHVKAALSAMTVKTDRKDARGIAQLLRMGWYRPVHCKSPGSREVRALLVARKLLLGKLLDVEFSIRGILRGFGLKMGVVARKGFEARVRELCSGQALLSGVMEAMLTARAELQKQYGKLHKNMLSIVRADGVCRRLMSAPGVGPVTAITFKSAIDDPARIGKSKAVGALFGLTPRKYQSGETDVTGGISRVGDEMVRTALYEAANAVLSRVTRFSALKRWALEVAKRRGMKRAKVALARKIGIVLHRMWVDGTTFRWTKQAAETAQSTRA

SEQ ID NO: 271500 - protein, 429 aa, unidentified
MTVSNDTPPRVTLVAVDIAKNYHDVLVQPPTPGRRRRVRVANSRQDFEHLAGYLQGLKSSVLIGFEATGNYHRPLAYFLHEHGFELRLIPTLALARTREAMHNSWDKNDPKDAQVILHLLKTGLIQTWHDPVVNSINDVQELSKTHFQVTLARVRVWHTLRNHYFALYFPEIDRFIRSDHSIWLVRLLASFPTPASITALSEGEFQTRAWNLVGRKVSKRALLAEIYAAATRSIGVPVPLDSAAVAMFRLVLGQYLDLHRLREHIAEQAAIVLGDNPDSRRLMTVPGIGPANALTILAEAGDLRRFRHHRQFLNFCGLNLSTLQSGKSRGQSHISKYGNARLRTALWMAAQTAIRMRENSFRRKFDNYVRGNPLDADLRRKAYTAIAAKLARVIFGLIKSGADYRPFFEHKFQVEEPSRASAVGATSTP

SEQ ID NO: 271501 - protein, 332 aa, unidentified
MSKFKQIVGIDISKNTFDCNVYGEGNTAEFINDTDGFASFEPEVLSRLECKKEEILIAFENTGMYSYNIAVYLEAEGYNYVMLPGLELKRTLGIVRGKSDKIDAKNIARYAYEKREAIRPSKLASSTVIKIKKYLSLRDSLVKSRTGFKANHTESKSVYSKEDFGDYLQILETQINHFDAEVLKVEKIIDNLLQSDESLKTQYSLLTSIKGIGPQIALYLIVYTNGFTKFDSARKFASYIGVAPFPHQSGTSIRGKMKVSQLALKKINALFEMGARSAIQHDAEMKIYYQKKVAEGKEKESVINAVKNKLTSRAFAVIKRGTPYVDIMKFAA

SEQ ID NO: 271502 - protein, 416 aa, unidentified
MSFALPDALFFTGIDWAAETHAVCVMNAAGKIAAEFTIEHSADGIATLIRRLARFGSPGGMPVAIERPDGRLVDLLLEAGHPVVPVKPNAIKTWRDGEVLSGAKSDAGDAAVIAEYLRLRAHKLKAAAPYSGQTRALRTVVRTRGDLVGMRVAATNQLSALLDAHWPGAKAIFADVESPVSLEFLTRYPTPAAAAHLGEKRMAAFCVKHGYSGRRTPAELLTRLRNAPAGATGDALGEALRDAVLAAVGVLTALNASVKTLDRSIAAHLGEHPDSAIFTSLPRSGQVNAAQVLAEWGDARQAYEHPDSVAALAGCTPVTRESGKHRAVHFRWACNKRFRQAIITFADNSRHASPWAAKIYSDARASGKDHPHAVRILARAWIRVIYRCWLDRVPYDPALHGAAAALSGQATEQIAA

SEQ ID NO: 271503 - protein, 436 aa, unidentified
MSNKGMPKIHPHAAGIDIGTGNLHVSVDGETVKVFATYTESVVELVKYLQEESIETVAIEATGVLWVPLYDMIESAGIEVYLVNGSHVSNIPAQKSDFKDSRWLQKVHSYGLVRASFIPKEEIRELRTYVRQRDNLIESGAQNIQRMQKALELMNVKLHNVISDIKGKSGMLIIEAILAGERDVNKMLKLCENSIIKTKGEQVKLSLSGNYKKEYVFMLKQAYEIYQFFQQQIHSCDKEIEALLKKITASLPKPPATTSSPSRHNQPDIEDLHNQMVQLINGRNATVLPGLTDKTMLKLVSELGTDLSNWPTEKHFVSWLGLSPKKKQSGKISRTKRISVKTIAGQIFRESAYSIANSKYIALKGFYNRIKSKHGYKVAIKATARKIAILYYRFIVFGLEYVEKGLKEYEEKYKQIMYKNISKKAKELGYGLVQVV

SEQ ID NO: 271504 - protein, 413 aa, unidentified
MQILYERCCGLDVHKQTVVACVTLTAASGKASREVRTFATTTAGLLALCDWLASQQVTQVAMESTGIYWRPVFNVLEGSCEVMLVNAQHMKAVPGHKTDIKDSEWIADLLRHGLLQASFIPPKPIRDLRDLVRYRKTLVQERADEINRVQKVLETANIKLSSVASDVLGKSGRAMIEALLAGQSDVETLAELARGRLRAKLPQLREALEGRVDATHRILLRHLLGHIAFLEGELEQLFAEIDARLSPYEHQITLMTQVTGVGRTAAMAILGEIGTDMSRFPSHKHLASWAGVAPGNKQSGGKRLKAPTNKGNTHLRAVLAECVWVISHTSDNYLSAQYHRLARRIGKKRAIVAVSHSLLVIIYHLLRDDQEYHDLGPHFFETLDTTRQRDTAVRRLQALGYTVTIEERQEVSA

SEQ ID NO: 271505 - protein, 316 aa, unidentified
MMSEEISRVLGVDVSKDWLDVAAEPDGSLQRLSNDTEGFKSVIALARESESERITLEASGGYQTRLVAALLEAGLPVVVVNPRQVREYARATGRLAKTDRIDARILCAFTLAVQPPLRELKDEQAELLSSLIARRRQLIEMRTAEKNRLTLGARGKVRKNLKAHIEWLDRHLRDTDRELRQLIERSPAWQEKEDLLTSVPGVGKTTAQMLIAQLPELGRLTHKQIAALVGVAPFNRDSGTLRGQRTTWGGRDSVRAGLYMATMSAIRANPPIKAFYERLRGRGKPGKVAITACMRKLLTMLNAMLRDHKPWEHQMA

SEQ ID NO: 271506 - protein, 409 aa, unidentified
MISVGIDVSKGESTVCIMKPGGEVLKTPFKMLHSIEDIVHLSNLIKSYDEETRVVLEDTGHYHLPVVSLLVEKGIFVCTVNALRMKKYCSQDIRRAKTDRIDSIHIASYGLTYWNRLTPVLPPIDVYRELKLLARQYYQTVSILVKAKVNLSNLLDQVMPGIQSLMSDSTSNHKLTDFVDRYWHYGHILDMGEKRFTTDYCKWAKKKGYRVYERLAKEILAVAQNGIPVLPNSLSTKLVVQEAVRVIHQVELSRDTILAQMQELAKSLPEYSVVREMSCVGDVLAPRIIAEIGDVKRFHSKHSLIAYAGIDIPPYQSGSFTATERHITKRGNSYLRKTGYEIMQCLIQHKPVGDPVYDFIQKKRSEGKCGKEAMIAGLNKFLRIYYGRVTELYTNISDELVFCSRVDFT

SEQ ID NO: 271507 - protein, 366 aa, unidentified
MEKIITPIGTPVGIDVHKRSCKVVELAHGEIKVRKSIANTREEWLEMLTELPPDAEIGLEVSTAGYFAMSVLEEAGWRERAHWVHTAGIDSNRRQKNDRLDAERLARKLAAHHLDPLPEAWFPPPEIRALRLRARARCWLVSLRTQGKNHLQSLLGMQGLQAPGTDPFGAAGEKWLAEQTLPVPLGESIPQIQRLLQFLAQEIALSEKYLQAVDGQFPELALLRTIPGIGPILSAVIWSEIGSIERFRSAKALANDTGLVSSFYDSGEVKVSGPITRQGSRWLRWALVTAANVAIQHPNPFARRYHRLRRGKKPNVAKAAIAHSLARCVYGVLKHGCPYREDRWGRRVGVLEQEARAGARSIKTVV

SEQ ID NO: 271508 - protein, 349 aa, unidentified
MQSKSQIRSIGIDLGKTTFHLVALGTRSQVVIRKKFSRSQLLEYTANLPSSLIGMEAGVGSHFLGRALREQGHEVRLIPAQFVRPFVKSNKNDYCDAEAIAEAVERENMRFVPIKTEDQLDLQALHRVRDRLVARRTSVINQIRAFLLERGISFRKGPASLRRQMPEILENADEKLSPAMRRLLDFLWQEWKGLQVQIESLNSELEQIASSDPSCVRLQQIPGIGPLVSTAVVSAIGNGAAFKKGREFAAWLGLVPRQWSTGGKAKLLGISKRGNPYLRKMFIHGARAAVLRVKREGSSLGKWMSGLETRTARNVVIVATANKLARISWAVLATGNDYQPLHKAAVFSH

SEQ ID NO: 271509 - protein, 342 aa, unidentified
MLIIGCDDHPGMQQIAWFDEPSGECGEQPLEHCTGEAERFYRELKRRGVQVRVGIEASGHTRWFERLLAELEMELWIGNPAKIAAPRVRKQKTDRGDARLLLQLLREGHFPKLWVPSPENRDLRQLLWHRHRLVHMRTRVKNQLHAIALNEGVPRKSRLWSKAGRAQLESFALAPWTARRRHDLLELLDQLTPQIAELSQAVEQEAQRRPEVQRLMTHPGVGPITALAFVLVLGTPDRFRCGKQVGSYLGLIPCEDSSAGKQRLGHLSKQGNTLLRFLLVEAAQAAVRCDPQWRRCFVHLALRRQRNIAIAAMARRLAVSLYWLWRNAEDSPAASQSGSHVG

SEQ ID NO: 271510 - protein, 412 aa, unidentified
MVGHSIGIDLSITDAHDCTVLDATGQITQRFAFDSSSAGLRQLEQRLRAIAPSDSAPTVVMEPTGLAWFLPCLYLRARRPDVKVVRIKTSKVAALRRYLQQDAKSDRLDSLTLAKMPLVDPEKLYAVDLPPAALHGLDRLTRQRARLIESLTARKNRLQALVRGYLPGLMTAVGKPWEPAFRTLVAASLNPFDLAGQDLTTLRDALQDKRPRKAPSEELLRRLHAACEQLAQLYRPILETRLLTESFFDDIQDEVARELRLMDVEEQEVKALERAIAKRYREVVPEDHLRTIKGLGAVTAPTILAAVGTPQRFHSQAAFRGWTGVVAHASQSADSDAKGLPMTKAGPKRVKFALYQAAETARQWDPQLAKIYYDQMVHKGKPHTKAMGAVMSHLASRIHAVLTEQRDYVHGM

SEQ ID NO: 271511 - protein, 328 aa, unidentified
MSDDVAALFVGIDVSKARLDCAALVGETVTQSKSFNNDSAGHERLLRWLQDGECQPGLIVVEATGGYESAVVAMLATAKLPIAVVNPRQARDFAKATGVLAKTDAVDARILAQFGRAIRPQVRGPKSEELSLLEALLTRRRQLVEMITAETHRRGVATSPVIARQIDRHLRWLERQVQAADDDLNGMIGKSSLMQRKLDVLTSVPGVGRVTAVALLAQLPELGGLNERQLSALVGVCPFSRDSGTLRGRRVIWGGRARVRAALYMAALVASRHNPILRTFYRRLLNNGKAKKVALVACMHKLLLILNAMIKRDQMWQPAYVHPGAQVA

SEQ ID NO: 271512 - protein, 398 aa, unidentified
MTVMGIDVSKGKSTIAAVNNNGELVLGPYDVEHNKQQLQELVARCQKIEDLSAILMEFTGHYHFPILQELLNAGLPVSIANPLLMKKYGDTEIRKAKTDKKDAVRIALFALEKSYLLQPYVETEEKYKELRFLSRQYSQRIAALCVAKEQLLCLLDETMPGITKFLALNSRNPEKSALLLFIKRFESFAKIQRMSSSRFLNAYAKMVARTTDRRAGAKGMAIYEMAKQSIYTRGDDISTVMAQNQLVDLISLSQKSADEIMFRMRNIAELIPEYAVLRSMNGVGDRLGPIILAEIGDVRRFHSGKALNAYAGNDAPPYQSGQFESRNRHISKRGNPALRKACFEVMQALKLNKPQDDPVYQFILKKEQEGKPKNVAKMAGVNKFLRIYYARAMELYEL

SEQ ID NO: 271513 - protein, 311 aa, unidentified
MNNTIGIDISKDTLDAHRLADGQHKQFLNGKTGHAQLVKWIGKQSDPLIIFEATGAYHRQLERVLCTHIIPFVKVNPKQARRFAQASGKLAKTDRVDCEMLAKMGAALQLMPKPFTAENLYDLRELLSARRALIKDRTAAKARKATVINALIKQQLEKRLRQIKNDVAKIDALMLDVAREDQYMSERLDILFSIPGIGVITALMILVDMPEIGALNNKQVASLAGLAPMSQSSGKWMGKARIQGGRPNLRNAIFMPALVAIRHNADLKTKYDRLVTAGKEKKVAITAVMRKLLVLANALLRDNRKWAEKAA

SEQ ID NO: 271514 - protein, 403 aa, unidentified
MNSVGIDISKGRSTVAVMRPFGEVVISPFEVRHTDSELSKLARQLKILDGETRVVMEATGNYHAPVAKLLHDAGLYVSVVNAKLVHDYGNNDLRRVKTDKKDSVKLANYGLDRWLTLTRYVPEEDTRLLLKNCYRQYRQYSKVQTVLKNNLISLLDTVFPNVNRLFSSPAREDGSEKWVDFVAEFWHCRCVSEKSEKAFANKYQRWCRKYGYNFNEAKAHTIHAEASGHIGVMPMSETTKLLVEQAVAQLRATSTALAALKHEMQALTSMLPEYPVVMDMFGVGPTLGPQLIAEIGDVRRFYSKKALVAYAGLDAPPNDSGDVTGRHKSMSKIGASSLRRTLFLVMSVYLQTAPLDEPVYQFMDRKRAEGKPYRVYMMASANKFLRIYYATVKAYLESLEHTA

SEQ ID NO: 271515 - protein, 325 aa, unidentified
MEAKKLCCGIDVSHAKLDVCYQNNLGELFHLQVANSKQGFAKIMEHTGPDYHFVMEATGVYYIRLAFYLHKQGCDLSVVNALAIKRYIQMHLERNKTDKKDAAWICRYAIDQRPVYWQMPDSAYFESRQLYNTIREYTEQIKRFNNQLHSLRLLPVPSKDTIKSLEKVILYMGKQIKQLEQKLQQLLEQWQPEQLKSVSSVKGIGKRAAAMLIVFTQGFKHTQNHRQLISFAGLAPTQYSSGSSIHGKPRIYKRGGKNLRDVLYMCSMNAMKTNTACKALYDRLRANGKTGKQALIAVCNKLLKQVFAVAKNNSLYQPNYCSAKP

SEQ ID NO: 271516 - protein, 352 aa, unidentified
MKRYTQSQEKSNRLFVGIDLHRLQWHVTVRTEEVELFSGAIPGKWEALRKLLDRYPGHQIRAVYEAGYFGFWLHDSLEEYGARCVVTPPSLIPQDYGNHVKTDRKDSRKLARLLAKDLLKEVWVPSEDERCHRQVIRRRRQLIGDRVRTQNRIKAELRFFGVELPQPTGQWSLRYQANLRHVRLHDRWLQESFRQLLEEYDFLTEQIKKQTKLLTELAELPCYKERLAIVRSVPGIGLIAGMELLLELQDVARFHKADQLAAYVGLTPSQYSSADKVRMGRITAIGKNDLRGTLVEVAWRLIGKDRAMRRKYDRIKVRSGSKRAIIAIARMTLLRTRRMLLDGTPYVIGRAA

SEQ ID NO: 271517 - protein, 383 aa, unidentified
MLHIQNIPSGDKTKGDFSLYIFYFQNYLNMRKIVKQVAAIDVAQKELVVCLGYMYDDWSPELYAHKTFANTAKGFEALLAWVKKQSHQEVAVRFVMEATGVYHEAVAYFLVEKGEEVSIVLPNKISSYMRTLDVKTITDKTASEAIARFGLERKLNTWHAPKDIFRKLRQLTRERDQIVQERTIVKNQLHAEEVEAYPNNSSLTRIKARIKILDKQEQEIKKELADLIATDMELKKMVVLICSLPGVGLLTAAIVLAETNGFELIRNKRQLASYAGFDVKEKQSGTSVKGKPKISKKGNKHLRKAMHLPALTAIRHDERFKAVFARLVSKHGIKMKAAVAVQRKLLEMVFTIYKTNKKYDKDYLTKEIKEVQEIAEAEAQEAV

SEQ ID NO: 271518 - protein, 350 aa, unidentified
MIIIGVDYHPEFQQLAFVDTDTGELSEARLRNPEQAEQFYRELAVQGAQVRIGMEASGHARWLERLFAELQFELWIGDAAEICSKRVRKQKTDRQDAQLILQLLLENRFPRIWVPSSENRDLRQLLWHRHRMVQARTRVMNQLQAVALNEGLRSKKRLWRQRNRQQLESFQLGQWASRRRHDLLHLLDELNPTILELTQAVEREAEKCPEARRLRTHPGVGALTALAFVLILGDVGRFHCGKQVASYLGLVPLEKSSGSRRRLGHITKQGSSILRFLLVEASQATVRSVPEWRSKYFHLMQRHGRNIAKVAMARRLAVRLYWMWRQQWNYEQLNKFGSHAGQPGNPYGVQ

SEQ ID NO: 271519 - protein, 340 aa, unidentified
MKHIGMDVHSTTTDACVRNGRGVIVLQRRIRTTQDELIDFVDSIQGQKRVVVEEDQMADWVTRLLQPHVDEIIRCQPQYNKLISGSEDKCDKMDAKALSELLYLNRVKPVHHPEMKYRILREAVRAYWVASRDLTRAKNRLKGWYLFNGLYKSGRSIYSGRNRSKYLKTLKQEGRNTELAELLYEQMDACRQLKAKHIRMLRKAARPVKDLVQLVTTMPAIGPISGYTLVSLLEDGWRIPNKRKLWRYAGLSLRRYESRDFGMKGASKSGNRLLKRVAMSAAITIVSRGKPNGLLALWERDIRQNVNPKRARRNLARKIVVIAQHLLRSKQEYIDECIRA

SEQ ID NO: 271520 - protein, 344 aa, unidentified
MNVSTVGLDLAKNVFQVHAIDGTGDVIVRRSLRRRQVMPFFGKLEPCLVGMEACGTSHFWARELAALGHEVKLMPPIYVKPYVKRGKTDAGDAEAIAEAVRRPTMRFVAIKSPEQQSVVALHRTRDLLVGQRTQLVNMIRSQLAEYGIVLAKGIHHALRLVDQLVEGVVPDIPPLARKIVVALAEQIRDLQARIGMLEAEIKTWFRGNDLAKRLETVPGIGYITASALAASVTDPHRFTSGRQFAASLGLTPKANSSGGRERMGRISKMGDRYLRRLLVSGMTSQLQSARRKPEAHPWVTGLLATKPNKLVAVAMANKAARIAWVIMTRDQVYRARRPATEGTA

SEQ ID NO: 271521 - protein, 397 aa, unidentified
MNAVGIDVSKGKSMVCVMRPFGEVVLEPFEVLHTAQNLHDLAEKLKALDGETRVVLEATGNYHKPVAFVLHDAGLFVSVVNPVLIHDYDNNSLRRVKTDKKDAVKIANYTLDKWTRLRQYLPEDDTRLALKNCYRQYQQAVAIRTMLKNNLISSLDLTFPDANKLFSSPVKNNGCEKWVDFIGDFWHSECVSSLSAKKYLKWCQKHGYVFTRSKSDEIYACAVNSASLPKSPTSKLLIQQQVAQLKAVSQSVAAFRQEMLRLSQQLPEFDTVMEMYGVGPSLGPQLMAEIGDVRRFSSKKSLIAFAGIEPQPNDSGKVVGNDKGISKVGSAVLRRTLFLIMTVILQTQPQDEPVFQFMNKKRSEGKPYKVYMMASANKFLRIYYAKVKAVMDSERSQ

SEQ ID NO: 271522 - protein, 382 aa, unidentified
MNRIIKIGMDVHSTNYTLCAMEPVLDGEDRIFTNIQVTPDYENVIQFIDNLKERLGSSDSYSIECGYEAGCLGYSLYHQLTKAGVKCTILAPTTMLTQQGKRVKTDKRDAAMIAQCLSYGGYHAVHVPTDKDTSVKEYLRMRDDHKLALKKIKQQINAFCLRHGYIYDGHKWTLKHLDWLKKLNLSGLYRETLNEYMTSYEEQTAKIERFDKRIEELAADSDYHENVRKLSCLLGIQTYTALSLIVETGDFKRFRKGNTYAAFLGLAPGESSSGEKISRTGITKAGNSRLRTLLIEAATGICKGRVGHKSKALCARQAGNPEEVIAYADRGNIRMRSKYKRMIRHEKKRNVAVAAVARELACYVWGIMTNHIEPREEGKKAA

SEQ ID NO: 271523 - protein, 352 aa, unidentified
MKINRVGIDLAKNVFQVHAVDGRGKVVWKRQLKRGNWLRVLGERIDTDCEIGMEACGGAHHWARELRSRGYQVKLMPPQFVKPYLKGNKNDASDASAICEAMGREDMTYVAVKTVEQQDIQAVHRVRASVMGRRTASSNQIRGLVAEYGLVAPKDLGPLRRAIPDWLEDAENGLTDRFRRLLHELWQELLRLDERVVALDREIEVIAESHADAKRLLKLRGVGPLVATALVARFGDASHFKRGRQAAASVGLTPRHHGTGGKNRIYGLSKQGDRYLRSILIHGARAVVSQAKRRDDRLSLWVTDLKERSHMNVAAVALANKTVRMAWAMLRHGTDYEPELAAGERYRGWVMA

SEQ ID NO: 271524 - protein, 372 aa, unidentified
MQQDSAVFVGLDASKMKISVALAEEGRQGEVRFLGDIDHTPEAVRRLVTKLVGRYGRLLFCYEAGPTGYGLQRQISALGHDCAVIAPSLIPKRPGERVKTNRRDAITLARLHRAGELTRIWVPDPGHEAVRELVRAREAAMADLRTKRQHLQSFLLRHGRIYRGSRPWTQVHARWLSNLSFEHPAQSLVLREYRQAIDDAETRLERLTQQVAEVVCSWSMAPVVEAYQALRGVAFLTAVTFVAEIGDVRRFETPRQLMAYLGLVPSERSTGEQVWRGSITKAGNPRARRVLIEGAWTYRYPARLSRTLQVRQESLPTVVRAIAWKAQLRLCARYRRLMAAGKRQTVVTTAIAREMAAFLWAIGHAVEPRPAA

SEQ ID NO: 271525 - protein, 363 aa, unidentified
MERERTSVGLDVHARSVVACGIDDDTGEMFRARLVPQPEAIFGWLRELPGPLAVVYEAGPTGFGLARFLTGQGVRCVVAAPSKLQRPSGDRVKTDAKDALHLARLLRLGEVTPVAVPTVTQEAARDLVRVREDVRGDLMRARHRTSKLLLRQGIVYSGGTAWTAAHHHWLGRHSFDQPALAAAYDSALETVLLTADRRDRLDKAIVELAADPAWSPMVSRLCCLRGVSTLTAFGLTVEVGDWSRFTGSSIGAFLGLVPTEHSSGASRSQGSITKTGNTHARRLLVEAAWHHKRPYRPSKALRTRWDAAPAAARARGHAGNQRLHQRWQAFDERKKRPVVANVAVARELAGWCWSLAMLDTTAA

SEQ ID NO: 271526 - protein, 345 aa, unidentified
MTIVEAARAVTGGVDTHLDVHVAAALDPVGGLLGTEGFTADPAGYKAMLSWLEGFGEVAKVGMEGTGSYGAGLARFLRHQGIEVVEVDRQSRQARVRHGRSDPIDAVEAARATLAGRAGQPKSMDGAVEAIRVLVVAKRSARQARSKALTQMRHLGYTAPDQLRCQLKGLTIPALVAQATSLRPTRSPDPVTAGTKASISSLAHRVRFLDAEIAGLDELIEPLLFATAPALLALKGVGPDTAASLLITAGDNPERLRSEAAWAHLCGVSPIQASSGKVTRHRLNRGGDRQANSALWRIVMVRIAHDPDTKAYFERRVKEGRTKREVIRILKRYVAREVYRHLPRG

SEQ ID NO: 271527 - protein, 429 aa, unidentified
MNSTQNKKIEQVKETTMIVGIDVGSEKHYFRAFNWRGIELTRKPVAFSNSMEGFNSFYNTIVELMQKSELEEALVGIEPTGHYWFDLGQFMGEKSIKFVMVNPHHVHKTKELDDNSPSKNDRKDPRVIAVLVRDGRYFYSYMPTGVYAELRNASNRRFVLVEEQTRAKNRLQKWIAVYFPEYKGIYTHIDAKGGLLVLKQAPTPEEIVKLGEEGIIKIWKDAKLRGNGNKKALKILNAAMRSIGLRTGLTEARMEIQDQIEDYELQTKRLERVNDLIKELCQQIRYADKLLEIKGIGITTVAGFIAEVGDITRFDSTKELQKLAGLELVADSSGKHNGKTKISKRGRKRLRYLLFEAAISVVGKNEEFKEIHRYYTTREKNPLKKMQSLIAVACKLIRVFHVILTKGVSYDASKMLEDIRHPGEQLKAA

SEQ ID NO: 271528 - protein, 429 aa, unidentified
MEIVFERCAGIDVHKRTVVVCRLTRDAQGARLAQTQTFGTTTGELLRLSDWLAEGGCTHVGLESTGEFWKPVFNLLAGTCEVWLLNAQHIKAVPGRKTDVKDAQWIAELLAHGLVRPSFIPPRPQRELRDLTRYRTTFVRARATLVNRVQKALEDANLKLASVATDIMGVSGRAILAALLAGEADPTVLAELAKGPLRKKRPQLEQALRGHLRPHQSFVLTELLAQIDRVEETIARFTAQIQTTCAEDGNEAEIVALLDSIPGLSEATAQVVVAEIGTDMRRFPSAAALAAWAGLAPGNDESAGRQRSGRTRKGNVWLRTILVQAAQAAAHTKHTALAARYRRIAARRGHKKAVVALAHALLVIIYHVIARRQPYHELGEDYFQRLNPAARAQRLVHQLTHLGFEVQLSAQQAAASRSNGAASTLAGGS

SEQ ID NO: 271529 - protein, 414 aa, unidentified
MKSARNTLPTEPVNGITCGIDWARDDHALSIVDAKGREVTRKTITDDAAGLRDLLSTLDSAGAREVAIERPDGPVVDTLLDAGVTVVVISPNQVKNLRGRYGSAGNKDDRFDAFVLADTLRTDRARLHPLLPDTPATIALRQTCRARKDLVAHRVAVANQLRAHLKIVFPGAVGLFAAIDSPISLKFLTRFDSQDRADWLSLTRLTAWLANASYSGRTHPRELHRRLTSAPRATNEVTGAHITGAFVATLTALNTQITALDDSIADQLAAHADAHIFTSLPRAGSFRAARLLSEIGDCRARYPTPEALACLAGVAPSTRQSGKITHVGFRWAADKQLRDAVCDFAGDSRRANPWAADLYNRARARGHDHPHAVRILARAWLYVIWHCWQDHTTYDPTKHRALQALLERPQPGAA

SEQ ID NO: 271530 - protein, 368 aa, unidentified
MGKCITYVGLDVHKNSIAVALADEGGVEVRSYGTINSDLSSLDKVTRKLVSRGSQPRFVYEAGPCGYKIYRHLRQQNFECVVAAPSLIPKKSGDRIKNDRRDAMMLARLYRSGDLTPVRVPSSEDEAMRDLSRAREDAKKAERKARQQLNAFLLRHGLHYCGKSHWSLAHWRWISDIRMEHEAQQFTLQEYVDTVRSGSERVERITEQIRLLVGKWRLGPVVEALQALRGVSLVVASTVVAELGDLTRFDRPRQVMAYLGLIPSLYSTGETIKRGPITKTGNGHARQMLTEAAWSYRMPARVSRRLRDRQQNLPEKVWQIAWKAQVRLCARYRRLVARGKLSQVAITAIARELAAFMWAIARTVEVGA

SEQ ID NO: 271531 - protein, 391 aa, unidentified
MIYVGIDVAKDKHDCFITKSDGEVLFKAFTITNNLDGFNELHQKIASVMDDVTKVKVGLEATGHYSYNLLGYLIDKGLPTYVINPLHTNLYRKSLSLRQTKTDKVDARTIASMLMSDVNLKSYSDISYHNEELKSLTRYRFDKVKERAKLKTSVSRLVCILFPELEKLVPTLHITSVYALLSEFPGAKHIATAHLTRLTNLLSEASKGRYGKDTAITFRDAARASIGSNMPAKSLELKHTIKLIQELDSEIDEIENEIKIIMDEINSPILSIPGINYRMGAMIIAEIGDFNRFDSPDKILAYAGFSPSTYQSGQLDGAYAHMEKRGSRYLRYALYNATKYVCHWDPTFAAYLAKKRAEGKHYNVAISHAVKKLVRVIYHLEKTKQQYIKAA

SEQ ID NO: 271532 - protein, 338 aa, unidentified
MEVYAGLDLHSTNTYVAMIDGENRVLYKQRHRNEVPAILSALEPFNKDIQGVVVESTYNWYWLVDALMEAGYQVHLANVSAIKQYEGLKQIDDRRSSLWLANLLRLNILPTGYIYPKEERPTRDLLRKRLQLVRHRTSHVLSVKNILARNLGVRMKTYDIKKLTATEVRTLFPDKEMRLAVMSSIGLIQHLEEEIDGIEKLITKKLKIRKEFMKLLTVPGIGEILGLTIMLEVGNINRFPAVGDYSSYCRCIRSIRTSNGKVTGYGNSKNGNKYLSWAYVEAANYARRYHETVRSYYERKRAKTNKIVAIKTVSHKLARASYYVMRDGVDYDQARLFA

SEQ ID NO: 271533 - protein, 533 aa, unidentified
MGRSELALFVRSTKRDNLRRSSPKGEHGCTYSWTVPFCSLVYLSTNWVEHASAGYEYGCAKQIMFLTRRSSQQKLLSFKTHTQGLPHHRLSIRPARNEFSTHSDIHFTHRSLSMKEPTVKDFAALIGIDWADQKHDVCEIPFDSKRPKYSIISSKSQAIHDWAMNLKKRYPSKKIAVACELKKGPLIYALEKYPHIVIFPINPSTVAKYRKAFTQSGAKDDPSDALIQAEILDRHMDKLSPIFPEDSEIRALKQLVEDRRKLVQNRVDLSNLITATLKNYYPQVLDWFNEKDTIIFCSFITKWPSLADAKRARKQTLINFFEQHNSRYTEVNERRVEEIKSAFSLTDDKGVIEPNKIFIEVLIPQLRLLIEATERFDKEIKQRYKKQNDKSIFDSFPGAGPKLAPRLLVAFGANRDRYKSASDMQKMAGIAPVLERSGQKSWTHWRYSCPKFLRQTFVEWAGQSVRFSFWAKAYYEQQIEKGKPHNTAIRSLAFKWIRIAFRCWKTRTPYNESKYLEALKKRRSPLLKYAANV

SEQ ID NO: 271534 - protein, 331 aa, unidentified
MGSKSRMQGKEASEQETGKSNAGIDVSKSWLDVHVVPAGATLRVANTRDGIRKLKRWLTRFDLALLVIEATGKWHRDVRRSLHAAAIPVAVVDPFRVRMFAKACGILAKTDRLDARVLAQFAAVMAPAVRAPMPQAMEELAELVTARASAVAEETALKNQLSAAISPFLKRQLGRRLERIAKDIAALEAEILRCIRADQGLARRYDILTSITGVGPVVATTLIACLAELGTCSRKQIGMLAGVAPVADESGERQGVRVVWGGRPNVRRVLYLAAISAARFDADMKAFFNRLTASGKPAKLAIIAVARKLVVLANILISENRKWQPHSPNHA

SEQ ID NO: 271535 - protein, 353 aa, unidentified
MLYSGIDLHKDMCWIATIDENGVVVKQVKLPNDPALILEYFRSLGADHKAVVESTSNWYWLSDLLRENGIELVLAHAKYVKAISYAKVKTDKVDSLTLAQLLRMNLIPVAHQISPELRASRDLMRARLNLVHKRISCINSIHRLFEKFNISLTEHNLQTLQGFKELKEIPLPPEYQFHLHCLIDQILLLRDQITNLEKSLHPHLVPNPDIQRLLMVPGIGKISAFTIYLEIDDISRFPDDKHFFSYARLVPGASNSNQKFKHKSGNKDGNKYLKLAFTEIAVQAIQNYAEIKRFYQAKARKSPKAIARTIVAKEMARIVYHMLKEHSEFRTFKGLTLSKTKKRGWPRLSSPCA

SEQ ID NO: 271536 - protein, 395 aa, unidentified
MFIVGIDVAKRSHEVCMITSDGQTVQRPFSIRNNCTGYNLMLEKIRKHTNIKSQIVFAMESTAHYWLALFTRLRKDGYHVILLNPIQTSAMRDMFIRKIKTDAKDSFIIAELIRFGRYAESNVAQDRLLALKELCRNRFYLVDMAGDLKRKLIALIDRVFPEYEAQFDTIFCKSSVALLKKYPTPQKLSNAHLDKLTELLWNSSNGHFGEWKARELKDLARNSFGVEDCDGAYSTLILLMLDQIQSLSGKADALEKEISRLFQSFDTTVTTIPGVGPIIGAVILSEVGDISRFSSADKLAAYIGVDPSVNQSGEFQAAHAHMSKRGSPYLRRCIWMASQVAVQRDPMFRAYYEKKAAEGLKYMTIIGHVTRKMTAVVFAILRDHKVYEPVLPTAA

SEQ ID NO: 271537 - protein, 360 aa, unidentified
MIVQGTSVGLDVHALSVVAHAVDEETGEIARARLCPDHGEILCWLSQLRAPLRVVYEAGPTGFGLARALDDAGVECVVAAPSKLHRPSGDRVKTDARDAAHLARLLRLGEITAVRVPDREVEAVRDLVRAREDARADLMRVRHPLSKLLLRQGIVYFGGTPWTFAHEQWLRRQRFDNIHLKAAFDHGFDAVLAATAARDRLDEQILEVAASPRFADPVNRLGCLRGISALTGLALTVEIGDWSRFTGSSIGAYVGLVPSEYSSGNSRAQGSITKAGNTHVRRLLIESAWHHRKSCSTSGPTLRARWAKVDPAIRARGHAGNRRLNKRWRSFTERGKNPLVANVAIARELAGWCWSLATMQ

SEQ ID NO: 271538 - protein, 341 aa, unidentified
MKNKSFIGIDISKNVIDASIFCEGTPIKDFPHAVFNNSRKGFGEMCTWLKKNHVVLSNCLFGMEFTGSYSMELEKFLNARKFQFCMLSTHVVKHHPMGPKDKSDKIDSAKIADFLYRYDGTECVKPYKMPDKTMQRLKALTNERKFLVEQRTCFMNRRQLCTTKEDAQLYDGYIKKFSRDIENIELEEQKLLATDDSLLATYKNLLTIPGIGFVNAINVIVITRNFTAFETARQYASYVGVAPHSHTSGTSVKWRPRPSARCDGQAKADLSMAATVAVQYDAELQSFYNRKLGGKQDSDTKRKTLNAVKFKLVLRMFAIGKQNREWEPLDSKSSNEKLAIS

SEQ ID NO: 271539 - protein, 385 aa, unidentified
MAPIRMPEAVIGLDVGKSSHWACVATRDGEVLLSTPVANREDDLDSLFGRFPDALVVVDQSRNIGALALARARAAGMSAAYLPGLAAHGAARLFAGDAKTDERDAMVIAKTALGIPDALLPVGDPGPTIAAARALAAQRNFLTCENTRNKNRLRSILLESCPAFETLVDLSDGPQLRLMASLGGAWSVADAGPRRASALTRGAARGKIEALVRSTTSSTRPDASVVAAEDRAVKLLARRISENSAEIEAITAEISALLEGDDTYRCLLTVPGIGPKTASELAISIDIEDFPSHDRLASYCGLAPRNRQSGTSISSVTASRQGNKRLKNLLIFSCNCLTRTEGRWGDYYTRCRERGMSHGKALKALARKRLKVIYAVMRDRVPYAA

SEQ ID NO: 271540 - protein, 412 aa, unidentified
MNIIHRCCCGVDVHAKTVVVCLIKNGKKQIRTYSTMTDDLLVLSDWLVSEGCKQVAIESTGVYWKPVFNILEGVLDVVLVNARHVKAVPGRKTDIRDCEWLADLLRHGLLRASFIPPLPIRELRELTRHRHTLVRDQTAVSNRIIKLVESANIKLAQVASHALGVSGPTMLRALARGEQDTTKMAEFARGPLREKQGQLRRALRGNLTRSHRFVLTELLDQLEQLEAAVARVSEEIRQQIEENSDPFVKEAARLLQTIPGVGEHVAQVIVSEIGTDMSRFPTDKHLSSWAGMCPGNNESAGKRKSGKTTKGSIYLRGALTQAGWAASHTKLTYLSAQHKRLTKRMGKKKALVAVGHSILVIAYHILKNRASYHELGGDYFDRQNVESQRAHYIKRLEALGLKVSIEVAPEAA

SEQ ID NO: 271541 - protein, 353 aa, unidentified
MQRPEEGQVAIGVDTHKEIHVAAAVDWQGALVDERCFATTRQGCRQLESWARSLGDVLRVGVECSGSYGSGLARHLAKNGFTVLEVTSPDRTVRRKRGKDDFIDAEMAAEAALSGVRTVTPKSRDGMVEALRMLQKTRSTAVAARRAALRMMRAHIVSAPEELRDQLRGMTRMRLIRHLSATRPDSTDFKSPVGAARISLKRLAKRYVDLDDEVSELDEMIEAILADAAPLLVKCSCVGPQSAAQLMATVGGNPERLRSEAAFAMLCGVAPIPVSSGMTCRHRLNRGGDRQANSAIHIIAIGGLRTDERTKDYVARKMAEGRTKMEAIRCLKRYIAREMYYVIKKQRKLVNCS

SEQ ID NO: 271542 - protein, 330 aa, unidentified
MYLGIDTHKRYSQVAVVDGDGNLQDEIRLPNDRLAELAEQYSGGEAAIEASGNYRPIYEMLDEHLDVTLVNPSKNRIIADATVKTDRVDAKRLAQMLRADMLAESYVPPDEIRTLRDLVRTRKSLVESRTAEKNRVRAVLTRTDNTYDSELFGPTGREFLAELSLSHPDRTIIEAHLSVIDAYDEQIEAVEEKIEQEVLESPAAQRLLSIPGVGQYTAAVIVAEVGEVDRFDNDKQLVSYAGLDPMVHQSGDKEIRGSISKEGSAPLRWALVQCANIAVRCDDYFGNFYTRLKQRKNHQVAIVATARKMLVSIFYMLTRKEMYDPPGVSA

SEQ ID NO: 271543 - protein, 354 aa, unidentified
MLAELIDAVVGVDTHRDTHQVEIALPNGVPIAATTISNDSSGYAELLAWIVDHAPGPRLAVSIEGTRSYGIGLARAAAAAGLVVLECEQPHRKARRGKGKSDPIDAHLAVLAALRLDADRLPTPRADGDREALRILLSARQELTTASTAQTNRLRALLLGGDDTDRTLARGALTEARLASLARRRPPREASREQAVRHAEIRRLALALREAARALKANRAQLQTIVNDVVPRLIERPGIGPVSAAQAIVSFSHPGRCRNDAAFAALGGVSPLPASSGRTVRHRLNRGGDRALNRALHTIAATRMRSCPTTQAYVARRTAEGKNPREIRRCLKRYIARQLYRTLATAMTPAAETS

SEQ ID NO: 271544 - protein, 322 aa, unidentified
MHKNNEFIGIDVSKDTFDVWSPLFGHQSLDNNEKGFKEFQKLLGENAWCVMESTGSYHQLLAHYLYSKQIQVSVVNPLVVKRFIQMKLQHNKTDKSDAKMIALYAQEQPLEAWVPDPKYIEECKILNTSIALYFKQSTALKNKLHSLESKGSKGLVLQSLKRQIKQLQKEIVILENQVETLIKEHESVMLTNISSISGIGKKTAMMLISNTYAFKSFDSYTQVSAYFGLSPIERTSGSSIRGRSRISKKGNPAVRNHLFMCSFTACKYNPQCKALYERIVAKGKSKKLALIAVCNKLLKQSFAIAKSGIPYDPKYRSRPVFQ

SEQ ID NO: 271545 - protein, 361 aa, unidentified
MAKKAKKVKTAKGAELRIVNPDAAGIDIADGIMQVCVPADRSKDNNRAFGAYTSDLHAISAWLRECGIKTVAMESTGVYWIPLFCRLQEDGLDVVLTNARDVKNITERKTDESDAEWLMLLHQYGLLKASFQPHNDAKRMRTLTRHRDTLSREASSIVLRMQKAMQQMNIKLTLVLSDITGKSGIRIIEAILAGERDPKRLADLADIQCKTPKEEIAKALEGNWEEDLMFVLRQNYDTFKHYCTQLGECDAELEKLMENYRAEVAKVEDTSYSPAKKRRDYKKTRHTVGFDVERKAYEMWGVNVFEIPGISHLTALELMSELGHDFTRKFPSSKQFCCWCNISPNTKISGGKRISSMILIY

SEQ ID NO: 271546 - protein, 411 aa, unidentified
MAIWCGIDWAERHHDVALVDDVGKLIAKLHIDDDAAGFARLLTLLAEHGAGPETPVPIAMETARGLLAAALVAAGYRLFPINPMAVARYRDRYSVSRAKSDAGDAFVLANILRTDLDAHRPLPGDSELAQAVRVLARAQQDTVWERQQTGNKLRSLLREYYPAALIAFPDLAQPDAIEVLQLAPTPTVAAKLTRARIHAALRRAGRQRNLDATVDRVRSALRDEHLQQPPRVEAAMGEHALALLRAMAAAVDNIDRLTEALAQAFDQHPDAAIIISMPGLGPVLGSRLLGEIGDDRARFADARGLKAFAGTAPVTRASGTKRAVTARVVRNKRLGQVGFLWAFSLLTASPGARAHYDRRREHGDRHAAACRNLANRYLGILHHCLQTGTTYDESTAFPSTDNQHPANPTAA

SEQ ID NO: 271547 - protein, 428 aa, unidentified
MSNQELIKRKQYCQIVKEIAGSDQYMVVGIDIGKDKHHAFMGTATGKSLFRRLIFENNRDGFSRLLRTADEIRSQNDLSKIVYGLEPTGNYHKPLAKHLIRFGSNLVLVSGEAVKKNRALLDGRWDKHDTKCAANIADLVSRGRCLYYDSPSSDIIELRSLLSLRRRLKKEEHSLRMRIRNNLLALYFPELDRFYSACENETLAIVKWCPDPDQIAGMDFEPFFQMVTRTRRGTAQLLRLRKIHQQASESIGCPMGSSATFEAQLLVDKLKQVRQQLKDTEAAIKDVALEFTEYSYLLTIPGFGPYISARVLASIGDPFRFKNRKQLIKMAGYDLCANRSGKTSDKAVPVISKKGNSELRYALYQAAKVATARVDLFRTYFTELLRGRERERGIKTKMCVKLAAKMLIIAWTLMKKKEPFDPEYLTIE

SEQ ID NO: 271548 - protein, 349 aa, unidentified
MGEVSTIGVDIAKSVFQIHGVDVNGAVVIRKRVSRAKVLEFFAKLPPCLVGMEACATAHQWARELRKLGHDARLMPPTYVKAYVKRGKNDANDAAAICEAVTRPSMRFVPIKSVEQQSALMLHRTRDLLIRQRTQLINALRAHLAELGLVAAKGHEGLRQLVMAVTESSDERLPNQARFACEAIVAQLHAVQTQINGLDKRIIQTHRANADSKRLEGAPGFGVILSTAVVATMTGPKAFRTGREFAAWIGLVPRQNSTGGKERLGSISKQGDRYLRRLFVLGAISIVRTARMRPDKYPWVIELLGRRPAKVVAVALANKMARTAWAVLAKGETYRTPTRSNNAAIAAAA

SEQ ID NO: 271549 - protein, 271 aa, unidentified
MALNTLAIDIGKHSFHVFGIDDDGVVISRKVSRLKLATTVECLDPKIVAMEACGSAHHWGRLFQAAGRAVHLINAYFVKPFVRGSKNDATDAEAIFEAASRPTMRFVPVKSLECQDLQSLHRIRDRLVHSRTSLINHTRGLLAEYGVVLPQGAKRFTVQVGEAVAEAALSELARELFLELLDQLGDVDRRIAGIDTRLVAICRENAACRRLVGMPGIGPVVATALVAAVDDGRHFRSGRDLAAWIGLVPRQYTTGGKPKLVLVREETYAPA

SEQ ID NO: 271550 - protein, 349 aa, unidentified
MTQFSRIGLDTSKALFTLHCVDAAGKPLLRVNLRRAQLLGFFKRHPPTVVAMEACGGSHHWARKLAALGHEVRLIPPQYVKPYLKRGKNDRNDAEAICEAAGRPGMRFVPVKSVDQQAEAMVLKLRATLVEQRTQLINAMRGHAAEFGVISGRGTGKAAALLAVIAADTAIPPVAQEMLGLLGEQIDHLDCRIKALEAKLEAMHKANAISQLLATVPGIGPIIGLSFAIDVDPAAFASGRHLAAWLGLTPQEHSTGGKQRMGGISRAGNERLRALLVSGAMAVIRAAERAGSKLATEWLLKLLARRPRKVAAVALANKMARMIWAMMTTGEAYRVPASAATAHFSAAIS

SEQ ID NO: 271551 - protein, 349 aa, unidentified
MDYRVYCGVDFHARQQTICSLTTESGVMSTHELKHQNKAELKAFYAQFSGPVLVGLEASGYSPWFEQLLESLGHEVWLGDATKIRRRARRRQKNDRRDAELILDLLIHNEFPRIHRPPATSREILRMLRYRHKLIKIRTIIKNSLQSLSIQSGLSLRARLFTHAGLAQVRATAMSPVMQYQRDQWLQSLEPLNQRILEAANWLQQQAAGDERIERLRTHPGIGLLTGLGLVHTLAPVGRFSNQRKVAAYVGFDPKERSSGEKKRYSGISKAGSRVLRFLLVEAAQTACKGDPELKRFYLRLLHRHGKPKAKVAVARKLLVRSYILLRDGIDYAEFNRRAVAARLAREAT

SEQ ID NO: 271552 - protein, 366 aa, unidentified
MKKTSTVRVNRNLIFKGHKLTIGVDLGDHWWCYCVLDEAGKIILEQKVATTPEAMKQTFSKIPQGLMAMETGTHSPWVSRLLTELGHKVIVAHAQKVQLITKSNRKDDRHDARTLARLARIDAELLGPVRHRSAQAQIHLTVIRARAELVRARTVLVNATRGLVKSYGQRLPKCGTRQVSRELGAGLHAELREVLEPLLKEIESLNERIQEYEVRVEKIAKASYPQVELLKQVKGVGTQIALTYVLTLDDPHRFPKSREVGGFLGLRPGRRDSGQSQPQMRISKEGDRYLRTMLVQGAHYILGPFGADSDLRRWGLKLAGRGGKNAKKRAVVAVARKLAVLLHRLWVSGEVYEPLRNSQKAMRVAA

SEQ ID NO: 271553 - protein, 394 aa, unidentified
MIYAGVDIAKTDHVIGAVDERGAEMCRPMPFKNTEAGLERAVAWLEGLAGSPSDVVVGMEATGHYWMACYSFLVARGYSVAVINPMQVKAVRKLKGLDKVKNDRVDAWLIAEALRIGQYDETRLATDEVASLRSLSRYLQSLRGMVAELKTQCVCLMDAHFPEYAGIFSDMFGAGSRAVLSKSPLPFELARRRADSLARDVAEASRRGGKSAGYAAKIKAAARSSIGVRLGQEAASFQVKSLIRQIEFADSECAKVEARVRALLDEVEPLVLTIPGVSYATGAQIVSEIGDVSRFRNASALVSYAGLNSSVSQSGQFDSGGGPITKHGSPYLRRALWLAANRARQYDPGLRAFYDKKRAEGKPHRVAVTAVARKLCHIVFAVMRDQVPYDPGRE

SEQ ID NO: 271554 - protein, 371 aa, unidentified
MIHTNTFIGLDVHARSIKAVALDVITGEVRSASFLYDYIALAEWIRSLPQPTRCVYESGVTGFDLQKKLASSGIDCVVGAVSKMFKPAADRKRKNDRNDAEFLARMLSVGNITAVWIPDDECEAARDLIRALEDAREECIRSKQILSKFLLRHGLVFNETSPTGRRIGNWTLAHWRWIRSITLSNPAANDTFLYYIDRVKASTEEKKRLEALVREEAARPRWKKRVDTIRCLKGIDLMTAADLVFEADELSRFKNARSFAAWIGLVPSEHSSGESIRQGGITKAGNRHLRKALVESAWHYLYASPGSKDLVKGQDPDRQARRHATKGTRRLIERRRALLERGLDKNKANVATARELACWVWAIGCMVEKGN

SEQ ID NO: 271555 - protein, 392 aa, unidentified
MYIVGIDIGKNHHEASIVSPEGKQIGRSLRFATTHKGADSLMSFIFKNIGNSPCVFGMEATGHYWYPIYSFIKAKGYTIYVINPIQSDSLRKMYIRQTKNDSIDSFLIAEVIRFGQFGTTSMADENILAMRQLCRYRDSVISSRTEIKLRIGTIMEQIFPEYEKQFSSLWVSTSMGILEKYLTPENIENAPIDELFEIIKDKSHNRLTRAKAISIKEAAADTFGIKIAQDAFSFQLKQLIDRMNFLDKQIEALDCQILEYYEKFDCYLHTIPGIGMIAAATILAEIGDINRFKSSSALVAFAGIDPTVRQSGEFSSTHNHMSKRGSPYLRHAIFLAATTCSFHNSPLNAYYKKKREQGKHHLTATGAVARKLTTVIYAVLRDGKPYEPKSFC

SEQ ID NO: 271556 - protein, 323 aa, unidentified
MNKYIGVDISKKDFYACFEETEDPVLFGNNKIGIKTFEKYLNAHDFKKDQTVIGVESTGIYHLPMSFGMSKAGFQVKVINPLIVKKQNQISLRRVKNDKKDAGLIRYCTANNAGYKFIDTNETLTIKSLVRQRDSLAMMKNTLSRKQDSVLYKETNLGINVSKSNKRLIAAMNCEIKQLEKELKEFRKDEQKLLQSIPGLGPITAISFISEINDVSRFPHPKKMIAYIGLDSRVHQSGTSIHGKGYISKRGNKILRTRLYNACSVAVLHDNIFREFFQKKRGEGKAYKVALCATMNKMARIIYAVWKSGLPFEDKRKSTPIIG

SEQ ID NO: 271557 - protein, 428 aa, unidentified
MSYRIAGIDVHKKMLAVVVSDVEIESEYQFERRMFSSNPEQLRSLAAWLVEQKAEEIVMESTAQYWKPVWETLERYWKSLCEKREGARRRSGTLHLAQALSNRGRRGRKRDFVDAERLVKRLVARELTLSFVPDAEQRLWRTVTRKKYQLRRDLVRIHNQLEALLEEAHIKLSSLVSDLLGVSARRMLKALADGETNPAALAALAHERLRATPEQLCDALGACTELKPVYRRLLKMTLEHLQILEQHIGQLDQELATLLHPHQDAVERLAEVPGFAVDSAQQIIAEVGPAAATFPSEKCLSSWVGACPGEEESAGVNYSHRSPKGNRHMRRLLNQTANAAVKAKGSIFEIIYRRCVPRLGHNQAIGVIAHRQCRLIWLILHHGTRYEERGPAVTKRSRYQRTWRMIRQLRNLGYRIELPNPDASQAQA

SEQ ID NO: 271558 - protein, 438 aa, unidentified
MSNKVIFNLDDLFISVGIDVGADFSWMSIALPNQQFVGKPYKILHNSIDSLTTAVSKIKEAEELYSLESRIFLESTGIYHYPLFCYLRDKGFNCSVINPIITKNSTNINIRKVHNDRFDSKKAALVGLKPDLKVSLIPSDLALNCRNLCREYYDLMDNRSAYVNKLQGELRMAFPQYLGIFSKVTINTSLTLLETYASPSAFLEADKQEIIDIIRSTARFGLTYAQNKYNAIIQAATDANQFGYIIESNIKRICLYISFIRKYDEEINSILESLHELVDANEDADFVKQIHLIETIKGAGFLSAVSIMGEIGDFSAFSKPKQLFAYFGLDPAVKQSGKFEGTKVQMSKRGSAIARRVIHTLTLQSISISRNGEAKNPVLREYYLKKCDSKPKLVAMGAVSHKVCNMIFAILRDNKPFEIITPQEHIKQYNASKCDMAA

SEQ ID NO: 271559 - protein, 367 aa, unidentified
MKKNSTSPRSRKGAARKAGPITIGMDLGDQSSRYCVLEESGEVEAEGSVATTKKAMLQKFAGLKRCRIAIEVGTHSPWVSRLLKHLGYEVIVANARQVKLISQSSRKNDRVDARTLARLVRVDPQLLSPIQHRSEQAQQHLAMIRVRAALVEARTKLVNAARGFSKAQGERLPARDAATMGVEEMTELPAGLQEVLRPLLEQVKSLTDQIQKADVELEQIARAEYPETALLRQVKGVGLLIALTFVLTLDDHERFQKSRDAGCYVGLRPRQRESGASQPQLRITKEGDRYLRTLLVQGAHHILGWRGPDTDLRRWGLKLASRGGKNAKKRAIVAVARKLAVLLHRLWATGEVYEPLRNSGVTATLAA

SEQ ID NO: 271560 - protein, 338 aa, unidentified
MTYYAGIDVSLESASVCVVDAAGKTIREGKVASEPAALVDWLKGVGWGLERVGLEAGPLSQWLHAGLRQAGIAAELLETRHVRRAFEIMPVKTDRKDARGIADLMRLGWFRPVHCKSIDAQETRAMLTARKLVQKQVFEVESSLRGILRGFGLKVGKTTPVKFEGRVKELVAGNPSLERIAGSLLATRAVLRREFNGFERQLRGMARNDTRTRLLMSTPGVGTIVALTYAAAIDDPSRFTSSKTVGAHFGLTPKRYQSGETDYTGRISKLGDASVRAALYEAAHVILTKPLKGCTALKSWAMRIARRAGMSKAKVALARKLAVIMHRMLANGTTFQSA

SEQ ID NO: 271561 - protein, 345 aa, unidentified
MQITTIGLDIAKNVFQVHGIDAKEKVVVRKQLRRGKLMAFFEALSPCLIGMEACATAHHWARELTKLGHEVRLMPAKDVKAYVKRNKNDAADAEAICEAVRRPTMRFVRIKSPEQQGQLMQHRTRDLLMRQRTQLINALRAHLAELGIVAAKGEGGVKELLAIVADEEDTRLPIDARASVIVLATQLEAVQTVIGAIEKRIKMQHRANEASQRLETIPGIGVIGATAIAATVADPTVFKSGRDFAAWIGLVPRQDSTGGKQKLGPISKQGDRYMRRILIVGAHSVLRRAQQNPGKYPWLTQLLARRPFKVVAVALANKMARVAWALLAHGGTYRAPELAEGHLEQ

SEQ ID NO: 271562 - protein, 386 aa, unidentified
MKPTSQMTLDVYFRQCVGIDISKDKFTACLYMYDRASDAGCCTKSIDFANTKSGFNQMVRWSRKEAVKSHPLTYLMEPTGVYYEHLAYHLHKIGQTVYVVLPNKARKFCESEGIKTKTDAMDARCLALMGCASRKLKPWSPPAAIYRELRQMTRFHADLCEVRTSVANRMEALDHMEGTAKSVHKNCEKLLQEIDTLMEKNGKAIMKIVAEDKELQMKVKRIATAKGLGVTTIVCVIAETEGFHLIENRKQLTSYAGLDVKARQSGKEDPKHMISKEGNAHIRAALYMPALVAVRHNRQIREAYGRICQKHPKEKMIGVAAAMRRLLMLIYTLWKNGEEYDETRDTTHTPRKKEPELEYGPDDCIGRIDDEPVDWNAVDGNGEPPF

SEQ ID NO: 271563 - protein, 402 aa, unidentified
MDIGDIEVFIGIDVGKSEHWATALSRDGQKVLDRALPNDEDRLREVYQRLQAKGQVLVVVDQPATIGALAVAVAQDMGITVGYLPGLSMRRIADLTPGSAKTDAKDAAVIAQAARTMPHTLRAVSTSDEDAAALSMLTGFDLDLARQVNQTANRIRGLYTQIHPALEAVVGPWLEHDAVLEVIAAWPTPADLKRAGKARIEARLKKHGCRRHAAWAGQIVSALKHQTVVVAGTDAAAVVLPHLARQLIALHAQRADVAAQVETLVQAHPLYQVLTSMPGIGVRTAAVFLAETLGKTFDTGAQLASYAGLAPVTRRSGSSIRGEHVSHGGNKRLKRAMFLSAFASLRSDPVSRAYYQRKRDQGKRHNQAVLALAHRRILTLHAMIRDGALYDPQPATKLPAAA

SEQ ID NO: 271564 - protein, 356 aa, unidentified
MKYYTSTTEFNCGIDLHAHQMYVCVMDRQGKKLVHCNVKDNDFEYFLKLVKPYRHSLTICSECMFGWYWLADACQAEGLTFVLAHALYLHLIHGGKNKNDRIDSEKLAHLLRSNLIPPSYVYPSARRPLRALLRQRISYVWRRAELLARIHSHQLAHNRTPAKQTQRTRDLWEERLLKAENHPLRQLALKNDLAVIRHYDQQIFQLEEELQRQTKRVACREFTLLKSIPGIGQSLGLTILYEIGDIERFPTIKDFLSYCRLVKGTVASAGKIKGLRGAKLGNPYLRWAFGEAAVIAKRDHYRLKPLAQQLEARMNGNKFKANTVLAIKLARAAYFMLKNKTVFDPERLTAVLAKAA

SEQ ID NO: 271565 - protein, 442 aa, unidentified
MEILYSYVGGIDVHKKQVTVTARTPDPKRPGARRQTTRTFRTFYGDLLAMARWLVVEQGVTHMAMESTGPYWWPVYTALREVGGPGMTIEVVNAAHVKNVPGRKTDVKDSQWLAELMEVGLLRGSFLPPEQVRMLRDYTRYQTKLTEERSREKQRLLKVLEAAGIKLDSVASDTFGVSGRLMLDALVAGERDPVVLAGLAKGVLRNKTDDLRLALTGRFTDHHGSMIGLHLTRIDHLDQTRAQVIEKIGKIGTGPPDGLAGPFAAQIALLASVPGIGERVATVVISEIGVDMSRFPTAAHLAAWAGLAPGNNESAGRRRRARHRKGNTHVQSILIEAALAASRTRTRIGARFHRLHRRFGGKQNKGAAKKAAFAVAHTLIKVIWSVLHTGQPYTDLGHDFYTRRVDTLTQTQRLVAQLEAITGKKISFIDDADAPPGAALTA

SEQ ID NO: 271566 - protein, 406 aa, unidentified
MEVVHPRCAGLDVHKKSVVACVMVPGRKEVRTFGTMTDDLLRLAGWLEQEQVSHVAMESTGVYWKPIYNVLESTGLELLVVNAQHIKAVPGRKTDVKDAEWIADLLKHGLVRASFIPSRPQRELRELVRYRKGLTEQRGHVVQRIQKLLEGANIKLSDVASDVVGVSGLAMLRGLASGEHDVDRLAAMGKSQLRNKREELKLALRGSFGEHQRFMLKKQLGLLEFLDAQIGDLNQEVERRLRPFEPLLERLRAIPGIGPRNSEQILVEVGTDMGRFPSAAHFASWAKLCPGSDQSAGKRLSGRTGQGSRWLRATMVEAAWSAARVNNSYFAAQYHRLVPRRGKRRAAVAVAHSMLVVIYHLIKDGTIYQDLGPRHFDELDRKRLTRRAVHRLQSLGFEVSLREVGA

SEQ ID NO: 271567 - protein, 403 aa, unidentified
MTVTAIAPGTIIGGIDTHADTIHVAAIDPWGRQLGDQEFPTTPTGYSDALEFLSSHGQVIGLGIEGTSSYGVGITRAALAADLTVHEVLRPERAVRRREGKSDPIDAYQAAHAVLAGRATAAAKKADITALRALHNARRSAVKARAAAQVQIGQQLITSPVRLREKYRNLTSARLVQALGSCRPGNHADLEERLVLTALKSLAQRHHALTKEIAKLDAELTSLIEQTAPHLLHLHGVGNYTAAQMLITSGGNPDRLRTEASFAALCGTAPVPASSGKTTRHRLSRGGDRRANHALHTIALARMRNHPPTKAFVTRQRDQGRSTPEILRLLKRAIAREMFKQLTRPHQDLGVHDLRPARQAKNITIGAAAVALGLAPVTISRTERGQFVTPEVVSRYRAWLATA

SEQ ID NO: 271568 - protein, 417 aa, unidentified
MEGISTMDVVYRCCAGLDVHKQTVECAVRRLTQSGTVQVEIRQFGTMTDDLLEMVTWLKAQGVTHVAMESTGVFWKPIYNILEGHCSVLLVNARHVKQVPGRKTDVRDCQWLAQLLQYGLLKGSFIAPRWQRDLRDLTRERTQLTDEQTRVANRIHKVLEDANIKLGSVATDILGVSGRDILERLMAGEEDVEALAERARGRLRGKIPELRRALRGRLSEHHRFQLRLNWDHLQRLQELIERLDQRIRELSQPYHPQIEQLDKVVGIDQTSAESIVAEVGVEMKVFPSDGHLSAWAGMCSGNNESAGKRRSGRTPKGNRWLRRTLTLAAQAAGHAKDSFLASRFRRLAARRGKKRACVAVAHSILKVVYHILKDGRPYQDLGGSYFDRLDPQRLTRYLVRRLERLGLKVTLEPATVA

SEQ ID NO: 271569 - protein, 325 aa, unidentified
MIQNKEKVESRIILGADVAKASIVLKQLRDGHPVCAGVKTIPNNAADITKALINLGQIDLIVCEVTGGYERQLLEAASQLAIPIHRADGARVKAFITSHGVRAKTDAIDAYGLALYGQDRFNSLPRWTPPDPKREELQSLVKHRQALLDQRTMATNRSKAPNSHYLAGFLQDEISFINTQVEKIEQQISDIMKSHATIKAQEKRLRAIQGIGPVSAHTLIAMLPELGHATRKQIACLAGLAPHPAQSGNSFKKYPMTGGRDLIRRTLFMAALTASRCHPDLKHFYQNLLNNKKPKKLALAAVARKLVTIANAVLKPVLISHAELT

SEQ ID NO: 271570 - protein, 357 aa, unidentified
METITTVGIDLAKNVFQVHAVDAQGQVVFRKTVRRAALLRLLSKVRPCLVGMEACASSHHWARALIELGHRVRLIPPAYVKAYVRRQKNDAADAAAICEAVSRPSMRFVPVKSQEQQAVLMLHRARALLVGQRTALICAIRSHMAELGVVAPAGPRNVAPLLERLADASDEGIPAVARLALSPLADQMARLHREIERLDRAILEQCRRNEVSRRLAVIPGIGPLTASALAASVTDPKMFKSGREFAAFLGLVPRQSSTGGKERLGRISKMGDRYLRTLLVVGATAVLRHAKAQGSAKAQGSAKAQGSPPRIWAEGLLNKKPFKLVAVALANKTARIAWAVMARGEKYRKPAPMAKAA

SEQ ID NO: 271571 - protein, 317 aa, unidentified
MDSATVYYVGIDVAKRQLVIAVRPTGECWTTANLPRAYPALVRRLLALRPTHIIVEATGRFHQPLARALAHAGLPIRVANPRHTRSFASALGRLAKTDAIDAHVLAHFAEVLPFDARPPLDEEAQALRELVGHRRQLVKDHTVQSNRLSAGCRGLPARQLRQHLRFLERQLAAVEEALQQALRDPRWAARADALRSIPGIGEQSVVALLTELPELGQISGKQLAALVGVAPLNRDSGAFRGARTTHGGRRALRCTLFMAALAAIRCNADIRVFYQRLLAAGRPKRVALIAALRKLLLLANAVVREQRAWRPALPAAA

SEQ ID NO: 271572 - protein, 355 aa, unidentified
MPSLIARTVARAKSPYRQGWDPQNRLDRDAMDTFLSTSDSYLGIDVSKARLDLAVRPGTQTGSVAHDPDSLDRLVEQLVAQPPRLVIVEATGGLETPLVAALGAAGLPVAVVNPRQVRDFAKSLGRLAKTDRLDAGVLAHFGQAVEPEPRRLPDAAARALPAVVVRRRQVIEMLVAEKNRLHRTHASLQERVGQHIAWLEADLAELDRELHDRLRASPLWRAQDDLLRSVPGVGPVTATTLLTELPELGRLNRKQIAALVGVAPFACDSGQQRGKRIIWGGRATVRSALYRAALSATRHTPAIRAFYQHLRQTGKPGKVALVACMRKLLTILNAMLRSGRPWQPDRVAPAALRTA

SEQ ID NO: 271573 - protein, 372 aa, unidentified
MSTLRFVGLDVHAETIAVCVAEGSGEVRPLGTIPNRLESIRKLVGKLGPVKQLRTCYEAGPTGYVLYWQLAALGVACDVGAPTLVPVKAGDRVKTDKRDAEKLARCHRAGELTAVWVPDAEHEALRDLIRAREAGKKDQLRARHRLSKFLLRHGRRPPEDTKAWTKKYLEWVKSQVHFEQAALEATLSDYFHEVEHAAARIERLEKAIDGAVEKMPPQLRAVVEGLQALRGIAQITAVTIVSEIGSFSRFEPRKLMGYSGLVSSEHSSGNRIQRGSITKTGNSHLRRVIVEAAWSYQHRPWLGGYLLKRQRDLKLSEETKEIAWKAQNRLHTRYKKLSAGGKNKNQVVTAVGRELLGFIWSIAVQIEAGFKA

SEQ ID NO: 271574 - protein, 434 aa, unidentified
MTPDSAAVRATKGKVMKPFNEITHYAGFDWARDHHDVVMVDGQGQIVADFRIEHSLAGWQQFRDKIKDYPALGVAIETSQGAAVDQLLQLGCNVYPVNPFSAKSYRERKAPSGNKTDHLAGWSLAEALRTDGHAWKALQPLDPLTQQLQLLCRDEISLIEQRTALVNQLQQALLEYYPAALQAFEDWTLPACWDFILQFPTPEKLATAGRRRWEKFLHTQKLWRPETATKRLEIFQNARHFCGSAPVTSAKSLLALSLANLLNALQIQLDQYRQQIEALFAQHPDHDLFGSLPGAGKTLAPRLLGEIGGDPQRFEDTEALQCIAGTAPVSFQSGQIHRVRLRHQCNKVLRHTVHLWSQCCVRVCPWAETYYKQKRAEGKSHACALRCLGQRLLKIAWKMVQTRKPYDADLHARHQKLHGSWVLTLMQPAASASE

SEQ ID NO: 271575 - protein, 416 aa, unidentified
MSQKLKEQRLKELAFVGVDTHKDEHTACIANCFGQSLGVFTSENRPKELKGLLEKVDETAKSHNLKPVFGLEDVMGLGQHLARSLISGGYHLKEVNPIETERKRLKNAHPDKSDPLDALAISRVLITDFDKLPTIQSLNEIYLAIHELSNRRDSLVKEKTRIKNKLHILLHREYPYYQTMFKNTFSKAALAFWERFPIASLLKGIGVERLAQYLRANSNNTVSTKKALSILKLVDKDSVPSCLNLVHSSIIRNLVKHLRFIEEQIAIVEKELEPLVDETGMKLSTLTGVDLVTAAKLIAEIGDVNRFSSSDKLAKCAGIAPQQKSSGKKLKFKKSNRGRRQLNTAIYHIALSQISRDRSGKPRNSKARDYFLRKISEGKTKKEALTCLQRRLCDIIYAMMKNKTEYRFQRTNNLVT

SEQ ID NO: 271576 - protein, 394 aa, unidentified
MLYLGIDIAKNNHVASLISENGKTLFKAFSFSNTSDGGEALLSKLNSFSNNISDFIVGMEATGHYWLALYSFLYDNGFTVHVINPIQTDGWRKGTEIRKRKTDTIDSLLIADLIRYGSFVETSLSNEDMFSLRNLTRFHSYLVQSISDLKRKVISVLDQVFPEYQSIFSNVFGKTSKELLLQFSSPIDFEDISTNSLAELINKLGRKRSGDIKANLIKSKAENSFGVTFSKDSFTFQLKALIQQMNFIESQVKDTENEINDLMSLIKSPITTIPGIGNVIGATILGEIGDIDKFDSPKKLVAYAGIYAVVSSSGEFQATHTVMSKRGSPYLRKALFQAALVASFNDPVLNAYYLKKRGESKHHLTCVGAVSRKMCNIIYAVLKNQTPYEVRLNE

SEQ ID NO: 271577 - protein, 421 aa, unidentified
MTDDIEWYVGFDWASETHCACLMDRAGRVVGKREVAHAGADLAELCDWLIRKTGAEPGRIGVAIETPHGPVVETFLERGFAVFAINPKQLDRFRDRFTVAGAKDDSRDAQVLGDSLRTDSRAFRRLVIDDPVRIELREWSRIEDELKRERTRLANRVRDQLWRYYPQMLQLSEDLAEDWLLALWRRVPTPAKAAKASEATIQRILKAHRIRRIEAPEVVRILRQTPLKVAAGASEAASAHIRSLAERIGLINQQLKTAERKLEQLLTRLEQAAQDQAGQDQAGQMSEQRDVTILRSMPGIGRTNLATLLAEGSEPLGRRDYHVLRTLSGVAPVTRRSGKAWMVLRRLACNRRLRNALYHWARVATQHDPVSRQRYAALRGRGHSHGRALRSVGDRLLYVACTLLRRQVLFDPDHNSLEAAA

SEQ ID NO: 271578 - protein, 408 aa, unidentified
MKVQYICCAGLDVHKRIVVACVRKGAFGEEVISKVKSFGTTTPELMEMIEWLKSCGATHVAMEATGNYWMPIYNLLEGHFELVVANAAHMKAVPGRKSDVQDAELLRHGLLRSSFIPSREQRDLRELTRHRSALAGKRAQAANELQKSLESANIKLQSVLTDITGASSMEMLQELISGKNNPKELAQLAKRRLRAKIPELEKALRGNLRRHHQMIIEQLLADIGLFAAQIAELDAYIENLLRQEQEIIDRLDDTPGINRRIAEIVIAEAGTDMNRFPNQYHFASWIGLCPGQNESAGKRKSGKTRKANRALRCALVEAAHGAVRKKDSYYGAQYRRIAVRRGKKRALVAVAHSMAIAIYHMLKSKTAYQELGANFFDTINPIKALNRLTKRIENLGYHVSVTVADRAA

SEQ ID NO: 271579 - protein, 370 aa, unidentified
MIANHSSFQLIASINFNVYKGMKKIIVGIDVSKEKIDASAILVTGNLLGMQKLDYQTFENRPMGFRRMVVWAKHLVKGITLDDVMFCCETTGAYDHKLCDYLFAKGLDIWRESALQIKKSSGLRKGKDDKADSLAIAEYAMRHADKAVYYVSPNQDIRELKELLLYRHKLEQEKASTTVRVAGLKATAGKSPSRNFILRDAQKRIKQLEKSIKECEKQILEIYGRNEEMKKSYTHITSIKGVSIVNATAMIAYTNNFKNITSSRKLASYYGVAPFREKSGTSIDKKAKVNCYSNTMLRSYLTMAAKHTIKANGIYFDYYNRMIAAGKCYGIAINNVKNKLLNLSISLVKNDMDYEACHEYKRLQGKAELA

SEQ ID NO: 271580 - protein, 414 aa, unidentified
MIVAEEGTGARVCGGVDWAKDDHAVCIVGAEGEALQRFMVTHDRAGLKDMVHRLLRAGVDEVGIERPDGPIVDALLAAGLTVLVIPPAQVKNLRSRYGSAGNKDDRFDAYVLADVIRTDRRRLRALERDTVATTALRTTVRARRDMIVHRVAAANQLRAHLQIVFPAAAGLFDAIDSEVSLQFLQRFTTQAQADWLSVKRLGSWLASIGYSGRTDPEVMYARITAAPRGTTGPEAVILAGTTHAYIAVLRQLNTQIRTLAAGIADQLDVHPDAKIFTSLPRAGCVRAARLLAEIGDARGRFPTASSLACLAGVAPSTRQSGKVKVVTFRWGADMELRDALCDFAGDSRHSNPWAADLYARARARKCDHPHAVRILARAWVAIIWRCWQTNTAYNPAEHGGLQRILNQDQQTVAA

SEQ ID NO: 271581 - protein, 477 aa, unidentified
MNKKQGDNLQSPKAKSKRRRRNKGMCLEDRPVLEPNAAGVDVGAREMFVAVPPGRDENPVRVFATFTEDLERLTDWLEQCGVTTVALESTGVYWIPLFEILEQRGIRPCLVNARHMKNVPGRRTDWHECQWLQFLHSVGLLRAAFRPGQDVCAVRTILRHRNELVGAASQHVQHMHKALTPMNLQIHHVISDITGLTGRAIVDAILAGQRDGAELAKLRDPRIKADTETIRKSLEGNWRPEHLFTLGQSRDLYRIYQQPIVNCDLEIEKMLQGFAPRIDPGERPLPTDRKRNRAGSTRRRKNGHPHPEFDLRTEAYKLFGVDISQIPGVEENALPLFSEVGRDMSRWPTAGNFISWLALCPDNDISGGKLLWRGTRRVKNRAGHLFRMAAYALHRSLTPLGNYLRRMKAKLGPQAATMATAHKIAVIFYTMVKNQVEYDETLWATRDAQREKRLEAKLKRQAKRLGYELVPIEPKAA

SEQ ID NO: 271582 - protein, 336 aa, unidentified
MNESIMPAAAARFNYVIAFDVAKESLSVHILPSGESLEVPNTAASVRKLLRREQKRNAKLNLGPLLVVCEATGGYENNVLEAACELRLACHRAHGSDVRAYANFRGKRAKNDPIDAFLIAAYGQDKPSPRLYQPPRPEQTALRELMGRRAELQDMIGAEQARMEHVRTEAVLKSLEKHLKLLDKELAAIEKEIEALTAKDLAFSRRAGLMQTVTGVGAVTACTLLAFMPELGTIPAGTAAALAGLAPFDRDSGKEHGRRRIFAGRSQLRSCLFMAARAAIRHHEVFKTFAGRLMKRGKPYKVAVTAVMRKLIVILNAMLKADEPWKHAKNACTETQ

SEQ ID NO: 271583 - protein, 394 aa, unidentified
MEVAFMLVLLDRCCGLDIHKELIFACCLSGDSDSPTAVHSQFATNQNGLSELCNWLKSHDCVHVAMESTGVYWRPVYETLEDQFPECEAIVINAQHFHNLPGRKSDVKDAEWIATMYRHGLLSKSFIPAKAFRTMREVSRLVRKAVSERIGQINRMEKFLQIRDIKLSSVVHDITGKSSRALLERLVQKGHLTLPDIESICGRLKASPQEIRDAVKGTLPIYDRKLLSRILYELDFYDSEIKELRDILLELAEPYSVQLKQLCSIPGINVDSALAIMAEISATPQTDFASSEKLCSWAGLVPRNDESAGKIISNRILPGNPFIKSILCQCAWVSVYSRNSVFHDWFWKRQARIGRKKAIIAVARKMLALCYKLLTSGEFYDPVVALSPYQSPVQ

SEQ ID NO: 271584 - protein, 349 aa, unidentified
MYIGVDTHKAAHVLVALDEQGRTLGTRDITHSPDGWGEALRWAQGWPGERMWGLENSGSWGKGLAQSLLAQGEAVVCEVSPQRTAQYRRRGRTQDKTDHADALAIARLLVAEGEQLPRVQADDARTELRLLSDHRDNLLGERTRLINQLHDQMVQLDPAYKVNSGPLKQRRGILYCRDWTLDHPSRVAGTRLLIVHQRATQILRLDDELAAITAELSARVQATQTPLLALRGVGEVTAARLIGELGSPPRIRSATALAALSGIAPVAVSSGGRTGYRLNRGGNRRLNRAIHIIALSQRRCEPRAQAYYAKKRAEGKTAREAMRCLKRRLVDVLYRTLCQDRGVPVASAA

SEQ ID NO: 271585 - protein, 344 aa, unidentified
MDHFGGLDVSVKETSICVVDDTGRIVKEVKVASEPAALLKVLGNPTYRFKRIGLEAGPLSQWLFSALAEAELPVICVETRHMQAVLKAQINKTDRNDARGIAQMMRAGLYRPVHVKTLRSQKLRMLLTHRKLLQSKAIAIENDLRGTLRNFGLKVGMVGKVRFEARIQELVESLPDFAELVEPLLIVRRTLREQIVVLHRRLLAIVRDDEVCRRLMTTPGVGPVVALTYRATVDVPARFRKSKSVGAVFGLTCSRHQSGEIDWSGKISRCGDEMMRVMLYEAAQSMMHSKKWSWLKAWAMQIARRRGMKKAIVALARRLAVIMHRIWVDGTEFRWTREQVAAAA

SEQ ID NO: 271586 - protein, 343 aa, unidentified
MNNGFTPFDPCGIEVSHLLLVVGLRCGDHEQAPREFPNTPEGHQAVLRFLERSARPVRVAMESTGLYGLDLALALHQAGVAVMVANPRAVRHFAQALLQRSKNDQLDAEVLREFAARMPFQAWRLPSAAALKLVSVARRLEALTDMMAAEKNRLHAASLSEALPAIIRRDLQRSIQTQQRAIDRLTRAALEFIAQDPELARRSELLLSIPGCGATSAVHLLAELNLLPADLDVRQWVAYAGLDPREYTSGTSVHKKVRISNAGNKHLRRALYLLRRSRTQRPNRFLIWTTLGQAPPLHQNSTYFLKGSPPCGECLVSTAARASAALGVGVLAKRISFASIFLP

SEQ ID NO: 271587 - protein, 342 aa, unidentified
MTLYIGVDIHARQQTLSYLDTSDGTTGQVRLDHERDDIKGFYSQFRGEVIIGIEACGYTNWFEELMEDLGHKLLVGDAAEIRRLARRRQKNDGRDADLILELLWHHEFPVLFRYSQESREVLRQLRYRHKLVKLRTMVVNTLHALAINAGLSLRAQLLTKGGRKQLAGLQLSAISQQQRDELVSLTDELTRRIQTVEKWLQEQARKDVRVQRLQTHPGVGLLTSLCLVHTLGELSRFSSTRKVAAYVGFDPMEDSSAERKAYGGISKAGSRLLRYLLVEAGQTAAKHDQQLKQFYRRLLPRRGKARAKVAVARKLLIRCFIMGRAEIDYAEFLRRGKERETE

SEQ ID NO: 271588 - protein, 345 aa, unidentified
MTKITTIGLDLAKKVLQVHGVDVEGTVIVARQLRRKEVLAFFAKLSPCLVGMEACGTSHHWARELTKLGHEVRLMPPRYVKPYVKRNKNDAADAEAICEAVTRPTMRFVSAKSREQQAALALHRTRELLVKERTQLVNMIRGLLAEFGISIPHGLERAIAMARQVAEGEILDVPEDTATCIVELCGQALAAHERVRIIDRAMLATHHANDMAMRLATIPGIGPIGASALAASVSDPHQFKSGREFAAWLGLTPLQNSSGGKERQGRISKMGDRYLRKLLIVGMTSLVRRAKSKPESVDPYLARLLARKPARVATVAMANKAARIAWAIMVRGDTYRAPTARLLAA

SEQ ID NO: 271589 - protein, 354 aa, unidentified
MPETEKTTVAVVGIDIGKNSFHIVGLNQRGAIVLRQRWSRGQVETRFANMPPCLIGMEACVGAHHLSRRLKALGHDARLMPAKYVRPYSKGQKNDFRDAEAIAEAVQRPTMKFVATKTVEQLDLQALHRVRERLVSQRTGIINQIRAFLLERGVAVRQGPRFLRTELPRILATPSDIVSLPMVRLIEDLAGDWRRLDERIEGLSAEIEVIARQDAGCERLMSVPGIGPLTSSAMVAAVGAGGTFAKGRDFAAWLGLVPRQISTGDRTILGKISKRGNRYLRVLFVQAAWVVLIRPKSWQRHGLKPWLEAARKRLHRNVLAIALANKLARIAWSILAHGRNFEARRIDEATAQPA

SEQ ID NO: 271590 - protein, 485 aa, unidentified
MALVFAVVLGLLILEVARSRRKPNPTSPDPASLALLHTLHPHAAGIDVGAAELWVCVPPGAVSIPRPPTVLPAHVRRFGVFTADLQAIAAWLHQCGVTTVAMASTGVYWIPLYDLLEQAGFEVLLVDPRQVQRAPNRPKTDVHDCQWIQRLHSLGLLTAAFRPEEPIRVWRSYQRHRASLIEDAGRHLQRMEKALEQMNVKLPEVVSDLTGRTGMRIVRAIVRGERDPKALAKLRDHRCKASAETIARALQGTWQPEPLFALQQSLALYDYYHEQIRDCDRVIEAHLMGMALPEVPPLEPKRRSRRRKDNEATFDARQRLHHVAGVDLTAIEGIEESTALVVLSEVGTDMSRWPSEKHFGSWLGLAPNPKKSGGKMKSSATRPGVNRAAQALRLAAKNLQRSHSALGAFFRRIAARRGLAKAITATAYKLARIIYAMLKHGMAYVAQGLEAYETAYRERVVRQVKRKAVALGLVVVERDAGVQPS

SEQ ID NO: 271591 - protein, 332 aa, unidentified
MLGIDVSSQMLETALCLDRHAKPQWRREVPNSAAGVDELLTLTPADVPWIVEPTGRYSLLVVKQAQAAGRKVLLAPTRHAKLFLKSLQSRAKTDKLDGRGLALFGHSRPLHPFPIKSDNVEQLDQFLSARKLLSRSLSSLKLQAESLPKAKEALLPAIKVLKEQIKHLDKQIAALSTDPVAYPEFAATKRLLKVPGIGPVTAAALVSRLSAKRFSHPDQLVAYVGLDVGVRQSGKRIGYTGLTKQGDAELRRLMFLCATAVLCGKDNPFKTQYHREKEKGLSSTAAICAVARKMLCVCWSIHKHGTDYDASRVSKRPERQSATQEPQDNNSN

SEQ ID NO: 271592 - protein, 400 aa, unidentified
MLSIGIDVSKGKSTVCGMKPGGEIVYTPFEVQHTREGMSELLSLLRGSGEEVRVVLESTGSYHCPVVAALLENGIFVSVVNSLRMKRFCSQSIRRVKTDQIDAMQIALYGLAYWQELQPTRLPENTYRELQLLARQYYQMTSLLIKAKVDFNALCDQVLPGMQELMNDHAGRHKLSDFVLRYRHTTHILEMGETRFRKDYCKWAEKKGYRNRERMAALIFATAQNGIPVLPNAPSTQIVITEAIRVLHTVEASRDAILTQMQALAKTLPEYSLVREMPCIGDTLAPRLIAEIGDVRRFHSKRALIAYAGIDAPPYQSGKFCANNRHISKRGNRYLRKTGYEVMQSYVMHKPANDPIFTFIEKKRSEGKSGKLAMVAGLNKFLRVYYGKVTELYRSLPAIE

SEQ ID NO: 271593 - protein, 346 aa, unidentified
MIMIGCDFHPGMEEVSLLDTGTGRRWQHQLSHASGMEEVRAFYAALAGPVLVGLEASGYSQWYEEMLEELGIELWVGDPARIRKAAPRKQKTDRNDARLLLQLLEENRFPRIWVPDKATRDLRQLLMHRHKLVCMRSAVSNQLQAIAINRGLRKKGSLWSERGRAELQALDLPPWASVRRNELLALREQWDGEIAVLDKVLLETAEQHPEARYLMHHQKGVGPVTAMAVVLTLGPVERFASSRKVASYVGLIPAEYSSGARQRLGHITKEGNVFLRWVLVEAATVAVRHDPAMKQMYWRLVERRGKSIAKVAMARRLLVRLYWMLRRRKQAIKSRQSNRVAGKLGS

SEQ ID NO: 271594 - protein, 313 aa, unidentified
MNTPTQYTYIGIDIAKDTLVTSLEKGKATTFENTPRAIEHLIAHLRSLSQHPFAICEATGGYEIPLVQALTEAQIPTAVVMPGRVRHYAKASGLLAKTDSLDAALLAQYGQAFQPTPYAGHTPALLELRHLVDRRTQLVDLLSTEKNRAAKAATKIEKYINKTIRFIENQIAQIEDEIEKHIDSNPDLREKATRLQQVQGVGAATTYILLSHFPELGTLTRNQAAALLGVAPMNRDSGKYSGQRSIHGGRLYVRNAIYMASLSTIRFNPILKPFYRNLKSTGKPSKVAITAVMRKLIILLNQILKNPDFVLAH

SEQ ID NO: 271595 - protein, 355 aa, unidentified
MESVKYIGLDVHQSTISVAALNGEGKLLMQSVIATKATAVLDLLKGLRGVLHVTFEEGTYSAWLYDVVVRHVARVVVCNPRKNALLKSGNKSDQIDARKLAELLRAGMLSPVYHGEQSTRTLQQLVASYTALTEDTGRAMRRIKALYRSQAIGCAGKKPFGTRHRGEWLARLTDSGQRRRAQWLYQELDAVQILRREARQAVMEECHKNQAAKLLRSMPFLGPLRAAVLIARVQTPHRFRTKRQFWTYCGLGLETRSSADYVEKDGQIMRRRRPVYIRGLNWNYSHELKNVFKSAATTASAMDGPFRAFYESRVANGMLPAMARLTLARKMAAIALILWKKGESFAAEHLKRQAA

SEQ ID NO: 271596 - protein, 313 aa, unidentified
MSSPLVYVGMDIAKATLDLYAPLASRPQSRQMANNPTGHRALVRWLQKLGLVHIVCEATGGYERSVVTALQQAAIAVSVVNPRRIRDFARAQGRLAKTDRLDAQVLAEFGQRLQPAATPVPSAAQRQLAELVSRRQQLQQLRVAEHNRLEHATHPAVRRQLQRHLLGLDRQLDQLQDWITALVDAEPWLARKVARLCAVVGVGQITAVVLLATMPELGTLNRRQAAALAGVAPFNRDSGPRRGHRLIGGGRAVARRALYMAALVGAFANPQFQVFYQRLIAAGKAPKVALVAVMRKLIILLNQLLKNPEFQLT

SEQ ID NO: 271597 - protein, 343 aa, unidentified
MLYVGLDVHVKHITICVLNKHGKLLQRCQLPCLDDVIKFLMNLQGRCEVCFEASTGYGIYFEALSKIASRVAVAHPGLLKLIFRSKQKNDRADAEKLAKLLFLDEVPTVHVPTADVRAWRELITFRGKLIQKRTRAKNGIRSLLRSVGCRVPKEFGLWTIRGMEWLKQKDLKQPMQNLKRDMLVEEIETLTRQTRLVETELARYSKENIAVQQLQSIPGIGLRTAEAFVAFVDDPHRFANSKKVGAYFGLIPIQDQSGSTNRLGHITREGCAEVRHLVTEAVWQGIRYSPTIKAYYERIHRQEKDCDCSHIALPGACDVVHVEKWNLVERTEPGSLSDCSFDK

SEQ ID NO: 271598 - protein, 321 aa, unidentified
MNTYTEYLGIDISKQTFDVVNKSGKHCQYENTSKGFLKFKRTIKPESVCVMEATGIYHLPLAKYLHSKDINLSVVNPMRIKRYSQMKLNRNKTDKSDAKIISSYAQNQEIELWNPVPELIEQGKDLVQIIEQHIEFRAGLKNKKDALKSKKASISLIEIVVNQIETLSVSITELQAKLIQMVKEYDSELLQNITSIVGIGQNTAALLILASEGFNTFDNAKQLSSYFGLAPTEYTSGTSIKGSRKISKMGNPLVRKKLYMCSLQASRYNKSCMDLYQRLLAKGKPKKVALIAVVNKLLKIVFAIAKSGLPYDKEYQSYIAR

SEQ ID NO: 271599 - protein, 392 aa, unidentified
MSHEGTQFRATSGEEPVIQNKVRFLGLDVHADTIAVAIAEPNGEVRSLGTIANRAESIRKMVKKLGAVDQLRACYEAGPTGYVLYWQLAELGVHCEVIAPTLVPVKAGDRVKTDRRDAERLARSHRSGDLTAVWVPDAGSEALRDLVRAREAAKQDQLRARHRLSKFLLRSGQRPAQGFKAWTQPYMNWVKQIRFTQVAQESTRLDYLTEVEHMGERVLRLEKAITEAVKLASPELQEVVKDIQALRGIAQISAVTIAAELGNITRFEGARQLMGYSGAVPSEDSSGKRLKRGSITKTGNAHLRRIVIEAAWSYRLRPGVGPALRKRQEGVPEEIKEIAWKAQNRLHKRYMKLSAAGKDQRKIITAVGRELLGFIWAIGTKAEAAIKQQKAA

SEQ ID NO: 271600 - protein, 402 aa, unidentified
MRFIGMDVHRDFCDVAIYEDGKVRLAGRVESSPEQLGLFAQSLCDEDHVALETTGNALSIARILEGHVGGVLVADTRNVRAMTHAKVKNDRVDACMLAKLLAAGMLPGTWLCDEPTRVLRRRVSRRNQLVRGRTRARNQIHAVVIRNLGGRSPKRDAFSKKGREWLAGLELPTDERETLEGCLREADFLSGEVALVDREIACYAMGSAEIRRLMTIPGVDVTTAATLMATIGDIRRFPSPRHLVGYVGLDPRSRQSGASPIYTGHISKQGSSSARHVLCEAAHATMRAPGPLRAFGQRVRSRRGSKIATVAVARKLLCLTWQLLTKEQDYLYERPALTFRKLRKLELAAGAPKRSNPRGRDGKGTPDNPAQWATDRAQALQTEDHYRTAVANWQPQPQASPS

SEQ ID NO: 271601 - protein, 428 aa, unidentified
MKFKQSDGQNQRIERITTSHLVVGIDMAKEVHVAQATNFRGIVLSSRHLSFKNKIDGFEKLQRWIKGLLQKHRLNNIIIGMEPTGHYWYNLANWLVDEGAHVVMVNPATTKRNKENRDNSPSKSDPKDALVIADVVSRGYYYEYTRQATNFQRLRTIMSDREFWVTNSVRLQNRIIRWLDIRFPEYASVFKDWTCPRSIATLKEFPSPLDLKGQSTAEVITGWRKYMKRAGGSTGIQKAAELISQASQSVGDTTALEEAKQDLQRLIEEFERIVGILEQIEKDIVTVLGEIPIASQLRSLKGLGPIYTAAILSGAGDLKQYAHGRQLLRRAGLNLAESMSGKRKGEIVLSKRGDAKLRKYLYLATLTLVGTNPMFRQLHENNVHNKHMSKQQSVFKLLGKLARILVGMVRHGESFTPEKTFQTYTQAA

SEQ ID NO: 271602 - protein, 400 aa, unidentified
MAQQLWAGVDAGKSDHHCVVIDTDGQRLVSQQVANDEAALVDLIEGVATLADGGEVTWAIDLNAGGAGLLITLLIAADQRLLYIPGRTVYHASGGYRGDGKTDAKDAAVIADQARMRRDLQPLRPGDDIAVELRILTGRRTDLVADRTRAINRLRAQLLEYFPALERAFDYSKSRAALMLLTGYQTPDGLRRIGHARLETWLRKRKAYNASAVAAAAIEAANAQHTTVPGQQVAAAMVARLAKEVMILDTEIGDTETMIEDRFRRHRHAEIILSMPGFGVTLGAEFLAATGGDMSAFASADRLAGVAGLAPVPRDSGRISGNLKRPRRYDRRLLRACYLAAHIAIRTDPTSRRYYDRKRAEGKRHTQAVLALARRRLNVLWAMLRDHRVYQPIAPNAAAA

SEQ ID NO: 271603 - protein, 400 aa, unidentified
MISVGIDVSKGKSTVCILKPYGEIVSKPFNITHTQKDLSELSSMLFRLNDEVKIVMEATGIYHLPVLTYLQEKGFFVSVINPYLMKSYRNESLRKAKTDKIDSRIIANYGIDHWFKMKEFQTSGEIYEELKLLGQQYRHYMKLHLLSLAELTHLLDLTMPGIKNLLASWNETNRKDKRSDFVERFWHYDVITSMSEQEFTEEYILWAKEKKYVPSQEKAKVIYTLAQESIPTLPSETSSVKILVTEAVRVLKEVDATLGLILSRMQEIAKTLPEYPVVREMGGVGNTLAPKLIAEIGDVRRFRNGKALVAFAGIDPPPYESGQFVGCNRKISKRGSASLRKVGYEKMRSLKIRSSPAVPGYRYVVKKESEGKSKKSAKIAGLNKFLRIYYARVTELYKNI

SEQ ID NO: 271604 - protein, 429 aa, unidentified
MQNESAPGARGPVFCGVDTHADSHWLYVLDWRGRKVLSRQFPADAAGYEALAGAIAAAGEPACVAMEGTSSYGAGLTRHLASLGMPVREALSPARTQRRRPGQGKCDEADAERAARAAMSGSRLGTPKSQDGWVDGVRCMLAARSGAVKARTSAINTARSLLTTAPEGLRSRFRGMGGPRLMEELPSVRAEGALGAALGALADLWAAARDAALDMELAIEASLEENCPALLAMYGCGPVSAAKLAVAAGDNPGRLRSEASFAAICGACPIPASSGKTVRHRLNRGGDRQANSALHEIARQRVMRDPETAEYAERARGRGKSDREVMRCLKRYVAREAYRALMRPHEIRRPEDASELVAARRAAKVSQVRAASILGTSEKYISMLERGQRELKPIRRAYEAWVEAGLPLDWDRQAFEAERKMDSKKHLAK

SEQ ID NO: 271605 - protein, 314 aa, unidentified
MNTNTLQNINVGVDTGKTQLDIYIRPLDIYFHVTNDEKGIKQAVRTIAKYHPERIVIEATGRLEMPFILACEKANLPYVIANPLHIKKFSGALGNKAKNDRLDAALIAHYTEAIKPKLTQLKSENIRLMSDLVTRRNQLLSMQTMEKNRHQILPQSLASSIKPILTALKNQIAKVENRIEKLIETCPDYQAKNEILQSVPGIGKIAAASLISNVPELGYITNKQAASLIGVAPITRESGSFKGKRMIKGGRMQVRTVLYMAMMSAMQCNPVFKETYQRLLAAGKPKKVALIACVRKMVVILNSMLRDGCMWNGR

SEQ ID NO: 271606 - protein, 418 aa, unidentified
MENESNWFVGVDWSSKTHHVHVSDASGRKVGERVFTHGGEGLADMVAWLLTITGAAPAAIFVAIETPHGPVVESLMQHGFRVHAINPKQLDRFRDRFSPAGAKDDSRDAYVLGDSLRTDPHCFRALAPLDPIVVELREWSRIAADLQAERNRLGNRVRELLWRYFPQLLDVADDYAAPWFLDLWRLIPTPAKASRLRLADLERLLKRHHIRRLTAEQLLAKLRTPAIPVAPGTVAAACAHLKTLAKRLDLVNRQIAEAKQQIDRLTQSLAGEEEDAEGQSNEQRDVTILRSLPGLGRIVLATLLAEASEALHRRDYHALRCLSGVAPVTKRSGKSSTVVMRYAAQTRLRNAVYHWARVAVQHDARCRTKYAALRARGHGHGRALRSVADRLLAVACAMLESQTVFDPDRATKQLSPAA

SEQ ID NO: 271607 - protein, 408 aa, unidentified
MTTSNSTPADVVLVAIDIAKLRNEVLIEAPGHKRRRRLLVLNTRAEHDHLIEVLQAYGRPVVCAFEATGNYHRPIGWRLAEAGFEVRLVSSLALARTREALHNSWDKNDPKDAQVILHMLRIQATQLYHDPLRAGINDVQELSKTHEAIARAKTEIQHRILTHYLPLYFPEIDRFRGNSRSDWFFAFLDAFPTPASITMLTKEEFVKAAWDVVGRKVSKTQILMDIYETARTSIGLPLPLDAPAIRMFRMVVAEARSLIRQRNEIETQADELLRHSQDYQLLRQIPGIGPINALTIIAEAGDLRRFHHHRQFLKFCGLDLSTQQSGQYRGQTRLSKFGNARLRRTLWIAGQVAIRQRENGFRHKFERYHRKRSRQSRPAPQGDDRYYRQDGARRTRRRQRRFRLPALR

SEQ ID NO: 271608 - protein, 342 aa, unidentified
MQITTIGLDIAKNVFQVHGIDADEKVVVRRQLRRSQVIAFFKALPRCLIGMEACATAHYWARELTKLGHEVRLMPAKDVKAYVKRNKNDAADAEAICEAVRRPTMRFVRIKSAEQQGQLMQHRTRDVLIRQRTQIINALRAHLAELGIVAAQGDAGVNELRAIVADERDTRLPIDARASVIVLAAQLEALQTLIGSIEKRIKMQHRSNEASQRVETIPGIGVIGATAIVATVADPTIFRSGRDFAAWIGLVPRQDSTGGKQKLGPISKQGDRYLRRILVVGAIAVLRRALENPGKYPWLTQLLARRPFKVVAVALANKMARTAWALLAHGGTYRAPELAEAA

SEQ ID NO: 271609 - protein, 405 aa, unidentified
MNAVGIDVSKGKSTVTIRQPGDVVVLAPRDYRHTQSSINDLITTIKCLEGETKVCMEHTGRYYEPVASWLSAAGIFVSAVNPWLIKDFGNESIRTPKTDKADAKKIARFALDRWAKLPQYSRMDELRNQLKTMNRQFGFYMDHKTAMKNNLIALLDQTFPGANSFFDSPARSDGSQKWVDFVYTYWHVDCVRSKSLEAFTEHYKNWCKRKGYNFSAAKAEEVYLMASDLISVFPKDDYTKLLIRQAVAMLNIASETVETLRIKMDQMASQLPEYPVVMEMDGVGATLGPQLIAEIGDVTRFKHRGALTAFAGVDPRANESGDYKRVSNPTSKKGSPHLRKTLFQIMDGLIQRSPADNPVYAFMDKKRAQGKPYYVYMTAGANKFLRIYYGKVNAYLSPTEGAEDS

SEQ ID NO: 271610 - protein, 327 aa, unidentified
MAQKMDVVGIDVSKATLDAYALTSQQARQFANDPAGHQGLVAWLQELGVGVAVFEASGGYERAAARSLRRAGLVAHVVDPKRVRHYAQAAGQLAKTDRIDARMIAAFGAAFLRGRPSGIAGAEDPARQDLAELVGTRQVLVDHRTGLQQQADAVTSAIAKKLLLAPLKQLDRQIETCDRQIAAAIARHEPFAALARRLDTVPGLGPVSIAALIAWLPELGQLDRRQLAALVGVAPFADDSGKRTGQRHIQGGRMKLRNVLYMATVGAATRHNPVLHARYRRLLENGKKPKVALIACLRTLLTILNAMVAHQQDWNPTKLPATEPVAA

SEQ ID NO: 271611 - protein, 357 aa, unidentified
MNTTQKISFADAHFFIGVDMHRKNWKVTIRTGGIELKTFSMNPSPLELIAYLHKHYPDGIYHIVYEAGFCGFWALRIFQHHKVDCIIANPADVPTTNKEKTNKSDPIDSRKLSRELENKSLRGIYIPSPEQEELRMLMRLRFRIVQSQTRVKNRIKGLLYSQGIDIPLRFSGNARWSRAFIRWLESLPMNTSAGHFTLQNLILQLIQLRQHNTIVLRQLRTEAKDQHIAPILNVLLSVSGVAFITAMTLYTEIIDMKRFPDENHLAAFIGLVPSLQSSDDTIYANNLTHRQNSFLRAMIIESAWTAVRDDPAMTLKFKELSKRMNQQEAIIRIARKLVRRIRHVWLTQEHYVYALVA

SEQ ID NO: 271612 - protein, 426 aa, unidentified
MKFNTQNKKIAAITEKTLVVGIDIGSEVHFARAFDWRGYEYSSKPFQFTNSEEGFEAFRVWIEDMKAKGGKETVMPGMEPTGHYWFNLGRYLQDRGMKPLHVNPHHVKKSKEMDDNSQAKNDRKDPKVIAGLVNAGRYMYPYIPNGVYAEIRTLNSLRVFAQEEAIRLKNRIARWFSIYFPNYKDVYGNVNAISGLMVLKKAPLPEDIVKLGVEGVNHIWRESKVRSVGLKKAKELVTAASHSVGVQNSQDAARIELQFLLSDYEMQVKREAELMAMIEAKIKKIPYVENLLAIKGIGMKTAIGFVAEVGDIRRFKDPKEIQKLAGYAIVNDESCKHVGESHISYRGRKRLRYVLYEAAVSVLAHSPEFRLIHHYYTTREHNPLKKMQSLVAIACKLIRVFYRILTSGITYDPGKMMGDIQRPQAA

SEQ ID NO: 271613 - protein, 280 aa, unidentified
MTIGVDPHKASHTAAALDEHGQLLGQQRVPATLDGYQQLRWWAERWPQRCWAVEGAHGIGRALAQRLVGDGEPVVDVPAKLAARVRVLSVGHGRKSDPDDAVSVAVAARHAPLLRQVGVEDQATVLHLLTKRREDLVAMRTQTINRLHRLLLVDLVPGGARRNLTAKRAAAFLAGVTPAGAPAVTCWQLATELAADVRQLEQRIAAVEARIKTAVAQANTSLLQLFGVGPVLAATFLGELGDIRRFPSKHHFAAHTGTAPLEASSGQVVRHRLSRAGTAS

SEQ ID NO: 271614 - protein, 401 aa, unidentified
MNAVGIDVSKGKSMIAVMRPFGEVVASPFEVAHTDSELSKLAKMLKSLTGETKIVMECTGSYHLPIAYTLHDAGLFVSVINPQLTHNYDNNSIRKSRNDKTDSVKIANYTLTNWLKLSKYIPPEDIRHMLKTYSRQYSKYGKIKTMLKNNLISLFDQTFPGVNELFTSPPRKRDGHEKWLDFAATFWHCECVCSLSPKVFGERYRKWCKRSGYYFSQEKSDDIYASACGHVSVIPMNDITKLLITQAITQVNAVVETIAVIAAEMKRLASLLPEYSIVMDFYGAGEILAPQLMAEIGDVYKYPKKSSLVRFAGLEPVENQSGKFKGNESISKQGSPHLRKTLFQVMDCILKREPIDNPVFQFLDRKRAEGKHYYSYMCAGSAKFLRIYYARVIEFLDRYYD

SEQ ID NO: 271615 - protein, 344 aa, unidentified
MKIAVLGIDLGKNVCSVVGLDASGAVVLRRRVRRDTLIDLVAKLPACIVGMEACCGAHHLGRLFATQGHDIRLMSPEYVRPYVKAQKNDDRDAEGIAEAATRPTMRFVEVKTEAQLDMQTLHRSRERLVGERTALINQLRAVLLERGIVVPQGKRKFEQYLVAMMDEHDGEGLSARMRMLVADTRAQWRELDRRIAAFDAEFARWAKENEDARRLATIPGVGVTISTALIAAIGKAETFEHARDLAAWLGLVPRQATTGGKPRLMGISKRGNKYLRTLLIHGARAALPHLAEKGTTLGRWAKNLLSRVHQNVAVVALANKLARICWAVLRSGEKFAAKEATLTV

SEQ ID NO: 271616 - protein, 334 aa, unidentified
MIIIGVDFHPEYQEIASVETDTGEYQEKRLAHPQEAEEFYRCLSCVGQVVRVGMEASGHGRWCERLLEGLGVELWRGDAEVIRAKRGRKQKTDREDARHILKLLLKDDFPRIWVPNWENRDLRQLLWHRHRMVQARTRVMNQLQAVALNEGLRCKKRLFRADGRQQLESFQLAPWASRRRGELLELLDRLNPTIAELSQAVERAAEKCPEARRLMTHPGVGALTALAFVLIIGETKRFQCGKQIAAYLGLVPLEKSSGNRRRLGHITKQGNSLLRFLLVEAGQVTVRSLPEWRSKYVHLTNPALKIRGQPEASSGCPLIFSHRPNTNLCQTRPT

SEQ ID NO: 271617 - protein, 418 aa, unidentified
MKSPPNASPEIRYLAIDLHKHYTVIGGINIQQKVILSPRRVEIDELEVWARKNLRPSDEVVLEATTNAWTAYDLIVPLVRHCVAVNPLHVRWIAEARVKTDAADVLRLAKLLAANLIPEVWVPPLHVRELRSLMTYRRRVIKMQTMTKNRLHSILHSCYLTPPTGQVFAEKNRDWWLALELSPTLRLRIRHDLATLEHLQGQLTDLESEIQRLSITSPWQEQAPCLIQLPGFGLLTAMTVLAAIGDITRFPSAKELVGYAGLGAGVHDSGETHRDKGITKQGRRDLRKVLVEAAWVAVNSHPYWKAQFERLERRKPKNQAIVAIARKLLVAVWHVLTERTTDKNAVPEMVAFKLMVWSWKLSDQERGGLTSRQFIRYHLMRLKLGEDLPYLITGKDTKRAIASPGEVLALRPELASAD

SEQ ID NO: 271618 - protein, 452 aa, unidentified
MLLEPAIAVSFRRYRAAREERVRENELTEAAPTASPEGEPVRIVYPRCAGIDIHKQSMTVCTIVDSQNGSAPEYHKRKFATHTEGIGELAAWLREFQVTDVGMESTGVYWKPVWNALEGEWKLHLCNPHHTRAIPGAKTDFRDGTRVAELLAYGKLPESFIPPQWQRELRDLTRLRARYTQEVTRIENRIEKVLEDAQIKLGTVTSKLLGVSGRAMLEALARGETDVDKLAGLAQRKLKRKKPALRQALQGKVTEHHRFQLGMLLDDLKHTEEKITQLELRIWEYVEPHRELVERLDQIPGVDWLSAAVILAEIGPDVSHWEDARKLASWSCLCPGNCLSAGKRLSGRTRKGNPWLRRAFCQMGWAASHKKNSYTKAQFRRLAGRRGKQRAVLAVAHTLLTVVYHLIANPDLQYRDLGEDYFDRRNAEQTKKQLVKRLAKLGYEVTLTPKAA

SEQ ID NO: 271619 - protein, 391 aa, unidentified
MDKNNILNVAQLMLNRLNTFEYPIVISCDAHSKSTYIFAVDIRTGEIKMDRNFIGGTRQIAKTIMNIRPRKEVIVLYEAGSLGFSLYRKLVEHGYTCKIIAPNSIPHRNGKKSDRQDAMGNFNYYCSGLLRFISIPEPIIESARECLRYRFDLVQERTALKQKVQAMLKRCDAVFTGTKKAWTKRHHAWLKAVELPNEVRVVLDMQLVRIANHDTNIKKLDEQLIAVISANPQLARLYNAYIAMTGIGPLGAMTWVFEGHDLQRFAHPHNLMSYLGLVPRKNSSAGKDPALSITKAGNVYLRYVTVVAARGYTDRRLMQRKADIKKHPQPLTDLIHRCQDRLYHRYQLLRKNKKNGNKAKVAVARELCAFIWELAVKILPQMDERLLCEAA

SEQ ID NO: 271620 - protein, 365 aa, unidentified
MQKISTMRTSRKNLFQGQLTIGVDLGDRSSAYCVLNEAGEIVLEHKVATTPEAMKQVFGSMPRCRIAMETGTHSPWVSRLLTALGHEVIVAHAQKVRLITKSRRKDDRMDARTLARLMRIDPALLSPVKHRSAQAQLHLTEIRARAVLVSARTALVNAARGLVKSYGERLPKCGTEQFRRETTSGLSAGLREALEPLLQEVESLNERIQEYDRRVEKMAKQTYPETALLKQIKGVGNLIATTYVLTIEDPHRFRKSRDAGCFVGLQPGRRNSGESEPQMRISKEGDEYLRTLLVQGAHYILGPFGEDSDLRRWGRKLSARGGKTAKKRAVVAVARKLAVLLHRLWVSGEAYEPLRNSQKTMNAAA

SEQ ID NO: 271621 - protein, 343 aa, unidentified
MTYFTGIDVSLRSVSICIVDETGAVRLEAKVAAEVEVIVAALRRFSEEIRQVGFEAGTLTQYLTYGLREAGFDVICLEARQVAATLAAMRNKTDRNDARGLAQILRTGWYRTVHVKSVESHQERALLASRKAILTKCVDLENEMRGLLKVFGVRLPGHLPHGSFDTTVRERLSTLPQLARTLLPLLDACTMLYATYLKLDNAVKTIVRHDRLCQRFMTVPGVGPVTALTFKSAVDDPTRFRSSRLVAAHFGLTPRRYQSGETDNPGRISKAGDRDVRQALYTAAHAMVTRSYAWSTLKAWGVRLAKTRGLRRAVTAVARKLAVILHRMWVQGTTFRLTREATA

SEQ ID NO: 271622 - protein, 464 aa, unidentified
MAVLNIGVDLGVTTKHHAEVKNGEGIEVCSSVTFAGTKEGFDMLSKHVLKHVDKEAKSRFICEPTSMSWFPLAVYAKRNGHEMMRVKAQKSHDLRKYYSRHSKSDKLDAKALAMMPIVDRESIEEVYLPDEVTNALDRRCRQREKISKEIASIKTRIKSLYHWVMPGLTDCFEDPYGERAKAFYKKYTNPFNVKQLGVSRLRRVLEKAGRQQSSEGLAERVYEAAIRGCELYDHCGEYIDFDELQKEVECELQLLESHEKVQKKVDEAINRLYKRAHPTKNLETIPGIGETLGPVFVGIIGNSDRFSSQSKARGYSGMIPKQKDSGESSKKGLNITKDGPSRYRRALYLASDTGRQWDPQLAKVYYDQMVYKGNCHTQAVCAVSTHLIGRIVRVLKDKRPYELQDLNGKPITKKEAKLLIMREFTVPEEVRKRTRSRRTKKGYKRDQNRGIAKMQSSRSAQYPS

SEQ ID NO: 271623 - protein, 340 aa, unidentified
MSKRTLISIDLAKSTFQVEVEDLHRHKVLSSKKLTLRGLKRFLARQNPGIVAMEACGTAHYWSWYAEAYGHETILLPPQHVKPYRQGHKTDETDTCAIREAAKRPDRKEAVKKTPELVELQGLLRVRDHYVNLKRQLSNMIRMHLMEFGIRIPKSYAALEREIRPILEDAENGLATLTRDLINRLYQSFVEAARALKELDAQLKAVANAYEPCRRLRKLEGVGPVCAVLLYVRIGDGSAFKDGREASALVGVTPQQYSTAGVANLGHIRKKGVDKHGRALLLQGAKSVIHARRAPETKKDFWLRDLMARRGENVAAVALVNKTVRTAWAMLSRGEDYVAA

SEQ ID NO: 271624 - protein, 420 aa, unidentified
MAYRIAGIDVHKKMLAVVVADVEVQGEYQFERIRYGSNPEPLRLLAAWLIEHEVEEVVMESTAQYWKPVWGALERYWKPSCQKREGAGPMSGTLHLAQARSNRGRRGRKKDFPDAERLVKRLVADELVLSFVPDAEQRLWRTVTRRKYQLTRNKVRLQNQLEALLEEAHIKLSSLVSDLLGVSARRMLKAIADGGTDPAALADKKLRATPAQLCDALGACAELQPIYRRLLKMFLEELQLIEQQIGQLDQEMAALLSQHPDCVQRLSEIPGLGVDSAQQIIAEVGATAATFPSGKHLSSWVGACPGDEESAEVSRSHRSPKGNRHMQRILNQCANAAVKSKGTIFEIVYRRLVSRLGHNQTIGAIAHRLCHLIWIILHRGVRYEERGPSVNTKSRRQRTSRMIRELRNLGYRVEPLGTPA

SEQ ID NO: 271625 - protein, 435 aa, unidentified
MSSRAYRATRVNDVNWEQIARGKEGLGVTLGVDVGKFDVLVVCRWADGRFERPWRIKNPREIATLVALVRQVKADRKLVVAMESSGTYGDALRQALGDGGIEVRRVQGKAAHDYAEVFDGVPSQHDGKDAAVVAELAALGKAKPWAYQAADPWEEELTYWVEEMVAQRQMVTLWQGRLEGLLARHWPEASQVLKLSSGTLLRILKRYGSPRALALDAGAAEQVARWGRSLLSPEKIEELLAGARSSVGVRMGQWQQRRIQEYAEKALNARQQSDRAQRRLSQLAVGHPVLQAQGKVVGVSTACVLWVSTGDPRKFDSAAAYRKAMGLNLVERSSGTYQGTLRISKRGSARARQWLYFAAMRLVQKCGVRPWYEAKKARDEGDARRVLVAVMRKLAVALYHVGVRGEEFQPRRLFGRIGRRGGKSAECSVASKGPA

SEQ ID NO: 271626 - protein, 359 aa, unidentified
MKEHIDYLSTLFVGIDIASRIHVISALDFNQDFYIKMKPFENTKDGAGIVEKLIADVLADNHQFKYVVIGMESTGFYGVHLANYLSTSELLAPFSVRVYCLNPKEVKNYKKSFNDIGKNDGIDSFVIADFARVGRIAIKPWRGSQYLALQRLTRHRMHITECITREKTYMLNNIYLKFSQYALLRNGEHPFSNKYGATAEAILTEFTTNEDIVNSSIEELVEFINSKSKGRIADPEETAKIVQAAARNSYRLDKCLYEPLTISIASSFNCISSFEKELKAIDKAILQTVQGLNPEEYTVLNSIPGIGKVYSAGILAEIGSIKAFQNANQLAKYCGIVWNDNDSGDFESEDSRMSKARGV

SEQ ID NO: 271627 - protein, 312 aa, unidentified
MDAIYVGIDVSKDRLDVAVRPSGESFTVGRTGAGIDDLIERLKPLSIKLVAIEATGGFETVVAAGLAGAGLPVVVVNPAQVRAFAQALGKRAKTDPIDAAVIAHFAEATKPRLRQLPDATTQLLADLVARRRQIVEMIAAESQRARHVTLPRLKKSIARLRKALEKELSELDDDISDHVRGSPAWAEKEDLLASVPGIGPTIARTLIAELPELGSLDRRQIAALAGLAPWTRQSGKWRGKSFIGGGRASVRRALFMGAMVAARHNPTLKLFRDKLVAAGKNKLAAIVAVARKLLTILNAILRDKTPWQLKIA

SEQ ID NO: 271628 - protein, 410 aa, unidentified
MNEGRCAGVDWAKDTHDVVVQDADGEQVWAGTVTHTESGIDGLCRTLIRLGVARVSLERPDGLLVERLLDAGLRVIPMHPNQVAAARPRFRASGGKSDRFDATVLCELARTDSHRFRVLSPDSDQTKALRAMTRGRQDLVEQRVALCNQLRAELERFWPAATLLFNELDSPISLAFLKRYPSPVDARGLGEKRLAQFLARHHYCGRKTAGELLAKIKDAPAGRAGELETEARRGLVLALAATLEVIVEQIRLITSEIAGAIRAHPDGHVFLSFFKSPDSVICAATLLAEIGDDRNRYPTAEHLAADAGMSPVAVESGRKKVACFRRGCDHRLRHATCTLADATRHWHPWAQDKYAAARARGQDHSRAIRTVGRGWTRVLWKCWQDSVPYDPTLHHGHQNHLKIVTPDLEG

SEQ ID NO: 271629 - protein, 354 aa, unidentified
MKNKRDYTGKKIFVGIDVHKKTYSVSVVCDNELIKRDTMPAHPKRLVAYLHKYFDRAVIKSAYEAGFSGFGLHRYLIDNDIGNIVVHAASIEIGARDRVKTDKRDSAKIAIQLGANRLRGIFVPSPEVEDRRELTRLRSTLVKDRNRIATRLKHKANYHGLIGPEDSQKVCDQWITRLLTIKMGPGLRYVIEEFVAQWKAFNMKIKRLNELLKEQSVEDEKHEKIYRSVKGVGPTTARVLANELGDMSQFSSERALFSYTGLTPCEYSSGEHVRKGHISRQGKPILRSLLVQCSWVAIRYDPGLREIFERIALRAGSKRAIVAVARRLIGRIRACFRKGVLYEIKPEIEKMNAA

SEQ ID NO: 271630 - protein, 473 aa, unidentified
MVRFLQDEEVREKRMRKAIGIDPDSKGYICCLVEAGENQTVRKGYVTTVKDLESLLRLVKSEGEVIVAVEGSNGVSRPVEQAFLKEQIVFYSLAPNDVSKFRKVVLGRNKNNEKDAETVARYALALQSQGKLEKFRRVWFPDDSLRLLTRGYERRSKELTAEINRMWKMLRLASPDLYLALAGTNPEVDITGKVLQQQGIVKLLEQKPDLYEWRNLSMEEFKNAMGGKTYRGREKLISELQKLSASFRPTSPAVSLMIKNAAQTILQMRQHLNEIKKMMGELTAENRAVKTLEQIRGISVITSSTLMAEIIDIRRFANEDHLASYAGLGRSEYSSGDRNKMIPNPQFNHRLKDGFITAAKNFVQNNPDSHLTGYFRNLVKKRKMKPNEAYKRVARALVRVIFRRLKSVVEDSSEEQKRSESDMASGSVVRSDQGHESNISLSAPTENDKEPEGKIKRQRRSRERPKMAAVEKM

SEQ ID NO: 271631 - protein, 402 aa, unidentified
MHYLGIDVSKASHQCIVLDTSGEALGKSFTVQSSKDDFIKLAKKLSELNIPKADLTIGLEATGNLWENLYSFLKEQGFNVILLNPYQTNKFHEAMLKKAKTDSIDALVIAGLLRSGCASSSYIPDEDIQSLRDLVRLKDGYLKDVKNYKRKAYSLLNLVFPEFLNLVKDPFNIVSTDILLRYQTASDFKNLKPKDLIKIFRHRQGNNYDDSWADKVISSAKDSIYSGKAHKARGLVLKSLVQNIKYLKEQIELLDNEIQLLLKPDDKSQNSDVDNLLTIPGVGPKTIAVFLAEVGNIQRFLSCKDFIGFVGFYPKIEQSGSSLNRAKLTNKGSSILKHALYMASVASLIHNPYLKSVYHDKVSQGKCPKQALIVVARKLACIMYSMLKNNSVYNPERVAIAI

SEQ ID NO: 271632 - protein, 387 aa, unidentified
MPQPNDLSRSLAALDQDSTLVAVIEISQSSGLVGGIVPGVNRQPLKKLAADETALLQLLSRWRDEATKAGRTISRIAVAYEAGRDGFWLARWLRGRGIEAHVIHPTSVAVSREHRRAKTDRLDTELLKRAFLGWLRGEQRHCSMAMIPTLEEEDAKRPNRERENLVSERTRLVNRMKSALARLGIRGFKPHLRKAPERLDTLRTAEGMALPPNTLAELRRDMARLRFVMDQIREIEAARLARLEQHPEQANHAMVRLLARVVGVGIETADMLVHEILSRHLRDRKAVARYAGLTGSPDESGARRREKGLSRAGNARVRRGMIQLAWRFLMFQKDSALAQWYRRQTTDGRGATRKTMIVALARKLLVALWQLVTTGEVPEGVVLRRAA

SEQ ID NO: 271633 - protein, 355 aa, unidentified
MNSKKYVGMDVHQATISVAVRDSSGKLIMESIIETKAATILGFIRGLNGSLSVTFEEGTGASWLYDLLKPHVSELIVCDPRKNALLKGGNKNDKVDARKLSELLRAGLLSPVYHGERGVRTLKELARSYLTLTKDLTRVMNRIKGLYRSWGIRCAGRDVYTASHRDDWLAKLSEAGVRRRADRLYQQLDHLRPLRQQARKELVAESHNHPARKLLCEVPCLGPIRVALVIALMQTPHRFRTKRQLWMYSGLALKTHVSGEYRFAGGELQRSKKRATPRGLNENHNHDLKNVFKGAATRASISAGPFQDFYAGLLAKSMKPSMARLTLARKLAAITLAVWKKGARFDATQLKSQAA

SEQ ID NO: 271634 - protein, 460 aa, unidentified
MEVPREVPDEEHERVWERVAAVDVAKGSGVVCTRVPDEDRPGRRRSHVWTVPARTGAITELGDHLRGLQAQVVTLESTSDYWRIWYVILEAAGLKVQLVNARTVKNVPGRAKTGKNDAVWLAKLTERGMLRPSFVPPPEIRRLREFTRLRADLVHDRTRHWARLEKLLERALIKISDVTSTLDLKSVRAMIEALIAGQRGPRILADLARGPLRKKRAALAEALDGRFEDHHGEIARILLDQIDSLTAQIEALTGRIGELAAEIPAAWGVDADGTAGPGAGHAPDAAVLPAVARLDEITGCGPYAAQAVIAEIGLDMTVFGAPGRLVSWAKLCPQTRQSGKKTSHGKAGKGNPWLGGILGEIAATAARTDTFLGQRYRRIARRRGKRKAQVAIARSILIIIYHLLADPAARYRDLGPDHYDLRVNRDRKIRSLIHQLQAINADPAEITALLTTHPPAARPA

SEQ ID NO: 271635 - protein, 413 aa, unidentified
MQAIYKSCCGLDVHKRSIAACVRRLLENGSVHQETRTFGTMTRDLLELSDWLAAEVVNHVALESTGSYWKPVYNILEGRFKLVLVNARHFKHVPGRKTDVQDCQWLAQLLQAGLLQGSFIPERPQREFRDLTRHRSQLVAEKNRAANRIQKILEDANIKLASVASDILGASGRDMLRALIRGETDSTKVADLARRQLRTKIPQLRPALDGKVTEHHRFMLCELLDHLEYLENRIEEFSRRIEEVSRPFAPAITKVATLPGFDQRSAQNVVAEIGPDMEVFPSAQHLASWAGVCPGNHESAGKRKSGKTTKGNRWLRSAMSQSAWSAARKKDCYFQAQYRRLAGRRGKKRAIVAVAHSLLTIIYHMLKNASDYRELGCDYLDKLNAHRLLPHLLKRIKDMGYQVTLQEIAQEAA

SEQ ID NO: 271636 - protein, 343 aa, unidentified
MQTVTTIGFDIAKSVFQVHGVDAAGQVVVRRQLKRRQVIALFQKLRPCLVGIEACASSHYWSRELQALGHSVRLMPPAYVRPYVKRQKTDMADAEAICEAVTRANMRFVPTKTPEQQSGLMLHRTRHLFMRQQTSVINAIRAHLAEFGIVAPVGRRGVEELLRVVADANDKRVPEVVRTCLAALGSQLLSLKQQILDFDRMIMAWHRSNQTSKRLNCIPGVGPLLATALVASVADPKTFRSGRNFSAWIGLVPKQRSSGGREKLGSISKQGDRYLRSLFVTGALAVIRYAKIHGAKHRPWLTALLARRPTKVAAIALANKLARMAWAMMATGARYNYPASLRV

SEQ ID NO: 271637 - protein, 473 aa, unidentified
MGKGSGISRSDRRRNARRGRLRDLVPRDGAVLGIDLGDQKQALALVDHDMRVLWRRSPRCAAHQLGGPIADAVIAAAAAGFSRVTVACEPTGPRWMQVQRLCREAGVALVCVQPLVSHIAREQEDYTGHKRDEPDAVLIARLAAELHCYIPEELDETWACLRQLGRRRAQLITTATAAVQRIRDCLSVAWPSAVTAACDPFASMTWLAALEVVTSRCGSDPARLAAGLGEEEFCALVRGASPGWGTTRPDRRIARKVLALAGDPDAVPVMRRALLRRVRDELGDLQRARRQLKETEADMGALLAGLGLSRLGDVPGLTVTGAAAILGEAGDPRRYETSSSMVKHAGLSPSDNASGAFEGLSRISRRGRPSLRLAAWRAVFPMLIHNPVMKAKYEALVAGAEESARAAAGSARPGSARAGQAARTARSARAKARVACAASLLRWIYHMTVHGADWDPVAASGGHLTPQEAQKAA

SEQ ID NO: 271638 - protein, 401 aa, unidentified
MKRLSGGIDIGSEHHHIIIMNDEEKILYDQKIAHKFSDFYQAIKESKEIEKREEGIISFAVEGKNGYGAPFDRILIEEGFTLYNVDNLKLKRFRNVFGAEWKNDQRDAKMLAKMLKLKDHLDSENEKVFIAIEKTPEVNEKLRILSRHQQTLIDEKIRIQNRLQKRLLEVCPEILNFGDTDSKKLLRLLIKYPDFSRYKRLTLKALLKIKTIGKKRASSMLESLRNIQYVEELADIYKTIILSYSRRILELKEEIEMLDKKLDEIGKKSPEVKRLQTIPGAGTKLASRLVGEIGDINRFKKESQLAVYCGVACIDDESGKKKKSKAVFKANKICKATMIGIAGCTIRYVQESKNYYAKKRAEGKEHNHALRCLARQLIKVIFKMLTEDRDYIVKEELKKAA

SEQ ID NO: 271639 - protein, 373 aa, unidentified
MPRYSTAFGMDVHLRSTTVCALDAETGETVTRRFRGNPWGEVAEWMSGFPGPSLAAYESGYLGFAPQRELSGLGVDCVVAAVSKVPRSAADFSSKNDRNDAARMAKAILSHDISPVWVPSPEIEGLRDLAGAHDAATARLAAAKQRLLAFLARRGYAYGGTTPAGNPRRYWTYDFLRWLDKVRPADDGGIRALAALRNEVEAAAETRDDLLAEYRAAVAAGPLSAEVEALQSIKGCGFALAAAFASEVGDFSRFRSGRQVTSYFGLAPKQRSSADSVRLGGISGAGNALVRRLAVEGSWSYVQASHQPKLMPKGSGVPLEVRMHGRKGSERLLRRREEMLARGMPQAKANAATAAELVRWLWALGAMCREATE

SEQ ID NO: 271640 - protein, 343 aa, unidentified
MKNTKYYIGLDVHKERTTYVVRNKIGNILLEGETATIYTQLQEQIKPYLNNSLIGLEASTSYYTLYQQFLKNNYNIKVANTIQLRQLITKNDKLDAKRLSEMLRLGTFPCSYIPNDKIQRMRSLVQVRHSLMEEKVRCNARIQAFLDKNSVIMPSYKAFSKKWRQALMQYMGSGDVSLELRYEYDHFVFLEKKMEQLDQELQGYAHKNWTKEYQNIQSITGIGPVIACYVIAHILPIERFASHRKLRRYVGVVPTCKESGNKTSRGRIPKTSSRKLLRWALIQAANTIGKTNTNLGRYYRMKKKQKKNAGIAKVAVASSLVDILYKVLTTKTPYKPTVLPKQI

SEQ ID NO: 271641 - protein, 458 aa, unidentified
MKRVSNDVEEIDSDETERVLTVAAAVDVAKASGMVCVRRPHPSVEGRRMSRVWEVESATNSILALGDDLVTMGVERVVLESTSDYWRPFFYLLEAAGLSVWLVNARDVKQVTGRPKTDKLDAVWLAKLNERGMLRPSFVPPREIRALRDYTRLRTELVEERSRNKQRLEKLLEDALIKLSSVATDLLGVSARAMIEALIAGERDPEALADLARGKLTAKRAALLEALNGRFDDHHADLARLLLDQIDACSDKIDRLTARIEQLVAELPDPQPPTDGEPRRSATSDVPIAHDPQAHRLTTVERLDEIPGIAERAAQIIIAEIGLDMGRFPTPAHLVSWARLSPQTIQSGPKVKAGKTGKGNRYLKGVLGEVATAAAKTDTFLGERYRRLVRRRGKQRALVAVARSILVIVWHLLNDPDARYIDLGSDYYTSRLDPDRKTRDLIRQLQALGHQVTLRPAA

SEQ ID NO: 271642 - protein, 385 aa, unidentified
MQTVIVRQCIGIDISKATFTACFCRSYSNGKVEVSDVLKFDNCKTGFNQLLKWARKNKGIIHQTVFVMEATGIYYEPLAYHLANLRLQVSVVLPNKVKHYGHSLNIKSKTDIIDARIIAQMGAERSLELWQPPSPVLKRLRDLTRLYTDLKAQRTVFENRLQAIEAGSEPLAFIIQSTQSVIKKLNTEIQKCEAQIGTLIKSEKWLSEKMNKILTIKGVGLITAAIVVAETQGFRLINNVKQLASYAGYDVVERESGTSIKGRTKISKKGNSRIRAAMHFPALVASRYNEDLKNAYQRINQSRPSKMVGATALQRKLLILIYTLWKNDTVYEQRTKQKTSGDQETKPLLRLNDEVVVKTAGRPKSLPAQDELPSNLSTEALLRLT

SEQ ID NO: 271643 - protein, 374 aa, unidentified
MKKELYLGLDVHKDCIITAVAQEGREGEVRDTGVISNDLHALEKWVGRLRKAHGSDVVLRACYEAGPCGFGIARRLKQLGVECEVVAPSLTPKRAGERVKTDRRDARKLARLLRAGELSPVYIPESTDEAIRDLCRARTDAVDDRCRSRHRLKGFLLRHGYHYQGKSSWSAAHERYLRELVLPHPAMKVILEEYLQGIAAAGERIARCEEAMRSLLEKWHLRPAVEALMAMKGFRTVAAMILVSELGEVHRFSHPRQVMAYLGLVPTENTSSDRRRQGHITKCGNAHARWLLVECAQHYATLPKVSKELSRRQEGQPREVRALSWKAQNRLHGRFARLSARRLQRNKALVAIARELCGFIWELLRMQRCYQTPH

SEQ ID NO: 271644 - protein, 387 aa, unidentified
MERLVYVGLDVHADTIAVAAADDGRNGEIRFHGVIEHTADAVLRLTKRLSGAGVCPVFCYEAGPCGYGLHRLLTKLGFDCAVVSPSMIPRRVGDRVKTDRRDAEMLARLWRAGELTPIWTPDEEQEAMRDLIRTRKQALEALKIAKQQLLSFLLRHGLRFNRPTYWTKIHWRWLNELRKFRYPHQQLAFEELKRAIHQIEERIQTLDLAIEDAVKSWRFADVVDALRALRGVNTTIAATLAAEIGDIGRFTNPRQLMAWLGLVPSEHSSGNTIRRGRITKTGNALARTMMVEASWSYRHPPRERHLHLKRSHHLPQEIRDIGWKAQTRLCKRYRDLSKTGKPQPRVLTAIARANSPASSGIMLERCRFPPEYIASFILPVQHAGDGG

SEQ ID NO: 271645 - protein, 411 aa, unidentified
MTVFVGIDWGGGSHAACVIDATGTIADRIEVGHDRDGLAKLVAWLARHGKPGDIRIAIERPSGLLVDTLVEAGFVVVPIHPNVVKACRPRYRAVSAKSDPGDAYILADILRTDGHRLLALKPQSDAIKALRGLVRGRDDLVATRVALANQLTALLDSFWPGAAAIFADVASPIALAFIERYPNPESAARLGPKRLAGFLAQHHYFGRRSPEALLERLHAAPRGDPGEAESDAKGELVRALARILHSLVTEIGKITGRIEHMVADLPDGKIVMSFPRASKICAAQILAELGSVRGRFQTEDQLASEAGVAPVTSQSGKSRGVGWRWACNKRLRAAITCFADNSRHQSPWAADIYKRASARGCDHPHAVRILARAWIRVLWRAWSNGETYDPTSHAGATPFLADNQNDHIAAA

SEQ ID NO: 271646 - protein, 403 aa, unidentified
MYIGIDWSEQKHQVVFLNDAAAVVASQLIPHSLEGFLTLDRIRQRLGLSTADCLVALETAHNLLVDFLWERGYTQVYVVPPNVTRSCRGRYCQSGAHTDQSDALLLANLLRTDRHRFSPWRPDSPLTRQMRALVSRYLFLTRSNVRLVNRLRALLLRYYPAAVDLFSSLDGVVTLEFLRAFPTPEAATSLKWEEFFAFARQHHYTRPGDLRKAFARLQEPRPHAAPEVVAAYQEETSLLATLLLAGVRARQETLKQLMSLFVEHPDHDIFASLPGTGEFLAPALLVKFGDDRERFPTPASVQALAGSCPVTEASGKGRRVRFRQGCDREFRYICQQWAWHSLNESVWASTYYEQALERGLSESHALRCLVNRWLVVAWRLWQDRVPYDEAYHLRQVVERRKPR

SEQ ID NO: 271647 - protein, 350 aa, unidentified
MSIIGCDFHSRYQVVAGVDTEDGEVVTRRLEHENGEAPAFYAGLAKPSLIGIEATGYTQWFEGMVADLGLELWVGDPAEIWARSVRRQVTDVRAAEHLLDLLLTKRFPRIWVPTPGERDLRQLLKHRDKLVRMQTSLKNQLHFLAMSQGVCRKRKLWSERGRAELEALSLGPWASQRRAELLELLDSLGPRLRELNQAVEVQAEQRADCRELMKVKGVGPVTSLAYVLTLGPVERFPNSRKVVSYLGLNPSEHSSGGRQRLGHISKQGNEMMRWLLVEAGQSAAQFDAELRRRYLRLKFRRGAKVAKVAIARQLAVRLFWTLRQAKTAPLPVRTPGSPARTLVEATPSIL

SEQ ID NO: 271648 - protein, 355 aa, unidentified
MISTKYIGMDVHKESISIAVMNSAGKVVMECVIETKASVILQFLNGLSGDLHVTFEEGTAAAWLYDLLKPHVARVVVCNPRRNALLKVGNKSDRIDARKLAELLRGNQLQPVYHGEHGLRALKELVRSYLTISKDLARVMTRVKALYRSWGIPCSGTQVYSRLYRATWLSKITEPGVRLRAAFYFQQLDALRTLRQEVRQELLAESKKHKVWKRLCEIPSIGPIRAAVALGILQTPHRFRTKRQLWSISGFAIETRSSADHRQVNGQLQKVKKRVSIRGLNQNHNHDLKNLFKGAAVSASTKPGPFQEFYEALLAKGMRPEMARLTLARKIATIVLIVWKRGVNFDAQYLKPQTV

SEQ ID NO: 271649 - protein, 308 aa, unidentified
MDKTYVGIDISKNTLDIAVHCGQGWSFVNSDEGIVKAVVCIRNVDPALVVLEATGGFEINITAALVDAGIPVVVANPRQVRNFAKAKGILAKTDRVDAKVIAGFAAAIIPQVRPMSDSQTRELKATMARRHQIIEMLTAEKNRLFIARDPIRERINEHLVWLEQDLNDINNNLRQIIQNIPVWREKDDLLRSVPGVGEVLSTALLAELPELGTLNRRQIAALVGVAPFNRDSGSKRGKRMVWGGRSSIRAILYMATLVATRYNPVIRSFYVRLCIAGKAKKVALTACMRKLLIILNAMVKNNTRWANE

SEQ ID NO: 271650 - protein, 402 aa, unidentified
MNCVGIDVSKGKSMIAVMRPFGEVVISPFEVQHTASELSELAKLLKSLDGETRVVMESTGNYHTPVAWLLHDAGLYVSVVNAMLVHDYGNNSLRRAKTDKKDAVKLANYGLDHWLTLPRYVPEEDTRLLLKNCYRQYQQYSKVQTMLKNNLISLLDAIFPEVNRLFNSSPRADGSEKWVDFVSTFWHCQCVSTLSLKSFSARYLKWCRKHGYYFSQEKAFEIHSKAQSCIGVMPRNETTKLLVQQAIAQLKATSAALAALKQEMQSLAASLPEYPVVMEMFGVGSTLGPQLMAEIGDVRRFHSKKALVAFAGIDAPPFQSGKMDIHSRSISKRGSAALRRTLFLVMGIYLQSAPLDEPVYQFMDKKRSEGKPYKVYMMASANKFLRIYYASVTAYLNTLAQI

SEQ ID NO: 271651 - protein, 391 aa, unidentified
MVCVGIDVAKDKHDCCILDSDGMVRADCFTIPNNMDGFKQLLQTIRNCTKKSDKIKVGLEATGHYSYNILGFLLDNDLAVYVMNPLHTNLYRKSLSLRKTKTDRVDARTIATMLLSDVDLKSYTDIAYHNEELKSLTRYRFDKVQERAKLKQSVSRLATILFPELEGLVSSIHGTSIYALLSEYPGTKQISEVHLTKLTNLLTTASKGRYGKEKAIQIREAARASIGSVMPAKSLELKHTIKLIRELTSEIDEIEVSIQKIMDELNPPILSIPGVGIQSAAMILAEIGDFSNFESPDKILAYAGCSPSTYQSGKLTNCYAHMEKRGSRYLRYALYNATKYVCHWNPVFAEYLAKKRAEGKHYNVALSHATKKLVRLIYALQKSGKAYLVAA

SEQ ID NO: 271652 - protein, 403 aa, unidentified
MEGPLISLDVSKGKSNYRFFENGTDRKGKKGVIRHDIQGFDSIRDEAEKMEERLRIKPSVIFESTGVYSDVVEKYFTDKGFDVYVISPLLSASMRKEGVRPAKNDSLDTLSIAKVFYSKDDLRKCSENDKKAERLREMSYELDMMNRRIRPMKCQFLRLLDKVWPCLDEVSDYSSRFMLDFIIAFGHPENIKTVKGVLSVIRKSEMGTAGRKDKIAQDLFDYCHTHLSAVSKDSSYVELLKRMAIELKAMAKKKSELIDRMAEEARNKDEFVRLLTIPAVAKTTALKIMARVGDISRFRNAEALVAYCGLDPRVYQSGKMTGEHRTITKKGDCILRSTLFLAVKLMVMLYPDTKVARFVAAKAKNGLSYKQAVVAGSAKLARIIYSMLTHHENYVEFNADIVA

SEQ ID NO: 271653 - protein, 317 aa, unidentified
MTKISTAVAGIDTAKDKLDIAIHGRTERWQVENASRGWRRLRVELTEAGVGRVGIEATGGYERGVVKHLRAAGFTVLVLQPIQVRAYARVHLRRAKNDALDAVLIAACSAAINDPRIAPDARLAEFADQLTFLEQIEEDIARLKTRLEHIDDRRLRRFVTADIARLKLRRAAELIRIGKGLRAHHDLARRLDLVLSVPGIGVRTALALVIRMPELGRISREEAAALAGLAPFDDDSGKYKGQRHIAGGRGRLRRSLYAAALPAAFRWNKALIDLYARLITRGKAHNAALVACARKLLIYANTVVARGTPWVTKTAAT

SEQ ID NO: 271654 - protein, 326 aa, unidentified
MQGKELSEQTTAAKSNVGIDACKSWLDTHVLPSAQTLRVPNTGEGIRKLKRWLDRFEVSLVVVEATGKWHRQVHRSLIAGGIEVAVTDPFRVRAFAKAKGILAKTDRIDARVLALFAALMSPDIRPPASQALEELAELVTARNSAVAEQTALKNQLAAACGAFLKRQLEHRCTRIAKDIEVIEREIARHIAADEGLARRYVILTSIPSFGPTVAATLIACLAELGACSRKQIALLAGVAPIADQSGKREGVRVVWGGRPAVRRALYLAALSAATHNPGMKVFYQRLIAKGKAAKQALIAVARKLIVLANTLIAEDRTWQPSPPKLA

SEQ ID NO: 271655 - protein, 315 aa, unidentified
MTKQRPAVNVGVDVGKSQLDLYLLERDRALTVPNEEQAIVTLIRALGRYRVERIVVEATGRLEQPFVRAALAAGLPVIVISPLKIRRFADAIGQLAKTDAIDARLIAQFAATVKPVARKASDANAQAIKDLVVRRRQLTALRTMEKNRRQVMPQELKSGIDRIIKTLDRELKRLEQLIDHAVERHAPSSHKRALLTSMPGIGNSVAATLIGDLPELGSLNRREIASLTGVAPFNRDSGKLRGKRRIRGGRAHSRTALYLSAMVASRFNPDIKRFYERLLSNGKHKKVALTACIRKIVTTLNAMLRDNSPWQPAMT

SEQ ID NO: 271656 - protein, 354 aa, unidentified
MKILALDLGKYKTVGCDYERESGRHRFQARYTAPAALGQLVKEVKPDRVVIEVCNIAGWVCDLLREMGIEVQVANTSDDAWRWRKVKKKNDRSDALKLAQLSAVNQLREVHIPKIEVRQWRALIAFRQQLVKRRSKVKNHIRDLLLVEGQILPRGAKCWTQIGMARLEALARPLSEVGINELWRGQLDIELRQLREVQEEIGVAEEKLNAIAAADPRVALLRTIPGVGPRLSEAIVALLDRPERFQKAREVSAYIGMVPKQFDSGESERAGRITRHGSRLVRSLLVEVAWAGLRYNPWVRETYQRISGGKKSRKKIAIVAVGRRLLVRCWAMLRDGTSWRPPAAQIADSGQRTK

SEQ ID NO: 271657 - protein, 452 aa, unidentified
MPKKRTQNQLPILQPHAAGIDVAAEEIFVAVPADRDPEPVRRYRTFTPDLHELADWLTRCGIRSVAMESTSVYWIPLHQVLEERGFEIYLVNAHYLKNVPGRKSDAADCQWIQYLHSVGLLRASFRPPAEICAVRSLWRHRENLLQMAAQHTLHMQKALDQMNLQLHHVLSSITGRSGLAILDAILAGERDSIQLAGLCNRRVKNSRETIAKALQGDYRPEHLFALKQSLDAYRYYQRQIAELDAELEIYLKKLPTSESAQAEMPKRTKRLPYQKEHNDPDFDLRRELYRIAGVDLTNVPGVSVVTAQTIISEIGTDVARFPNASAFASWLGLCPEKQVSGGKVLYTRTRKVKNRIAIALRIGASCLYHAQNYLGEFYRRMKRKLGAPKAVTATAHKLARIIYHLLRTRTPYDESVFARQDESALRQAELRLRKHAAKLGFRIVSVETTSEA

SEQ ID NO: 271658 - protein, 355 aa, unidentified
MTTPASRIDHDLDDEVVLGVDTHKDLHVAAVASPVGRTLATASFPATTAGYRQLVSWARSHGTVARAGVEGTGSYGAALARHLVVEQITVIEVNRPDRAQRRRRGKSDVIDAEAAARAVISLRATATAKAGNGPVEQIRIYKVAKDSAVKARVQATNQLKSLLVTAEPAVRQSLTGLSAKALIERCAELDSQTTGGDNAVVYTLRTLACRIQHLAAEIAELLARITSMIKTCAPALLDQYGVGPDSAAVLLVAAGDNPHRLGSEAAFAALCGVSPIEMSSGKTSRRRLNRGGNREANAALFRIILTRLRVEQRTKDYVARRTAEGRTKREIIRCLKRYAARQLFRIIHAALTPVT

SEQ ID NO: 271659 - protein, 351 aa, unidentified
MKEYIAFDSHKRYTLMEREQVKSGKTTHLRIEHAPGAIRQCLRNREPGTPVAVEATGNWYWIVDEIEQAGLEPKLVHPRKAKLMMGMINKTDKLDAHGLNRLQRNGTLPTVWIPPRELRDQREITRGRMVITCHRTRLKNRIQSTLSKYGWAGTEASDPYGKKARAQLNQAIQQLPPETSQITAALLEQLDFIQGQIEATEKRIRELVCDTPEMDWLRTLPGIGWILSAVIGLEIGVIGRFASAERYASYCGTTPRVHASGDKIRFGRLRPDVNRYLKWAYVEAAHSVCLQRGKFPLRHGSRLYERIRKRKGHPKAIGAVARHLAEATFHVLTRGQPYCDPGLKAGRSREV

SEQ ID NO: 271660 - protein, 332 aa, unidentified
MENFYFIGVDVLKKKLNFCVMFEGKVVHEEETSNHQGAIMSLLHHLEEDYGIASGQMLVCAEHTGQYTFPLACACKAVECRLWLENAAEIKYSSGVQRGKSDKVDAKRIAIYASRFQDKVRYYERPTEDIERLKQLESEHTLYVTDFAKYKGQMKDQKEYMPKSLYERKMKRLQALMDDLEEAIQSITDEMDEVIASCPVLFRQRELLMSIDGVGRVVATNMIIATEAFTRFDDPRKFNCYAGVAPFSYSSGSSQHSKARVSHRADKVMKRLLHLAAVAVTHRIGGELKKYYERKVAEGKNKMSVINALRAKIVARMFAVIKRNERYKPILS

SEQ ID NO: 271661 - protein, 329 aa, unidentified
MQKHVIIGTDVSKLTLDHGIHTAMAHSKTSNDLKGFKTWLRWALSFGGKEDLWVVMEHTGYYSYQFELFLHQQKIRYTKVAALEIKRSVGLVRGKSDKVDALLISRYGWMRRDQLQPQQISAGVMIELKDLISLRDKLVKDRSGYKARIKEQNVTRKYAKSHIQNKIQARKIKELSTDIKEIEAAIKELIKGDDALQNNYKLLVSIKGVGFVTAVYMLAYTDNFQKFINSRKFSCYAGLAPFEHSSGSSIRGRSRVSHFANKKAKSILNMAASSAIQHNKELKQYYQRRVAEGKSKMGSLNIIRNKLVDRMFAVVKRQSAYQEVLTIAA

SEQ ID NO: 271662 - protein, 343 aa, unidentified
MQTITTIGLDIAKSVFQIHGVDATGQVVVRRQLKRRQVLTFFQKVPPCLVGIEACASSHHWSRELQALGHTVRLIPPAYVKPYVKRQKNDAADAEAICEAVARANMRFVPTKTPEQQSGMVLHRTRHLCMRQQISVINAIRAHFAEFGIVAAVGRKGVEELLDIVADPSDKRVPEIARGCLAVLGTQLRRLKEQILEFDRMIRAWHRSSEMSMRLDEAPGVGQVLATALVATVADPKAFRSGRNFSAWIGLVPKQHSSGGKNRLGSISKQGDRYLRGLFVIGALAVIRYAKIHGTKHRPWLTALLARKPVKVAAIALANKIARMVWAMMARGERYKEPVALAR

SEQ ID NO: 271663 - protein, 315 aa, unidentified
MQTPLSIGVDVSKDYLIVACAQQSFAHTKLANRRAVLFAWLKQLPAGSRIGMEATGSYHELLARLAHRLGLSVYVLNPKDLRHYAKATGQRAKTDRVDAAVVARYVAKEHEHLHSWYPPSAVQRQLQRLMRRRAKLTSARSSMRATLRDVTSLRAHSRALLKHFDALIAKIDAQARELIKADQQREQAFQRLDAIPAVGHAVGIGLLTSLERWALPRADAFVAFIGLDPRPEDSGKKSGRRRLSKRGDPELRRLLYVAAMSASRTRVWAPLYQRALARGLARIEALVVLARHIARTAWSIYTHRTHFDPQRVQRA

SEQ ID NO: 271664 - protein, 403 aa, unidentified
MAPADEHERVYGGVDTHEDSIHVAVISAQGQDLEDREFPTTPAGYRRAVAFIISHGEPIAIGIEGTCSYGVGITGEAIAQGLRVVEVIRPERAERRRLGKSDPIDAYQAARAAMGAHRTAPVKDTAAIEGIRALHNARRSAMKARTAAMRQIHSQLITAPVAIREKYRGMSSDKRITVLARMQVPANRTPVERAVLLALKTLAQRCKELQREHERLGVELDQLVTDANPGLRAAYGVGPDTAAQLLLTAGGNPDRLRSSAAFAALCGTSPIPASSGKVTRHRLSRGGDRAANGALYRIALVRMASDPRTRAYVAQQRDAGFSNREILRKLKRAIAREVFRYLTTPVSVPAVDDLRPLRRAKNITLTTAANQLGVWPATISEIERGVRRDDTLTETYRNWLTAA

SEQ ID NO: 271665 - protein, 365 aa, unidentified
MGMLADQVDHVIGVDTHRDSHSAAIVAAGTGAVLLDRTVPADAFGYKRLLRFVKLHATGRRVWAIESSGSFGSGLTTFLLAHGEWVVEVERPVRPAQRNGAKSDHLDAIRAAREALARKHLAQPRRRGDREAVRVLLVTRRGAMNARTRAINHLKALIVTAREELRHQLRRHDTDELVARCARLRTLPSHSAEHRATVIALRHTARRILALEAEANDLESELEQLIKANVPWLLNEIGVGPISAAQLFCSWSHPGRLRNDGAFAMLGGAAPIPASSGQTVRYRLNRGGERQLNCALHTIVLTRLKHDPATRAYAAKRAAEGKTPREIKRCLKRYVARRLIRQLEANGPASPIPRAPRSRTLGICH

SEQ ID NO: 271666 - protein, 282 aa, unidentified
MENFYFIGVDVSKKKLDFCVMFEGKVVHEEETVNHQGAIISLLHQLEEDYGIAGCQMLVCAEHTGQYTFPLACACKAVKCKLWLENPAEIKYSSGVQRGKNDKVDAKRIAIYAKRFQDRVQYYERPTEDIERLKQLESERTLYVTDLAKYKGQMRDQKDYMPRKLYERKMKRLQALMDDLEEAIQAITDEMDEVIASCPVLSRQRKLLISIDGVGRVVATNMIITTEAFTRFDDPRKFNCYAGVAPFSYSSGSSQYSKARVSHRADKVMKRLLHFILYSPRP

SEQ ID NO: 271667 - protein, 388 aa, unidentified
MQIVTDRSLAPTAIRTDLGAIFVSLELSRSTWLVTSLSPGGGEKMSKHMIRSGDVAGLWSRFSQLKDKALDRTGQVVPIIVIQEAGLDGFWIHRLLQSERIESHVVDPASIATSRRRRRAKTDKIDGEALVRALLAYKRGEPRVCTMVRAPTPQEEDRRRICRERKTLTAERVEHVNRIKGLLFAQGISDYEPLLRKRWERLEELRTGDGRPLPEHLKAQIRRELDRLELTLQQIKAVETERNAMLSPSDDGTPAPGAMLKNLKGIGPEFAGVLWSEGLFRSFSNRRQVAAYAGLAPTPWRSGSVAHEQGVSKAGNPRLRTTMIQLAWLWVRHQPRSILTLWFHQRTQLNGGRVRKVLIVALARKLLIAFWKYVTAGVVLEGAEATSA

SEQ ID NO: 271668 - protein, 342 aa, unidentified
MAIAIVGLDLAKHVFQVHAVDETGRAVLRRQLRRAGVEAFFKTLPPCVVGMEACASAHYWARRISALGHEVRLIAPAKVKPYVQRGKKNDANDAAAIVEALMRPHMVFVPIKNEEQQAVLMLHRTRDLLVRQRTMLVNAIRAHLAEFGIVAAQGRRKVKDLITGLDNTEIPELARLALWQIADQIDECDKHIDVLERRILAWHKSDEASCNLATIPGIGPITASAIAATVPNPSAFRNGRQLAAWLGLVPRQNSSGGKDRLSGITKAGNPYIRRLLVIGATSVIRYARSKAPGTAEWLKKLLDRKSARLASVALANKMARIAWSVLTRGEVYRNTYPIPKPT

SEQ ID NO: 271669 - protein, 367 aa, unidentified
MKKISTVATQQSRKISEQKLTVGLDLGDRSSWCCVLDEAGAIVREQKLGTTPKAMKEVFGAVPRSRIALETGMHSPWVSRLLSQLGHEVIVAHARNVRLIGESRKKDDRIDAQTLARLARIDPQLLSPVKHRSAKAQADLTVIRARAGLVRARTALVNTARGLAKSYGERLRGCNVRNMNAEKAQGLSPELRTALEPLLAGIESLSERIGECNERIERLARESYPEVAQLKQVKGVGTLIALTFLLTLEDAHRFRQSRDVGCYLGLQPGRRNSGQSEPQMHISKEGDPYLRTLLVQGAHHILGPFGADSDLRRWGLKLAERGGKSGKKRAIIAVARKLAVLLHHLWVSGEVYQPLRLSKLRAMPAAA

SEQ ID NO: 271670 - protein, 443 aa, unidentified
MIFAGIDWAEDHHDVCIVDADGRVLWRRRIGHDPAGVRQLREAIAHIEPDPLQVAVGIETGRGLLVGELVQAGYVVFPINPKAAERFRDRRAVSGRKDDRLDAEVLAQAVRTDRASLRVLLPDSPQALEIATLARDHANLTRQQTRLRNQLRSALLEYFPAAVGSFELGAKSTLAFLERYAEPETAARLSVAAVARFLRSQRANRDANAKAEAIVAALRAPALRARPEIARAKARLVRTLCTQLLALHPALRAYERELADLLKTHPEGEIFLSFPGLGVVLASRVLAGTGDNPQRFATGYGPYAGTAPIVVQSGKRRVVKARVAAPKYFRDAVQQWADQARRWSPWAAAYYARHRARGHLHNESTPTSCCACCSTCAASASRTKRACTSPTSSARPHEPRDRSSIDGGYLGRSQIASIARRRSTSARAARTRGSPSSSASCSR

SEQ ID NO: 271671 - protein, 354 aa, unidentified
MMIIGCDYHPAFQQIAFVDTDTGELQERRLQHREEAEKFYRNLAAQGMKVRVGMEASGHARWFERLLAELNFELWIGDAAEIRAKRVRKQKTDRQDAQLILRLLLENRFPQVWVPNWENRDLRQLLWHRHRMMQARTRIMNQLQAVALNEGLRCKKKLWREAGREQLESFRLAPWASRRRHDLLELLDRLTPTIAELTQAIEQEAEKCPAAQRLQTHPGVGALTALAFVLIIGRADRFECGKQIASYLGLVPSEESSGQRRRLGHITKQGNSLLRFLLVEAAQVTVRSDQEWRNRYFHLVLRRGRKIAKVAMARRLAVRLYWMWRKGWNYEQLTKFGSHAGEPGNPDGVQSSTE

SEQ ID NO: 271672 - protein, 357 aa, unidentified
MKTIQEYILKEKAIFVGLEDSKKTWKLCVRYSGMVVHEVSMEAAYVGLNAYLKRHFPECKIQLMYEAGFSGFGLHDQLTQDGVKCIVTPAHTVTQEKNSKVKTDKIDAKRLAKNLENRDFKACFIPPQKQREDRQISRTLDQIQRKIISIKNQIRRALECHGIDYLFKPGAWTTKDYRLLEEKLPTLSLSAPLQFSLTLQLNLLGQLRKHKLDLVKYLRRLAKSDEYKKEVDILKSAPGIGLITAIRLLLELIDVKRFESEKKFSSFLGLTPGEHSSGEMIHKGHITGQGNRLVRSSLIEAAWIAIRKDSALLGKFNAVWSHSGSKKKAIVATARKMAIRLRAILLSGQPYQLGIVA

SEQ ID NO: 271673 - protein, 338 aa, unidentified
MRVHILGIDLAKNVFQLHGVDERGHVVLTKRVPRGRLREVVAQVPPCVIGLEACRGAHHWARQFAHLGHTVKLMSPRFVKPYVKTNKNDRQDAAGICEAVSRPSMRFVPVKTVHQQDIQASHRCRSLLMKTRTALINQIRGLLAEYGVVIAPTPGKVRAILPTLLEDEHEHLTPLAKATFRALYEHLLDLEQRIEQIDERLGQLFTEHPMCQKIAAVPGIGPLTATALVAAIPAPQLFRNGRHLAAWLGLVPRQQSSGERVVLRGISKRGNRYVRTLLIHGARAVVSRAEGKRDPQSRWMSELKQRSGTAVAAVALANKNARVVWALLAHDDVYRRAA

SEQ ID NO: 271674 - protein, 351 aa, unidentified
MTNNAKTEMVATIGIDLGKNTFQICGMNACGVVVLRHKFSRRKLGQQLANLPPCLIGMEACAGAHHIGRHLATLGHDVRLIPAQYVKPFLKGHKNDYRDAEAIAEAVQRPTMRFVPLKSVDQLDLQAMHRVRSRLVGQRTAVINQIRGFLLEHGITVRQGPAGLRQALPTILAQRSDVLAPRIVHLIEDLVEDWRRLDTRVEDVTREIVQLARQDENCKRLQGVPGVGPLTASAVVAAIGNGAAFAKGRDFSSWLGLVPKQISTGGRTILGSISRRGNRYLRTLFVQGARSVLLATKNLSKHELGRWLEAATPRLHRNVLAIALANKLARIAWSVLHSGRGYELNYKNHVA

SEQ ID NO: 271675 - protein, 337 aa, unidentified
MKNYTLLNISIGLDVSKESISVYIPINNLDYEIKNTLDGFNKLISKLKKLYKKEYDNLVFVYEPTGSYSELLKKFCSKKSIKTFALNPKRSHNFAKASGSRNKSDMDDAKVLSGAIVLAKSEEISIPVISAVAEDIKELMSYYKFIVKQRVMASNHLESITVKDGNNYVISSLEDEIKTLKKRENDIVVNIKKIIDSDEDLSAGYENIKSIVGIGELGAIVLLHLFLKYPDANKKQIISLVGLDPTRFDSGSSVHKKSKISKAGAKIYRGVLFMGAMMATRYNPEMKLFFDRLKANGKQTTQAQIAVMRKMITIAHSLYKKKQKYSSDVYQKACGML

SEQ ID NO: 271676 - protein, 348 aa, unidentified
MDRTTYGLDIAKSVMQLHWVDVDTGEIGRKKLARAKLAEHFAQLRPVLVVMEACGSAHHWARVLGDLGHEVELLPARQVRPFVGSNKDDAADARAIWLAARQADIRRVPIKDCKQQAVLALHRTRQHWVSVRTATVNALRGLLYEFGVVLRGGRQAGLKAVAEQRAAIDAQLPEAMRRLVNGQLRSLAQVNERVDELERELAALQRQMDKAVQLRMVPGIGVLGATALAATLGDGAAWRSGREFSASIGLVPAHTGTGGKARMGRISKRGDPYLRTLLIHGARAVVESSKQKPQWLEQMLARRPMNVVIVALANKMARTAWALVAHGREYQRTWQLTSVECGASAAAL

SEQ ID NO: 271677 - protein, 343 aa, unidentified
MGEVSTIGLDIAKSVFQIHGVDAGGAVVMRKRVTRAKLLEFFATLPGCLVGIEACPTAHYWSRRLQALGHTVRLLPPNYVKAYLKRSKNDANDAAAICEAVTRPSMRFVATKSEEQQCGLMLHRSRQLLVCQRTMLSNAIRGHMAELGVVSAKGRNGTAELLKIIADEHDDRIPSAARFSLDVLARQYAVVRAQIVAIEKRIHAWHRSSEESRRLEEIPGVGPIVATALVAEVGDWKEFTSGRSLAAWIGLVPRQHSTGGKERLGRISKQGNRHLRWLLVAGAMAVIRYARQHGTKRPWLTRLMDRRPIKVAAVALANKIARMAWAMMVRGERFKEPKLLPAA

SEQ ID NO: 271678 - protein, 403 aa, unidentified
MTMRRRAWVGIDVGKTSHHACAIDETGKVVWNQKVSNEQRAIEQLVTRACKGAEQVQWAIDLTSPMALMLITVLLCAEQSVVYVPGRTVNTMTHAFRGEGKTDAKDARVIAETARLRNDLSNVVLPDELVVELTQLTGYRADLMADWVRGINRLRALLGSIFPGLEAAFDYSTRTPLILVSGLCTPAEIRAAGIDGMTAFLVDNHAWPTGIVKSAATAAALANEQPLALPGEAGTAALVKRLACRLLELDREIKDIDKTITERFRDHPYARIIESLPGFGPGLGAEFLVVTRGDLASFATAGRLASYAGLVPVPKDSGRITGNLRRPKRYNRRLRRVFYLAALSSLRADGPSRRFYDRKRAERLIHTQALLALARRLIDVLWALLRDDREFTPEKPITATAAA

SEQ ID NO: 271679 - protein, 423 aa, unidentified
MSYKIAGIDVHKKMLAVVISDVEVDGEFQFERIRYGTTPEQLRLLAECLIAQKVEEVAMESTAQYWKPVWGALERYWKPICQQREGAGAMSGALHRAQAQSNRGRKGRKKDFPDAERLVKRLVADELTLSFVPDAEQRLWRTVTRRKYQLTRNHTRLQNQLEGLLEECHIKLSSLVSDLLGASARRMLKALAEGETNPAALAAMADKNLRATQAELCDALGACTDLTPIYRRLLKMFLEEIQLIDQQISQLDQELASLLSRHHDAVVRLAEVPGLGVDSAQQIIAEVGAGAATFPSAKQLSSWVGACPGDEESAEVSKSHRSPKGNRHMRRILNQAANAAARAKGTIFEIVYRRLVSRLGHNQTIGAIAHRLCRLIWIILHRGVRYEERGPSVNAKSRRHRTNRMIRELRSLGYHVEPLVTTV

SEQ ID NO: 271680 - protein, 318 aa, unidentified
MKQNSTKPWVCAGVDIGKSSLAYALAGGDGPVESPNSAEGRAQLVAFLRRHDVRRVGMEASGGYEIEVADDVRAAGLEVVVFQPMQVKAYARFKLQRAKSDPIDAVLIAQCAAACDKARDAPDPRLAAFAEHLTLIEQIEDDIARAKVRRERYRDARLKQTIEDEIKRKTALKRAELRLLVNAVRAHKDLARKLFLLGSIQGVGERTALALVVRMPELGRLSREQAASLLGVAPFIHESGRYKGQRRTGGGRARARTSLFAAALAAARQWNPALIALYDRLTKAGKPHPLAIVACVRKLIIYANTVLAQDRPWEIRPC

SEQ ID NO: 271681 - protein, 385 aa, unidentified
MNATTATRSSASVVGVDVAKSVFQLAVADRNWKVIETHRLTRSQFERWFANREVGLVVMEACGSAHHFARWLNGLGIEVLLLPARYVRAYVKRNKTDAADAAALLEAVRASDISPVRVKSIEQQALQGMHRIRSLWMGTRTSRINALRGFCREFGITISQGSRLGVEQISRVLADPDSAVPTLIRGTMKLLIDEIRLLEARVAQLERELTLLARQSPACTTLLSIPGVGLLTATAMVAATSGSVAHFKSARHFASWLGLTPRERSSGGTRHLGRISKQGDRYLRMLLTHGARSVLHAIGARQAAGKPLDALRAWAGALQGRTNHNKATCALANKLARICYATLRDSQPYAPKVSIPLEGKVSLGDGLPAPRFNHKIERTAFAAAT

SEQ ID NO: 271682 - protein, 370 aa, unidentified
MSQPSTLDVGLDVHKESITVAYSSQEPHAEVVSLGNIGTRQCDIDQLVRRLQSKSPHLIFVYEAGPCGYWLYRYLTQKGHICWVVAPSLIPKKPGDRVKTNRRDAIKLARLMRSGDLTPVYVPTVEDEAIRDLCRAREDAIRDLKAAKFRLKAFLLRHDIRYTGRATWGPAHLRWLSEVVCPTPAQQIVFQEYIRAVTEHTERLARLEQELTAQVQTWRLSPVVDALQALRGVQFTVAVTTVAELGDLTRFDNPRQLMNYLGLTPSEYSTGERRRQGGITKTGNCHARRALVEGAWAYRYPATVSRHLQLRLEQVPKPIQDISWKAQVRLCKRSRQLSARGKNANQVVVAIARELSAFRWAMAQEVPLTP

SEQ ID NO: 271683 - protein, 328 aa, unidentified
MDLFIGIDVSKATLDVAGCTADGPLAELCSTIANTEAGLATLVPLLVGRAPALVVLEATGGYERLAAATLALAGLPVVVVNPRQVREFAKAVGQLAKTDQLDAALLALFAERIRPAVRERPQLETGPLSEQILRRRQLVDMITAENNRRALVSPTVRRRVDRHITWLERELEHVERDLQHLIEASPLWRARDDLLQSAPGIGPRVAHSLIALLPELGTLNRQHISALVGVAPFNDDSGGRRGVRHIKGGRAAVRTVLYMGALAGVRYNPVLKAFYQRLRAAGKPAKVALVACMRKLLTILNTMVRTNTRWRTDAPLSSRPAALVASPT

SEQ ID NO: 271684 - protein, 427 aa, unidentified
MSYRIAAVDVHKKMLAVVVADIAGEGEYQFERRKFGATPSELKVLAEWLVQQEVEEVVMESTAQYWRPVWGALERYWQPARQQREGASKMSGTLHLCQAKSNHGPRGRKNDFADGERMIKRLVAEELVLSFVPDPEQRLLRTVTRRKHQLTRAKVGFKNQLESLLEQAHIKLSSLVSDLLGVSARRMLKALAEGETDPSALAALADRGLRATPEQLRDALGASTQLNGVYRRLLKLALEELQVIETHIEQLDREAMGLLKEHQDVVRRLAEVPGFGPDSAVQMIAEVGPKAANFRTEKKLSSWVGVCPGNEESAGESQSTRSPKGNRHMRRLLNQAAQSAVKVKGSIFEVTFHHLLPGLGYKQAIWAIAHRLCRLLWLILHKGVHYEERGPAVSAKSKRTRAARMIRELKKLGYRIEGGPLPAVAGA

SEQ ID NO: 271685 - protein, 457 aa, unidentified
MSKDKRKKEARKTKKTTKAIQGIPVLYPKAAGADIGDTQHDIAIPDGHGGLIVRVFKTFTADVEEAVNWLKQEGITTIAMESTGVYYLTFYLLLEEAGIEPYLVNARHVKNVTGRKKDDSDAMWIQRLHSCGLLQKSFQPDNDFRTLRTYVRQRKGLITRCSDEVRRMQKALEQMNIKIHTVISDLLGKTGLQIVKAIIEGNFDPEELSKLRDPRIKATHQEVFKSLQGLWKEEYVFTLKQAYNTYCFYQQQVKECEDKIHEQLLKQIAQANQGDITEDKPTLEKKTKPRKNQFSFPVAPLLCRLTTVDLCKIPGLSEVSILEFISETGTDIDKWPGSKHFSAWLNVVPNTKITGGKIISSRMLKKKNIAGQVLRMGASSLYGNKTSMGDYHRRMSAKYGGKGAALASAHKMSRIIYKMLKDKVEFDFQMLADADQKYRVKRIRHLEKLLEQLKKVA

SEQ ID NO: 271686 - protein, 326 aa, unidentified
MEKHYIGVDLHQAFFQACAVRGDGSRLWEGRFPRTAEGFAAFRTRCDAAVAVAVEASTPTWHFADAVHDTVGTLTIVDAFRTRLKAGYAAKTDRLDARRLADALRRDSVSSIYYPPPAIRDLRELVRYRHAIVQTRTKLIQRLRAVLLRQGIVEAGRLSRQDRCLEALVLPTQAAASVAGLRRLLALARAEGVAADQAVHATAAADPIAAALQQLPGLGPVLALMIRAEVGDIRRFPSGGHLASYAGLVPRVEASAGRVRQGRITKRGSPWLRWALIEAALQGPRRSDAQGRWVRRLALRKGALKARVACARQLCHEIHAVWMAMA

SEQ ID NO: 271687 - protein, 331 aa, unidentified
MYDHYIALDWAQINMAVARMTKESTKVISKDVPANIRELKMYLMNLKGKKMLTFEETTTSQWLYTELKDYADEILVCDPYRNHLLSEGAKTDKLDAMKLVKLLRSGMLKPVFHKSGGEFIRMRKFVSGYEDMVKAGVRLKNQRAAMFRAVGKCKRQKALEDRMDQFVLGGLDRSIAFHTAEKERYEAEMEKFSKKHKMIRDLDSLVGIGRVGAVKIAARVVEPKRFKNKGKWLSYCGLVKHDKMSGGRSYGKKPTRHCRSLKSVFKTAAISAIAKNANNIFKDHYEYLIAEKKYSEANARNTLARRIAVIALGILKSGQPFEAKRIIKQAA

SEQ ID NO: 271688 - protein, 406 aa, unidentified
MGPTASNNLMEVISVIIVAVDVAKDKHDCFITNTDGEVLFDSFVVRNNQDGFDDLYQKICSVADSTQNVKVGLEATGHYHLNLLGYLLDKGLTTCLINPLQTSLFRKSLSFRKTKTDPVDARAIARLLMSDRTLQPYSLTSYQNEELKSLTRYRADKVRERARLKSSLARLVVILFPELEKLVPILHMATVYDLLREFPGASYVASAHLTRLCHLISDSSKGHYGKEKALEIREAARHSIGSVFPAKSLELRHTIDHIRFLDDEIEEIEVQIFALLDKDPPKMLGIPGIGPRMAAVIVAEVGDFKRFSSPDKLLAYAGLSPSTYQSGQLTSTYAKMEKRGSRYLRYALFNATKYVCIWDPVFKDYLAKKLAEGKHYNVAISHAAKKLVRLIYHLETTGETYCSKAA

SEQ ID NO: 271689 - protein, 363 aa, unidentified
MTTATATPATPTAPTTGLILALDLGKYKSVACAYATDSATARFESLPTDRAHLRKLFAKHRPAVVVCEACALAGWVHDLCAELGLPCKVANTASEAWKFKHTKRKTDRDDALRLAQLQALGQLPTVVIPPQQTRQWRALIAARQALVGRRCGCQNRIRAVLVGRGLPAPRGAKAWADLGLQGIGSHAKPLADCAADELWRGLLDLALTEYRQVKGLIDQAEAKLDALAQADAGVRLLQTIPGVGPRTAETVVAYLGDAGRFTKGKQVSAYGGLVPRQYQSGECDRRGRITRRGPALLRKLLVECAWVMLRYNPWARAVYARLSRGKARKKQAIVALARKLLVRCWAMLRDGAPWRDEAQAAPA

SEQ ID NO: 271690 - protein, 391 aa, unidentified
MQKLNDLSRSLTALEPDGTLIAVIEMSLSSWLVGGIVPGVERQPLKKLVVDESALLKLLHRWREEAEKAGRRIKRIVVAFEAGRDGFWLARWLKACGIEAYVIHASSIAVSREHRRAKTDRLDTELLKRSFLGWLRGERDHCKMVEIPTMKDEDAKRPNREHDSLIGERSRIVNRMKAALVRLGIRGFNPKLKRATTRLDGLRTPEGEPIPPNALAELRRDMERRRLVNSQIRQIEEERLERIEQAPSDGPHVMVRLLARVMGVGIETADMLVHEVLSRNMRDRRAVARYAGLTGSPDESGRKRREKGLARSGNARVRRGMIQLAWRFLLHQKDSALVQWFRTRTENARGTRKTMIVALARKLLIALWRLVREGVVPDGVILRPATMTGGR

SEQ ID NO: 271691 - protein, 373 aa, unidentified
MYQRTFIGMDVHARSVKICAITPETGQVQRAALAMDAAGVRHWILTHGGEISTLRATYEAGPTGYGLARTLTAAGIECVVAAPSRLIRPSGDRIKTDARDAEHLARLLSLGQVTEVRVPDPDEEAARDLVRLREDARMDLMRSRHRLSKLLLRHDVLYPGGKAWTADHRAWLEAISFDIPPLQMTLHESIGMVDTVIERRDRLDAQIELMATTSSYAPVVTALECLRGVGTLTAFGLAVEIGDWTRFTGNSIGAYLGLVPSEHSSGQTRSQGPVTKTGNKHARRLLVEAAWHHARPYYEPSSTLRRQWDAATPETRAQAHRANQRLHQRWEAFEARKKNRCVANVAIARELAGWCWALAEPQQRTTEDTVMES

SEQ ID NO: 271692 - protein, 318 aa, unidentified
MEQQEQACFVGIDVAKDHLDVAVRPTGAARRFAADELHTLVGFVQQARPTLVVMEATGGLETAVAAALAAAGVAVAIVNPRQPRDFAKALGKLAKTDAIDAAVLAHFGEAVRPEPRPLPDAQTRELEALVMRRRQLLEMLIAERCRLSSCRVSSMRKSLESHIEWLRKQVKDLDKDITKSVRNSPMWREKDDLLQSVPGVGPVVSSMVLVALPELGTLNRKQIAALVGVAPLNRDSGKMQGKRSVWGGRAPMRAALYMATLVATKRNDKIRDFYQRLLIAGKAKKVALVACMRKLLTMLNAMLRAGSRWKSNEVPAPA

SEQ ID NO: 271693 - protein, 377 aa, unidentified
MIYVGIDVAKDKHDCFITNSNGEVLYKPFTISNNREGFDTLFQRIESVSDDLTKVKVGLEATGHYSYNLLGFLLDKGLPTYVINPLHTNLYRKSLSLRKTKTDKVDSRTIATMIMSDMNLKSYSDTSYHNEELKSLTRYRFDKVKERAKLKTSVSRLVNILFPELEKLVPSLHLSSVYALLSEFPGAAQIAASHLTKLSNLLSQASKGHYGKETAILFRETARSSIGSVMPAKSLELKHTIKLIQELTAEIDEIEAAIKQIMDEEIHSPILTIPGISYRMGAMILAEIGDFSRFDSADQILAYAGMSPSTYQSGQLDNCHSHMEKRGSRYLRYALYNATKYVCHWDNSFGAYLQKKRSEGKHYNVAFIPCRKKSLCV

SEQ ID NO: 271694 - protein, 430 aa, unidentified
MNESVSEQPLSPKVAAFVGIDWADQKHDVVLRSAGDPAKAEHQVIKSEINALNDWIAQIQERFGTKGKVLVCLEQSRGALIYQLMAYELFELYPINPSQLANYRKTFFSSGAKDDRPDADLLSELVMCHRDRLKAWKPDDQLTRELASLNEGRRNAVNRRTELANEIKSQLKLYFPVALQILENDITTALAADLLVQWQTLAELQKVSPGKLRKFFYGHNSRQEKKILERLALIKQAKPLTTDVAIIRPNALRVKLLAQQLKSLLPFIAEYERRIAELFGSHPDRFLFDNLPGAGPALAPRLLTAFGTDRDRFEVAGDLLNLSGIGPVRIASGKKTGKSASVHCRRACPKFLRQSFHEFGECSIRYCPWAQACYQAQRGRGKGHHAAVRAVTFKWIRILFACWKQRTPYDPQRYFQALQTRGSDYAQTTA

SEQ ID NO: 271695 - protein, 362 aa, unidentified
MTKTTFLGLDVHAATITIAPLEYGQEKSEVWEIANDPAVIRKTIKRLKKGRELRCCYEAGPCGYVLHRQLVGMGVACDVIAPSLIPQKPGDRVKTDRRDASKLARLHRAGELTAIGVPTEDQEAIRDLVRAREAARRARTDARHRLTKFLMRHGHRYHACNWTRPFWLWANRVTLTHAELTRVLQHYIEMVLHLDRQIEDLDKHIESVAAREPFQAMVARLSCLRGISTLAAMVILSEVYDLHRFSTANQFMAFLGLVPSEHSSGQKQRRGGITKTGNGRVRRILVEAAWAYRHHPKVTSRQRKLLTQQPPHIADVCQKANLRLTRKFRRLENRGKRSPVAMTAIARELAGFVWAVARANSA

SEQ ID NO: 271696 - protein, 384 aa, unidentified
MQKPNDLNQSRIVLKQDSTLIAVIEMSLSSWLVAGIVPGVERQPLKKLAVDESALLKLLNRWREEAEKAGRRIERITVAFEAGRDGFWLARWLRARGIEAHVIHASSVAVSREHRRAKTDRLDTELLKRAFLGWLRGERDHCKMVAIPTTKDEDAKRPNRERQSLVGEQTRIVNRMKAALIRLGIRGFNPKLKKAAGRLEDLRTPEGEPIPPNTLAELHREMERRRLVSDQIRQIEKARLERMEQAPDDGPHAMVRLIARVIGIGIETADMLVHEVLSRKLRDRRAVARYAGLTGAPDESGSKRREKGLAKAGNARVRGGMIQLAWRFLLFQKDSALAQWYRTRTEGGRNRKTIIVALARKLLIALWRLVTTGEVPAGVVLRAA

SEQ ID NO: 271697 - protein, 430 aa, unidentified
MCRNVAPGSFLGNRFDLIEALNTQRGFVVRLAAIHRLGGHVTTKKTIGKRGAEPSPADGPVRDGGNVVGADPHKRTLTATVLDERGGVLGTSVFNVSGEGHRAMEAWALAFGPVSRWGIEGAAGIGRHTAMFLAGRGHDVRDVCPNRTNERGRGRQQGKSDALDSLRVARETQACPDVPVAFKRAGNDRGPDERSELMTLWHKVRRSVLKSRQHLLNEAEAMLVDLPEDLRATLPDTSDVRARLVELAGRDRVQHYDAVTALRLRLLADTATALSELEAKEKEATAALAGLIEAAGSTLDRLCGLSTRSVAELLVEVGDARRMTEGGFARFNGTAPLPASSAEGDGEPVRHRLNRGGNRRVNSVLHLMAVTQLRCEPRARRLYEDARRRGHTKKEAMRILKRQLSNLVDRRMIADIDARQVAAGEHPEAA

SEQ ID NO: 271698 - protein, 310 aa, unidentified
MKKTSTVRVNGNMIFKGHKLTIGLDLGDRWSFYCVLEEAGQIILEQKLPTTPEAMKQTFESIPRSLIALETGTHSPWVSRLLRELGHEVLMAHAQKVQWISKSNRKDDRHDARTLARLARIDPELLGPVRHRSAKAQIHLTVIRARAELVSARTALVNAARGLAKSYGERLRKCGTQQVSRELAAELSVELPEVLEPLLQEVESLNERIKQYDARMEKIARESYPQVELLKQVKGVGTQIALTFVLTLEDPHRFPKSREVGCFLGLRPGRRDSGESQPQMHISKEGDPYLRTMLVQGAHYILAGTLWTRQ

SEQ ID NO: 271699 - protein, 362 aa, unidentified
MEITIAKVGLDVHAAQTQAAVLDPATGEVALRRLRVPPLGVLEFLAGLGSRVCAVYEAGPSGFALARGAAERGLDVRVVAPGLIPRKAGGRVKTDRRDAVRLARLLAAGELTFVRVPSVEEERFRDLVRAREDLRGDLMRARHRLSNFLRRRGLRFPGPAGAWTREHRRWLAKLRFDDLASETTFLDYLGGVETLPHRCAALEATLAELATACPFATTIARLRCFRGVDTLSAAGICAEVGDFRRFEHPRLLSGYLGLVPSERTSDQQRRQGSITKAGPAHARRLLVEAAHHYRHQPRLDERLARRQAGQDGRVCAISWRAQQRLHSRWRALALTRGKPRGIVAVACARELATFLWEAAVLE

SEQ ID NO: 271700 - protein, 387 aa, unidentified
MTVLTVNNLPAATHSETVRCLFAIELSGMSWVVAFNTPLSEKISRRTLIGCKWKKLLELIEEVRARVGRETGRAVEVISCYEAGYDGFWLHRQLSAHGIRNYVIDPASVQVDRRARRVKTDRIDTERLLRSLMAYLRGEPKVWSVVRVPSVAEEDARRLHRERDRLVSERVQHVNRIKGLCALQGIYHYNPLRPQAMARLEQLRTTQGDALPPRLKSEIKRELQRLELVVEMIAALEAERNAIVADESSTHPNAKKIQTLHKLKAIGPEFATVLVGEIFHRDFNNRRQLASYVGFAPSPFQSGNVAHDQGISKAGNRKGRTTGIELAWLWLRYQPDSDLSVWFRTRVGSTKGRIRRITIVALARKLLVALWRYLETGVVPQGAVLKG

SEQ ID NO: 271701 - protein, 343 aa, unidentified
MKLSRVGIDLAKNVYQLHGVDRFGKTIWKRRLKRDQWLKALLDKIEPGCEIGMEACASAHHWGRELQSRGYTVKLMPPQFVKPYVKSNKSDAKDAEAICEAMSRPTMRFVTVKTVAQQDIQATHRIRSELVTQRTAKANQIRGLVAEYGLVAPKHMSSLRAAIPCWLEDAENGLTGDFRRLLQGVWEDLLVLDERVGEMDKAIKRLAKDNEDCVRLEQIRGIGPMISTALIATVGDARQYRKSRQMAAAIGITPKQQSSGDRERLLGISKRGDVYLRTLMIHGARSAVAVAKHKDDRLSRWVTGIANRSHPNVAAVALANKNARMAWAILRNKTDYDPDFAVR

SEQ ID NO: 271702 - protein, 341 aa, unidentified
MQITTIGLDIAKNVFQVHGIDAAERVIVRKQLRRGQVMKFFEALPPCLIGIEACASAHYWARELTRLGHEVRLMPARDVKAYVKRHKNDAADAEAICEAVGRPRMRFVRPKSAEQQGRLMQHRARDLLLRQQTQVINALRSHMAELGIAAAQGREGLKQLLAVIADKKDARLPIDARASLIVLAAQLQALHTMIGSLEKRLIVQHRTNEASKRLQNIHGIGIIGASAIAATVPDPKAFRSGRDFAAWIGLVPRQDSTGGKQKLGPISKQGDRYLRRILVVGAHSVLRRAKLNPEKYPWLTQLLARRPFKVVAIALANKMARIAWALLASGGHYRPRLGTAA

SEQ ID NO: 271703 - protein, 370 aa, unidentified
MPRMPQAPEPSHAHIDPTVVDPDEVVLGVDTHKDVHVAAVINVLGVLLGTRSFPTTASGYQQMLRWATGFGTVRRAGVECTGSYGAALARHLVGEQIEVIEVNQPDKATRRRRGKTDTVDAEAAARAVLSGRASASAKAGDGPVEMVRIFKLAKASAIKSRTQAINQLKAVLVGADPQLRDSLSGLRNPTLIRRCAQLDAGTPRDATTAAAYTLALLARRILELTTEVDDLNRQITDTLSTHAPQLLERNGVGPDTAAALLITAGDNPERLHNEASFAALCGVSPVEASSGKTQRRRLNRGGDRRANSALHTIVLSRLRWDPDTRAYLARRIANGKTRREAIRCLKRYIAREIYQLIAQPTKPAPCAHEA

SEQ ID NO: 271704 - protein, 411 aa, unidentified
MVYIGIDLHLKQLTVCIRNEQGDVTLRRQVSTRPHKVREFLDELRQHDGGYVAMLEVCGFHDWLVRMLREEPACRDVVVVHPDQRSKKKTDRRDANLLGELLWVNRQRLLAGERVQGVRRVYTPTPEEQQDRQLTSVRQRLGRQRTRTLNQIHYLLRRHNLEWDRPTKTFQTEKVKRWLKKLSLGECDRLELDHLLAQWELWDQQIDKLDERIAERFDGNAAAKLLATIVGVSCYMALAITSRIGAVTRFARGRSLANFLGLTPGSRSSGETQRLGSITKEGSRHVRFLLGQLVLHVLRKDGRMRAWFKRIKQRRGSKIARVAVMRRLAVIMWHMLTKNEPYSYGGVPQRTRPTPGELSEAQREQQRREVLQDFTRAASRGVATAAHGAAAESTGASSLCPEPEETASCPA

SEQ ID NO: 271705 - protein, 348 aa, unidentified
MGMLADEVDHVIGVDTHRDSLTAAVTDQTGAVQAQVTLAADAFGYRRMLAFARENAPGKRAWAIEGTGCFGAGFCTYLLEKGEWVVEIDRPARVGGRNKAKSDELDAARAAREALSRARLAQPRRRGDREALRVLVATRQSAVVGRTKAICLLKALLTSSPEYLRKHFRNMGTDDQLQRCARLRTTASHSEEHRCTVIALRATARRALALETEADDLETEIQRIVAKTAPRLLQEPGVGPISAAQILCAWSHPGRLRSEAAFAAIAGAAPIPASSGKTVRHRLNRGGDRQLNRALHTIVLSRLAHHEETRAYAARRAAEGRTSREIKRCLTRHLARRLFKLLESSAAA

SEQ ID NO: 271706 - protein, 368 aa, unidentified
MGKSSKLYVGMDVHKDSIDVATGDDAAGEVRHYGAIGGDLASVSRLARKLESTGKVLVFVYEAGPCGFGIYRMLRDRGHECWVVSPGMTPRSNADRIKTDRRDCLKLARLARAGELTPIHVPDEADEAVRDLVRAREDAVVMQRQVRQRLGALLLRNDVRYNGKTAWSPAHRRWIAELKLPHAAQHIAFEEYAQAVDEAGKRIERLEAAIGDELGRWRWRPVVAALEAFRGIRTIHAVRLVAELGDLTRFASPRNLMGFLGLVPSENSTGNHRRQGAITKTGNSSARRALVEAAWAYRYGARVSVGIARRQSGLPKHVTDLAWKAQLRLCSRYRRLSARGLNRNKIIVAVARELSGFVWALGQQVKPL

SEQ ID NO: 271707 - protein, 394 aa, unidentified
MKLIGIDIGKNKLFFCVMDQQTGEIISQPVSFSNDKEGFDFLVQKIKSYPKDSILIGMEDTGHYHFALLKYLLDLQYTVALINPKTTDFNRKMQGGITKNDKLDTINICDVLDTPERKKQYRITKVNSFDLYEQKQLTRHHHNLKEEENVYKNRLQKCIDIVFPEFNKLFNSKYGIVYMNILKMFGSAENIANTDIRTIRKCFEIEGRGNRISLTPERLKECARSSIGISSSAEVIQIKHLTAQIELIEEQLTEIDKKIEEFSIQNNSPILSIPGISHFSGTSILAELGDISNYSKPSQIIKFAGVAPLHYESSQFNAQHTAITKKGSKYLRKTLYQIILPVIRHNPVFNKYYQLKISQGKGHRCAQGHCVRKLLRIIYHLLKTNQQFDPQLLR

SEQ ID NO: 271708 - protein, 410 aa, unidentified
MERIVTRAGGLDVHKDVIVAEVHLPGGVVERGRFATTTPGLLVLRDWLIELGVSRAGIESTGVYWKAPYYMLEDAMEVWLLNARHMRNLPGRKTDVSDAWWICQLIEFGLVRPSFVPPKPIRELRNLTRYRKAQIEERTRETQRLDKILQDAGVKLSSVASDILGKSSRAMLTALVAGTTDTRVLADLALGKLRKKIPALREALTSRFSGHHAVIVASILSKLDFLDELIASLSTEIEQAIAPFAHQVQLLDTIPGIDQRTAQGLLAEIGADMGVFGTAARLASWAAVCPGNHESAGRSKSGATRKGPKWLGIYLHDAAMGALRTKNTYLAAQYARLRPRLGHAQALVAVEHSILVSIFYMLQRNQPYHDLGADYFIRREDPARRARKLIRQLEAIGYTIQAQPPPPAAA

SEQ ID NO: 271709 - protein, 437 aa, unidentified
MSSLLEQPFTAWVGIDWADTKHDICVQAAGDTRRESGCIAHQVAAIDEWANALHHRFGGPVAVALELAKGPIVAALQKYDFLVLFPINPATLARYREAFQPSGAKDDPADAELALDLLVRHPERFSPLRPQSAGMRTLVSLVERRRQLVGDQTRLTNRLCDTLKQYYPQALEWFDDRGTVLFCDFLERWPTLRSVRQARTAVLETFFHAHHCRSASRISARIESIRTAAALTDDPAIIGPCRLHVLALVAQLRAVLAAIAQFDREIAAVAHTLPDYTLFEDLPGAGAQLAPRLLAAFGEQRERFRSAEELQKYAGIAPVTERSGKKSWVHWRLQCPKFLRQTFVEWAAQTISRSFWAGAYYRQQRAKGSSHHIAVRALAFKWIRILYRCWQTRTPYNETVYLNALRKRGSPLLANLSELPRISVSGVGWDRSAPLSH

SEQ ID NO: 271710 - protein, 335 aa, unidentified
MKKIQVGIDISKEKCNLCYRKGLEIVLEEECPNDVKAIKKTFKASFRTLCVSFAEVLVCAEYTGRYIYPLTVACQELDLFLWLDDPTRIKNSFGIIRGKSDAIDAARIAEYAYRYNDKAVRYVIAEDAIVSMKNLLSDREFLLVDRKKYQSQLTDQRKYMAPGDFKHKSSRWKKVIKTIDEQINAIDAEIEALIGADPVLTRQKELLVSIDGIGDRIAISMIAITGGFTRFRTARQFCSFAGLTPYKYESGSSVRSKAKISKRANQTMKALLHLSAVNIATRMKEGEYRDYYERKIKEGKHVMCVLNVIRAKLVHRMFSVIRRNQPYTKVYNPAS

SEQ ID NO: 271711 - protein, 395 aa, unidentified
MGSTATPGPEPVVIGTDPHKRSATIEVMTAEEDIAGGGRFGTDRDGYAAMLAYGRQWPDRVWAIEGCAGIGKHIANRLLADGEDVVDVPPKLSARARVFATGQGRKTDATDAHSVALVGTRMSGLRPVVNDEQLAVLRILVDRRRSLGEDHTRMVSQPHQLLLELIPGGAKKDLSARQAKALLAKVRPRDAAGKTRRRVAAELISDLERIYARKKAANKELTELLTATGTSLLDLPGNGPSGAARLLVEVGDITRFPNKAHFASWNGTAPIDASSGDQVRHRLSRAGNRQINRVLHIMARVQIRSCHEGRDYYERKEADGKSPMEAMRCVKRRLSDLVYQQMLHDALAQTTGPGGQQGNDSDSSATGSHPHTGSSDKPLPGPATSQPKTPLRRAG

SEQ ID NO: 271712 - protein, 421 aa, unidentified
MLTAQWFVGIDWAADAHEVCIIDRTGHVCERREVKHTVAALQAFVDALLERAEGDPSQVAIGIEMPRGAVVELCVERGYAVYAINPKQVDRFRDRFTVAGAKDDPRDAHVIGDALRTDPQAFRLVRLDHPLVIQLREWSRLDDDLRDDLMRLTNQLRDLVYRIAPGLLVLCPAADEPWFWGLLEAASTPAAQRRLTKRRLERLLREHRIRRLSAAELHHVLQQPSVYTAPGVVDAVSAHLLMLLPRVMLVAEQRREAKRQLARLLDALEAEMPPAGDQREHSDVAIVRSMPGIGTRVAARMLAEASQPLADRAYHVLRTWMGVAPVTKRSGRRRRPLVVMRYACNRQLREAAYHWARTGTQKDPDSRAYYASLRARGHSHGRALRSVTDRALRILITLLTRGQLFDPNYGQHVAAPVAAGA

SEQ ID NO: 271713 - protein, 462 aa, unidentified
MARRQAQPRDPAARKLAGSLPIVNPNAAAIDVHSDNHVVCVPADRATPNVRTFGANSCDLLQIAAWLKGCGITTVAIESTGIYWIPLFELLEAQGFEVYLIEPGQASRCGARPKTDVLDAQWLQRLHSHGLLQGSFRPPDEVIALRAYLRQRQMLISYASTHIQHMQKALEQMNVKRTEVVSEINGVTGLRIITAILAGEHDPARLAALRDGRCKNDEATIARALEGTWREEHLFELSQAYELYRAYQMKVTECDRRIEQAVARLPDRSAGDALQRKLPTRGRKPNDLRFDGANPVFRALGVDLTAIEGIDVSTALVILGEIGVDVSKFPTEKHFASWLGLCPNHQASNHKLKSRRVRKGKNRVAIALRMAARSLHRSHSALGAFFRRMHSRLGTKGAITATAHKLARYVYAMLKHGQAYVSQGLAEYEAAMHERMTRGLRKKARALGYDLVASQQSSPAVP

SEQ ID NO: 271714 - protein, 419 aa, unidentified
MKPHLAASIGLDWADAHHDVSLQESGSDTVERRRIAHTPEALKEWVAELRHRFGGRPVGLCVELSRGPLIHALLEYEFLVLFPVNPLSLKRFRDTFATSGAKDDPTDADLLLELLTKHRDRLRAWTPDDPKTRALGRLVQARRKTVDLRTRLTQQLRAELKGYFPQALDWTGKLTNQLACDFLLRWPTLDSVQRARPETVRKFYYGHNCRRGDLIAKRLQEIRAAVPLTTDPAIVETSVLTVQMLARQIRLLGPSIARFEEEIDKLLADHPDAELFSSLPGAGPALAPRLLVAFGSNRERFDDAIEVQQYSGIAPVTERSGKKTWVHWRWAAPTFLRQSFHEFAGFSILYSAWARAFYDLQRERGKGHHAALRALAFKWIRILFRCWKDRTPYDEARYLRALRERGSPLIERLELPVAA

SEQ ID NO: 271715 - protein, 411 aa, unidentified
MQYFIRKEGMPMLSIGIDVSKGKSTVCGMKPGGEIVYTPFEVQHTREGMSELVSLLRGSGEEVRVVLESTGSYHCPVVAALLENGIFVSVVNSLRMKRFCSQSIRRVKTDQIDAMQIALYGLAYWQELQPTRLPENTYRELQLLARQYYQMTSLLIKAKVDFNALCDQVLPGMQELMSDHAGRHKLSDFVLRYHHTAHILKMGETRFRKDYCKWAEKKGYRNHERMAALIFATAQNGIPVLPDAPSTQIVITEAIRVLHTVEASRDAILTQMQALAKTLPEYSLVREMPCIGDTLAPRLIAEIGDVRRFHSKRALIAYAGIDAPPYQSGKFCANNRHISKRGNRYLRKTGYEVMQSYVMHKPANDPIFTFIEKKRSEGKSGKLAMVAGLNKFLRVYYGKVTELYRSLPAIE

SEQ ID NO: 271716 - protein, 458 aa, unidentified
MPRSQRRTTRAVTTPVLHPHAAGVDVGATELYVCVPLDRDPQPIRRFGTFTEDLRAVATWLTQCGVTTVVMESTGVYWIPLYQILETRGVEVCLVNARHVKNVPGRKTDVQDCQWLQYLHSVGLLRGSFRPPETVCAVRSLLRHRDTLVQLAATHTQHIQKALTQMNLQLHHVLSDITGVTGLAILDAILAGERDPQVLARHRDRRIKASRETIAKALVGDYRPEHLFTLRQSLVSYRHYQQLIGACDGEVQALLGDFASQVDPAVHPLPPPTKARRKPRGLPAAPGFDLRTELYRILGTDLTQVPGLQTPTVHTLFAELGADLSPFPSGAHFASWLGLCPDNRISGGKVLSVQTRRVKHRVAQALRLAAQSLFRSQSVLGGFFRRMRAKLGAPKAITTTAHKLARIIYHLVTTRQPYDESRLAAAEADHRRRTESRLRSQARALGFQLVPAPVQSVS

SEQ ID NO: 271717 - protein, 400 aa, unidentified
MISVGIDVSKGKSTVCLLKPYGEIVCKPFEVQHTEKDLEDLANLLQKLDGEIKIVMEATGIYHLPILTFLLEKGFFVSVINPLMMKRFSKDNSLRGAKNDRLDSVMIASYGIEKWYKLKKYEVNDRIYTELRLLGRQYYRFMQTHVKLVQELTHLLDYTAPGLKAMFNSWNEHSNRDKLSDFVERFWHFDLITSLSREEFVEQYLLWAKEKKYHQSRSKAEKVYDLASNGIPTLSSHTPSTQLMIQGAINVLRIVNNSLYHILSRMKELAKSLPEYATVRSMGGVGDSLAPRLIAEIGNVKRLRNGHSLVALAGIDPPPYESGQFVGTHRRISKRGSPILRKIGFEVMRMLKSHKEPEDNAVYNYILKKEAEGKNKKLSKIAGLNKFLRIYYVRVMEVYQ

SEQ ID NO: 271718 - protein, 343 aa, unidentified
MDYFAGLDLSVKETSVCIVDDAGKIVREARVASEPEALLQVLTNAIYRFKRIGLEAGPLSQWLFSALAEAGLPVICVETRHMRAVLKAQINKTDRNDARGIAQMMRVGLYRPVHVKTLRSQKLRMLLIHRKLLQSKAISIENDLRASLRNFGLKMGLVGAVRFEARIKELVENLPDLAALVEPLLIVRRVLREQLGILHRRVLAVVRDDEVCRRLMTIPGVGPVVALTYRVTVDVPARFRNSKSVGAVFGLTPAKDQSGERDRSGAISRCGDEMVRVMLYEAAQIMLVRSAKWSWLKAWAMKIAKHRGMKKAIVALARRLAVIMHRMWIDGTEFRWTRELAAA

SEQ ID NO: 271719 - protein, 370 aa, unidentified
MKSQPTAIPKLYIGMDIHKKSWSVHMRTDISDHKSFTIPANCEVLYNYVEKNFGDHEVSLVYEAGCCGFGASRYFLNLGWIVLVVNPSDVPRMDKQNYQKSDSIDCRNLAKQLHAGQLKGIYIPDEPQDLLKSLLRQRAETSRQLRSIKSSTKSLLLYHAIVIPAEHDNPSWTKAFLEWLTQIKWSFATGKLCLESKLRMYAVIHKEYLQLANELRSYCRKHHKKDYYLLKSIPGVGGYLASAILAEIGDLRRFNNECSFASYVGIIPTMRNSGGTENIQGVTPRCRGLLRSYIIESSWVALRMDPTMQSYYRKHTGKNSKSIIIKIARKLLNRMLSVIKTETPYQFNYSLNNGKETIIKSKQLKVKSAK

SEQ ID NO: 271720 - protein, 352 aa, unidentified
MGYFAGLDVSLEMTSICIVDADGVVVKEAKVASEPDDLVAFFAQCGMTMKRIGLEAGAPSQWLYGGMAEAGLPVVCIETRHAKAALSAMPNKTDRNDARGIANIMRTGWFRAVHVKTQTAQELRFLLVARQTLVRKLMDIELAIRGMLRSFGLKMGVVSKRRFEARVLELAGDRAMLMRALNPMLTARRALALEYANLQKVAMDFARDDDVCRRLMTVPGVGPIVALTYRATIDVPSRFRRSKSVGAHLGLTPRAYQSGEVDWNGRVSKSGDAMARAALYEAAHILLTRVKRWSSLKAWGMRLVKNRGHKRAVTALARRMSVLMHRIWVEGTVFIWKTGDGQVVAPTPVAGA

SEQ ID NO: 271721 - protein, 422 aa, unidentified
MLEETQETAEIIQRVAALDIGKAELTCCVRVPSPGKRGRRAQEVRSYQTMTRSLLVMADRLAELGVTRVVMEATSDYWKGVFYLLEAQGFETWLVNARDVKHLPGRPKTDTLDAVWLCTVAERQMLRPSFVPPRPIRQLRDVTRYRADLVGVRTAEKQRWSRLLEDAQIKLSVVASDIFGVSGRAMLQALLAGERDPERLAQLARARMRAKLSLLAEAFTGFFTDHHGFLLARMLDRIDGLSADIAALDSRIEALIGPFAQAVDRLDEIPGVGQTAAHLLIAEIGVDMTRFPTAGHLVSWAKFAPGVKESAGKRKGTATTGHGNPYLARVLGEAAVAAGRTDTFLGDRYRRIARRRGTKRAIVAVGRSILVIVWHLLADPNLRYHDLGAGFYDSRVNADRAKRNHVRQLEALGYKVTLEPAA

SEQ ID NO: 271722 - protein, 410 aa, unidentified
MDLLRREVPATSLVIAIDPGKAVNRVWLTTGERGLIGEPVSLPVLRDGVDELERLIASSGVAGPPVIGLEATGALHRAWATEIQRRWPGSLRLFAPSETTAARAQLGSRRFKTDDRDCAAMVWLLRQGAGRPAEPDAVEALLGTVRHRRQLVDARKKLQQRLHDQLNALCPGLSAPPAHGRALKIESPTGKAVLACAATFDGRAPTTRSLLARAPGRMTEPTAAFWAARWKRLLPPPADAELRAARLGCDLRRWQDLQSDIALAEQQLELLLAQTPGQVLTSLPGVAVVRAAAFSAFTLPIERWPTPEHLYSATGLAPATYQSSTVTRRGRISRQGLPEHRDALMGIAWGLALNSNAFRARDAELRARGFRPIQARVALARHACRLCWRLLQTQQPFDERRYAHARQRGR

SEQ ID NO: 271723 - protein, 351 aa, unidentified
MTMVGGLDVHRQQITFDFVDDDGLVHWGQIRPATRQTLRGWLAEHCPDGDGEFALEGCTGWRYVSEELAAAGLGVHLGDPAETAALRGRKKRAKTDRADARLLRTLLVEGRFPESWIPPAHVLEIRTLGRLYCTLMDERRAWQQRIHAQLFHQGCPPIRALLSGAGREALADADLTPIGRQSVEVALGRIDELSVEIEPLRTQLVDFARRQAGCRALQAHYGIGWLSAAIMWAEIGDARRFTSSDQLVRYAGLDVTVYSSDTKRSPGHLSRQGSPELRWAAFEAAKCAARPGSPDYGYYRKLAAKRDGHNGKNPTLAVERKILRRCYHTLRELGDAALALPDTRPQQKVAA

SEQ ID NO: 271724 - protein, 321 aa, unidentified
MQPVTVTVYAGVDVAKASLQLHLQGRQTEFPNQPAGLAKLRQQLQTIPHVHVVCEATGGYERPLVQALHQAQIPVSVANPAQVRAAAQAQGQRAKTDRIDAALLTDFGQRFQPKPTPPTSPSQDQLVALTQWLTQLIQAQALARTQAEHHEAAFVCKQHAKLMDHFQSQIAAVEKQIRALVAQDARLQQRVECLDQITGVGPRTAWLVLAHMPELGQVNRQQVAALAGLAPWTRESGTMKGLRCIGGGRPEVRLALYMAALSAARFNPVLQPFYQRLRAKEKPGKVALTAVMRRLLVYMNHQLKALAATRAATKIDHAKTP

SEQ ID NO: 271725 - protein, 363 aa, unidentified
MNYVGVDVHKKYSVLCALDERGRKLGEARVEGNTGCGFAQFFRSLEGPSKAVVEACWNWGLIHDELEELDQVEEVVLAHPAKTRLIADAQIKTDRLDAHALGTLLRGNLVARAHVPRRQTRSRKNLLRQRLYWARLRTMLRNRIHALLDRQRGLELPQCSDIFGQRGLFFLRQLQLPEPDGMLLREQLALHDLIAQQMKAQEKRIAAEFKSEVIHRQLLSMPGIGTTLAAVIGCEIDQIERFPTSEKLCAYAGVVPTTHASGGKVAHGRLLPFCNKWLRWALLEASWVAIGCSPYFGALYQQHRARGKKANTAITIVARRMCRIIWQLLSENRDFEKRPFSHRIGPFPGCSAVRLTARSAHGS

SEQ ID NO: 271726 - protein, 366 aa, unidentified
MTKDTLYVGLDTDKQHIDVAVAEELPHGETRYWGQVANDGAAVDRLVKRLQQGRRLVMCYEAGPCGYGLYRQLSGKPDVTCAVVAPSMTPRRAGVRVKTNRRDALTLAKLLRAQELTAIWVPDAAHEAMRDLVRARASAVEDVTRSRQRISGFVLRQGLRYIGKPWTKKHRAWMAGLSFEAAAHRLMFRELLEALAFAEACRDRLTDHIGELVGSWSLSWLVEAVQALRGYKLVNAATVVAEIGDPRRFANPRQAMGHVGLGVSEYSTGDRIVRGGITKTGNKRARKALIEASWTYARPAKGPPAAAAHQSAAVRAIADKARHRLSRRYRWLIAHGKPSSVAVTAVAREAVGFIWAIAHAAAPRQS

SEQ ID NO: 271727 - protein, 353 aa, unidentified
MYKFFVGVDVSKGWIDVSSTEGLSVNYAGRFKNSIAGFKEVISQLKKISSIERSEWFVCFENTGTYSKLLLQWLSSQEIACREENPLIIAKLPGLRRGKSDKLDAGFICQYAYEKREKIKPTQLTPPTITELKKLLSRRNLHVRHCAALKTSLKEHRAEFPTELLHQLEQQNKMLIEKHNECIAFIENQIEALVNSDEELSRNSKLSQSIIGIGPVITWYMIATTGNFKLFATSRKYATYGGIAPFPKSSGTKKGRDRVSHLANKQIKALLSNGALSAIRHDPEIRTYYQRKIKEGKVEGVVINSVKNKLVARVFAVVQWGNSFRKAWQLCIEKNIIINLVKRRNSNSALRLG

SEQ ID NO: 271728 - protein, 343 aa, unidentified
MKLTRVGVDLAKQVFQVHGVDRAERPAWRKRLKRSRWIADLERDVEPGCEIGMEACGGAHHWARVLQSKGYRVKLIAPQFVKPYVKTNKTDANDAEAICEAMSRPSMRFVAVKTVEQQDLQAVHRVRSSLIRERTAKANQLRGLVYEYGLVAPREIKSLRRAVPQWLEDAENGLTPRFRALLSGLYGDLRLLDERVRELDREVASITREHEPVRRLMQIRGVGPLIASALYSLVGDARQYRNGRELAVALGLTPRQHSSGGKEKLLGISKRGDKYVRTLLIHGARSALRTAPGRTDRISRWALALAERSHANVAVTALANKTARVAWAMLRHGTNYEPGSVVT

SEQ ID NO: 271729 - protein, 365 aa, unidentified
MQKITTVRRSAKNVFKGQLTIGLDLGDRSSSYCVLDEAGVIILEQKLPTIPEAMKQTFRRMLRSRIAMETGTHSPWVSRVLTELGHEVIVAHAQKVRLIVKSRRKDDRLDARTLARLARIDPELLTPVQHRSAQAQLHLAEIRARAGLVSARTALVNAARGLVKSYGERLRKCGTQQVRREITGGLSPGLREALEPLLREVESLNERIQEYDRRIEKMAKETYPETALLKQVKGVGDLIALAYVLTLEDPHRFRKSRDAGCFVGLQPGRRNSGESEPQMRISKEGDEYLRTLLVQGAHYILGPFGEDSDLRRWGKKLAIRGGKNAKKRAVVAVARKLAVLLHRLWVSGEVYDPLRNSQKAMNAAA

SEQ ID NO: 271730 - protein, 337 aa, unidentified
MKLKRIGVDWAKQVFQLHGVDSHEQAVCRKQLKRSQMLDFFRRLEPCTVAMEACGSAHYWARELRTLGHEVRLIAPQFVKPYVKSGKNDANDAEAICEAASRPSMRYVEVKSAGQQASQALHRIRSRLIRARTALVNEIRGLLGEFGLVEARHGVAATRRLTQTALDAQNGLPGQMRELLAELSGELDEHDARLSRLDDMIQRQAREDERVGRLLQVEGIGPVTATALVSAVGAARQFSSARQFAAWLGLVPRQHSCGGKERLGAINKRGDSYLRTLLIHGARAVLRHCQDKADRRSQWLRQRVCRRNPNIATVALANKNARIVWAILSRGEGYRPG

SEQ ID NO: 271731 - protein, 339 aa, unidentified
MAIVDSARLIVGGVDTHRDVNVAAVVDMNGGLLGVESFATTADGHRQLSSWMAEFGTIERVGIEGTGAYGAGLARHFARASVRVIEVDRPNRQKRRRHGKSDRLDAVEAARGALSGRCEGIAKSGDGHAEALRALLVAKRSARSTRIRTLVQLRHLMFTAPDELRAKLVSEAAKLRPRPGGDIVMHGVKTTAVILARRVQALDVELALIDAQIAPLVKAAAPALLDVFGVGIDTAAVLLVTAGDNPDRIASEAKWAMLCGIAPVPATSGLMDGRYRLNHAGDRQANNAIWRIVITRLGQHEPRTVAYMERRRAEGKSKRYIVRCLKRYVAREVFQALPR

SEQ ID NO: 271732 - protein, 356 aa, unidentified
MEYGAIDLHKKESQVRIITESGEVINCRIPTRRDRLTTLFWGRPHARILIEASTESEWVAQHLETLGHEVVVADPNYGLMYGHRSRRVKTDRRDVTALAEACRHGIYRPAHRRSARQRSVQWQLNIRRELVAARTRGISVARAITRHAGYRIAGGATDTFLQRVAALQLPPALDEMLSPVRNVMEVLDEELSRVDTNFETLIADDPVVKRLTTCPSIGAITAAAFVAALDDVGRFAGRRGAAQVTSYLGLVPREYSSGEQQQRGRVMRSAHPYVQALLVQAAWRVFRSSDPRVAALRSWAQAIARRRGNKIAIVALARRLARILYAMWRDGTDYQSATIRGHQTQTPVAAGTQPTV

SEQ ID NO: 271733 - protein, 430 aa, unidentified
MTARQPIPNDAVLVAIDVAKARNEVLVKAAGHRRRRRLTVLNSRSEHDRFVTTLASYDRPVICAFEATGNYHRPLAWRLINAGFEARLVSSMALARTREALHNGWDKNDPKDAQVILHMLQIGATQRYHDPLAAGINDAQELSKTHEAISRAKTEIQHRILTHYLPLYFPEVERFKGNSRSDWFFAFLERFPTPASIIALSKEAFLEAAWPVIGRKVSKERLLADIYETAKASIGLPLPPESPAIRMFRMIIAEARSLIRQRGEIELMADSLLQDNVDYQSLRRIPGIGPINALTIIAEAGDLRRFGHHRQFLKFCGLDLAALQSGAFRGQTKLSKFGNARLRRTLWLAGQVAIRQRDNSFRDKFERYIARDRDNPDLRRKALTAITAKMARVVHAVIKSGSDYRPFIEGPVPGGRTSLSKCREGASATL

SEQ ID NO: 271734 - protein, 356 aa, unidentified
MQTQVTKKIDFTGKQLFIGLDVHKKSWSVTIVVDGMEHRTFTQPPDPMTLFNYLQRMFPGGNYNSAYEAGFCGYRIHRELNSLGIKNIVINPADIPTSQKDKLQKRDPIDSRKIARGLEKSQLRGIHIFDREIEELRSLNRTRFYLMRDLRRSKNRIKSFLQYFGISIPSEYDNNLWTLKYVSWLKQIKMQTMSGQDAFSNLICSYEYHRQQLLTLSRQIRQRIREYDNELYSLLKTISGIGPLTSSALITELGDINRFPHIDHLSSFVGLIPRVRESGETIHTGGITFRCNSFLRTMLIEASWQAIRMDPAMMQYYQKHIINNKGHKVIIKVARKLLNRIRYVMKTRQAYVTGVA

SEQ ID NO: 271735 - protein, 342 aa, unidentified
MKATTIGIDLAKQVFQLHGVDQHGKTVLKRQLKRDQMHTFFANQPPCLIGMEACGSAHYWANKLQGLGHTVKLMAPQFVKPYVKTNKNDAADAEAICEAVTRPTMRFVPIKSSEQLALLALHRARQGFVKARTAQTNQIRGLLAEYGLIIPQGIAHIGKRVPEFLEDSENGLPEIFRQLLMRLHEHLKALDKQVNELEEAIVRWHQDSAVSQKLAQLPGIGPITASALVASIGDAKNFKNGRQLAAWLGLVPRQHSSGGKQTLLGISKRGDSYLRTLLIHGARAVLRVAERKESFAGSWLAGVMGRRNHNVAAVAQANKTARIVWALLVHDRQYDAKYGVAA

SEQ ID NO: 271736 - protein, 377 aa, unidentified
MEVKMNYSTVYVGMDVHKETFSLCCYTNEKEKAEYPQKVEAHYSKVINYLEAMRFHYGDDLLFICGYEAGCLGFTLYHELTAHNVKCVILAPSTMPVLAGKKKIKTDKRDAAHIAKCLAHHDYSPVHIPTEKDEQVREFLRMRDDHQLALKKVKQQINAFCLRHNYQYSGTKYKWTQAHVNWLRTLKVDGLYQEILEEYMLTYDYLTAKLERLDKHIEELASEDEYNEDVHKLECFLGIRTQTALSVITETGDFKRFSDARHYAAYLGLTPGENPSGGEQHRLGITKAGNRHLRMLLVESAQSFTRGKVGYKSRLLAARQEGNAPEVIEYADKANERLRRKYYRLTMKNGKKANVAKTAIARELACFIWGMMTEHYV

SEQ ID NO: 271737 - protein, 326 aa, unidentified
MTNAAELIFVGIDVSKATLEVAMDDSGKTQTLGNDEAGLKALVGQLVALGDRVAVVLMEATGGLEKPAAAALCASEIAVMVVNPRQAHDFAKAMGYLAKTDHTDARALSQFARTLYSSEKRDRLFYKLAEPERVLLQAMVTRRSQLVVMRTAEGNRLASAHKSQHKSIKAVLKLLDRQIGQLDDDAGRHLKEHFKDKLDLLKGMKGVAQGTQCVVMADLPELGSLNRRQISKLVGTAPLNRDSGTFKGKRTTWGGRANVRAALYMATLSAVRYDPVLMAFYERLLLAGKPKKVALVACMHKLLTIMNAVIKSGKPWQAGYAQAANA

SEQ ID NO: 271738 - protein, 433 aa, unidentified
MLKTVYPNCAGLDVHKKFVTVCRLTVDCQGLSHAELCEFSTMSDDLEALATWLAGGGVTHVAMESTGVYWQPIHNILEGHFEVFLVNAQSIKRMPGRKTDMKDAEWIATLMQHGLLQRSLIPDKARRELRDLTRYRQSLSEEHTRFANRLQKVLEGTNLKLASVATDIQGVSAQAILRAMLEGQTDVKVLAEMSKGRLRNKRAELERALKGKITPHQRFMLTDLLIHLDFLDEHLALVEAEIDSHLKQIPAFQEPIRLLDTIPGVDRLTAVTIVAEIGVDMGRFPSDRHLTAWAGVAPGNNETGGKQRSGKTRQGNRYLRRILVLAAHGAARTKKTYLKSLYYRLKSRRGAGKAAMAVGRTILQMAYHMIRRGEVYRELGNDYFDQFDKARTAKRLIKRLEAMGYRVDVTERPLAPPTMEVSHSAQPHLPLVT

SEQ ID NO: 271739 - protein, 383 aa, unidentified
MRPTCEDDFTPGEEVLAVSLELSSGCWKMAFQDGKHAKPAVLTVSAEQASVRLQEVEREIGKIRRKWHVNPKAKTVVLYEAGQDGFWIQRALSARGIKTLICDPGSIPMPRKHRRAKTDRLDAIKLVSCLRGWLRGELDRMHVIRVPKEQDEAQRHLSRDRGELVKERGQHRDRIRKLLRTVGCWDSVDGDVGKRLRQGQYRCHDGSNLPAELQERLEREIERMELAGRQLGELEDELARQLPEATQERIDTLQKLKAVGAVGATRLVLELFWRRFDNAKQVGACIGLVPQPYDSGESRIDQGISKQGNRKVRSLLIEMAWFWLRYQPGSGIAKWYTAHIGGHGASKRSKRSAIVAVARRVAIALWRYLEQGVVPEGAAFKAG

SEQ ID NO: 271740 - protein, 456 aa, unidentified
MKMKRKKKVLQVPKLESLKQINPNAAGVDVGASELYVCVPEDRDPRPVRVFQTFTSDLHEIAAWLKRCRVTSVAMESTGIYWIPLYEVLEEAGFEVKLVNAREAKNMPGRKSDILDCQWIQQLHSYGLLTASFRPPKDIVALRSLVRHRDRLIVARAVHIQHMQKALHLMNLQLDNVLSDITGVTGMRILRALVAGERNLDTLASYRDPSCKSSAQVIRESLKGNYQEEHLFPLRQSLELYDYHTTMIQQCDREIEQKYRALPSRVDLQRKPLPPSKKQQKKPRKNAPTFDLRSRLYEMAGVDLTAIDGCNAATIQVVLSETGVDMEPWRTCGHFTSWMCLAPHNDISGGKVLRSRAKKTKNRANTALRLAAQALTHSDSWLGAYYRRQRARLGAPKAIIATAHKIARIIYYMLKYQREFVDLGANHYEAQYRKRQINSLTKKAASLGLLLVPAKA

SEQ ID NO: 271741 - protein, 316 aa, unidentified
MLYVGIDIAKNKHDVTALNVPGKTVLKPLTFSNNKAGFELLDLSIRQLNQDCLIALEDTGHYAFNLLNFLHEQGYKVYTYNPLLIKKFAKSLSLRKTKTDKKNAHGIALKLLSDPNREQFQHDNRQVDLKILARHIHRLKKKQSDWKVQYTRCLDIIFPELDKIVGKHSEYTYQLLTCYPNPQKRLEAGFDNLIEIKRLTASKIQDILSVAPRSIGTTSPAREFEIIENIKHYKRLIDKAEKCVNDLMAELNSVITTVTGIGNRLGAVILAEIQNIHAFDNPAQLQAFAGLDSSIYQSGQIDLAGRMIKRGSPHLR

SEQ ID NO: 271742 - protein, 466 aa, unidentified
MSEVRLGIDVACRADHQASLADERGEFLWSGWRFRTTAADLERLWAKIPDDVDVVVVMEPTRNAWVPLAAWLRARGARVTVVPPEQSADLRDYYNKHTKTDRLDSKMLARLPLLHPEGVRSIDDLGPAESLRRAVRHRSSLVRRRMSAALRLDALVELLGPGYADTLGCGDYNKTALAVLGGYADPRALRKLGRKRLTVLLIRASRGHHREAKADELLAAANEAIELWSAGGLDFAELAEEVASEVRIIAALDTEIATIEDRIEVLYDDADPAGIVRSTPGIGVTLAAGILGRTGDLKRFANLAGVRSFTGIVPKIDQSGLTQGHCGITKAGDPGLRAALFLAADLARKVDPTLAQRYHRLVVDQGKHHTSAVCSIAAVLATRIAACWRNDQHYVLRDVDGTEITESEGRAICADRYKIDPAMRAARRRTNKAQQLKKRVSRRKKESTGAAPASGSPADEPTKNAA

SEQ ID NO: 271743 - protein, 310 aa, unidentified
MNDSIGIDVSKTTLDCHRLSDGACERFANAKTGFAKLRRWIGSAAPTRVVYEATGPYHGAFERALAEHLPLVKVNPLQARRFAQARGTRAKTDQVDAAILAQMGAALGLQPDTPAHEEHYELKELQVARTALVKDRTRLLNRIKTQRLTLTKRHSKALLRQIEASLKEIEAEIKTRLRATDQGALAHDILCSIPGIGEPTAAAILIECPEIGTLGRKQIASLAGLAPMTRQSGQWRGQAFIQGGRKFLRDALYMPALVAVRFNPDMTAKYEDMCTRGKPKKVALTAVMRKLLELANALIKAGRKWTPKLA

SEQ ID NO: 271744 - protein, 432 aa, unidentified
MYPPEATVPNPAIAAYVGIDWADQKHDVILCPQAEPAVLEHQVITHSPESLLDWVGNIQQRFGAKGKILVCLEQSRGALIYHLMGYECFELYPINPNQLASYRASFKPSGAKDDRPDAELLCELVRYHRERLVAWKPDTELTRKLATLNEGRRQAVDRRSALANEIKSTLKIYFPLALQVLENDTTTALAADLLLHWPTLEALQRQSPSKLRKFFYGHNSRGEQKMLERLKLIREALALTHDAAVIEPAALRVQMLAEQLKSLLPYIARYEKQIAQLFDSHPDSFLFRDLPGAGSALAPRLFTAFGSDRSRFQCAQELASLSGIAPVRRASGQKSGKKGEKKASIHFRHACPKFLRQSFHEFAACSIRYCSWAERFYEAQRARGKTHHMAVRALAFKWIRILFVCWKERIPYDESRYLHALQNRASAHAQPG

SEQ ID NO: 271745 - protein, 349 aa, unidentified
MRIGGGLDVHRSQITYDWIDSDTGQRQRGQLAPAHREHLRMWLGQFAGQQAAFAVEGCTGWRYVVEELKRAGVEAHLAEPADTSAARGPKRRAKTDQLDARHLRELLATGRLPESWIPPAQVLEVRTLVRCYKALTDEHTAWLQRLHATLFHHGVPAERNLLAPDRRARLERGSGLSPAARQLVTVALGTLDHLDVELDRLRAELVGFARRQPGCQALDALYGIGPLTAVAIWAELGDVGRFTSSRQAVRHTGLDVTVYSSDGKRTPGHLARQGPPVLRWALFEAAKCAARAASPDHAYYLQVKQRLGGNRAALSVARKLARRCYHTLAALGEQAYAPPSDSPDLGQVA

SEQ ID NO: 271746 - protein, 357 aa, unidentified
MAKGITTEHGITIGIDVGDRFTEAYAMDDHGEWVESWRMATKQEALRSGLSRYPGARVVLEVGCHSPWMSRQLQEEGFEVIVANARRVRLIAESDKKNDRSDAEQLARLGRLDPELLSPIVHRSEQTQRDRVLVLARDGLVRARTQLINQVRGFAKSLGSRLPSSSSESFPKRVRGAVSDDLFPGLSTMLAMIEQLTFEIRSMDREIERLSRERYGETGRLRQISGVGPLTALTYVLTLEDPRRFAKSRDVGAYLGLRPRQRDSGGQHPQLRITKAGDALLRRLLVTSAQYILGPFGPDTDLRRFGLRLVERGGKSAKRRAAVAVARKLAVLLHRLWITGEEYQAVGYGAAARERAA

SEQ ID NO: 271747 - protein, 364 aa, unidentified
MQVSTIGLDLAKSVLQVHGVNAAGEVVVRKALRRSQVLGFFAGLPACTVGMEACGTAHYWARELAKLGHRVRLMPPSYVKAYVKRGKTDAADAEAICEAVGRPSMRFVPVKSEAQQAVLMLHRSRALLLRQRGMTANALRAHLAELGHVAPQGLGKLSALAECVLGEPEASQPMEQGQQGAAPAALPSHARLALRLLVEQVQGLQARIRSLEIELLAWHRSSEDSQRLETIPGIGFLTATALAATVSDASQFRSGRQFAAWLGLTPKPHSSGGKHRLGKISKQGDRYLRTLLVVGAGAVIRYARRHTTPSAVFASKLLARKPARLVSLALANKTARIAWAVLARKQAYRTGPAEAAQNAAPAAG

SEQ ID NO: 271748 - protein, 340 aa, unidentified
MGKRYIGIDLHRNRFTCCIRLENERTYVTEWELEDLGKFVKKLRPSDEVAVEITGNTRLFYDAVAPHVARVVVVNTSQFQVIRQSVKKTDAHDARALALYLSKNMLPEVRMKDKERGQLASLTQTRDTLVKLRTALKNKINNILSARGLNLAKEALGSEKKLGEVLELPFDEMVRIELRVIVEQIRSLNKSIAELEKTIGEEGSKLEGHRELSSIKGIGKITGAILLSVIGDVNDFADEGRLASYFGIVPRVSNSNETEHSGRIHKRGTKLGRTALVQSALIAAKYSPYLKRFYERVKARRGAGKAIIALARKFLGIIYRTLKNKWVFEDFPNFVLAEAS

SEQ ID NO: 271749 - protein, 351 aa, unidentified
MDKITTVGLDLAKQLIAMHAVDARGQVVLRKVLRRDALLGWSATLPPCEIAIEACGGAHHWARELTQQGHSVRIIAAEFVRPFRKSGKNDANDAEAICAAVRQANMRFVAIKSVEQQAALCVHRLRQGLVEERTALINRMRGLLTEFGVVAPLSPEKLRRELRLCLDEEKTHVPLMVRQLVTDELAALDALEQRIADYAAQIAAQVRDNVSAQRLQGIAGVGALTAAALVATVGQPQEFRNGRQFAAWLGLVPRQHSTGGKSRLGRITRRGDAYLRTLLILGAKSALQAALRKPPPLRHRLRQWIVDVFTRIGYHKTLVAIANKHARIIWALLVKGEDFDVQRLTLTAVAA

SEQ ID NO: 271750 - protein, 337 aa, unidentified
MKITTIGLDLAKSVFHVVCFDARHQEVSKRMLRRSQVLAYFAQLEPCVVAMEACAGAHYWGRELEKLGHTAKLIPPQFVKPYVKGNKNDYNDARAIAEAATRPGMRFVGIQTVEQQDIQALHRLRAQQVKQRTALCNQLRALVAEYGIVMNKGVAALRRGIPRLLEDAENGLSEAFRALLSRGYEQLLEREGHIDDYTRRVEAHSRQNEQTRRLQTLPGYGPIVASVFASVVGDGSAFKRGRDVSACLGLVPRQHSSGGKEVLLGISKRGDKYLRSLLIHGARSVVLHAKHKEDALSRWVNRVRERRGTNKAAVALANKLARMGWALLRHETVYRPA

SEQ ID NO: 271751 - protein, 349 aa, unidentified
MLIIGCDYHPSFQQIAWVDTESGECGEQRLAHSGGEAERYYRGLNGQRVRVGIEATGHARWFEGLLTELKYELWVGDPAQIRAKRVRKHKNDREDARLLLKLLVEDRFPRVWVPSAENRDVRQLLWHRHRLVQMRTRVMNQLQAIALNEGVRRRKGLWSQRGREQLESLTLAHWATRRRKDLLDLLDRLNPRIEGLSEAIEQEAVQRPEVKRLMTHPGVGALTALAFVLIIGSPERFRGGKQIGSYLGLAPCEDSSADRQRLGHISKQGNALLRFLLVEAAQAVVRFDPEWRRHFLHLAMRRHRAIAKVAMARKLAVGLYWMWRKGWDYQQMAQFGSHVGEPVTGHGVQ

SEQ ID NO: 271752 - protein, 314 aa, unidentified
METNIIIGVDLAKSVFQVHGADRTGAVLFRKKLSRPQFLKFMTAQPICLVAMEACSTSYYWARTLSDAGHDVRLIPPIYVKPFVKRHKNDAADAEAIVEAALRPNMSFVEPKSAEKQALSMLMRTRDQLIDHRTATVNALRGHMAEFGLIVPVGIKNIVRLKELVEADSTLPVLATEMAAIHFEQIVELTRQIDILTEKIKAYGASSPKLKRLRTMPGIGPIGAMIIETFAPDMATFKTGRDFAAWLGLIPLQNSTGGKSRLGKITKMGQKDIRRALVIGAMSRIAGYARQKTRSSPKFAVNSRGVAVTCRSWI

SEQ ID NO: 271753 - protein, 357 aa, unidentified
MVYIGVDLHRKSSHLAVLSEDGELLASRRIASRPEEFLQVFGELDPEPLEVAFEATYGWGWFADLLTDVGIPAHMAHPLATKAISTARVKNDRVDAKTLAHLLRTNLLPEAWAAPPEVRDARLLVRARISLVRISSRLKCQTHALLADQGISSPVTDLFGKGGRAFLEEVRLRPVPQARLEANLRLMDLVAVEVAEADRELRGLFRGDARIPRLLPIPGIGFTTAAVVVAEVWDHSRFPSPGHLCSWAGLTPTEHSSAEHTQRGHISKQGSRWLRWALVESASGACLKDPALRRFRDGIARRRGAKIARVALARRLLTLCYYALRDEGGCRAYPAMTSDVVGVRSPWVMASLGTAVL

SEQ ID NO: 271754 - protein, 437 aa, unidentified
MRRKKKNANKSVNLQVLPLVHPNAAGIDVGAKEHVVAVPCDRDPRPVRTFQAFTPDLHELAAWLKSCGIETVALESTGIYWISLYEVLEQYGFEIRVVNARHVKHVPGRTKTDVLDCQWIQKLHSFGLLNGSFRPDQQIRKLRTYMRLRDNLVVASTQAVHHMQKALFEMNVQLSNVISDIVGETGLRIIEAIIAGERDPKQLAALCSTRIKASRETVAKSLHGSWDEALLFALKAALETFRFSQTKIQECDCCIQQHLVQFESRAQEINSPQDLKTQLHRVCGVDLTKIPGIKEQSAQIIISEVGLDMTKWKTEKQFCSFLGLCPDNSISGGKVLHRATRKVYNRAADTLRLCAQSLTHSKSALGAKYRRLKGRLGAPKAIVAMAHHLARLVYRMLRYGQNYVEQGIHQYELKFQLQRIKWLKKEAKSLNLQLVPA

SEQ ID NO: 271755 - protein, 372 aa, unidentified
MGHHTEAFVGINTSKSRNAVAIADSGRGGEVRYLGEFPATEAAIRKLVAKLAAKCCHLTFCYEAGPTGYGLYRLLKSLGHDCLVVAPSLVPKKAGDRVKTNRRDALSLAKLLRAGELTAVWVPDERHEAMRDLSRARLAVKKDLQGKRQQISSLMLRLGRIYPGKTTWGRAHMRWLMEQKFEHREQRIAFEELLEGIRQESERMERLEDAIREVVPDWSLAEVVAALQAMRGIDLIAAVGVLAEIGDLSRFQNPRELMGYLGLVPTEDSTGDKVKRGGITKAGNGRARRILVEAAWSYRYPPRVSRDKQPKVEAAPRRAREIAWKAQTRLCGRFRSLERKGKRRTVIVTAIARELSAFIWAINRELLPPRQA

SEQ ID NO: 271756 - protein, 393 aa, unidentified
MYLVGIDIGKLKHSFCLLEKETGEILVEPVFFKNNRDGFNALLSSFKHLPQKDILIGMEDTGHYNLALLKFLLDRNYQVALINPVATNLTRKMQGGISKNDKLDTLTICDVLSSSQRVKSYRISKYSSFDLYEQKQLTREHHNLKEEENQLSNRLQKCIDVVFPEFNSLFKSKYGIVYMNILKEFGSADAIAHADIRTLRKCFDTGRGKHISLTAEELKEAARNSIGFPSSSEATQIKHLVARIELIKEQIAEIDKKIEEFSLQNNSPILSIPGISHFSGTSILAELGDIHNYSKPSQIIKFAGVAPLTYESSQFTAQHTAITKKGCKYLRKTLYQIITPVIQYNPVFRKFYLLKIAQGKGHRCAQGHCVRKLMRVIYHLLSTGTQFDPALLR

SEQ ID NO: 271757 - protein, 416 aa, unidentified
MSIVYRVVAGIDVHKKMLAVVVRRERQGPGEAEYEKRKFGATRSEIEHLAAWLQQQQVEEVVMESTAQYWRPVWYGLEAHFQLHLSHPLKTKAPRGRKWDFRDAQRLSDRWCSGDLEESFVPSAEQRSWRWLTRTRVDLKDKIVVVRNQVEGLLEQGGFKVTAVASDVFGVSGWAMLERIAAGETDVSILVEEARAALKKKKAELREALAGHLDPIYQFLLKQYLDQVRLLRRQIGEINEQLAIAMKDHTTALCRLCQIPGVQMAAAQELLAEIGPRAAAFPSAEQFASWVGACPGCTESAGVCYSHRSAKGNRYLRRLLAQIAWAAIHVKETFFADLFRRLLPKIEGKGAAWAVAHRIGKVIWLVLHKQVAYEERGPVAPTPQTLMRKLHRLTKQFAAQGIDIGSLLAPQVVPAA

SEQ ID NO: 271758 - protein, 370 aa, unidentified
MGKSTPLFIGLDVHKDSIAVAHAQGQSADPPVFLGEIGTRQTDLDKLLRRLRAKTPALVFAYEAGPTGYGVHRYLTGQGVECQVIAPSMIPKKPGDKVKTDRRNAVDLARLLRSGDLTRVYVPTVEDEALRDLCRARDAARLTLKNAKLRLKAFLLRLGLHYVGRADWNAAHLRYLAKVVCPTPAQQIVFQESVRAVDEQVARLQRLEAELLERAPAWRLYPVVQALQALRGVQWLVAITVVAELGDLTRFDSPRQLSAFVGLIPSEYSSGTARRQGGITKAGNGRARRALIEAAWAYRHPAKVSQHIQTRIDALPKPIQDIGWKAQVRLCKRFRRLTARGKHPNVAVTAIARELIAFMWAIAKEVAVTG

SEQ ID NO: 271759 - protein, 349 aa, unidentified
MAVTIVEEARAITGGVDTHADVHVAAALDPIGGLLGVGEFPATAAGYARLLGWLGGFGTVCLVGIEGTGSYGAGLARHVTAAGVRIAGVDRSDRQDRRRQGKSDPLDAVSAARAAQSGRARGASKGRDGSVEAIRALMVAKRSAAGERTRTIGQARALVLTGPDDLRARFAAHTPAALVAGLGSLRPRPGGDVAGHATRVALRELGRRAQFLDSQLERPGELIVPLVTAHAPGLLALYGVGPNTAALLLIAAGDHPGRLRSEAAWAHLCGAAPIPASSGKVTRHRHCPGGDRQANHALWRIVFTRLGSDPATRAYAERRTAEGKSKAEIIRCLKRYVAREVYRYLRPGG

SEQ ID NO: 271760 - protein, 353 aa, unidentified
MSGLDSRIAAIGIDIGKNAFHVVGQDGRGALVLRQKWSRGQVEVRLANLPPCLIGMEACVGAHHLSRKLQVLGHDARLMPAKYVRPYSKGQKNDFRDAEAIAEAVQRPTMKFVATKTAEQLDLQALHRVRERLVGQRTGIINQIRAFLLERGIAVRQGLRFLRAELPTVATRSDALSPRMLRLIEDLADDWRRLDARIEAISGEIEELARKDQACERLMTVPGIGPIISSAMVAAIGTGDAFSKGRDFGAWLGLVPKQISTGDRTILGPISKRGNRYLRALFVQAAWVVLVKLGKKWERYGLRSWIEAAKKRLHRNVLAIALANKLARIAWAVLHRGRAFECAKTDVMAPRSA

SEQ ID NO: 271761 - protein, 334 aa, unidentified
MEEAPSSSSNWAFSLGIDVSKTALELALRDGGKTVAETTFANNSDGHEQLVRWLRDQGAGPEKTGVCMEASGDFEKAIAQRLYEEDYRVSIVNPRRIKGYASSQLQRTKTDSADASLIARFGRREAPRPWEPASASESRLQELTRARQALKKEKTRTQNRLEEAEDEAVRKAHQNLLGEIERQIEDLENEIEEHIEEDSELNNQCSLLETIPGIGLQTSAIVVSELGSPEQFENARQAAAYAGLVPQHRESGTSVRGKPRMSKVGNGRLRRAMYFPAMTALRFNSAVKAFGDRLKERGKEKMVVIGAAMRKLLHICYGVLKSGRPFDASLHPGT

SEQ ID NO: 271762 - protein, 367 aa, unidentified
MKKNSTVKQSPKRARVLARGPITIGVDLGDKSSRYCVLDENGQVQAEGSVATTKKGMAGKFGCLKRCRMVMEVGTHSPWLSRLLSSLGHEVIVANARQVQLISASSRKDDRMDAQTLARLARVDPQLLRPIRHRGEKAQQDLLLIRVRAALVEARTSLVNSARGLAKAMGERLPSCDTDSLGVERLEPLPERLRAQLQPLLRQVESLTKEIQEADRKVEQIARTEYPETQLLRQVSGVGPLIALTFLLTLEDRDRFEKSRDVGCYVGLRPKRSESGESQPQLRITKEGDIYLRKLLVQGAHCILSRRGPDTDLKRWGLRLAERGGKNAKKRAVVAVARKLAVLLHRLWVTAEVYEPLRNSAAKKAAA

SEQ ID NO: 271763 - protein, 389 aa, unidentified
MPEPRFVALDVHKTYVMIGAVNSDQAIVLTPRRVALTSLETWCQKYLDSTDEVVLEATTNAWHIHDMLEPLVARVVVAHPYHVKLIASSFVKTDKRDTLALARLLAANVIPAIWVPPQHVRELRSVVAHYHRLVAQQTAARNRLQAVLHRHNITPPEGGLFTAANRDWWQALALTAVEQLRIQHDLATLEHLALQIAQTKDELAQQSIRDEWLDLTPMLLQIPGVGLIHAMTILSAIGEVTRFPTAKKLVGYAGLGAKVHASGNTYRTGNITKQGRRELRTALIEAAWMAVRYSPLWQARFDKLEKRIGKMKAITAIARKLLIVVWHVLTKQEADRNTTATVTERTLMNWSTRHRLAQQVGLKRTTFVHQRMQAFGVDPPQQRPWQRRC

SEQ ID NO: 271764 - protein, 318 aa, unidentified
MTTDAGPVTGGVDTHGQTHHAALIDGVGRHLGDREFPTTPTGYRALTAWLSSHHHLERVGVEGTGAYGAALTRHLHAHGIAVVEVDRPDRRARRAKGKSDPLDAYAAARAALSGAAAGIPKQRDGRVEAIRALRVARRGAVKARTQAMNQLKALLLTGPAELREQLRHLTEEVRDADTDLTTLVSDAGPQLLALQGFGIDVAGQLLTTAGDNPDRLRSEAAFAHLCGVAPVPASSGRTHRHRLDRGGDRAANNALHTIALCRLRYDPRTHAYVVKRTNDGPSKTEIIHCLKRYIVREIFTALQPLPAPNGLLHVLDTP

SEQ ID NO: 271765 - protein, 333 aa, unidentified
MVALMTVMTAFLGIDVAKLKLDVVLRLGQRAIHQVFANTPDGFAALDAWLLSFGLTASQVRICLEATGSYSDAVALDLFARGYTLSVLNPAVLVDYRRSQNIRSKTDKLDAHLLARYAQEKQPRAYKPLPAEIVTLRALLHHRDDVQQMLRQERNRLEAGRMTAAIKQRVLKHVQDLQSEFKTTEREIKAHFKAYPHLKAIWQRLQTIPGIGWLTAARLLAHLGEIDRFDKVGSLVSLAGLAIKEQSSGSSVRGKAQIDRHGRKDLRQTLYMSALVAKRVSPHMQGWAKRLQAQGKPKKIILIAIMRKLLHIVYGVWKSEQDYQPALAFPVAS

SEQ ID NO: 271766 - protein, 399 aa, unidentified
MFVGWDWASTTHDVTVLNDAGAVVDRWAFRHTEQDLVAALDRLARLAEPAALPVIIERASGLVVERLLAAGHPVVPVHPTAFWAARPRWGASGAKSDPGDSDKLADYLRTDGHRLRRLDPPDLGLQELQALVRLREDHVRARTAASMKLGALLEAHWPGPKAVFFRLASPIALAFLTDYPTPQAAARLGQARMASFCRRHSYRGGKTPAELLARLQSAPTAPVGIPAATLAILVGAQVQLLRTLLGTIAELDVAIAKRVVLHPRAKLLASLPGVGIINLAQLLAEVGPVLDRVANAEQAAAECGAAPVTRASGKTSGVYFRWAANRRARKALTAFAHNARMQSPWAGRLYADARARGKRNPHATRIVARAWLRVIWTCWHTSTPYDPGAHLAEQRLVAT

SEQ ID NO: 271767 - protein, 313 aa, unidentified
MKKTICGVDVSKAKLDVCIEPGHRLASFNNDTAGIAELATFCRKHAVELVVMEASGGYERRAFVGLWEQGISCALTNPRNVRRYAEAMGILEKTDRIDCSVIARFAHAKNLAPTPLPSQAQQRLKTLVTRLKQVTGDLTVQKQRRSGLLDNPEMLASLDEVIALLKRQSRSLEGEIASMIDDDPLWAKLAEAWREVKGVAGRTVARLHAELPEIGLLSNKAAAKLVGLAPIANDSGKRKGKRSTRGDRADVRSILFLVAATAARYHRSLGEFRDRLRKAGKEKMVIRVALARKLLIILNAKARDARAQYANAT

SEQ ID NO: 271768 - protein, 314 aa, unidentified
MQAAVVVGIDVSKRTLEVALSSGEGFRVANNQDGISELLARLRPSGAALVVLEASGGYESPAYLALWAAGIATALINPRDAYHFAQANRQLAKTDSLDARGLCEFGLRMQPDPTPAPQAGDEELKALATRRQQLIKMLAAERTRVQQGPRAVRSSLKRMIRALERELAALDDQIERRLRDNPRLAQRCAQLDQVPGLGPVTCAILISRLPELGQLGPKQIAALVGVAPYDHQSGQWRGRSAIFGGRAEVRSALYMATLSAIRCNPLLRSFYRRLRAAGKPAKVAIIAAMRKLLVILNAMLKTNSPWRPQCATVA

SEQ ID NO: 271769 - protein, 414 aa, unidentified
MSQSSFPMPTPAPLAYVVGIDIGMESCMMCALTMEKRQVIKPSPFANKAEGFSSLFERLECLGASPEQILVGLEATSRYGENLYHVLLKRGYRVCLLHPAQMHAFAQQRGLRAKTDQVDATTIARALLSGEARFGYVPTEQVAIYRELVRLQQQLSEDVVRYKNEIHALLVVLFPEFTQVFADPTRPTALAFLKRYPSAQAVAQAEVSVLSQVLHQLSPKHYGRQTAERLLDVAKKSISSGVAISARSTSLRILCDQLEHTQANLKQLHQEIETLLDQDPKAKGVLLIPEFGVMTVAVLRAELGDLDRFARMDQVVAYVGMDLQVKQSGKWIGQTKLSKRGSGRVRRILYLAALRSIWLPNSPFGAYYHRLVERGMKKGMAVVAVMRKLLIVAAHLILTEEMYEPGKVAALSVR

SEQ ID NO: 271770 - protein, 322 aa, unidentified
MNKYSETFGIDISKDVFDCYGSTQGHLQFKNTESGFKKFQKLLRKDSLVVMEATGYYHYRFAQFLYHQGFLVSVVNPLSVKRFIQMKLAKVKTDKSDAKAICNYGLSQEVPLYNALTEVQSECLQLFRLLDSYLKKRTMTKNKLHGEDVLGIPSKHVYGSLKRNRKHLDTEIASIETKLLSLVKQDQQAQLTLLKSIPGLGVKTALFLIVITDGFTKFETAAQLCSYVGITPTIRQSGSSVRGRSSISKVGNRKLRNLLFLCSFSACKHNKSCREIYERIVNKGKSKKLALIAVANKLLKQAFAIAKSGNPYDETHVSLLSK

SEQ ID NO: 271771 - protein, 406 aa, unidentified
MDVVYSYVCGLDVHKKNIVACTITPEGKEIRTFGTMTDDLLMLMDWLRAKRCTHAAMESTGPYWKPIYNLLELEEIEALVVNAQHIKNVPGRKTDVKDAEWIAGLLRHGLLKGSFIPNREQRELRELIRYRRSLIEERAREVSRIQKVLEGANIKLSSVASNVLGKSGRAMIEAMIAGETDPEALSDLAKRKLKSKKADLKRALNGLMGPHQKLMLGAQLRHVDYLDEEIGRLDEEIKKRMHPFEEELELLDTIPGVARRTAETILAEIGSNMDQYPSAAHLCSWAGLCPGQNESAGKRLSGKTRKGNKKLRSTLVEAAKAAARTKETYLSSQYHRIAARRGANRATVAVAHSILSMVYYILKRKQPYIELGPTYYEERKRDVIIKHSIKKLESLGVSITVNTEAS

SEQ ID NO: 271772 - protein, 351 aa, unidentified
MEEFIAFDSHKRYTLVEREDVETGKTKQLRVEHRPGAIRRCLEGREAGTPVAVEATGNWYWIVDEIEQAGLEPKLVHPRKAKLMMGMINKTDKLDVHGLNRLQRNGTLPTVWIPPRELRDQREITRARMVMATHRTRLKNRIQATLSKYGWTGTEASDPFGKKARKELSHAIAQLPPQTAQITEALLEQLDFVQRQIEEVEKRLRELVQDTLEMNTLRSLPGIGWVLSAVVGLEIGTMGRFGNAERYASYSGTTPRVQASGDKIRYGRLRPDVNHYLRWAYIEAAHSVALHRGTHPLRHVSRLYERIRKRKGHPKAIGAVARHLAESTYHVLTRGEPYRDPILKKGRSREV

SEQ ID NO: 271773 - protein, 407 aa, unidentified
MPRDYIGVDWADTEHAVWVEDESGTQVAALTVPHTAAGLSEFGRWLYERQAQGIECWAAIERPEGRVVDFLLDHGVVVYPVNPKALDRARDRFRMSGTKSDPFDARVLAAFLRTDHPHLRPLRPSSELAQELKLLTRDAQRLIRQQTRLLNQLTATLKEYYPRPLEVLGELTTPLARAFLTAYPSPDALAALSRAQWRRFARTHRLSEARTMALWTALQPPQLPVPAHVVRAKARLVRVLVDELSATVRAVEEYRQAVDDFFATLPAAEWARSLPGGKSGTTVPTLWAELGDAPDRWQSFAHVQAQAGAVPVTARSGKSQHVRFRFACNTHLRAATHTLAFLSLRQSEWARGYYKQYRARGHRHHEALRALGAKWLKIIFVMWMHHTPYDEQYHLANMARQHLRQAA

SEQ ID NO: 271774 - protein, 372 aa, unidentified
MTSIIYVGMDVHTTNYTLCCYSMEDDRFFAEVQVEPDAKNILKYLARIEKQQSRDCRIVCGYEAGCLGYSLYHQLHAHGIDCVILAPTTMMTKPGKRIKTERRDARLISKCLAFHTYSPVYIPTEVDDAVKEYIRMRDDANSALTRVKQQIIAFCIRHGKIHDGKSYWTNKHLEWISSLDLGNKILSEVLQEYLIRYYQLREQVDVYDMRINELAQAEPYRQKVEKLGCFRGIAAHTALSFCVEVGDFRRFATAQQFASYLGLVPGECSSGDKQQYTGITKAGNSHLRKLLVETAQVFGRSATKSRKSVALKERQARCDSLTVAYADKANARLKKKYFKIAMRSKVNIAKTAVAREMACFIWGMMTDNISCA

SEQ ID NO: 271775 - protein, 320 aa, unidentified
MSTTTIERYAGVDVSKARLDVAVRPTGERYSVANDPEGIDTLVGRLKEAGPPKLVVLEATGGFERPAAMALAASGIAVAVVNPRKARDFAKATGTLAKTDRIDAYVLARFAEALKPEPRALPDEEALLLSEILDRRRQLIGMLVAEKNRLAATVCGPVKRRIRSHARWLEKELSRTERELEEAVEASPIWRENEALLRSVPGVGPALSRTLLAELPELGTLTHKRLSALVGVAPFNRDSGRMRGKREVWGGRARVRTALYMSAMVASQHNPLIRQFYERLVKAGKPKKVALVACMRKLLSILNAMMRDRTPWRCIHALTP

SEQ ID NO: 271776 - protein, 437 aa, unidentified
MRRKKNHARKNVNLQVLPVVHPNAAGIDVGAKEHLVAVPCDRDPQPVRTFQAFTPDLHQLAAWLKRCGIETVALESTGVYWISLYEVLEQYGFEIRVVNARHVKHVPGRTKTDVLDCQWIQKLHSFGLLNGSFRPDHQIRKLRTYMRLRDNLVVASTQAVHHMQKALFEMNVQLSNVISDIVGETGLTILEAIIAGQRDPKQLATLCSSRIKASRETVAKSLHGNWDEALLFALKVALETYRFTQTKIQDCDCCVQHHLAQFQSRAEVINSRQNLKTQLHRVCGVDLTKIPGIKEQSAQIIISEVGLDMTKWNTEKQFCSFLGLCPNNSISGGKVLHRATRKVYNRAADTLRLCAQSLTYSKSALGAKYRRLKARLGAPKAIVAMAHHLARLVYRMLRYGQNYVEQGIHQYELKFQLQRIKWLKKEAKSLNLQLVPA

SEQ ID NO: 271777 - protein, 454 aa, unidentified
MSRRPKKKAQSQPVIIQPDSAGIDIGATELFVAVPPDRADESVRSFGAFTEDLHALADWLAQCRIKSVVMESTGVYWIPVFQILETRGFEVCLVNARHVKNVPGRKSDVLDCQWLQYLHTVGLLRGSFRPADQVCALRTYLRHRDMLIKSAARHVQHMQKALTQMNLHLHHVISDLTGVTGLAILDAILGGERDPRKLAALRDRRIKASEATIMKALVGDYRPEHVFTLRQALAIYRHYLAQVQDCDREIERQLGAFESKTSQPAPAAVGRQRKKPERNQPQFDLRSHLHRILGVDLTALPGLSTINVHTLFSEVGGDLSKFPSSKHFASWLGLCPDHRISGGKVLSAHTRKVKSRAAFALRMAAYSAGNSHTHLGDYFRRMRARLGAPKAITATAHKLARIIFHLLTTGQPYDDSVFARNEATYHKRREDNLRKHARDLGFALTPLPASQVVS

SEQ ID NO: 271778 - protein, 358 aa, unidentified
MQSNKKSFKGQKIFVGIDVHAKNWAVETLTESGFIKRHAQEASAKVLFDFLSKHFPDGEYHAVYESGFSGFSTYYQLKEYGINCVVVHAADVPTTQYEQVMKTDKIDAGKLARALRKGEIKPIYVRERENLDDRAVVRLRKTIQKQLSGYKTRVKHLLHTNGVKLPARFDKPGTHWSRAFMNWLKDEVVLLSSTRLSLDLLINQVESIRKNLLEATRGIRKLAASDRYKVNYELLLSIPGIGFNVAMCLLTEIYDFKRFGNENSFAHYLGLIPTCHDTGDKHSTGGKTFRGNKLLGPMIIEACWVAIYKDYGLSQAYCSYKQKMKPQLAIVKVARKMSNIIFSVIKNGKKYEPYKWEE

SEQ ID NO: 271779 - protein, 338 aa, unidentified
MGTYAGIDLHSSNNYIGIMDQNFKRLNGRRLPNNLDSILMMLEPFKAKLKGVIVESTYNWYWLVDGLQEHGHRVHLANPSAIKQYEGIKHTDDKWDSFWLAHMKHLKILPEGYIYPKEQRAVRDLLRRRLFFVRHRTANILSLQSTITRNLGIKMSNNEIKKLDMDDAFDLFDTSNLVLMAQNNISTIKHLDKIIKGIEKEVTSQVKLRKEFLMLTTIPGIGLILGLTIMLEVGELGRFFKVGNYSSYCRCVGSKRLSNGKKKGENNKKNGNKYLAWAYVEAAHFAKRYIPKAQKFYQQKMAKANGAVATKALANKLARASYFIMRDQVPFDEDMLFR

SEQ ID NO: 271780 - protein, 429 aa, unidentified
MRFIGLDVHRDFCEVAIAEGGRVRSAGRIPTRVPALELFALSLARDDSVALEATSGATKIARVIEPHVARVVVANTRKLAAISQAKAKTDRLDARTLARQLAAGYLEEVWAPDERTRVLRRLTARRARLVRARTRAKNEVHGLLARNLCERPPVVHLFSQAGRRWLGQLELPLDEQLTLEGCLRQIDFLQEELQRLEAVLAQQALGSAEIRRLMTIPGVNVHTAAAFMASVGEIQRFSSPRKVVSYLGLDPKVRQSGNEVARHGHISKQGAAEARHMLGEVAWKVSRTPGPLRAFFERVCSRRGPQIAATATARKLAVLFWHLLTRKEDYAFQRPALTRHKIRQLELAAGAKPHKGKKGIAGGKSPKVWDAERELSTQAERAYRRLVSDWRAAGPKKRGAGVPSGRASSSHLLGEETPARQETAPHPAL

SEQ ID NO: 271781 - protein, 461 aa, unidentified
MVRKDDAERAQRRRQLAGLPVIRDKVAGIDLGSERHWVCAPTVAGEGREVASFGATTPELIHMAEWLKARQVESVAMESTGVYWIAPHEVLERQGFALLLVNTRQLAQVPGRDKKTDPTDCEWIQRLHSCGLLRGSFRPEEAICMLRTLVRDKANLVAERGDWVRRMQKSLDQMNVRVHRAVSDIDGETGMAILRAIVGGERDARKLAKLRDRRCSKTEEEIAKELSGHWREDHLFSLQQALKMHEAVQERIAAYEQEIVRKLGEMEREQQKGQTPPSLKNANKAKSIRYRGQEAKRGALYRMSGVDITQIDALGVETVEVVLSEYGPDLSRFPTEKQFISHVTLAPRVAKSGGKPIHKKKKNSASTRVANALRMAAVSLRHSQTALGAYYRRIARRIGGDVAVFATARKLATLIYRLLRWGQPYVDEGAAAFEARYRYQRIERLTATAKELGYQLAPANA

SEQ ID NO: 271782 - protein, 320 aa, unidentified
MSQGYDRFIGIDMGKSSFDVAGLAEGQPGHFDNTAAGRSQLLGLLPPVGTCLIVLEATGGYERDLVGDMVSAGHHVSTANPRQVRDLARALGILAKTDRIDAVVIARFAELVRPLPQEYHRKQEEMRELIVRRRQLIEHRTAEKNRCEQGHSALVRKSLLRSIEAINNDIKQLDKALMELVDSDDEWKNRFDRLKSVPGVGEQTAVTLLAELPELGRLNRQQVAALVGVAPFNRDSGILRGKRAVWGGRAGVRSALYMAALSAKKHNPVISEFAKRLLALGKPAKVVLTACMRKLLVIMNSMLRAQQKWEPRLANAAEAI

SEQ ID NO: 271783 - protein, 340 aa, unidentified
MRLIGCDLHASQQSIAMLDRDTGVVVEKTLMHEGGAVREFYASVPPPVVVGIEATGSMGWFLRLMEELAIECRVGHPTAIRKAETRRQKHDRRDAALLLQLLVEDRFPAIWMPSTEYRDLRSLLLHRHQWVRMRTRVQNALHAIVLAHGVRRGHTLWNRDGQALLASLPLAPYTADRRSELQALYQHLQAHIDRLDEQVKHVADERPRATLLMTHPGVGPVTALATDIFVGDPTRFLDGKALASYVGMIPREYSSGTRQRLGALSKQGNPFLRFLWCEAAAHAVRRDPDLQRFYRRKTVQKGFAKARVAAARKLGIRLWIMLRDQIDYAEFCRRGLARQT

SEQ ID NO: 271784 - protein, 343 aa, unidentified
MKTTTIGIDLAKNVLQVHGADANGKPAIRKQLKRREVMAFFANMEPCLIGMEACGSSHHWARQLQSLGHEVKLISPQFVKPYVKTNKSDVADAEAICEAVSRPTMRFVPIKNVEQQAMLSLHRAREGFIGDRTATANRIRGLMAEFGLIIPQGIGHIRSKIPELIEDATNQLPGMFRALIDQLIDHLKWLDQQIQAIETQIKTWHKNNADSQRLAEIPGIGVTIATALIAMIGDARNFKSGRELAAWIGLVPRQHSTGGKQTLLGISKRGDAYLRKQMIHGARSLAYHTGRKADPGNWLNKLINRRHINVAVVAQANKTARIVWAMLAHGREFRVDYALKTAA

SEQ ID NO: 271785 - protein, 364 aa, unidentified
MKRKVYVGMDVHKETIQIASLTSNTKDLVKEQQIKHEEVQIKKFIQKLKLEKSEIHCCYEAGVTGYPLYRYLKTLGVNCTIVAPGKIPRQSSDKTKTDKRDAIKLARLLRSGELESIHVPSEEDEAVRDYLRSRDSLRLDLGRNRQRLMKFLLRKGIKYSTTKYWTTSHYKWLNNLHFENEILQTTFNDYYSRVRVQEENLKAMDKKIQEIAESEPYREKVGILRCFRGVDYLTAMFLLSEVNDFKRFKTAGSFMSFLGLVPGEYSSGSKRKQTGITKTGSPRLRRILTEAAWQHRFSGTGSKVVVARRVGQSALVVSLAEKASLRLHKKFKNLQLRGKSPQVMITAVSRELSGFLWAAMNLVV

SEQ ID NO: 271786 - protein, 339 aa, unidentified
MQGKVTEKDSAAIEVYAGIDVCKKWLDIAIHPYGPNNAAPPHGARLERCERFENTGKGIKKLMRWLSSYDVALIVMEATGKLHRKAHEMLHHASFAVAIVNPLRSRLFAEAVGKLAKTDKIDAGCLALMAASLKPAAVAPRPELMENLHELLRARQALVDERTAFLNRIAACALAFVKREFTRQQATLAASIARIEKEIARLIKTDPGLERRYKIVLSIPGVGPVAAAALVIELSELGACSAKQAAMLAGLAPIACESGESKGARHIRGRRASVRRGIYRAAVSAISHNKSLKAFYDHLIAAGKLPKVALTAVMRKLVVIANTLITQDRFWQDEAPKGA

SEQ ID NO: 271787 - protein, 401 aa, unidentified
MQENQQHSSVDVFVGVDVGKDHHHAVALDRRGKRLYNKALPNDEAELRALITELKTHGRLLFVVDQPATIGALPVAVARDEGVLVAYRPGLAMRRIADLHAGEAKTDARDAAIIAEAARSMPHTLRSLRLADEPLAELTMLCGFDDDLAAQITQTSNRIRGLLTQIHPALERVLGPRLDHPAVLDLLEQYPSPAELASASEKTLANRLNKLAPRMGKSLASDIVQALSEQAVIVPGTQAATIVMPRLAQQLASLRKQREEVASEVERLVHAHPLWPVLTSMPGVGVRTAARLLTEVAHKAFASAAHLAAYAGLAPVTRRSGSSIRGEHPSRRGNKVLKRALFLSAFAALRDPISRDYYARKVQQGKRHNQALIALARRRCDVLFAMLRDGTLYQPKSAPTA

SEQ ID NO: 271788 - protein, 352 aa, unidentified
MAILAELVDHVIGVDPDRDRVTAAVVCAKTQGELASKTFPATRRGYGQTLRWAQTQTVDDRRAWAIESTGSYGAGLAIVLAEKGEFVIEFDHPGTLASKDGAKSDSLDAVRAARETLGRKTWATPRARGLREGLRTLVVARDSAKLARVAAINVLKAFVVTAPVELREELRGLTRGQLVDRCMRLRPDTAVDPEHAATKLSLRSTASRVKQLTIECRELEDAMVPIVREMCPALLTEPGVGTLVAAQILISWSHPGRCRDESAFARLAGVAPLEATSGQTQTRHRLSRGGDRQLNRALHTVILARAKGHAPTQAYLVRRVSEGKTKREAMRCLKRYYARHLFRLLESTTMPT

SEQ ID NO: 271789 - protein, 335 aa, unidentified
MLYAAIDIHKHAFQASVFEPESGELVEERFSADRESLGWWAEQWEGKVSAVAIEATTGWRWVWRELIARGFDVRLAEPVQARALLGRRRSAKTDRLDARWLARLLAKEMLPASWIPPEEIQQLRDRTRLRKALAEDRRRWGQRLHAFLLHEGWPCSKARLLTPEGMRWAASLRLPAHARLQVDSLLAIIGALEAQLGTVDAELRRFARGDQRCQALQTIYGIGPILACHLLAEIGDACRFRRAEQITRLAGLDPVVDESGETRRRGHLAKAGSPHLRWALVEAAVHANRESAPDVAVYRTTRARRDATVARLTVARKIGKRVYHVLRELELADAA

SEQ ID NO: 271790 - protein, 338 aa, unidentified
MNPSQTVETYELFVGVDIAAKTAMASTLRPGGKTSRSFTIDQTPEGYSSLLHTLQATGHAPSEVLVVMEATGSYWISLATRLVHKGFAVSVINPAQAHHFAKALLKRAKTDAIDAQTLAQLAMVLRPEPWALPPPIYYALQQRLAQRDDLLNLRQQVRNQLHALVQHPEVIAEVRARMESLLATFEAQLAEVESEITAALSQDSAWAAAAERLQSIKGVGWVTAAWTLVTTLNFSSCDTIDALTAYAGLAPMPRQSGSSVWHRPSIGHTGNGRLRTALYMATLSSAQHNPVIKAFYTRLREAGKPEKVARCAAARKLLHIAWAVVKKDQPFDPNYALG

SEQ ID NO: 271791 - protein, 340 aa, unidentified
MHVSKKNYLGIDVSKPWFDVSLLSVVDNQKQLMITERFDNTTSGMKDFKKWLACHDVNFDTNSLLVIENTGVYHRLIWSFCSKHQLQLHIGNAAHIKWSLGITRGKSDKIDSQRLCTYCFKQADELQATPALNPIFMKLKDLMTSRSRLVTQLHSTKNYIKEIQCTDDKILLAMLDKAHKAASEGIKKSILQVEELINKIIHEDQAIYNNYQLIKSVPGIGHLTAVYIICCTNNFAANPSGKQLASYAGVVPFEHSSGISIKGKSRVHKMANKDLKKMLHLCALTAIKYCPEFRQYFERKKAEGKNGMLVVNAVRNKLVLRVVAVVKNQKPYVENFQIAA

SEQ ID NO: 271792 - protein, 347 aa, unidentified
MKDTMIGVDLAKRVFQLHGAAMTGAVKFRKKLTRDQFRVFMAAQPAALVVFEACGSASYWAREMEALGHEVRLIAPQYVRPFLKRQKNDAADAEAIVIAARQPEMRFVAPKTADQQAKAVLFRGRERLVHQRTELVNALRAVLYEYGHVFPVGICHLKRMEAALEDSHCDLPALVIAECQDLLAQIAEKTERIEAKTKTLKALAAETDTARRLQTMPGVGPLTAMAVEAFAPDMAQFKSGRDFAAWLGLVPRQHSTGGKARLGRISKAGQSDIRRLLIIGAMTRIMGRARHKVPADSWIGRKLASKPTTLTSLLRLLAVAYIGQAGEPARQRLSVISEINEEIDLFD

SEQ ID NO: 271793 - protein, 350 aa, unidentified
MEYIAFDSHKRYTFASVEEHTGAILRDTRIEHQRGAVTEFLSAWKAGTPVAVETIGNWYWIVDEIEKAGMVPQLVHARRAKMMLASVNKTDKLDCHGLNRLQRTGTLPTVWIPPAQIRDLRDLPRTRMVLSKERTRLKNRIHATLAKYAISIEGTSDLFGKRGREELKKSLYLLPPHSRFSVERLLETLELVQRQIDLFEERMKETFATSRELEILQTLPGVGFILAVVIFLEVGDIGRFPGASRFAAYSGTTPRVTSSGGKTRYGQLRPDVNRYLKWAFIEAGNVVCLFHRRRPYRHVSRLYLRIRQRKGHQKAVGAVARHLAEATYWILKKGEAYREPQKKTVSSTKG

SEQ ID NO: 271794 - protein, 309 aa, unidentified
MNTQNKNIIAIDIAKSTLQVQTENSSFVIGNDKGGFKRLDKQLSKLSKPHVVCEATGGYERPLVRHLFEQEVSVSVVNPSTVRAFAKGEGIKAKTDPIDAKMLLKYGQTRELKPSSRPDPAREELAALMDRRSQLSGSLTREKNRLDKDPAFTRKLIEKSVRFLEKQIKEVDKRIEGILASNDSLTKLVDRMTEVKGVGKTTALTILAYLPDLDSLSRGQMVSLSGLAPFNRESGKTRSRAFIQGGRAKVRKCLYMAAQSAAQHNDVIKTYVTRLMDSGQPYKSALVAAMRKILICLRSLLINPKFRLA

SEQ ID NO: 271795 - protein, 344 aa, unidentified
MANLNQFCDFMNLIGIDIAKSVFQIYSCDTQTGEITNVQVKRDKVLESFANCGKCLIGMEACGSSKYWARKLQALGHTVRLMDPKLVKPFVRHNKSDKADAEGIYHALVSGVRSVAVKTETERDIQTLLTMRALLVKQRTARINHVRGLLAEYGHVMPKSVDQFDKKVDECINSLEGDAVQLVIDMLRDTIKSIRDEHDRIKTLQREISRLASQTKNAKHFLTVPGIGETIMAYMCVLLADPTQFSSGRQFAAYLGLVPMHTGSGGKTVTTKIPGRCDKALRALLVQGAHAVARSKYRTDWVKNILAKKPKKVAMVAIANRMARQCWAVASKGQDWRRMPVTVA

SEQ ID NO: 271796 - protein, 355 aa, unidentified
MNQEKYIGMDVHQATISVAVRDSSGKLIMECILETKAATILEFIAGLRGKLSVTFEEGTSAAWLHDLLKPHVSHLVVCDPRRNALLKDGSKSDRIDARKLAELLHGNQLHAVYHAEHGVRTLKELGRSYLTITKDLARVMSRIKALYRSWAIPCSGATVYAPRHRAEWLAKILEPGVRLRAERLYQQLDLLQPVRQEARRDLLVESHKHHAVKLLRQIPSIGPIRAALLVALLQTPNRFRTKRQLWAYSGFAVETHDSGEYRLVRGKLRRNRERITVRGLNHNHNHDLKNLFKGAAISASTRPGPLCDFYVALVEKGMRPTMARLTLARKMAAITLTIWKKGVEFDAKQLNRQAA

SEQ ID NO: 271797 - protein, 396 aa, unidentified
MGTVGIDIGGRVHVAARCREGETKADRSVLRISQSRAGFTALDDWLDAGPEPVELVVMESSGHYWMPLASHLRRRGIPVAVVNPLAAKYFAKSRLGRTKSDPADARSLAEMAMRDTPPARDPLVGVELRQAARFAMTLVTEQAKVCQRLYRLVELGFPELRELFDDPTCRTARAVLRVAPTARAATRRRTETLANANKGRGQRRLGETRAELLQGAATETIAVPELDAETAFEIGLLLDQYDLLEAQIEGADRRVAGLLDGEIARRLLTIPGVGPATAATLIAEIGDIGRFTDFDQLLAYAGVHPAERSSGTKGARPGTSWHMSKVGNSHLRAAAYRMAVVGVQHNPVIAAHYARKRAAGKSPMNALGHCMRKALSIVWGVWRNGQDFDPDWGAEA

SEQ ID NO: 271798 - protein, 407 aa, unidentified
MRLFVGDDWAEDHHDVELMDEQGRVLARKRLPEGVAGMARLHELIGEQLGEDADDAEVIIGTGTDRGPWVAALVAAGYTVYGVNPLPASRFRERHGVSGAKSDTGDAHMLTDMVRTDSHQLRAVAGDSPGTGAVKVVARTHKTLIWERTRQVQRLRHQLREYFPAALGAFEDLDAPDALELLARAPDPARAAKLTRAQISAALKRARRRDIPGKTTVIMAALRGAQLGQPPAITAAYAATVRSLIAVITTLNEQVKILQRQVAAHFGQHPDAEIYLSQPGLGPVVGARVLGEFGDDPHRYASGKARKDYAGTSPITRASGKKKMVMARFIRNDRLIDALMAQALSALGSSPGARAFYDAQRAAGVEHNAALRKLANRLVGILHGCLKTRTLYDESTAWSHRENKRAA

SEQ ID NO: 271799 - protein, 394 aa, unidentified
MKLVGIDVGKNSHHFCVMDKETGEFNVTPTSFSNNKEGFDFLINSLKPYSKKSILLGMEDTGHYHVALLKFLLSNGYTVALINPKTTDLTRKMEGGITKNDKLDTITICDVLDTPERKKQYRITKVDRFDLYEQRQLTRHHHDLKEELNVYCNRLQKSIDLVFPEFNTLFSSKYSIVYMNLLKTFGSAEAIASTDIRTIRKCFEIKGRGNRISLTPEKLKECAKNSIGISSEVETIQIKHLVSQIMLIKEQIAEIDKKIEEFSITNNSPILSIPGISHFSGTSILAELGDIGNYSKPSQIIKFAGVAPYHYESSQYNAQHTGITKKGSKYLRKTLYQIILPVINNNPVFKKYYRLKISQGKGHRCAQGHCIRKLLRIIYHLLETGQSFDPALLR

SEQ ID NO: 271800 - protein, 315 aa, unidentified
MHNTWVGIDVAKDSLEVFVGPSRRFAIENTSDGLAQLVKELCLLDGAHVIFEATGGFEVRLSEALAGAKIKFTRTNPRQVRDFAKALNRLAKTDRIDAELLAEFGRRLEPPPTVLPDDVSRLLHDLVSRRRQLVDMRSMEQMRLKQARVKRLVQSLERTIAFLSKQIDSLDTDIEKTCKTLPEFKVRDEALRTIKGVGPVTRSTLYALVPELGHISGKQVASLIGVAPFNDDSGKGERRRRIRGGRRDVREVLYMAAMSARLHDATIRTFYDRLLAAGKNHHVAIVACMRKLVVTLNARVRDALRPTPQISASGA

SEQ ID NO: 271801 - protein, 431 aa, unidentified
MSHNTTANPTAPSGPAAAAPAPTPVAWIGLDWGHHTHAFVLQDGAGPPEEGTLPHTAESLHAWLRDLEKRFGGRSVALAIEASRGAVIHALVQYPWLTIYPINPVTSARYRSAFTPSGASDDLPDARVLLELARDHAAKLRPLETQDPQTLKLAGLVEARRDTVDRRTQVLNQLTSLLRAYYPQALQLVGELDTELAVNFLSRWPDLIALKATKPGVLKRFYYAHHLRRPELLEQRLKFIQGAVALTTEEARVSVAVLQLRCLLDQLRAFRKHVAILDVEIKTVFAGHPEAALFRDLPGAGPALAPRLCVAFGTIRSLYPDPASLQKHAGVAPVREKSGQSLWTHWRWLAPVFLRQSLVEWAGQTVRYSAWAKIYYERMQAKGKGHHAILRALAFKWIRVLWKCWQTRTPYDEARYLKQLLHRKSPNALAA

SEQ ID NO: 271802 - protein, 381 aa, unidentified
MQVLGVDPHKGSHTAAAVAPDGTVLGRTRVVSNRRQVHRLLAWAAPWPERVWAVEGATGVGRLLAQQLVAAGETVLDVPAALATRVRVLSGQSGRKTDAHDAVAVATAAIHHPRLRAVQAEDHSGVLRLLSVRRTQLTASRTQAVSRLHGLLAELIPGGAPRNLDADHAAVLLRSIRPSTAVDATRKALARDLVDDVRRIDRKLDANKADIVEAVKASGTTLTEIQGIAEITAAKILGQTGRIDRFEDRAHYASYAGVAPIEASSGAVSRHRLSRRGNRQLNSAMHGIAITQATHPGRGREFYLRKRDEGKTEGEARRALKRHIIDLVFVTITADTERAQRSPGRQVGATHESSAAGQSPTANTSERSVPGLRKQTTPRVA

SEQ ID NO: 271803 - protein, 402 aa, unidentified
MRYIGLDVGRDFAHAAVVEGTGSARKLGRLRMGEELAAFAATLGPDDAVALEASGNTWALVELLGRHAGRVVVSNPLRTRAIADAKRKTDDIDAATLAELLAADYLPAVWIPDEATRRLRRIVAHRAGLVRDRTATRNRVSAILGRRLVRSPLSDPFGSRGRAWLAALELPPDERLALDSALRLNAVLDAEVDLADRAIATALIDDPRVRHLLTIPGIGLVTAAGILAVVGDIGRFPRPAKLVSYLGLDPKVRQSGDRPAHPGHISRAGQAHARGLVTEAAHAAVRAPGPLATFFLRLRARRGGGIAIVAVARKLAVLVWHLLTKDEDYRDARPDLVRAKQRALGRLAGRATARTRPSHRGATGSSHDQGRARLRGGDDPHHPALRHAIDRVQLDDTPVPGA

SEQ ID NO: 271804 - protein, 424 aa, unidentified
MSVNNIHPSRPAPLSNPGPGDLAREGVTAGVDWASTEHAVAVVDQQGVELRRATVPHTKAGLSQLVGMLNRAGVREIGIERGDGPMVDALLEAGFVVFVIAPNQVRNLRRRYGAAGNKDDHFDAYVLADTVRTDRHRLTPLAPDTPPTVTLRMSVRARQDLVAARVAMANQLRAHLAIVLPGAIGLFRDIDSAITLAFLTRFPTQAKVNWLTPRRLENWLRSQRYPNPRRAELLHAHLAGAARGTTDPQADTRAHITAALVAGLQSLRTQIAALEDDIGQQLLIHPDAQIFTSLPKAGTMRAARLLAEIGDCRSRFPTPQALTSLAGATPSTRQSGKVTVVGFRWAVDKQLRGAVMDFAGDSHHANPWAADLYWKARHRGKDHSHATRILARAWLLVIWRCWQDHEAYDPARHRAYQALQNTVA

SEQ ID NO: 271805 - protein, 338 aa, unidentified
MRTTYIGMDIHKNFIQAAAMDKHGNILKEQKFKSDINGIREFVNGLDSENIKAAIEATCTWYHVYETLNSLGVDTTLVNVRRTKVIAESKIKTDPLDARNIAHCLRTGFIATAYIPPKEVIEQRDILRHSISLRKDINRYKNKIHAILLRNGIKHRFSDLFGAEGMRFLRNLKLKESEQYRLNSYLTIVEALLQERRQTQEKIETLCKGNDQAMLLTSIPGISYYSAMVILTEIGEFPRFSNPKKLCNYAGLAPRTIQSGNHVHHGKILKECNQHIKWILVQSAHVHIRYCQNSSITRLYNRVMKKKGKAKATVAASRKMLTIMWHMQMKGERFKYSD

SEQ ID NO: 271806 - protein, 313 aa, unidentified
MISENKCFVGIDVSKNHLDVCILPDNQSLRVSNNSEGHKKLCRNLKKVKPLVIVLEGTGGYEKPIAMAMAQQDLPVAVVNPRQVRDYAKAMNVLAKTDQIDAQVIARFAEAIKPEPRFVADEQRVVFEELITRREQLIKMRTAESNRLDRTHSLEVKNSIEAVLELIESQLQDLDAQTESAVKNSPIWRTKDNLLQSVPGVGPVTARIILAQLPELGKLNRREIASLVGVSPFNNDSGLTKNKRMIKGGRGLLRHKLYMATLVATQHNPTIQIFYNRLLSNGKAKKLAITACSRKLLIILNVMMKNDTSWNCA

SEQ ID NO: 271807 - protein, 355 aa, unidentified
MNDAKYIGLDVHQATISATVLDAKGKLVMEAILETKAETVLQLIHGLRGSLHVTFEEGTSAAWLYTLIKPHVTRVLVCDPRKNALLKVGNKSDRIDAHKLAELLRSNLLRPVFHDDTGLRTLREMARSYLTITKDVTRVMRRLKAIYRSWAIPCGGQQVYSPRYRAEWLGKISEASVRRRAELYYQQLDALVYLHRQAKKELLAEGRKHQATKLLRQIPSIGPIRSVLLVALLQTPHRFRTKRQLWSYSGLALETRNSGEYRFQDGQLKRSKKVFAIRGLNKNHNHDLKNVFKGAAIRAAAIEGPFQKFYEALVAKGMKPAMARLTLARKIAAITLIVWKKGARFDAEHLKQQAA

SEQ ID NO: 271808 - protein, 316 aa, unidentified
MNCFVGIDVSKAQLDVVFRPSGEGTQVGNSDQGIAELVTRLQQDAVTLVVLEATGGYQAALVAALGLAKIPTAVVNPRQVRDFAKATGRLAKTDSLDAGVLAHFAEVIRPEPKPLVDEETIALEALMGRRRQVVGMITAERNRLAQAHKSLRGSIKAHINFLQRELQDMHRDLDGMLRKSSLWREQEDLLRSVPGVGRVMAATLLAQLPELGKLNRKQIAALVGVAPLNRDSGTYRGKRMIWGGRASVRAALYMAALVASRHNPTIRSFYERLCAAGKAKKLALTACMRKLLTMLNAMARSKTTWRSLPASAQDSC

SEQ ID NO: 271809 - protein, 475 aa, unidentified
MRTIGIDLSAKGEHKAVVVDERGRFVSPILHFRTDAASLRRLLEMAQEGNPDRQLQAVMEPTGMAWFPVAVFLIRQNVIVYLVNSQQVADLRKYYKKHAKSDRVDARVLAKLPIVDEEKLHRLELPDPGALACQRGCKQLDRLMKQRTACKNRLIALDRFAWPGLDETVFADPFSPAAFWFRQHWYDPLQVQQAGAETIRQEWLESGLDPQDSGDWAAFLVQLAEKTLSIYGQEGDFLDYELLQAEAIREQEYLAFVDKMHQSLQLKTVRPLYRQLHPSRNLETIPGVGQDGAAVYVSFIGNPGRFGSLRELRGWSGMVPNSKQSSESQASGLRITQAGPSLIKKFAFLDAEAARQCDPQIAALYYDQMVHRGKHHIQAICTCSAHLLDRVGVVLRENRPYELKDVDGTPLSKQQARKIITERYTVPDEVRRRNSKRKHREQVEQRAEKKQKEEKPHQLDFPGSMPQVSQVRGKP

SEQ ID NO: 271810 - protein, 404 aa, unidentified
MEVLYKRCCGIDIHKNMMVACIFTSVRKKEIRQFSTMTEDILQLVSWLKETDCEMAAMESTGSYWKPVYNIFEEEQIPIMVVNAQHIKGVPGRKTDVKDAEWIADLVRHGLVKASYIPNRDQRELREITRYRQEVIEERARELNRIQAVLEGCNVKLSSVITDISGKSGMTILKAIVSGETDPVVLSELAEGRARDKIPEMQKSLQGRISEHQQKMLKHQLGNIESLTALIMDLDADIKKTESINWAIEALDDMPGIGRKSAERILAETGVEMEHFQNESRFSSWAGLVPECKESAGKKMSTRIRKGNKYLKATLVECARAGIRNKQSYLYSRYQRIAARRGGKRALIAVAHTMLIAIYHILKEKVPYHDLGADYYSVINQEKIINRNIRTLEKLGVNVMIQPK

SEQ ID NO: 271811 - protein, 367 aa, unidentified
MNQSIVVGLDVHAESITAAILDGDSQEAQVMTLSGDLMKVRKLFRRLAEKGPVRACYEASGAGFVLQRVLTNDGFHCDVIAPSLIPRRPGDRRKTDRLDAIMLARLYRSGHLTPVHIPSEDHEALRRLLRLRYTYHAYCTATKHRLSGILRNHGYVFREGKSTWTKKHRLWLAELRHTLEGPLQTAIAIELEHFEYLETQTRALDTELEHCARLEPYRQRAEALCCLRGVKTLTALTMLLEIDDIRRFPSPRGLMAYFGLVPSEHSSGDRERRGSITKAGNIHARRLLVEAAWNNRYRAGAALILNRRRQGQPPYIVAIALKAQHRLYKKFSHLDQRKHRHVAITAVARELCGFIWAILNAVPQPQN

SEQ ID NO: 271812 - protein, 341 aa, unidentified
MQRTNYFIGIDIAADTFSASTISNPENVIFFKNDISNTYDGFEQLHQQIIQHNIPAKETIICLEATGVYAEKLCYYFASKSYRICVEDPHKVNHATKDSPRKNDHIDAQRIAEYAYRYIDKLTLWQPRAEILEQIKVLLSTREHISQQLIGNQNALKALNRKYYQTPLANKVYEETITKLKEHIKEIDKEIKSLTDKDDSFHQYVNLAKSVPGVGLLLAANLLVLTNGFTEKVDYKKIASYTGICPYEQQSGSSLNKKPRSKRCGPQKLRKLLYLASLSVRTHNLAFKKYFLRRVQEGKPTRLILNNIANKILKITCAVINSKTSFINNYQSVNPMLLKTA

SEQ ID NO: 271813 - protein, 323 aa, unidentified
MPHVTSIGLDVHARSVAAAAFNPFTGEVVHRDFGTDAAEIAEWALGFEEPRGCYESGPTGFHMARELRALGLDCAVAAVSKMQRPAADARRKNDRRDAEFIARMLATHNIVEVPLPDAAVEAARDLDRALDDATVEYRRARQRLNMFLIRLGHVWDERNADGTRKGSWTRAHWRWISGIRLEGPQRDVLEYYVTAARCAESDRRQLEKKVLALARTDRWRPAVEALSCIKGIDTLTAFRLAAEAGSFTRFRTAPAFASWCGLVPSERSSGETERRGGITKTGNRLASVSVNLFFTSFAKQARRSRKGGFTGCANVFSPIPVTA

SEQ ID NO: 271814 - protein, 349 aa, unidentified
MNTVKQSIGIDISKDTFTACGCTHTFNGETTFTQVHSFTNDSRGFNQLMRWSKSVVLKDSPLVFLMEATGVYYERLAHHLYKINKQVIVVLPNMSKHYFSSLNVKSKTDEIDARVLSRFAVERTHRLWQPPKPIYIELRNLTRYLVQLNEQRTALSNIKHSKEAANEVQQFVLKSNQTLVEQIDKQIEKCKVEIEKFIQKDKDLAERVSNLMTIKGVGLITIATIIAETLGFERFKSAKQLVSFAGYDVVQRESGTSIKGKTRISKKGNRYIRNALYFPAMVATRFNPVMKANYLRIIQQKPSKMIGQVAIQRKLLTLIYTLWKANIPFNPDYNKVASPVKAEATLDAQ

SEQ ID NO: 271815 - protein, 355 aa, unidentified
MLYLGIDQHARQITISLRDDHGDVLLARQVSTHPEKIQAFFQQLTRERLRADESFVAVLEVCGFNDWLIQMLHDYRCHKVILIQPEDRKLRKTDRRDAAGLSELLWVNRERLLQGKPVRGLRQVDIARTADQENRRLTTLRKDAGQARTRLVNKIRHILRRHNLQWQMPTKKFPSKSGLAWLKQLVLPTIDHLELKHLLADLEQLQERRQELEQVIAERCGVSAEAVLLATMPGVSYFTAVSLACRVGRVERFPRAHSLANYWGLTPGCRNSGENNQRLGSITKAGSSMARWLLAQMTVNVLRRDARLREWFKRLKRRRGASIARVAVMRKLATIIWHMLRKRKSFAECRAPAAA

SEQ ID NO: 271816 - protein, 339 aa, unidentified
MYNAVGIDVSKGKSTVAVLQPGGTVIRKTFDVSHTSQNLNELADYLSSLDGTTKIVMECAGRYHEPMVKALSEAGLFISIVNPHLIKNFGNNSLRKVKSDPADARYTLDNWTELRQYSGMDNTRTQLKTLNSQFSFFMKQKVAAKANLIALLDNTYPGVNKLFDSPTREDGSEKWVDYAYSFWHADCVRKIGLKAFTERYMSFCKKHHYIFQQDRPEKLFNASKELVAVFPKEKTYKLLIQQSIQQLNLASEHVERFRREMNELASTLPEYSTVMGIYGVGKTYGPQLIAEIGDVSRFTHREALTAFAGVGPGVDESGQHKSKSNRASKVGSARHCFRS

SEQ ID NO: 271817 - protein, 467 aa, unidentified
MLKEINIHVGAIDVGSECLHVAIYNGPVRVFRTFTCELYQVVDFLKEHAVKSVAMEATGVYWIALHDLLEASGLQSVVVNGAHVKNLPGRKSDMSDPQWLAELHAHGLLNAGFIPQEAVRRLRDYERLRQDHVQMGSTHVLHMQKALDRMNIKIHEVISQLTGWSGQRIIGAILAGQRDPEKLADLCDQQILQKKRPRVIESLRGFWHPQQLFALRQAWEGWQFYQKQIQACDQEIAQALAAVPAAPPQSPPEPPSANLSKPAPKSDAKPKEMPLTLKANGPKRMHHNGPQIAQLHQILKVLCGGQSAADLPTLTDYTVLQIIAETGTDMTRWPTVKHFTAWLGLAPSSRQSGKRRKPEKRFRGRAGRLFCVAARSLARSKYLALAGFYRRIRATRGGQVANIASARKVAQLFYCTLRYGMNYVEHGLQQYDAKYRAQSIKRLQAVARRFGLTVIPPQNPAPMAPSA

SEQ ID NO: 271818 - protein, 409 aa, unidentified
MGRMKGKRSASSIVGCVPKCAEPHAETPEGVLPQTFRGGRPVSKTITSFVGLDVHKDSTAIAEAEAGRETPRFVGTVGPDLGQLLKALKSLGKPETMLVAYEAGPCGYGLARQLRSRGYGCEVVAAGKIARRPGERIKTDRRDALTLARLARSGDLVKVMVPDERDEAMRDLSRAREDAVRARLKARQQLKALLLRHGHRYSGKSSWTLAHERYLARVSFAHPAQDIVFAEYRQAVREGHERVERLTEALRTQTEHWRLKPLVAALSSLRGIDFVAAVTFAAEIGDFGRFAHPTELMGFLGLVPSEYSTGDTRRQGDITKTGNSHARRVLVEAAWNYRFPARLSRILQTRQEGQPKAVRDIAWRAQLRLAHRYRRLSSRKLHPNKICVAIARELAGFLWDIAQQVQVPT

SEQ ID NO: 271819 - protein, 432 aa, unidentified
MISVSPPLAPENSVFAAFVGLDWADQKHDLVLYDQRGGRPEHRELIQTAEAIDEWACGLRQRFGGRPIAVCFEQSRGGIAYALLKYDFLVLFPLPPARLASYRESFSNSGAKNDPTDAALLVDYLLRHRDQLRVWQPDTPATRELQLLAEARRDAVDQRTRLSNQLTAVLKRYFPQALVLVGNDADSPLACDFLSKWPTLTAVQAAAPATLRKFYYAHHSRNEERIAERLELIKSAIPLTTDRALIQAGLLQVQCLVGQLRALAKAIQRYEERLHDLLDTHPDAALFLTLPGAGPALAPRLLVAFGTDRERFQSAAELQSLSGVAPVTKRSGKQCGVHRRTACPKFLLQTFHEFAHCSCKRSAWAKAFYLQQRSNGKGHHAALRTLAFKWIRILFRCWKTKIPYSEERYLESLRCRNAPLLTFLPATETTSA

SEQ ID NO: 271820 - protein, 342 aa, unidentified
MTAIGIDTHKATLAACAIDELGRAIGEATFANDPAGHDAFIAWARLTAPEATIGVEGSSSFGAPLARSVQLAGLAVREVPPHLSRAERRRTRRPGKSDPGDALAIARVTARETNLPPIRLSDRTSELHLLLEAREDLIGEATRARNRLHAHLLVLAPGYGGTVANLVAVRHRATVGRLLRGNHTVQAELARALLTRLPRLERETAALTRRIGALVEGHPLLGLPGAGPITVARLIAEVGDVRRFRSPDALAALAGVAPIPASSGQTQRMRLNRGGNRQLNRALYVIAVSQSRFHPPAKAYVTRRMETDGKTWREAIRALKRQLVRPVFKLLVEGAEVLRAAA

SEQ ID NO: 271821 - protein, 368 aa, unidentified
MKKTAYVGIDYHISKLTIAVMIEGEKDFNSTIHLENKTKLIANYLKKLSEQFQLKICYEASGSGYHFQRLLQSWSYHCDVIAPSLIPKKAGDRRKNDFRDARELSRNYASGQLTVVHPPTQYEEAVRSVVRCRLDFKENEKRTKQHINSLLIPQGQHWQKSKWTLQHRKWIQQQSFSEPLLQDVLQENLAHLEYLETCTARLDQQIEKIAATDIYAPSVKKLRALKGLGTLSAMLLIAEITDFRRFASPRALMSFLGLIPSEDSSGVKSRFGSITKAGNRRCRTQLIESVRHYIKQPRMSRQMKADCAQVDPVSSGKVQKCMQRLHKRYWALPMKGKIRNVALVAIAREFVGFIWALMTHDDTAAETA

SEQ ID NO: 271822 - protein, 351 aa, unidentified
MPHKLNSAIAVIGIDIGKNSFHVVGHDKRGAIMLRQKWSRGQVEARLANLPPCLIGMEACVGAHHLSRKLQMLGHDARLMPAKYVRPYSKGQKNDFRDAEAITEAVQRPTMKFVATKTAEQLDLQALHRVRERLVSQRTGIINQIRAFLLERGVAVRQGLRFLRNELPHILAAPCDALSPRMLRVIEDLAGDWRRLDERIEGLSSEIEALARQDKGCERLMTVPGIGPIISSAMVAAIGTVDAFSKGRDFGAWLGLVPKQISTGDRTILGSISKRGNRYLRALFVQAAWVVLVKVGPKHWARYGLKSWIEAAKKRLHHNVLAIALANKLARIAWSVLAHGRTFEASKIQAA

SEQ ID NO: 271823 - protein, 369 aa, unidentified
MADRITYVGLDVHKEGIVVAVAAGGLRGEVREYGRIANTPAALDRLLGKLGGDGMKLRFCYEAGPCGYGIQRQVSATGHECVVVAPSLIPKRPGDRVKTDRRDAASLAKLHRAGELTAVWVPVARHEAMRDLVRARLDAVHNLRRARQQLSGFLLRQGCHYGRPAWTKLHRRWLAGLKFEQVVHHLVLEDYIQAVEASEARRDRLTAQIEAMLPDWMLAPVVAALQTMRGMALVNAATLIAELGDLSRFANPRQLMAYLGLVPSEHSSGASVRRGGITKAGNGAARRLLIEAAWSYRFPARISRELLLRQENQPRPIRDIAWKGQVRLCARYRRLARTGKPANVVTTAIARELTGFVWAIARQVTVTPS

SEQ ID NO: 271824 - protein, 388 aa, unidentified
MQTVADRPEAPTAIRTDLGAIFVSLELSRSTWLITSLSPGGGEKMSKQVVRGGDVAGLLERFARLREKARARTGKVFPFVVIQEAGLDGFWIDRALQNEGIESHVVDPASIATSRRRRRAKTDGIDGEVLVRALLAYKRGEPRVCAMIKAPTPEEEDRRRLCRERKVLIVERVRHVNRVKGLLFSQGISGYEPLRRDRRRRLDTLQTGDGRLLPVHLKAQVCRELDRLELLLEQIKAVEAERDVLLAAQQVAAPAPAAMLLDIKGIGPEFAAILWSEGLFRHFDNRRQVASYAGLAPTPWQSGSVDREQGVSKTGNPRLRTTLIQLAWLWLRHQPQSALTLWFEERVRRNGGRLKKTTIVALARKLLVALWKYVTAGVVIEGAVMKHT

SEQ ID NO: 271825 - protein, 450 aa, unidentified
MSRMPQVIIDQDHERVHDRVAAVDVAKDSGVVCTRTPHPSRPGARASTIWTVQARTGAVRALGARLKADGIELVTLESTSDYWRIWFFVLEACGLAVQLVNAAQARHVPGRPKTDKLDAQWLARLTEMGLLRACFVPPKPIRDLRDYTRARARLTRERTRCWQRLEKLLEGALIKVSAVASKLTTVSARDMITAMIAGQRDPRVLAGLARGRMKARHDDLAAALDGMFDDHHGELAGMLLDQIAFLDQRITTLAARAAQLTAAMPAAWGTDPDGTTGPAAGAAPGAPVLNAVARLAEIPGISQDLARAIIAETGLDMTRFPTAGHLVSWAGLCPSARQSGPRTRPGAKGRGDTWLRGSLGQAATGAARTATFLGERHARIARRRGKAKAQVATARSILVIIWHLLADPQARYTDLGHGYYQARTDADRKIRNHIRQLHALGFDVTLTKTP

SEQ ID NO: 271826 - protein, 348 aa, unidentified
MLIIGCDFHSRFQQIAMLDSQTGEIVERRLEHETGEARTFYAGLPAPARVGMEATGYAHWFQRMLVQQGHELWVGDAAEIRARMIRKQKTDKRDAAHLLRLLLENRFPRIWIPSPAERDLRQLLRHRFKLICLRSSVKNQLHALAMGEGVCRKKKLWAPTGRKELEGLALGPWGNRRRQELLEILDRLNPPIEELNQAVEQEAEKCPRAAHLMKQTGVGPVTALAFVLTLGPVNRFQKSKQVVSYLGLNPSEESSGGRRRLGAISKQGNSMMRHLLGEAAQTASRFDPELRRVYRRLKFRRGSAIAKVAIARKLAVRLFWNLREQSSSVPPARMQGSSKIPLMGVSPS

SEQ ID NO: 271827 - protein, 345 aa, unidentified
MNKVIAGLDLHSNNVVVGIMDMDGKRVASRRLPCDLKDVAGFLKPFKKRLELAAVESTFNWYWLVDGLRALGYPVVLANPAAMAQYSGVKHADDEHDAFFLTELARLKVLPTGHIYDPQLRPVRDLLRRRLMLVHQRTSLMLSFKSLYARTLGQELSLGELRKLTVEQAQQVYQHPANQLIAGMQMQQIEHLTQSIEKIEKGVLACACELPYYCRLETLPGVGKILGMTITMEVGDIKRFAGPGNFASYCRAVKAERTSNHKKKAENNSKCGNKYLAWAFVEAANFARRYDGQCRKWFDKKAAKTSNIIATKALACKLAKAAWYLMAEDAPYSAQRMFGQPPTTQ

SEQ ID NO: 271828 - protein, 406 aa, unidentified
MEGPIITVDVSKGSCHYQPFIENGHPMRKPKQLSATIDGFQKLGQTIKDLEAKTEREDIPVIFEATGVYHRPLQKYLEDHKIRYYIISPLLSATYRKTDLHSNKTDALDCAHIAKAYYCEKELRQYQAQQQEYKRLYQLSRIYESELVHLRKRKVSLRSMLDIIYPRIDKTFKGNQNLYDPIPMEILKRYPHPSLLLSHREDTIVKTVGHRTGHLKGYTERIVHKIYEKAKECYSGCEINDIEVLKLPNLIENVQEQKKKCDSLLKEMIEIARTCPYFASVVSIVGIGENLAARIIAELGDVNRFDNRAAIVAYAGLNPKIQQSGDIDGLHLKISKKGNKHLRCLLYLGAQCNYRLRKEDPLYEFTKKKRQQTQCPLSSKAAYTASAHKLLVIIYSLCKNGTLYHS

SEQ ID NO: 271829 - protein, 331 aa, unidentified
MRINQTIGIDISKLKFDVRIHSNQMFNVFTNNQKGFKELIKWVRANNPFSTEETIIVFEHTGLYSFPLALFLSEQQLAFALVPGLEIKRSLGISRGKDDKVDATKIALYGYRLRDEINPYILPSNEIITMKQLLSLRDRFIKQRAGFRASLKEQKIFLLKKNHQILFDTQQKMIGYLTKQIDKVDKKLNAIINDNEVLKNIFTLITSVKGVGAQTALHLIAYTEAFTKFKTWRKFASYCGVAPFPNISGTSIRGKTKVSNLANKKIKSLLDLCAKNAIQYNPEMSIFYKRRVEIGKNKMSTINIIRNKLLSRIFAVVDRKIPYVDIMKYVA

SEQ ID NO: 271830 - protein, 485 aa, unidentified
MALPSFPEIAPGDSLRSSSLEDCRETAVPGAGLEGETPARVTSLEDWSIRTGQRLDGFPMSSFPRREVVMLGVGIDWSEDADVIALGLPGQGVIEIFTIAHRPEAVKGLLARIGELEADAREVRVALETKHGHLVEALLAAGYAVVPVNPQLVARRRGPAGKKDDPEDARILCLLALDRHQVLRALIPHGEVAAELRTIARDDERASRDERRLLNRLRADLLATFPAALAFAGDDLGAPSVLRLLEHYPTEEAVAEASDHELEALFRKGKHGWPDRAIARLRTARASERFVAPGYLVRAKADAIRLCATQLLAIGAQRRAWERRMGQLLAALPASGGDGPGKAVPDGEIYLSFAGLGTRLAARVAGEIGDHLDPFETPNSLQCYAGKAPVTRRSGRSELVVACRLACNRHLAGAVQQWAFCSLRRSIWEREFYDAQRARGKSHQAALRALGNRWLEVLWHCLRKGVVYDESIHIANRKRAMQRAA

SEQ ID NO: 271831 - protein, 403 aa, unidentified
MLFVGVDWGEAHHDLCLLDQDGGVLASRRIADGLAGVGELHALVAAHVEDPGRVVVGIETDRGLLVGALVGAGYQVYAVNPRAVSRYRDRHRSARAKSDRGDAKVLADLVRTDRHNHRQVAGDTPLAEAVKVLARAHQSLIWARQRHVNALRSALREFYPGALAALGAQLAEPEALAMLTAAPTPELGRRLTRAAVRQALVGAGRRRNLQARVVAVHDALAAPQLAAPEPVEAAYRQVVDALVALLGSLNRQVAALEEQLSARFVAHPDAAIVRSLPGLGMVLGARVLAEFGDDPHRYATAKGRKAFAGTAPVTRASGLRTTVVARAACNQRLVDACYLWAFAALTASPGARRCYDVHRARGATHHQALRALGNRLVGILHGCLARRVAYQEQIAWPAADAAG

SEQ ID NO: 271832 - protein, 364 aa, unidentified
MDDVSTEQTKKMTVGLDLGDKYSYLCVLDTESGALVEEGRLRTTPDDLHRRFDSAEQMKIAIEVGTHSTWISRLLEECGHEVLIANPRKTRLIYGDKRKTDKLDAQKLARLARVDPELLYPIEHRGKDSQTHLALIHSRDALIRSRTQLINHIRGTVKSFGARLPKCSAESFHKKVAGQLPHELAEALEDVVATIAALTEKIRGYDRRIEQLCKERYPQETKLLRQVPGVGALTSLTFVLTLEDPRRFEKSRSVGAYLGLVPGKDQSGESDPGKRISGEGDEMLRRLLVGSAHYILGPFAPDSDLRGHGQKIASRGGKNAKKRAVVAVARKLAVVLHRLWVTGECYEPLHNARLSGALGEEEAA

SEQ ID NO: 271833 - protein, 444 aa, unidentified
MKTTSASPRGAVPNVAAWIGLDWADQQHVGCLYDVASGQQEAFSLESSAEAIPLWLAQLRQRYGGRRVAIVLEQRRGALIHALLGCEFVILYPINPQSLAKYRQAYFSSGAKSDAADAPLLMDLVRHRPDRFHPWQPDDPETRSLQLLTQARRRWVDQQTALTNQLTQLLKGYYPQALELAGDLSSPGACQFLKRWPTLAALQQARPSQIRKHYQRYGRPTAAELDGRLERIRQAQPLTQDPAVLLHGSLMLRALVDQLLPLFDTLREFERQIAALFAQHPDRPLFEHLPGAGKVLAPRLLAAFGTQRERWQQAAEVLTYWGVAPVTEQSGRSRWVHWRLACPKFLRQSWHEFAAHSRKHCGWAQAFYQQLRAHGKGHHAALRALAYKWIRILFRCWQTRTPYDEQVYLKSLEQKNSPLLAAIQALSSSSAPSKAVRGSLVKNL

SEQ ID NO: 271834 - protein, 340 aa, unidentified
MDCIGLDLHKRESQLCILTEAGEVIEQRIVTSRERFAAVLGVRSPARILLEASTESEWVARHLEGLGHEVIVADPTYAPMYATRSRRVKTDRRDARTLADSCRLGAFRAAHRASDAQRHVRAQLAVRDALIRTRSRYVAVVKALLRRDGWRLPRGVPVHLGERIAALPIGPTVVAELKPLLALLAPLQGEIDAADRQLAALAAHDPVVRRLTGIPGVGPVTAVGFVAALDEVGRFASARQVAGYLGLAPSERSSGEQQRRGRISKTGNPRARVLLVEAGWRLLRSRQPDAAPLRAWAERIAARRGRAIAAVALARRLARILYAVWRDGEEYQVERVAEAA

SEQ ID NO: 271835 - protein, 412 aa, unidentified
MQAIIERCCGLDVHQGTVVACLLVGAPGAQPTKEVRTFRTVTRDLEALRDWLRAAGVTHVGMESTGVYWRPVYTVLEGHFELIVGNARHIRNVPGRKTDVKDSEWIADLVRHGLIAKSFVPPRPLRELRELLRYRRKLVESQAAERNRLLKLLETANIKLASVASDVFGVSGRAMLRALIEGEASAEAMADLAKGQLRRKRADLILALDGRIEEHHRFLLAMQLRRLEAIEADIAALDLRIGERLEPYCMQHALLMQIPGVDWLVAAVLIAEIGVDMSVFLSVYHLAAWAGVCPGSHESAGRQKSGRARKGNIHLRTILVGAAISAARTKGSYLKDKFHRLKARRGALRAALAIAHKILVSAYHMLAKNLAYRDLGEAYLDQIGQTRTVANLKRRLERLGYHVTLQPTAHTA

SEQ ID NO: 271836 - protein, 432 aa, unidentified
MDLPILNAHAAGVDVGSEKFFASVGGKEPKVFLTVTAQMKELCEHFKGEGVRTVAMEATGVYWINLYDVLEEAGLEVVVVNGAHCRNFPGRKTDMKDCQWLAVLHAHGLLTSGFVPPADIRRLRDYLRLRADLVSLAAQHVQHMQKAMDRLNVKIHVVISDILGRSGMRIIKAILQGERNPETLVALCDEQILKTKRAPMIEALRGIWRKEHLFALELAVDSYEAYQKQIDRCDALIAEVVKEMSGGKPTPELGRAKELRHNAIVLPGLQARMAEVLGKDLTKLPCLNSSTVAMLLAEIGRDMTRWKDWRHFGSWLALAPSSAQSGRRRKRVKRYLSRAGQILCRAVQCMAMGKHTWLASFYRRIRAKRGAKVAIKATAYKLAKLIYQVLTQGWDYVEAGIAKYEQRVRETQFKALKKLAKTLNYELVPKTA

SEQ ID NO: 271837 - protein, 342 aa, unidentified
MKITTVGIDLAKNVIQVHGVDERGKAVLRKQLRRNQVAAFFANLPACLVGMEACGSAHHWARKLGSCGHTVKLMAPQFVKPYVKTNKNDTADAEAICEAVGRPNMRFVPMKNVEQQAVLSLHRARQGFVKARTAQANQIRGLLAEYGIVIPQGIGHITKRLPEIMEDGENDLPGAFRLLLQRLGAHLKELDRHVGELEMQIQTWHRETDASRKLARIPGIGPITASALVASIGDAKSFDNGRQLAAWLGLVARQHSSGGKPTLLGISKRGDTYLRTLLIHGARAVIRVAEHKPNYEGSWLARLIGRRNKNVAAVALANKNARTVWALLANDRKYEANYGTAK

SEQ ID NO: 271838 - protein, 375 aa, unidentified
MGDYSEAFVGFDTSKLRNAVAIADAGRSGEVRFVGEIENTAAATAKLVRKLSAKYQRLTFCYEAGPTGYGLHRRIKDLGFECVVVAPSLIPKRPGDKVKTNRRDALSLAKLLRADELTPVWVPDGGHEAMRDLTRARETAMLDLRTKRQHVSAFLLRLGRPYPESRKTWTKAHVSWISSQNIEHPQQRLVLEEMMLAIRQAQERLARLEQAIAAAVPEWSLAPVVTALMAMRGIDLISATTLLAEIGDLSRFRTPTELMAYLGLVPSERSTGDTIKRGPITKAGNRRARRMLVECSWSYQHPPRVGQAKQPKVDAAPPAVREIAWKAQCRLYRRYRTLIRKGKLKTVAIVAIARELAGFIWAVARAVTTAPVVAV

SEQ ID NO: 271839 - protein, 348 aa, unidentified
MEKSMTVAVDLAKDVFELAVADERGRIVERQRLSRSQFARFFENRGMCQVVMEACGSAHYWARLIREHGHRVRLLPPQYVRPYRRRNKTDRSDCEAILEASRNREIREVPVKQVDQQVIQGLHRVRAQWMATRTNRINVLRGLLRELGIAIPLGATTAIRRVSGAIEALPARLQPVVRALLDEIRGLEERVAIIDTALREHSRLDADARCLLQVSGIGVITATAMAASVVDPRFFRNGRQLASWVGLTPREHSSGNHRHLGGISKRGDVYLRMLLTHGARSVLNRAKQLHKAGKPLNRLQRWVVELEQRRGHNKATCALANKIARIAWATWRYEREFDGNYVVNREAA

SEQ ID NO: 271840 - protein, 410 aa, unidentified
MEVMFDRVAGLDVGKETLTVCVRSPGPKGRRRAETRTFKTMFGSLRVMRDWLVEAGVSIAAMESTSTYWKPPFYCLEEVMEVWLLNAAHMKAVPGRKSDVRDAEWIAQLLEHGLLAPSFVPPPDIRRLRMLTRYRTQLMGDRAREIVRLELMLEDASIKLSSVASSLKTVSARAMLGAMIEGETNPLTLANLAKGRMRRKIPDLAQALTGTFDAHHAQLARSMLRRLELVELALAELNAVIATACQPWQHQIELLQTIPGVGETVAQVIVAETGADMTRFPSAAHLAAWAGLAPAMHESAGRQTPAGKRHGNKWLTAMLVEAAGSVGRMKGKNYLAAQHARLTKRRGMGRAQVAVAHSMLVSAYWMLKRDEPYHDLGADWHSRRSNEAHTRRLIAQLERLGHTVTLDSAA

SEQ ID NO: 271841 - protein, 421 aa, unidentified
MTADEKYAYARRFSVHVGVDTAKYVHVLVARGPDGQRRPPYRVPVSRVGFDATDQHLQQLFPGIPRAQMLVGLECAAHYALTFAYFLAERGYPVVNVLAVHTKRTKELEDNSPLKSDAKDAALICKLVGDGTFVRFPFLTSPYVELRVLASYRHRLAVEATRYKNRLQALLDLAWPELLTLFSSLTKQTPRAILERWPLPCDFLAAPRRTVRAHIHTVSRGKVAGERLTALYAAARTTVGVHHAEAERRLEIQHLLARWSLLRQQMATVDAELAALLQPLPAGQALLTVPEIDTVCAATLLAELGTPMDFQHPRQILKLAGMNLVERSSGTHRGRRKQSKRGRPMLRRQLFLLAGRWCLTRGLYRADYEALLARNGGQRTKAVCAVARKLVPLLFAVIRSEQPFDLHRWSANRRRVLVPAR

SEQ ID NO: 271842 - protein, 334 aa, unidentified
MKELKSSVGIDISKDSFEVCIKQLKDERVIIKATHSFQNDFKGFENFLKWSLSKVLQPVFVMETTGVYHEDLTHFLYSNDQKVSVVLANKMKHFAKSLNIKTKTDKADAQMIAQYGLERQLEWWQPMMPQMKNLRDLCRERLSLKKDLVRCKCQVHALKHAHSTLDVVLQLKEQQIEFLEKNIQIIENEIIRITGEDKEFSQRVKNIETIKGLRLLTIVTVLCETNGFAQFNNIRQVVSYAGLDIAERQSGLFKGKTRISKKGNSRIRECLYMPALSATSYNEHIKALYQRVIERNPTIKRKGVIAGMRKLLVLIFVLWKKNEAYNLEYKWNAH

SEQ ID NO: 271843 - protein, 375 aa, unidentified
MKEKLRFLGMDVHAETIAAAIAEPDGEVRSLGTIPNRMESVRKLIKKLGPVEKLRVCYEAGPTGYVLYWQLAELGVQCEVIAPSLVPMKAGDRVKTDRRDAERLARSYRSGDLTAVWVPDEGSEALRDLVRAREAAKQDELRARHRLGKFLLRSGHRPPTGVRAWTHLHLIWVSQIRFTQMAQESTRLDYLHEVEHMRERVLRLEQAIAEAVKLASPALQEVITDLQALRGIAQISAVTIAAELGQVSRFAGARELMGYCGAVPSENSSGKRTRRGGITKTGNAHLRRIVVEAAWSYQRPPAIWAGLRKRQQSASEEAIEIAWKAQHRLHKRYARLAAKGKDKRKIVTAVGRELLGFIWAIGTKAEATVRQRIAA

SEQ ID NO: 271844 - protein, 410 aa, unidentified
MVKENFIYVGIDLHKETHTAVMIDCYNQKLGEITFPNRPADFPKLVTKVKKCNTDAKEVVYGLENAYGYGRPLAVWLIDKGYFVKDVNTAISHRQAKHRGAMYRKSDSDDAEAIALATLNMLDKLPDACPNDAYWSLGQLVHRRDNIMKQRTRLVNQLHEQLCIAYPSYKQFFNDISRPTALYFWEHYPSRKYLKGKSVEDLRAELVPVSHNKCSTKTCEKILDAVASDKVKNNAYQDARDMVTLSIVSDLQHYDSQLTEVDKMLEQMYKMLGCTLTTIPGVNVITAVKILAEIGDIKRFSNANKLAQFAGIAPLHLSSSGKGKDLATKQGNRRLQATIYFLAIQMVQVSSKGTPRNSVVRAYYEKRKAEGKTSQQALICISRRLISIIYGMLKHGTEYRMPVVESAGEK

SEQ ID NO: 271845 - protein, 394 aa, unidentified
MRFIGIDIGSEKHFYAVVGRDGETVLRSTPFMEDDVGYAKLLAALGDPTGALVAMEATGHYWQNLFAVLTAAGFAIALLNPLRTARFAGEDLRRTKTDALDALSIARFAQQKRPAATTLSDEATLELRELVRHRDRLVQELGDHVRQLHRLVDLGFPEFRRFVKDLSSDLAIAVLRRCPTARAFDEILEGELANLRYDGTHAVGRELAGKLIAGAKRSVGQHHGPAYRLQVEHACEDIESLKRRIVHVEHRIDTAFKNHEVGQLLTTIDGIGDTTAAKLVAELGDIAKFESADALAAYVGVVPGIKHSGKWTPKSQPLSSIGHAELRAKLYMPTIAATRYNPWLRRFYERLRAAGKPAKVAIIAAMRKLLHAIYSVAKNRRPFTPILPNAEAAT

SEQ ID NO: 271846 - protein, 335 aa, unidentified
MNWTVAIGIDTHRDIHVAFALDRMGRELGSLEVETTQEGSEKLLAFASSLGEPAFVIEGTGSYGAGLTRFLVEAGCEVYECERPRRRSRRQSKSDLIDARKAGARLVAGERIAFPRSFGKREQLKALLSERRACVQACTQAKNSLRALLVTAPEPLRRELRQLTAERLVSACLELEAAGYAGCLVRISERIGHLKEELRQIDRELEHLTRSLSPRLLEELGVGPVVAAQIIVSAGDASRIRSEAAFAALAGTSPVEASSGLVKRHRLNRGGDRQLNWAMHTACLVRIRFHEETRSYYERLLERGKTKREAIRCVKRMFCRRLYRVLVEERSLCGT

SEQ ID NO: 271847 - protein, 405 aa, unidentified
MEIIYPRCCGLDIHKKTVVACVITPEEKEIRTFSTMTEDILAMVDWIKSKGCTHVAMESTGSYWKPIYNILEIEELNPMVVNANHIKNVPGRKTDVKDAEWIAGLLQHGLLQGSYIPSREQRELRELIRYRRSLIEERAREINRIQKVLEGANIKLSSVVTDIMGKSSRAIIEAIINGEEDTVVLSELTQKRLKNKKEELKKALKGLIGPHQRLMLKTQLAHIDFLDEQIGLLDEEIKRRMLPFEEDLERLDTIPGVGRRTAEHIIAEIGTNMDQFPSAAHLCSWAGVAPGNNESAGKRKSGRTRKGNEKLRSVLVEAARAAFHTKDTYLSAQYHRIAARRGANRAAVAVAHSILTIVYYLLKRKERYNELGVNYYKERKKEAIVKQSIKKLESLGLKVIVENAV

SEQ ID NO: 271848 - protein, 321 aa, unidentified
METLTASAGIGIDVGKRELVTCIRHSNGVSDPPAAFANSSLGLKKFVVHLTTENIEKDVPILLESTGPYHWNAARYLTDQGYVAKVVNPIHTRQIARYSIRKRKTDKIDAAQLAFLASQRYGYVFMETREMAQKKALVRHYWKLKGVAGSLAIHERYLKQYRGITAATVTPQMLAKCKVLKERIVQQWSSGNDLKYLDSIPGVTPFLGATILAELQPLDRFQKIDQIIAFAGLDPSVKQTGGKPGNHGALSKRGSRTLRQALYLAAFGTFHHAFRPLYDAYRNRGLAHTEVLCILSRKILRIAVALLKKRRMFDPAYLDRT

SEQ ID NO: 271849 - protein, 429 aa, unidentified
MDEVDDVDLVVQRVAALDLGKAGLRACVRVPHPHRPGRRMQEVRSYATTTAQLLEMVAWLRHWHVQRVVMESTSAYWKGVYYLLEAEEFECWLVNAREVKNVPGRAKTDRADAVWLAKVAERGMCRPSLVHPPEIRRLRDLTRYRRALVQDRTREQQRAEKLLEDAQIKISAVLSDLHGVTGRAVMDALIAGQRDPQMLAQLAKSRARKKVGQLEEALHGFFTDHHATILQMMLDNCDRLTAQIAALDAKIAEAIRPFSRQAARLADIPGVNVVAAAELVAEVGIDMTRFPTAAHLVSWAKFCPQTYQSASKSISKGHGKGNPWLAGTLGRIVFANCRSETFLGARYRRLARRRGKQKAIVATGNSVLTVVYHLLSDPDARFCDLGPNYYESRINKHRRVRDLATQLQALTGQRIAIRDGKAVITDTAA

SEQ ID NO: 271850 - protein, 319 aa, unidentified
MDESRRVTTCVGIDVSKDRLDVHLLPSGHAFAVARDGKGMESLVERLTALDVSLIVLEATGGFETMVAAALAGAGLPLAVVNPRQIRSFAKALGKLAKTDAIDAEVIALFADKVRPQVRPVPTSDARALGELVARRRQIIEMIGMEANRRRHAADKRIAKTIDRHLAFLEKELAAVDADIDTDVRASPAWRETEDLLASVPGVGPVTARTLIAELPELGGLDRRKLAALVGVAPFNRDSGAWRGHRMIGGGRTSVRNVLYMAATRSFGPPTSASSTEADQKRWPSSPASASSSQSSTQSSERNHHGKSLDPQDSRSHPF

SEQ ID NO: 271851 - protein, 359 aa, unidentified
MSDGSSEQPKMTAGLDLGDKYSYLCLIDTVSGEVIEEGRLRTTPEAFGRRFASEEPMRIAIEAGTHSPWVSRVLEDCGHEVLVANARKLRLIYANKRKTDEIDAENLARLARLDPKLLYPLKHRGEDSQAHMAIIRSRQALIGCRTQLVNHVRGAVKSFGGRLPKCPAVSFHNKAPEHIPEALRPALVPILETISSLTRRIRDYDRQLETISKERYPETDLLRQIEGIGPLTALTFVLTLEDPYRFEKSRSVGAYLGLVPATAQSGERDPQKRISKEGDEMLRKLLVGSAHYILGPFGSDSDLRRHGEKIASRGGKNAKKRAVVAVARKLSVLLHSLWMSGELYEPLRNTHRSSGGRAA

SEQ ID NO: 271852 - protein, 342 aa, unidentified
MNVTTIGLDFAKSVFHLVGAEASGKPVLKKRLRRNKVLAYFANLTPCVIGIEACGGAQYWARELRGLGHDARLINPKYVKRFLCGNKNDYNDAAALCEAVVHPKTRLVPVKTPAQQDLQALHRVRQGAMQQRTVWVNRARGLLGEHGIVMPKGIGAFRRRVPELLEDGENGLSELFRELLAQLYAQVRALDEQVAAYDRRLAQLARADETCQRLVELPGFGPVISTAMAASAGDGRAYHNGRHLSASLGLVPRQHGTGGKVRLLGITKRGDKHLRALLIHGARAVVYHAANKDDALSRWINRIRAESGTNVAAVALANKLVRIAWVIVRRGEHYRPALAARA

SEQ ID NO: 271853 - protein, 424 aa, unidentified
MSGPSVTWMPVPAPQGYLVNPYKQEDTMTESSDYESIQVFIGVDVGKDTHHAVAVNRSGKRLFDRALPNNENKLRALISDLKQHGQILLVVDQPATIGALPVAVARSEGVLVGYLPGLAMRRIADLHSGEAKTDARDAAIIAEAARTLPHALRSLKLADEQIAELSMLCGFDDDLAAQTTQASNRIRSLLTQIHPALERVLGPRLDHPAVLDLLQRYPSPEKLALLGEKKLATQLCKLAPRLGKRLAADITQALTQQTVIVPGTNAAVVVLPRPALQLITLRKQRDEVALEVEQRVLAHPLYPVLTSMPGVGVRTAARLLTEVACRAFASAAHLAAYAGLAPVTRRSGSSIRGEHPSRRGNKRLKRALFLSAFAALRDPISRAYYTRKMSQGKRHNQALIALARRRCDVLFAMMRDGTFYTPQV

SEQ ID NO: 271854 - protein, 298 aa, unidentified
MSYFAGLDVSLEKTHLCVVDHEGTVVHEATARSSPEAIATTLNAGPACSRVVFETGRMAPMLYHGLVERGVPVVCIESRQAYQALKTLGTHKTDRNDARGLAQLARTGFFKPVHVKSLPAHAIRSLIMARKKLVGQRVMLENQIRGLAVVFGVRLPRGLSPAFVQQVLDMSRDVAGLSSAMRGLITAREAMLHAIAEIDVDIKRLTRTSNACQRLMAIPGVGKLTALAFTAAIDDPARFRRSRDLGAYLGLVPRRYQSGEIDYTGSISKVGDRRVRTLLYEAANVMLTRYKGQLKLRA

SEQ ID NO: 271855 - protein, 340 aa, unidentified
MENDHVVSQCVGIDVSKEKLVATMCMFSQAEQAVYSKATEFDNDKTGFNQLVKWSRKEAVKELPLRYVMEATGVYHEHLANHLVRIGCIAVVMMPTKAREFAYWEGMISKNDAIDSRVLALVGCVKRNMRPWKPTNPLYRELRTMTRFSHDAKKLRTELKNHLEALEHSHEAEKSVIKHYESLVASLDKRIEKNLENMKKKVASDEELNKKVENIITAPSIGFLSAVTVIAETNGFALIQNRKQLTSYAGLDVRDNQSGTVNGVSRISKRGNSRIRAILYMPAVQCRLHNKHLKRAYDRIVAKHPDKKMIAVTAMERRLLLLIYALWKGDRPYNEDYDKE

SEQ ID NO: 271856 - protein, 394 aa, unidentified
MKEDSANQTSAPIVTERYAAYVGLDVHKDTIAVAVALPGRDEPLYRGEIAHEPKKVSRWLDRLSAEFEGALLQFCYEAGPCGYGLYRRLVAAGHDCQVVAPSLIPKKAGERVKTDRRDALKLARPLRAGEPPPVWVPDAEQEAMRDLTRARDDMKGQERKARQQLNGFLLRHGHHWPTGKTRWTATHFNWMASIRFEQPWLQVVLQEYIDAVNAASRRVADLTAQLMQALPNWSLAPVVDALVALRGIDTLAAIVLLAELGDISRFESPKQLMAYLGRVPSEHSSGGRRRQGAITLTGNAHARRMLVECAWSYRFPARQTMHLKRKAQKATPEAREIAWRAQKRLCGRYRTLTQAGKNVKRVCVAIARELAGFIWDIVRQEMPRLGAGNGMVAR

SEQ ID NO: 271857 - protein, 341 aa, unidentified
MTVRVVGLDIAKSVFQVHGVNEAGEVVVRRKLRRSDVLRWFAEIDPAMVGVEACQTAHHWARELVALGHDVRLMPPQFVKPYVKSQKNDAADAEAICEAVQRPTMRFVPIKSAEQQAALLLHRTRDLLIRQRSCLISSIRAHFAEFGIVASRGIRDIDRLLQLLTDSRLHLPELAREMLGVLSAQLQEAAARVRTVEAQLLAGHRSNDVSRRLATIPGIGPITASAIAATVVDANQFSSGRQFAAWLGLVPQQRSSGGKERLGGISKRGDGYLRRLLIHGARAIVGWRRRSSRTSDRWISGLLGRRPMNVATVALANKSARVAWALMKHECEYDHRRARAA

SEQ ID NO: 271858 - protein, 310 aa, unidentified
MECFVGIDVAKTRLDLALEPSGEAWSVPNEAAGIQDLVSRLTPLGPTLIVLEATGGYEAAVTATLASAGLPVVVTNPRQVRDFAKACGRLAKTDALDARILARFAAQVRPAPRPLPTEAAQLLDALLTRRRQLVEMLTAETNRLGVARGPVRRDITQHIRWLQRRLKDADGELKAAIQGSPVWRAKDDLLQSVPGVGRVLSLTLLAELPELGQLSRREIAALVGVAPLNRDSGRRRGKRLVWGGRAPVRAVLYMAALAATRANPVIRAFFERLRAAGKPFKVAVTACMRKLLTILNAMVHHDTRWRLATA

SEQ ID NO: 271859 - protein, 370 aa, unidentified
MTNIAEFVGLDVHKDTIAIAYCEGGPLAEPVQVGPISSDIQRVIKALDKIGPRASLRVCYEAGPTGYGLCRALLSAGIECIVVAPGKVPKDPGRRVKTDERDARDLARLLRSGYLHGITLPDAAREALRDLVRAREDVLRDLRRARQRLKSMLLRHDRKWSGKSSWTVKFREWVRSQKFPAEADDIVLKHYLDEVEHLEMVRDHLGEQVERLVPTLGEDVLFRSLQALRGVSNIVAATVVTEIGDLTRFASAGRFMSYLGLVPSEHSSGSRKWRGPITKAGNGHVRRVMVEAAWAGRLRPSRSLKLLRRQEGLDPAIVDIAWKAQQRLHKRYVRLRGRGLPQNTVIIALARELAGFIWAVGQAAAQRPAA

SEQ ID NO: 271860 - protein, 336 aa, unidentified
MQITTLGIDLAKSVFQLHGIDANGGVILKKKVRRGAFLQVLSDLSPCLIGMEACATSHYWAREIAALGHEVRLIPPAYVKPYVKRQKNDMADAEAICEAVTRPNMHFVAIKSADQQAVLMLHRARDLLVRQRTMLVNALRAHLAEFGIVAARGPQQVRCLVTDLENATDGLPEVGRAALLCLVRQLDAQEAEIARLDREIKAWHGQSETSQRLATIPGIGVLTATALAATVADPGLFKSARQFSAWLGLVPRQNSSGGKERLGRITKMGDAYLRKLLVVGATAVLRHAIRAQTRTGEWVRHLLERKPSRLVSVALANKTARIAWAVLAKGETYRSA

SEQ ID NO: 271861 - protein, 366 aa, unidentified
MKKIITVGKNRNEIFKQQQLTIGVDLGDRISHYCILDEIGNVILEQSVPTTPKGMQQVFSKISRCRIALETGTHSPWVSRLLTQLGHDAIVAHARNVQLITESSRKDDRLDARTLARLARIDPELLGPVRHRSAQAQIHLTEIRARATLVSARTALVNAARGLTKSYGERLPKCGTEQMNREIAKGLSPELRDVLEPLLGEIESLKERIAEYDRRIEQIAKEVYPEVALLKQVKGVGTLIALTYVLTLDDPHRFRRSRDAGCFLGLRPGRRNSGMSEPQMHISKEGDAYLRTLMVQGAHYLLGPFGQDSDLRRWGLKLAERGGKNAKKRAVIAVARKLAVLLHKLWVSGEVYEPLRNNHEVVSAVA

SEQ ID NO: 271862 - protein, 320 aa, unidentified
MLSFCGIDVSKDRLDVMVLPDEYSSSVPNDPAGWAILVEQLRGFSITAIGIEASGGYERGAVRSLQAAGMPVRQVNPFKLRQFAKASGVLAKNDPLDARMIASFVGIMPTRPAQRTMPAAEQLVEMLAVRRQLSAEKTAAENASRLLEDLMLQRLSRRRIARLAADIELLDKRLVEIVATDATLAHRYRLLTSMPGVGPVLACTLIALLPELGGMSRKQVAALVGVAPYAFESGTLKGRRCIWGGRANVRQVLYMAAMSASNWNPVLKLFHDRLKGAGKLPKVVIVAVMRKMITTLNAMVRDDIAWADRLSGRHSVTTAR

SEQ ID NO: 271863 - protein, 409 aa, unidentified
MDVVVERCAGLDIHKDTVVACTLVGPADGRARKEVRTFSTMTSKLCELKAWLAAQGCTQVGMESTGCYWRPVYEVLESGPFELVVGNAQHMKNVPGRKTDVKDAEWIARLIRMGLVHKSFVPPREQRERRDLVRYRKSLIRTRTDERNRLQKLLQTANIKLGSVASDVFGMSGTRMLEALAAGEVDPATLADLALGHLREKRPALIQALSGRVGDHHRAMLKIQLARLERMDEDIKTVEAEIERRLEPYRPQRQLLMTIPGIKGTVAAGVLAEIGPHVDTFPSDRHLCAWAGLAPGNNESAGKKLGGRARKGNLFVKGLFIEAAQTAIRKKGSYLRNKFHRLKARRGYMKALIAIARKLCVATFHILKRGVAFKDLGEQYLDLAEKKRTTRSLVRRLEQMGWGVALTAA

SEQ ID NO: 271864 - protein, 482 aa, unidentified
MKAKPPEKIQKATNPSTRGHWNEMNRKQRREMMRQIQSEDISLEVVHPDAAGIDIGNASHYVAVPPSRDKQPVRSFGCTTAELKTMADWLKQCGIRTVAMQSTGVYWIAVYDILEQAGLEVYLVNARETKNLPGRKSDVQESQWLMKLHTYGLLRNSFRPSQEIRTMRTYWRQRNDLVQSAGRHVQRMQKALTQMNIQLANVLSDVSGVTGQAIIKAILGGQRDPHKLAEFRHPRVRASEEEIARSLEGHWQEDLLFVLQQEQDGYEFCQKQMAECDRQLNHYLGQRGDRSQGAPLPEEKRKGRRKKKSGNKPQFDLRAGLFRMSGTDLSRIDSIDVMTATTILSEVGWDMSKWETEDHFVSWLRLSPDNRISGNRVIGKGRLPTNNRVTIALKMAASSLRLSDTYLGAQFRRFRTRLGAPVAIKAMAAKLARLVYRMLRYGMKYVDKGAATYQAQHRQLQIKQLKWKAATLGYQLIGVPAA

SEQ ID NO: 271865 - protein, 312 aa, unidentified
MTTHWIGIDVAKSWLDVARSDADAVQRYANTASGIAAVLRTMQADAPAGIVLEASGGYEQAAVTLRGAAGWPVSVINPERARGFARALGARAKTDALDARMLAQFGARMQPAPRPQPEEASTALGDLVARRRQLQEMLVAEQNRHERASARLRPGIAAHVDWLRQQLAELEQHIAQVIAADAVLTAKATALRSIPGIGPVVAATLLGRLPELGTLTRQEVAALVGVAPINRDSGGRTGVRSIAGGRGAIRAPLSMAALTASRRGTFKPFYDRLIGAGKPPKVALVALMRKLVVVANALLRDGTTWAALVSAA

SEQ ID NO: 271866 - protein, 369 aa, unidentified
MKKKLFYVGIDVDQNAFSVAIIDIYTNQETFVKCSPNAPALISKLQKIANPEEFDICYEATYLGFNLQRILNKNGFKCAVVSPSMIPEIKGKKVKTDKIDAKRLAEYHMKGLLTEVHVPDEKLEMDRALIRSRTYLSKQVAALRRHILSICQRIGWDFRQETSLKSYWTIKFKNWLETKIAKSSDSSLKVNLKLLLRQLLQNEQTLDLYDSEIKNLSESDEYKNKTVALVCYRGLDTISAMGVVTEIGDINRFDHPKRLASYSGLDIREYSSGGRELKFNISKCGNKHLRTLVNEACQFAIRPPRIGQKLKQRRKHANIKQIEIADRCMNRLYKKSTRLLYKDKPRNKIKIACAREMLCFIWESLKVAA

SEQ ID NO: 271867 - protein, 338 aa, unidentified
MLHIGVDFHKRFSRVVTLDDAGLVVDRQTLRHSDRAGMVEYFRDKSGKAVATVEAVRGWYWLNELLADLGVDMKLAHPRKVRLIAESTIKTDTVDAGTLAQLERTGFLPEAYVPSREVRDSRELLRYRLTLVRIRTGLKNRVHTVIDKLGIDHPFSDLFGSAGRKFLQSLELRPVYQQQLTSYLELLDEVDRRLKAVTLQIKASVRPDPRAELLMTIPGVAHITAYLLLCEIGDIGRFASAKKLCAYAGLVPVTRQSADHCWQGRITKEGNRYIRWAMVEAACMATRKDWGLAQYYRRVAGRRGALKARVAVARKLLIAVWHVLTDGQPYRLTKPDVT

SEQ ID NO: 271868 - protein, 446 aa, unidentified
MKKSSRMSVIHPHAAGVDIGAEFHVVAVPPDADAAPVRTFQSFTGDLHRMSGWLKTCHITTIAMESTGVYWLPAFEIPEAAGFNVILVNARDAKNVPGRKTDVNDAQWLQKLHSFGLLRASFRPEHDISVLRSYLRQRERLTEYRAAHIQHMQKALMQMNVQLHHAVSDITGVTGLSIVRAIVSGERDPSVLIQYRDVRCKKTPEVLQQALTGNWQPEHLFAPEQSVAFFDFYQEKIRECDDQIETSLLQLSTGTEEPEGVLPSARHRTKQPNQLSFDVRPLLWKITGADLTQIHGFGPYLALKFVAECGTDMNRWPDASHFTSWLCLSPGNKISGGKVLSPKTRRSSSRIAAALRLAATTIGRSDTALGAFYRRLSSRIGKAKAVTATARKLAILFYNALKYGQKYVDPGADYYEERYRNRVLDGLKRRAKSLGYSLQQDPELCV

SEQ ID NO: 271869 - protein, 362 aa, unidentified
MPNQTHRAPPRYKIPGFFSILLGDRWSFYCVLDEAGKIILEQKVATTPEAMKQTFGKIPRSLIALETGTHSPWVSRVLTELGHEVIVAHAQKVELITKSNRKDDRHDARTLARRARIDPELLGPVRHRSAKAQIHLTVIRARAELVSARTALVNAARGLVKSFGERLPKCGTYQVDEKLAEGVSAELRDVLAPLLREVESLNERIKEYDERMEKIAKEVYPEVFLLKQVKGVGTQIALTYVLTIEDPYRFPKSREVGCFLGLRPGRRNSGESEPQKKISKEGDRYLRTMMVQGAHYILGPFGEDSDLRRWGLKLAERGGKNAKKRAVVAVARKLAVLLHRLWVSGEVYEPLRNSQKAMRAVA

SEQ ID NO: 271870 - protein, 397 aa, unidentified
MYQLYVGIDVSKDSFTAAGLDPAGSELLRGAFNMDAEGFNHFLGMILQHCKEPNEILVAMESTGCYQLNLFSFLTAHGIKGVVINPLLISNFAKLSLRKTKTDKKDAMTIAKFILQYRESVSYLSVSQELQDLRDVSREREALSHLISATKAEIRRLLRITFPELDANYDVFTKVMLQFLSQFPSARLVKTATRKDVAKALTRKGSGMRFTYSAQNIIMTANESVGITSPAKEIILQGKVATLVHLQERADQMTKLMTTMCEASMLKDLEIVISIKGISLKTAVPFLAEVGDIYNYSCYKKLIAFAGLDPSVRQSGKFTGQSKISKRGNRHLRRVLYLMASRVVAENRIFKAYFIRRKNEGMSPQKALFGVIHKLIRVIYSMLTHRTYFNPEEVQYQ

SEQ ID NO: 271871 - protein, 329 aa, unidentified
MKVLHIIGADLSKHTIDFATPQGDHLKVTNDAPGYGALMTWMKEQSINLADTRIVMEHTGLYSYRLEQFLHLHHINFTKVPAMAIKYSIGIIRGKNDKIDAKRIARYGQEKQAALLAETPVGKQLQELQMLHATRDRLVRTRAAMTSAVKEYQQTCCLKKTHLIITTQMQIIKSLNCEVAKLDKRMDVIVNSESSLKKNAELLQSITGVGKVVALAVIIKTRNFTRFTTARKFACYCGTAPFENTSGSSIRGRTKVSHLADKTVKRLLDLSAKSAIQYDKELREYYSRRTAAGKSKMSTINIVRSKILYRMFAVIKRQTPFIKDHLQVA

SEQ ID NO: 271872 - protein, 327 aa, unidentified
MTDMNVYVGIDVHSEECYVTAMRSDGSIYTEGTTRNFKEGIRHYFAAVPTPNIKIAIEACGLWRGFYRDLTNMGYNVVLANPVQVHDVVKKMKTDQRDATAIADMLRCGYLQKIYIPDEKTLKLRDLARHEAQLRRLRASLRVRIKSYLKRDGDFRKFKWNKEVMKELRSKPLISNFVTLIEAIDPEIKKVSKMVKMVAINNDTTRILQTVPGIGEFSSLMIMAEIGDIRRFDNPKSFVSYCGLGTGTYQSADTTYTVNNNAVNKWLKWVFRMSSGRAIMKSTAYLAHYVRVKNRRGYKIARKSVARKMATDVWHMLTNNEVYKENS

SEQ ID NO: 271873 - protein, 351 aa, unidentified
MTILALDLAKSKSTFCNFDPVTGEVLFGNVATKRAALGALIEKMRPARVVIEICPLAGWVHDLVCSLKIEIQVADPTQDAWKWKNVKRKTDEDDALKLARLSALGQLNLVHIPSATMRQWRRLVELRHTLVAERTRCKNRIRAILLQEEHHWPPGQRGWSQSQRAALSKLTRPLVECESTELWRGVLGIELQHLEQIAARVLDVEAKLDGLAAADARTVLLRTIPGVAQRTAEIIVTTIDQARRFKTARQVASYAGLTPRRFQSGQIDRQGRISKRGNRLLRQVLNQAAWMAVRWNRHLRAVYLRISDGVAARRKLAIVAVMRKLLVTAWAMLRDARAYRPPRVVPAPAAA

SEQ ID NO: 271874 - protein, 354 aa, unidentified
MSTITFGVDLAKNLFSVCAVDGAGRVCQRRELRREALLPWLAQLPAGSVVAMEACGGAHYWARRCIEHGLAPRIIAAQFVAPFRKSRAIKNDRNDAEAIATAARQGNMRFVPIKTVDQQARLSVHRVREGYKVEALALGNRIRGLLAEFGVVVAKSEIALRRRLADLDALTELPGEVKAVLEELRAHGARLHAAIDACDARIASHVREDVRCQRLRQITGIGPLTADAAVATIADAGMFKNGRQLAAWLGLVPTQHSSGGHARLGGIGCRGDAYLRTLLIQGARSSLQRAKAVAPERATPEQRWICALDGRLAFGKVLVAIANKHARQIWAMLAHDADYDPHACLAHPMHRQAI

SEQ ID NO: 271875 - protein, 377 aa, unidentified
MKKELYLGLDVHKDCIIGAVAEEGRKGEVRETGAISNDLHAVEKWIGRLRQAHGKEVILRACYEAGPCGFGLARRLKQLGVECAVVAPSLIPTRSGDRVKTDRRDARKLARLLRAGELTPVYIPDARDEAIRDLCRARSDAVDDRRRSRHRLKGFLLRHGYRYQGKSSWSAAHERYLRELVLPHPAMKVILEEYLQSIAAAGERIARCEEAMRVLLEQWRLAPAVRALTAMKGFQTVAAMILVSELGEVHRFVHPRQVMAYLGLVPTENSSSERRRQGHITKCGNAHARWLLVECAQHYASPPKVSKELSRRQEGQSQEVRAISWRAQNRLHRRYTRLLARRLQRNKAMVAVARELCGFIWELLRTQPCYQAQSRSV

SEQ ID NO: 271876 - protein, 337 aa, unidentified
MNDCAVGVDVSKLKLDVCVVDGTKGDAKFRYKVVKNTRSGHAELIAWLLQRHLPSGVPVVLEATGPYSEAAATALADAGWRVSVVNPARVKGFAQSQLSRNKTDKADAKLLASFAQRSELELWQPPSPAVRELHALVERLQALQDMRQQESNRLEALSQGEQSRVITMVKDHVEWLTVQIARIESEIHDHIDSNPDLKRDADLIRSIPGCGPKLAAQFLAYVGDVRRFKNAKALAAFVGVTPRQKQSGTSVNGRTTISRTGHAAARKALYMPGLVAKHHNPVIVAMAKRLASRGMAPKAIVGASMRRLVHLIYGVVNSGKRFDMEIPMRALAFQDGI

SEQ ID NO: 271877 - protein, 360 aa, unidentified
MFGERTSVGLDVHARSVAAAAIDGQTGEVIKARLAPAHAQVLEWVCRLPGPVAVAYEAGPTGFGLARALSGAGVRCVVAASSKLQRPAGDRIKTDARDALHLARLLRLDEVVSVRVPPPAEEAARDLVRAREAARQDLMRCRHRLSKLLLRHGIVYDDGKAWSELHDRWLRHQRFDAPATQAAFDDAYETVLLAKARRDRLDEKITAIAGDSEFTALARRLACLRGICTLTGFALAVEIGDWQRFTGASIGAYLGLVPSEHSSGQSRSQGPITKTGNTHVRRLLIEAAWHHRTPYRPSVVLQRRWDQADAAARARGHAGNQRLHSRWVTYNLRKKRGVVANVAIARELSGWCWSLAVLPD

SEQ ID NO: 271878 - protein, 377 aa, unidentified
MSITQTVLQGQDTVIQADLYLSFELSDKQWNLTLSDGRRGPSRYSIEAGDTSAVMQCIVKAKARCKLDPRAKVHSCYEAGRDGWWLHRWLREQGIDNIVVDSASIEVNRRARRAKTDRLDGDKLLAMLLRHRAGERVWSVLHEPTAQDEDARRMHRELERLTHERTAHTNRISSLLVLHNLRPRLIIGGRKWAPWWASHSEQVPPALRAEIERESARLALVKQQFKALEAARRQDLADGKQPLVAQLSQLRAIGPKGAWILVKEVFGWRRFANRRELAGCLGLAPTPYASGDSQTEQGISKAGNRRARALLVELAWSWLRLQPDSALSQWYNRRFAQGKRTRRVGIVALARRLAIALWRYLERGEIPDGAVLKPTGA

SEQ ID NO: 271879 - protein, 360 aa, unidentified
MISERTSVGLDVHARSVVAAAIDERTGELVQRRMGSSTEEIVAWVTGLHGPVAATYEAGPTGFGLARALTAAGVRCVVAAPSKLQRPVGDRVKTDARDAVHLARLLRLGEIVEVVVPSVESEAARDLVRAREDARGDLMSARHRVSKLLLRQGIQYSGGKAWTVAHDTWLRQQRFELTGLQAAFDAAYDAMVQAVDRRDRLDTAIKEMAADSEFTAVVDRLCCLRGVSTLTGFALAVEVGDWSRLDGHRIGAYVGLTPSESSSGASRALGGITKTGNGHARRLLIEAAWHHRPAYRPSSPIMRARWDRASAAARARGHAGNQRLHHRWQTFQARGKRTVVANAAIARELAGWCWSLAVMT

SEQ ID NO: 271880 - protein, 338 aa, unidentified
MVVIGIDPHKGSHTAVAIDEDERMLDEVRVRSDRRQLERLTSWASAFPERSWAIESANGLGALLSQQLVGAGEEVFDVPPTLSARVRVLGTGKSQKNDPNDAFSVAIAALRSSRLRAVEAEDHVAVLRLLWNRHKNLGSLHTQAVCRLHALLAAIVPGGAHRRLSADRAAAVLSGFRPKTVVEKARKAQAQYLVVEVRRLDAQLKASKRTIVEAVAQVPTGLGELSGVGPVATAIILAHTGDIRRFGGEDNYASYNGTAPIEASSGPRKRHRLNPRGNRQLNHAMHIIAFSQLSHAGVGRDYYERKIAEGKSQKEAVRALKRQISNAVYRQLVRDAQR

SEQ ID NO: 271881 - protein, 338 aa, unidentified
MHPTIIGLDLAKHVFQAHGIDAAGNVAIRKKLRRSELKTFFEKLPPCLIGMEACGTAHYWGRELTALGHDIRLMPAGYVKPYIKRGKNDEVDAEAICEAVTRPTMRFVPVKSAEQQSILMLHRTRDLFVRQRTMLLNSLRGQLAEFGLIAPKGVWRIPELEALAQGTELPEPARACAELILMQIQDLQSKIKAIERTILARHRGNELSRRLATIPGVGIITATALVATVVNASAFKSGRHFAAWIGLVPQQNGSGGKMALGRISKKGEPYLRRLLVLGATAVVRYVRNKPDLAGWVNALLARRPARVVTVAVANKLARIVWAIMQRGGTFRERPFGIA

SEQ ID NO: 271882 - protein, 420 aa, unidentified
MRESRTYGSVRGARGNSRPLYVADCLANKHLLSSEENGEPLASLWRMSPCGRLGPVFPSSAVQAGRYLGTRVSVDPAYKVVRRGALAEATTWKDRTVIDGILGIDVSKDTLDASMSSCNKVRTRSFANSPTGWRHLLDWLITQRVRRVHACLESTGRYSLGIACALNETGHVVSIVNPAQIRDFARTKLGRNKTDGVDASHIREYCELFKPQPWAPPSEAHRRLCELQTIRAGIVAGLTEWKNRKNSGMVDAVAQSLADVTISHFTSQLGAVDEAIAQTITNDSVLRRKRDLLLSISGVGQTLAGVVLAELPGPDVLHSSAEVVAYTGLNPRQHQSGTSIDRVTRISKIGNAVLRAALYMPAMSAMRYNPAIVALATRLKSRGRLNPKQIVVAAMRKLLVLCFGVLKTGKPFDPAIAMGC

SEQ ID NO: 271883 - protein, 413 aa, unidentified
MEWVAVVGVDWGDKEHAYTIQGADGTRSCGKISSGSEEVHGWVQGLRELYTEGTVVIAVEQGQGSLIYALAQYEFLSLVPINPRASKAFRDSLRLSGASDDASDAERICEFAVKHLSSLRVWQPDDAVTRMVRMLSEHRRALVDQRTAATHTMAATLKMFFPQAVEWFGGETSLLLRAFLMRWPTLADLRQATIEQLVEVFRSRRCRKISARAKALYDQLRLAVPITLDASIVSAGSMYVRAQIALADALDEQIAQYDRAIAQAWSEHPDREIFEALPGAGPVLAPRLGAALGTDRDRYQDASQIQCYSGIAPVIEQSGKTRWVHARWGYPTFLHQTFFEFAQASIPHSPWAKAVYLEQRHLGADHHEAIRALAFRWIRIIFALWKKRTLYDEQKHIDRLRKTGSPIAARLAA

SEQ ID NO: 271884 - protein, 350 aa, unidentified
MVVVGADVHKRTHTFVAVDEVGRKIGEKVVKAVTAGHGEAVMWARERFGADVVWAIEDCRHLSARLERDLMGFGQSVVRVPPKLMAQTRASARTRGKSDPIDALAVARGFLREPDLPVASHDEVSRELKLLVDRREVLVAQRTATINRLLWRVHELDPERAPKSRSLDLAKHRRILGDWLDTVPGLVAELARDELADISRLTETINALAKRIGQRVRHVAPVLLSLPGCGELTAAKLVGETAGVTRFKSAAAFARHAGVAPVPVWSGNTAGRVRMTRSGNRQLNAALHRIAVTQIRLDGLGQAYYRKRLTERDSTAEALRCLKHRISRVVFHHLRTDEQNRQQPCHPAAA

SEQ ID NO: 271885 - protein, 378 aa, unidentified
MSKISKEAGRKKTTKDKPEMPMGIDVGDRFSHVCLVDNEGEVVERDRVRSTEAAFRRYFEGTARLRIALECGTHSPWMSRLLKQLGHQVIVANARKIPTITESESKNDGRDAEQLALMAAFNPKLLSPLEHRSLARQQDLNLVQARAILVKARTMIVNALRGLVKSAGGRLPACSSESFPDRAAGAVPSTLADVAGPLVEQIARLNMQIKSIDQQIEKLAVKYPEIGTLRSAPGVGPLVAAAYVLTLDRPDAVPSSRSAGAFLGLRPGQSQSGDSDPQKRITRTGNTYLRSLLLQSAQYILGRFGPDSALRRWGLKLAASGGKRAKKRAIVAVARKLAVILHSMWRSGQRFELFPQPAQAQGLTGTSTATSQPTANQM

SEQ ID NO: 271886 - protein, 381 aa, unidentified
MTTAATHHEHGNTPAGTLFVAFELSEKTWKLGFTTGHGQKPRERTVTARQQERVLDEIAQAKRRLRLPDTAPVVSCYEAGREGFWLHRFLQGHGITNHVVDSSAIEVNRRRRRAKSDGLDVRKLLSMLMRYAQGERQVWQVVKVPSVEAEDHRHLHRDLETLKQERASTTTRILGLLRSQGLRVTSLTKLPEQLEALRLWDGSPLPPGLRRRVLRVYAHHTFLSAQIAAVEAERRAQLHASTDARIDKVRQLMLLKGIGINGAWLLVMEFFGWRAFKNRREVGGLAGFTPTPYQSGESAREQGITKSGNRHVRWMTTELAWSWLRFQPDSALSVWFRERFGGGGKRLRRIGIVAVARKLLIALWRFLETGVFPEGAILKAA

SEQ ID NO: 271887 - protein, 430 aa, unidentified
MKSNTQNAKIEAITEKTLVLGIDVGSETHYARAFDHRGIEYSKKPFKFSNTEAGFVIFKEWILDLKEKHEKDKVVPGMEPTGHYWFNLGKFLQDNEMKPVLVNPHHVKKSKELDDNNPTKNDRKDPKVIAGLVREGRYMIPYLPDGVYADLRTASNIRFQLQAELTRIQNRISRWFNIYFPEYKTVYGKPDAKSGMLILKQAPLLEDILTLGIDGVNQIWRDAKMRAVGKARAKTLIEAAEHSVGSKEGAISARMEIRMLLEDYESRNIRLQEIMTLIEELVNQIPMAEKLLEIKGVGIKTVSGFLAEVGDISRFNNPKELQKLAGLALVENSSGKHKGRTTISRRGRKRLRYLLFEVAMSLVAKNPEFRELHTYYTTRRLNPLKKMQSLMAVAAKLIRVFYVMLTKGVDYDPKKMVGDIKRPAVYLQAA

SEQ ID NO: 271888 - protein, 334 aa, unidentified
MLKETSICVVDGSGEIVSEGTVISEPSAIAEFVKAKAAGAVRIGLETGPTTTWLWHELRALGLPVICIDARHAKAALSLQINKSDRNDAVGLARIMQCGWYKEVQVKSVACHEIRSVLNSRALLVRIKRDLGNQIRGLLKNLGLVIGKAQGNVFTRRVEELVAENPYLQQAVRPLLAVREKVSREIADLDRKLLSLTRGHQDSRRLMTVPGIGPITALAFCAAIDDPARFRRSRSVGAYFGLTPRRHASGEVDWSGRISKCGDTMVRSYLFEAAGVLLTRVPQWCALKAWGLRLAKRIGFKKAKVAVARKLAVILHRMWRDGTDFIWSTKEAAA

SEQ ID NO: 271889 - protein, 482 aa, unidentified
MKPKPEEQNKRATNHPTQHHWHEMNRKQRREMMRKMQTEDLSLAVIHPDAGGIDIGNESHYVAVPPGRDSQSVRRFGCTTAELKAMAAWLKQCRIQTVAMQSTGVYWVAVYDILEQGGLEVYLVNARDTKNLPGRKSDVQESQWLMKLHTYGLLRNSFRPSQEIRVMRTYWRQRNDLVQSAGRHILRMQKALTQMNLQLANVLTDISGATGQAIIKAILGGERDAHKLAEFRDPRVKASEEQIAQSLEGNWQEDLLFVLKQEHEGYEFCQKQMVECDRQLKQYLQQREDRSQGAPLPEEKRKGRLKKKKGNAPQFGLREGLFRMTGTDLTRIDSIDVMTATTIVSEAGYDMSKWETENHFVSWLRLCPDNRISGNKVIGKGRLPTNNPVSIALKMAASTLRLSKTYLGAQFRRFRTRLGAPIAIKAMAAKLARLVYRMLRYGMKYVDQGAAFYEAQHRQLQIKQLKWKAAKLGFQIVQAPAA

SEQ ID NO: 271890 - protein, 366 aa, unidentified
MKIIGCDFHPGYQQIAVLDLATGEVVEKALSHERKEEVRAFYAGLEGPARVGIEASGQSQWFERMLAELGHEVWIGDAAKIRASCERKQKTDRRDAELLLKLLAEDRFPRIWVPTAAERDGRQLLLHRHKLVRMRTQVKNQLQALALNQGVQRKKKLWSAAGRKQLESLPLLPWASRRRAELLQLLDQLEASIAELDRAVAEQAYVRPAARRLMTHPGVGPVTALAFTLTIGPAERFQRGKQIASYLGLIPSEYSSGAGKQRLGHISKQGSPFLRGLLVEAAQSAVQHEPEMHRAYQRLAQRKCRALAKVAMARKLAVRLYWMLRWQVNYAQLIQGSHAGQPGTFLVVVKTGLLVGHPASPKCWGV

SEQ ID NO: 271891 - protein, 408 aa, unidentified
MFPKTNTTEDDSNYYNSQHYVGIDVSKDKHDCYIVNSDGVVLADVFSVENNLDGFDLLLQRLKSVAPDLLNVKVGLEATGHYSYNILGFLLDKGLATFVLNPLHTNLFRKSTSLRRTKTDRVDARTIAAMMSSGIVLKSYTAISYHNEELKSLSRYRFDKVRQRAKLKQAVSRLVTILFPELEKLVPSLHIASVYALLAELPGAKQVASCQLTHLTNLLSAASKGHYDRSKAVELRNAARRSIGSAMPAKSLELQHTIRLIRELDAEISEIEAAIKQIMDQIASPILTIPGISYRMGAMILAEIGDFARFDSPDKILAYAGLSPSTYQSGKLDNAYAHMEKRGSRYLRYALYNAAKYVCHWDASFCAYLAKKRAEGKHYNVALSHAAKKLVRLIFALQRSGQPYCPTA

SEQ ID NO: 271892 - protein, 417 aa, unidentified
MDTLFAKVAGLDVHLKSIQCAVRCRHESGKLLKQSRSFGTMTRDLRALADYLEALGVTHVALEATGVLWKPVWNILEGRFTLLLVNPRHLKKVPGRKTDVSDAEWIAQLLQCGLLRGSFVPPRALRELRDLTRHRAQLRCEHTRVANRIHKLLEDANIKLGAVASDLLGKSGREMLRALLRGEQDAEKLAELACGRLRGKIPQLRLALEGNCTEHHRYLLGKLLAHLNYLESQTEQFAYRINHRLHELLAIEDWERLDCIPSVNRVTIENVIAEIGIDMSIFPDEHHLASWCGLCPGNEESAGKRLRSRTRKGNRWLRRALTEAAWAASHLKNSYLSAQYRRLAARRGKKRALLALGHSLLVIIYHVLKHKVEYRDLGPDYFGRLEPERLRRYLVKRLQGLGYEVSLTPKTPDDHAA

SEQ ID NO: 271893 - protein, 347 aa, unidentified
MTIVETRAVTGGVDTHLNVHVAAALDGIGGLLGVESFPTTPAGYTALTDWLCGFGTLERVGIEGTGSYGAGLARHLAALGVPVLEVDRADRASRRQSGKSDPLDAVSAARAALSGRARGQSKGRDGQVEAIRTLMVAKGSARRDRTAAINRMRALVVTGPDPIRVRFAHHTTVSLVNEAAAMRPRNSELVELTTLIVLRELARRAAYLAAEIDRLDDLLLPLITLRAPALLATPGVGPDSAAILLIAAGDNPERLRSEAAWAHLCGSAPIPASSGKVVRRRLNPAGDRQANHALWRIVLSRMSFEPRTRAYVERRLAEGKSKPEIMRCLKRYIAREIYPLLRQPVTS

SEQ ID NO: 271894 - protein, 315 aa, unidentified
MFPQVTSAVTYIGADVAKLSVVFQLPDQSWSFANIPEGHAALVTRLRTLAGPAHIVCEATGGYERALVCALHQAGIAVTVLNPRQARDFARACGHLAKTDGIDAQVLADYGAKLHPQADPVPAPGEEAFAELVQARRDIVGLLTAEAGRREHTTLPSLRKLADARQRQLENQLAKLDILLDAHVAADTKLAAKAERLSAVAGVGRVTVLTVLALMPELGTIEDPKAAALAGVAPLNHDSGQYRGQRHIAGGRSAVRRVLYMAALSASQHNPILGAIYQRHRQNGKPHKVALTALMRKLIVLLNRLLRNPDFVLVG

SEQ ID NO: 271895 - protein, 464 aa, unidentified
MSASPTHRKRQLDELACVHPNAAGLDIGSEEIVVAVPPDRDPQPVRVFQTFTADLHALVAWLVACGIDTVAMESTGVFWIPIYELLEQAGITPYLVNARHVKTVPGRKSDWNDAQWLQKLHAFGLLQGSFRPDAEIRTLRTLARYRAELIERRAPHINHMIQALKHMNIQLNLVLTDITGVSGLTMLRAIIAGERDPHRLAVFRQPGCKHSEAEIVKALTGTWDDTQIFILQQSVDLFDYYTMKLIDCDRQLEQQYQAMESRWEKDAPLPDLPPAKGDSKSKNAMTFNVRAHIARVIGVDLVAVMGLSAITVQTIISEVGTDMERFPTVKHFCSWLGLAPRNDISGGKVLRSRTMKVHSRANQAFRQAAYSVTRAHSSIGAYYRAMRARLGPKQAIVATAHKIARIVYHLLKTGEPYREESDAEYERKRQERELKHLARRAQKLGYALTAVPATTPESPSRPGG

SEQ ID NO: 271896 - protein, 348 aa, unidentified
MAVSIVETRAITGGVDTHADVHVAAALDPVGGLLGVREFPVTAAGYAGLLGWLGGFGTVCLVGIEGTGSYGAGLARHMSAAGVRVVEVDRSDRQDRRRQGKSDPLDAVSAARAAQSGRARGAPKGRDGAVEAVRALMVAKRSARSERTQAINQARALIVTGPEDLRARFAAHATAGLVADLASLRPRPGAVVGYHTRIALRELGRRAEFLDSQIACLDALIMPLVTGYAPRLLALHGVGPDTAALLLIAAGDHPERLRSEAAWAHLCAAAPIPASSGKTKRHRLNPAGDRQANHALWRIVITRMSSHPPTRAYVERRTAEGLSKTEIIRCLKRYVARQVYPHLRAAAD

SEQ ID NO: 271897 - protein, 425 aa, unidentified
MKSTQNEKISQIKFETLVVGIDIGKETHYARAFDYRGIELARLLKFSNTDQGFQLFDQWMRDICKQQEKAEIIAGFEPTGHYWFTLGDHLKSQGHKLAIVNPFHVKRTKELDDNSPTKNDRKDPKTIAMLVKDGRYREVYIPDDIYQELREAVSERERLQEQLTSIHNRVVRWLDIRFPEFTTVFKDWRRNAALITLRSFPTPEKVMEMGVDKIVETWRKQMKRASLKRAEALVKAASRSVGRTSGKVASEASLQNLLAEYDLYCQQYDKQEQLMQDLLMQVPNADKLLDIKGVGLITAATFVGEVGDISRFQDPRQIQKLAGLNLVENSSGKHKGKTTISRRGRRRLRHSLFFSMIAMLGKNQEFRLLHQRNLTRENNPLNKMQSIIALCGKLIRVFFAILTKGVDYSPEKMLGDMEQSMRAAA

SEQ ID NO: 271898 - protein, 339 aa, unidentified
MEENTNLDLNRVTFIGIDAHPSTHTALAINRFEEEKGHVQFENSSDGITRFLNWLQTVAPDAESTIVGIEGGSTSRNALLSRLIAKYHHVHEVNPVYTRQRRNARTRSDKSDIIDAKLIAEVLTKKLSLLPRITVNELSSHMLSLKKVVGYYEEQTAQGARLQNQLQQLRREQSLSVDTYERSVLTSVIKGKEQELRLIRKAQKLLTGELRKLLKTYGNNLTTILGISTVLAAKIIAHSSGAKRFANKDKYVCYAGIAPVERSSGKYRRFAKGKRGNRQLHTTFYLAGMLQLLNNPKAKAYYDKKLSEGKTKRQALSCVMKRTACIVYGMLKSGQAYRA

SEQ ID NO: 271899 - protein, 416 aa, unidentified
MKSPTNESFTAFVGIDWADKKHDICVQPAGSEMREFSVIPHKVEMINDWAQSLIQRFGSPIAVAVELSKGPIVYALQKFDCFVIYPINPLSLARYRETFTPSRAKDDPTDAEFAVDILLRHPDRFKPLKPQSMEMRALATLVEQRRMMVDEKKRITNRLRTALKQYYPQVLDWFDHIDTPIFCDFIRQWPTLVQVKRARKNTLKTFFHQHNMRFAQVLADRVEAIKTATPLTMDDAIIIPYRLQVQVLIEQLSVTLEGIKQFDQATESIASRHPDFPLFDALPGAGPALAPRLLVAFGEQRDRYLNAADLQKYAGIAPVTERSGKKQWVHWRWQCPTFLRQTFTEWAAQTINKSFWAGQYYYQQRAKGCSYQAAVRSLAFKWIRIIFRCWQTGKPYDESTYLKALENRGSPLLKQA

SEQ ID NO: 271900 - protein, 342 aa, unidentified
MDEYAGRQYVGIDLHRRRSVIVQMTSEGERLGLTRIDNDPFELARQAALWGERPEVVLEATYGWYWAADVLADAGAVVHLAHPLGVKGFAYRRVKNDERDASDLADLLRMGRLPEAWIAPPEVRGLREAIRHRCKLVALRSGLKAQVHAVLAKQGVRVAMSDLFGVGGQKLLDELRLDAPYAARVGSLRRLIDALTFEIDVVAKRTAGDLSGHRGYRAIQAIHGVGPVLAAIFVAEIGDVTRFDRPQQLCSWAGLTPRHRESDTTIHRGRITKQGNHLLRWAAVEAVQRLYGGPIGATRARLSERRGANIAKVAAARKLLTLVFYGLRDGHIRCLARAQAPA

SEQ ID NO: 271901 - protein, 367 aa, unidentified
MSRVQMVEVPEQGGHQGHRPLPESAVAMAIDLSRSKLVYCLRWDGAEQRRLSTPAGMEHVRAVVEQYRACRLHVVYEACGFGYELAWWLQQEDIPITVIAPSRVERAPGLTVKTDGLDVGKMARKLEEGQLHSIYIPPPALHHRRQLGRTYAQCVKERTRAQVRLRSLLQEQGCLGPPPTAGWRPYTQWLATQSLPPPVPRCVESLQRMRTVADEEAKRLHGALLQLARHPDYAALTTALCAQPGIGPLSAIRLVLELGDMARFPTADSLPRYLGLTPSEYSSGEVVRRGHILKCGPGMLRALLLQCAWAAVSKAKDPQLRAVFERLAPRTGRKRAIIAVARRLAIAVRRRWLAALREQAAAHGALA

SEQ ID NO: 271902 - protein, 389 aa, unidentified
MPMNMQYERAFGLDLSKKTFHGCILDGPDLGNRHFFTGEMGPQGKAKLAGRLCKCDLVLMEAGTSSFSLARFLLENTEAEVVVLNPAKLYNIFNSTLKTDKSDSEKIARIARTMPRDEWPTVSIPTKEEQAERSTVSLEVFLAQEITMLVNRLYALFNSMGHPFIKKSDLKTEEARLTLANRLLCEEALAMEQVIMLSNQIEHVTDQLEQCKQRLREICLSHPMQALSLLSLPGVGLMTTASQIAFLGDGSRFNSPDSYVNYVGLSERRFDSGTKVSKGHISHMGNKCIRRNIIQAAWVASTKLKGNPLSMKYKDLRLRGKNKPVAAVAIAKKMIQLSYILVKSNGIYEFTKQQGLGAFRRKLQYHKLTQNSNTTSLHKTPIPQAYTVA

SEQ ID NO: 271903 - protein, 419 aa, unidentified
MSFKILKNNCCGLDVHKTWIFACIGITDSHRRTEYKQARFSSFTKGLQELCDWLAKYNCTDVCMESTGKYWIPVFNVLEKNNIWVTLSHPKYTKPQKGNKTDRKDAKWICDLYMCGMVKPSFIPPADIRQLRDLVRYRFKLTCMITSEKNRAHNCLTISNFKLDEVFSDIFGKSSRSITEQILQHPGETFDVAQFVDGRCKTPIEEIQAAVDGAISTEQAVKLRQCLNHIDELEKHQAEIEQEIFRLSDKYEEVLNLIRTVPGFDKNPMTAIQVLSEIGGDLSVFPTAKNLVSWAGCCPRNDQSNQKIKSTRISRAGSYFKPVLVQVANALIKSKKHPEFTTRYRRIKARRGHKKAIIAICRMILTAIWHILTDLKPYTTEGFLESRPVNDSKILTTSQALNLLKQRGYVIKDDIVSVP

SEQ ID NO: 271904 - protein, 421 aa, unidentified
MNQLTDAGYTAYVGIDWAAAKHDICVQAADGGAREFARISSQPEGIEAWAQDLYRRFGGPIAVALELSKGPIVSALQKYDFMVLYPINPLQLARYRETFTPSGAKDDPTDAELAVDLITRHPERFSPLKPQSVGMRMLIGLVEQRGKFAADQGRVVNRLGHALKQYFPQVLEWFNEHNTVVFCDFLNRWPTLTQAKRARKASLERFFKSHHVNSAQLIEKRITAIKAVIPLTLDPAVIEPHRLQVEVLVEQLRITIKALKRFDDEIAATADKLPDYALLFNPLPGAGHILAPRLLAAFGEDRQRYQHADALQKYSGIAPVTKRSGKKTWVHWRWQCPTFVRQTFVDWASQTINKSAWAGAYYRQQRAKGCSYQVAVRALAFKWIRILHRCWQNRTPYDESKYLEALRRKGSPLLKYLAETV

SEQ ID NO: 271905 - protein, 399 aa, unidentified
MPKVYVGIDVAKFKHTCCAISEKGEVLRESFDFGNDREGFDLLMKTIAELGGRDEVAIAMESTGHYHLLLWRFLASKGYAVEVKNPKVIARFKAATEISGAKTDRRDAALIARYAMTFGSSPTALPSYALSRMKSLEREKYRLIRDRTALYNRALAILDLTFPELMGFLGEKSGAGRDALSSKTVRWLVSTHPSAESVASTKAATAERLRSMSKGSFSLVRFHGLRELAKRSIGTSFPDEEAELRQLLAECDSIDARIGAIDAETAPLVDALCPQIASVPGIGKSTAATIFAEVGGFGRFDSPDKLIKYAGLDANVYQSGTVLKHGKMGRKGPPILRYALFLAAAKCRIHCPEIAEYYSSKVSQGKHRICALVCTARKILRMCWGMMKSGKPYISKTAE

SEQ ID NO: 271906 - protein, 343 aa, unidentified
MQAITTIGLDIAKSVFQVHGVDAVGRVVIRRQLKRRYVLAFFQKLPACLVGIEACASSHHWSRELKALGHTVRLMPPAYVKPYVKRQKNDAADAEAICEAVTRANMRFVATKTPEQQSCLMLHRTRHLFIRQQTAVINAIRAHLAEFGIVAPVGRNGVEELLNIVADPSDKRLLDVARACLAALGAQLRRLKEQILEFDRMIMAWHRSNEASKRLDAIPGVGPMLATALVASIADPKVFRSGRNFSAWIGLVPKQHSSGGKNRLGSISKQGDRYLRSLFTAGALAVIRYAKINGTKHRPWLTALLARRPTKVAAIALANKIARMVWAMMARGERYKEPVALAA

SEQ ID NO: 271907 - protein, 371 aa, unidentified
MAKSTPLFVGLDVHRDSITVAHAQGGRSEPPVFVGAIGTRQADLDQLIRRLQGKASVLTFAYEAGPCGYGLHRYLTTKGLACQVVAPSLIPKKPGDQVKTDRRDAVELARLLRSGDLTAVYVPSVEDEAVRDLCRARDAARVTMKDAKLRLKAFLLRLGLHYVGRADWNAAHCRYLAKVVCPTPAQQIVFQEGLRAVNEQIDRLQRIEAELRDLAPHWRLAPVVEALQALRGVQWVVAITVVAELGDLTRFDNPRQLAAYVGLIPSEYSSGRTRRQGGITKAGNGRARRALIEAAWAYRHPAKVSEHIQRRIDTLPQPLQDLGWKAQVRLCKRFRRLTARGKHPNVAVTAIARELIAFMWAIAREVPVPAA

SEQ ID NO: 271908 - protein, 440 aa, unidentified
MTPLSEEVVLEKTEKRKVMSRTPGPILEDLSTFQYVTGIDIGMQSCLVCVLKPDKQMVIKPTTFANAAGGFTELFERLAALGVAPGEILIGLEATSRYGENLYHALQKQGYTLCLLHPAQTHQWSKRRGLRAKTDKLDATTIARVLLSGEARRGYVPSELVASYRELIRLHTHLADEAARYKNEIHALLQVLFPEYSQVFADPCRVTALSLLKRYPGARAVTTAGAETIARFLHELAPRNYGRRTAEQLLTLAQHSVSTHLADEARAKSLAILCDQLLHTQANLAQVEKDIEALIERDPHTKGIQALAEFGSITTAVLRAELGDVDRFGHSKQVVAYAGLDLEIKESGKWKGKAKLSKRGSGLLRRMLYLAAVRSVRLDSSPFGTYYHRLVERGLPKGAALIAVMRKMLIVAAHLIKTGEQYDPTKVGANYAASPRGEAA

SEQ ID NO: 271909 - protein, 347 aa, unidentified
MLADQLDYVVGVDPHRDSHALAVVQVVSGAVLFEAAVSASSDGYANALKLVDQHAKGRRAFAVEGTGSFGAGLTRFLTANGERVLEVGRLRRERRSGGKTDALDAIRAARSVLTQNRPATPRASGEREALRALMAREGAVNAKRAGLCQLRDLLVTTPEPLRSELRPLTRARLLQRLAATRPERRHDPELRGALLALRSVARRILQLTAEERELAREIETITRKLAPQLLEQPGVGPLAAAQVVLSWSHRGRISSEAAFARLAGCAPIPASSGQTVRYRLDRSGDRRLNRALHMILVTRRRTHAPTIAYISRRTQEGKTKREATRCLKRYLARNLYRLLEQGAPPAT

SEQ ID NO: 271910 - protein, 408 aa, unidentified
MNTLYVGIDVSSKSNVVYLMLPNGDKHSNFSVANSHDGSIQLVKRIHSALTSHSLDKVLIGLEATSVYGDNLVYSLREDTTLASFNRKIHVLNPRQVKKFHDTYNDLPKNDYVDSFVIADCLRFGRINKEVYMEDYRYKALQNLTRARFFTVQNLVKEKQRFINVLFKKYSTMTQEKVFSDTFSTTALAVYDEFESAEALANMDLQELTDFIIKKGKNRFPNPDSVAKAIQKAARSSYRLPKTVNNSVNQVLSISITSMKALESQIKEFDKAIKAQMELLPNVLISIPGIGPVYSAGIMAEIGDINRFDNQAALAKYAGLAWKQHQSGDFEAKFTRLISSGNRFLKYYLCEAAFSLVRCDKEYSNFYHLKYKEVNRYQHKRALALTARKFVRLVFRLLKDNRLYSPAK

SEQ ID NO: 271911 - protein, 426 aa, unidentified
MRSKAYAATNVNKVKVSSVIAGHEGQPADLGLDVSKDDVKLMLRWEDGQFAGVWRGENPAQIPQMVELMSELGQGRRLRVAMEPTGTYGDALRQAMHRRGVALEKVSTKASHDYAEVFDGVPSQHDGKDAAIVAELCAMRKSSVWRYELPSLADQEMAELVEWMDIQRKQMTIWMGRLEALLARHWPEATGIMGLTSMALLRALSYWGGPAGLAGDGKAAVLLRRWGGPLLSAEKIGQLVASAPETLGVVQTAVDVRRMRRMARRARAARRSKQKCRAALERLAQDNPAIVAMAQVVGTGTACVLWVCMGDPRDYSSAYAYRKAMGLNLAERSSGRWKGHLKISKRGSAMVRRWLYLAALRKSEGTNARIRSWYERKRARSGGKAGRALTGIMRKLPLAVYLAAAGEVYEEDRLFGSPAATPAGRR

SEQ ID NO: 271912 - protein, 353 aa, unidentified
MISRGCLHVPGIVVGVDTHKDEHVAVVVDKLGVRIGQRNLPTTNTGYVGLEHWASSLGEIDAFGVEGTGSYGAGLARFLRGRGHRVIEVNRPDRSARRRLGKSDPTDAEMAARAVLAGVARDRPKSGVDEVEMIRMLKSTKDSAMKGRTQAINQMKALIVTAPVELRAVLRGLTTNQLVARCARWRHGQLGTPTAAAKYALRSLARRHIQLTQEIEALDAQLVRITAAFAPALMESFGIGPDTAAALLVTAGSNPERLKSEAAFAALCGVSPVPASSGKTNRHRLNRGGDRQANAALYRVVIVRLRYDDRTRIYLQRRIEEGKTKTEVIRCLKRYVAREVFSILHDIGKRRTA

SEQ ID NO: 271913 - protein, 383 aa, unidentified
MGNSITLYVGLDVHKDSIDIATADPGRTGEVRHVGSIGGDLAALDKALRKLISKGEHLHVVYEAGPCGFVIWRHLTAAGLSCEVVAPSSVPKRPGDRVKTDRRDAMMLARLSRSGDLTAVRVPSAADEAVRDLVRARDDAVRECRNARHRLKALLLRNGITYEGRSTWTAAHLRWLSRLKMQHAAQQIGFQEYLHSVTESSARIVRLEQAMRDALPDWRLKPLVQALQAMRGVQLIAAMTLVAELQDFTRFESARKLMAYVGLVPGEHSSGPKRRQGSITKAGNSAARRMLVEVAWHYQHNARVSPIIARRQDQLPKAITDIAWAAQLRLHAKFRRLLARRVMKTKAVVAVARELTGFVWAIAGEVHNSGWQGVAIAATDKAA

SEQ ID NO: 271914 - protein, 330 aa, unidentified
MKNLFCGIDISKDFLDYAICFDEDKTISTTSKTENNKKGIISLIKLLHKEAGGAKIWVCFEHTGHYGFLLANLLAERKIVFSMVPSLDILKSSGLTRGKTDAVDAKRIALYLATNNYKLKPSVLPSDDIFRLKILLTIRQQYVKIRTQLKNAVKSLKIAGKIVSMKGETMQYEAEIRRYDNKIKEIETQINKVIRNNNQLLVNFNKISAILGIGLITAAQFIVSTNNFTAFDNPRKFNCYCGLAPFEYSSGSSIKRPTKTSHYRNKELKAALFKAANTAILHDMQIRTYFNRKIEEGKHKMSVINAVACKLVYRVFAVVKRDEPFVRMAV

SEQ ID NO: 271915 - protein, 426 aa, unidentified
MKTTTDFAATIGLDWADQKHDLWIHPADGAKAQHLQLAQTPEALHGWVAQLRERFDRRPVAIGIETSRGAVISALMAYDFIVLFSVNPKALKDYRAAFSVSGAKDDRTDAMLLEEFIRLHRQKLKALEPDTELTRKLAGLVENRRRLVDERTRLVNQLHSTLKTYYPLAETLLGEQMNKPMAADFLARWPDFETLKKTEAKTLRAFFYKHNSRSAQKMQERLQAVEKAQALTTDPAIITPARVLVGAWVGMLKPLHHAVAQLDKEIEQAMNQHPDAAIFRSFPGAGPALAPRLLVALGTQRHRFENAAEVAQFYGVAPVVKQSGNSKTTHMRNRCPKFGRQTFHENAGCAIKQEPWTRTYYDQHKERHHDKHHQACRALAYKLIRIYFACWKHHKLYVPDQYVLALEKHGSPLHKKLESQPQHLGE

SEQ ID NO: 271916 - protein, 320 aa, unidentified
MMAQNDLVVVGIDVAKDKVDACIRRFTLRQTFPSTAQGHRKLVAWLRKYQVGKAVMEASGGYEREWRNVLHNAGIEVRIVDPRRVRSFAQSAGRLAKNDPIDAEMIAWFAETFSQAPGQIPDAAREELAALAKARKALVDVKIRLQAQDEHAAPEPARKAYARALKSLAAEIDKLEAAISAKVKATPEFAERAEIIESVPGLAQATSAILIAGMPELGQVSDEVATALIGVAPYDDDSGKRRGERCIKGGRRWVRNAIYMPCLGAATQYNPVLKAFYQRLLAKGKEPKVALVACMRKLIIILNTMLARRQKWNPGRHAMA

SEQ ID NO: 271917 - protein, 416 aa, unidentified
MNSLLLSAFERYIAVDLHRAYVVVGGVNSRQEVVLPPRRIELDAWLSWARAHLRKTDALVVESTSNAWDFYDQVEPLVGRAVVANPRLVKLIASARVKTDKVDTLALARLLAANLIPEVWVPPLIVRQVRGLLAHRRRLVETRTRSGNRLQSVLQRHNLPAPRGGPFTMANRSWWETLKISLTERLRVRQDLETLTHLDKQVAEIEDEVYRLSTTEPWAAQVAFIIQLPGFSVLLAMTILAAIGDISRFLHPKQLVGYSGLGASIHSSGQTHRSGHITKTGRRELRWALVEAAWSAVRYSPHWRAEFKRLTSRMPENVAIVAIARKLLVVIWHVLTEQVADKHADQERVAAKLMRWSWGLTQEQRGGLSSRLFVRRQLMRLRLADDLTHFTYGGMPRRIASVQELLTACPEIAPSG

SEQ ID NO: 271918 - protein, 408 aa, unidentified
MDTIYERCCGLDIHKDSITACHRTGRQRELRTFGTRTKDLRELRDWLLAAGCTHVAMESTGVFWKPIFNVLEGHGLTLLLVNARHMKAVPGRKTDMKDAEWIAQLLQHGLLQPSFVPDRDQRELREVVRYRRSLIQELARETNRIQKVLEGANIKLAGTISDVLGVAGRAVLTALVAGETDPEVLANAVTTNVRASREQLVAALEGEVAAHQRQLLRMQLAHISFLGEQIAALDAEIAQRLTAEVKLIERLDGIPGVGRRGAEEIIAAIGTDMSRFPSARHLTSWAQVAPGQNISAGKHKSGKTQKTKAPLRTTLVEAARAAGHTKNSYLGAQYRRLARRGGSNRAAIAVANSILVIAYHMIKDSTPYTDLGPFHFEQRSKEHAIKRTVKQLEHLLGHKIDLPDITAA

SEQ ID NO: 271919 - protein, 340 aa, unidentified
MNQVVTIGLDIAKSVFQVHGVDADGAVVLRRRLTRSRMLSFFAKQAACLIGLEACGSAHYWARELSSLGHEVRLIPPSYVKPYVKRQKNDAADAEAICEAVTRPSMRFVPIKSPEQQSIMVAHRTRSILTRQRTQLSNAIRGHMSEFGLVAPVGRNGLEMLIAIIADANDTRVPKEARACLLMLIAQLRLVNEQILESDRCIVANARSTEVGRRLMGIPGVGPVLASALVAAIADPVSFSSGRNLAAWIGLVPRQNSSGSKERLGGITKQGDRYLRQLLVVGAMAVVRRAAHNGARRPWLVQLLARRTPKVAAVALANKNARMVWAIMTSGERYREPVAA

SEQ ID NO: 271920 - protein, 345 aa, unidentified
MMVIGIDAHKRSHTAVTVDEMGRQGFVKTVGTTTQDHLRLLKWAVGLAGERLWAIEDCRHLTRRLERDLIAAGESVVRVSPKLTAHVRDSAPSYGKSDPIDALAVARAALREPNLPTARLDGVEREIRLLVDHREDLVAERTRIIARLRWHLHELDPGWTAPTKLERHRAFDKVQAHLSDLNDGAMVRRLALRLVEHLRLLTHEIDELAAEITVRVTTIAPSLLAIVGCGALSAAKIIGETAHAGRFRSKDAFARHNGTAPLPVWSSNKQRHRLSRTGNRQLNAALHRIALTQARSYPPARDLLDRRKSNGDGGMEALRILKRRLSDVVYRAMLADQTGQPPVAA

SEQ ID NO: 271921 - protein, 438 aa, unidentified
MSRTDFAHPVATATRPEDSTVFVALELSRKSWLVATSSPGEERISKRVVTAGDGPGLLALLGKLRETAERRLGRAVRVVVIQEAGLDGFWVHRLLVDNGLESHVVDAASLAVDRRKRRRKTDVIDAEGLLRALMAWTRGERRVCSMVRPPSPEEEDRRRLCREREALVTERIRHTNRIKGLLAGQGIFDFDPLRPKHRERLDELRTGDGRPLPPCLLAEIRRQLGRLDAVVRDLATVEAERNGLVGLRAMDRPAQSPEEGAKPGGVAEAVTAPVAQGTDPAVAPEEVASSAASEAAPANATSRTAPAEPAALLMKLKGIGPEFAAVLWLEALFRSFGNRRQIAAYAGLAPVPWQSGGIDRDQGIAKAGNPRLRKTMIQVAWLWIRHQPGSAISQWFARRVGTARGRVRRIAIVAVARKLLVALWRYVGVIPEGAVLKA

SEQ ID NO: 271922 - protein, 470 aa, unidentified
MAPGPSPSISEMEGVRWQKRGADEGRWMDLQRSTTNAAGIDVGNAQHWVAVPCGRDVESIRMFGCFTADLHALANWLERCGIKTVAMESTGVYWIALYEVLESRGFRVCVVNARQAKNLPGRKTDVKDCQWLQQLHTYGLLTASFRPQGEIIILRRYLRHRETLVQEAATCIQRIQKALTEMNLQLANVISDISGTTGLRILHAIVEGERDPQCLAAMRDWRIKATPDEVAKSLLGNWRDELIFVLGENLVLFEVYQQKIERCDYRIEQHLKSMSAQVDNNTNPLPKPRKGKRPHGNSPSFDLRSELYRVTGTDLTQIDGINVVTAQAILADTGTDMSAWKTEKHFVSWLGLCPDHRISGGKVLQRATRKVTSRAATAFRLAASSLRRSQSALGAKYRRLQSRLGAPKAITAMAHHLARLFYRMIKYGSAYVDHGVAAYETRFREQQLTWLSRKAAELHLCLAPLPNSAG

SEQ ID NO: 271923 - protein, 388 aa, unidentified
MHVYVGVDIAKELHYAAIMDSDGVVSKPFSFENNDKGFNLLLSHLAPYNKESILIGYESTAHYQENLAFFLKSLGYRTAEINPLQTAALRKANIRNTKTDSVDARLICLALMNHHIQGDQRDSARLDDLYQLCKMRMDTMKKRTTCKIQLVATMDRIFPELAPFFDNNLHTNTIYRLIESFPLPSQIKKTRIDILTKLLHKASRGHFKKEKAQKLKDLADISVGIPSDIFAFQAQQLVHQIEFYTDQIQTIEERINTNPDVMSSPLMTIPGIGTFCVACILSAIKNINDFGAPCKILAYAGLDPVIRQSGKFNASHTRMSKRGNSLLRYALVWSAGNVVKNNHTFAEYYRHKTEDQGKSHYQALGHCAKKLVKSIYHMLKCNESFNLD

SEQ ID NO: 271924 - protein, 354 aa, unidentified
MDKTKYIGMDVHKEAISIAVLNSSGKLVMECVIETKASTILQFFQGLSGSLHVTFEEGTWAAWLYDLLKPHVTELVVCNPRKNALLKEGNKSDRIDARKLAELLRNGSLSTVYHGENGLRLLKELSRSYLTISKDLGPVMNRLKALYRSWAIPCAGTQVYAPRHRAEWLAKITEVGVRRRAELYYQQLDALRPLHQQARKEPLAEGRKHSATKLLRQIPGIGPLRAAQLVALLQTPHRFRTKRHLWTYSGLALETHDSAQYVFAQGQLQRSKKPQQLRGLNANHNHDLKNIFKGAAMRASTCHGPLRDFYEALLAKGMRPAMARLTLARKIAAITLILWKKGVRFDAQYLKQAA

SEQ ID NO: 271925 - protein, 317 aa, unidentified
MTFAGIDVSKTHLDLALVSNSPKPTRLRFPNSPEGRQALLAALAHHNPAWVALEPTGAYHLPLLKLLAENRLQVALVNPYHLAAFRKAKGERQKTDRQDALLLARYAQVYHGELWAYTLPPEALRELKALVGYREDLAGRERAILNQMEAAEWAGSKEVLALLQKELACVKGLLGEVEARIQALLATLPEAEVLMALPGVGPQVAAAVLALLPPELWGRAKRAASYAGLIPEREESGKSVERSRLSKKGPPLLRRKLYMGALVAVRHDPEMRAFYHRLLSRGKRKKQALVAVAHKLLRRMMGRLREYYATQLDQGVA

SEQ ID NO: 271926 - protein, 349 aa, unidentified
MILVGCDLHTRKQQVALLNTDTGELWDQELSHAGDDVERFYAALPPPVTVGIESTGYSLWFHALLQRLGHRLLVGEAAKIRAMVVRKTKTDRRDARHLRDLLKDDRFPLVWIPNPTTRDLRALIKHRLRLVRIRTMVKNGLHAIALNQRLALGPSLWSRQGLAQLQALVLLPHTRRRRDDSLDLLQWLNRHIDELDLQVATAAAADPDARRLMTHPGVGPVTALATVLVLGPVGRFPGSKHVVSYIGLAPTVNASADKCRLGHISKQGSALLRWVLGQAAPLATRGDAALKRVYFAVLRRRGRPKAKVALARRLLVRLYVMLRDQIDYDEFCRRSRTQRPGLEPARIPM

SEQ ID NO: 271927 - protein, 338 aa, unidentified
MQITTIGLDLAKNVFQIHGVDGDGCERVRRKLRRGDVLRFFEKLTPCLVGMEACAGAHHWARQIATFGHEVKLIPPAYVKPYVRRQKNDMADAAAICEAVGRPSMRFVPVKSETQQAALLAHRGRSLLIRQRTSLINAIRAHCAEFGLVAAKGPANITALVAAILNERHPALPHEARPALLILLDQLKSLDVAIGAIEKEATAGRRLDDRVRRLMTVPGIGVITATAIAATVPDAGAFKSGREFAAWIGLVPRQQSSGGKERLGGHTKMGDAYLRRLLISGAHAVIAHSARRKETAATWLGGLVARKPRMVAAVALANKTARIAWAIMARGETYRVIA

SEQ ID NO: 271928 - protein, 429 aa, unidentified
MVQSKRLRRSTLKKHSNSGKKSEPTTNRAKSRGSVQRDTKVVLAELVGKLKEKLHPKKVAATSAGEKHQRGELRPNLDRLTVGVDLGDQWSNYCILGLEGETLAEGQLRTTQEDIAEFFQALNAARVVIEVGTHSAWVQEVIGGYGHEVLVANPRLMDGSKRRKRKNDRIDANKLARLGRVDPESLYPIQHRSREVRQDLVMLRARDALVAARTEIINTTRGLVKSMGTRLPKCSSRSFAKKGEEAVAVEMRAALLPLVRLAATLSADIKEYDKKIEELGREKYGHTALLRQVKGVGPITALAYVLTLENPERFVKSRDVGPYLGLVPRQEDSGESQPQLGISKAGDTMVRKLLVGSAQYILGPFGPDTDLRRYGLRLCERGGKNAKKRAAVAVARKLAVLLHCLWVSGEVYEPLRHGMAVTTAQAAAA

SEQ ID NO: 271929 - protein, 318 aa, unidentified
MGQREEVVVVGVDVSKKQLDVALLPGNEAFAEVNDEAGIKAVVERLLGIRPDLVVMEATGGYETACATAVSAAGFRTAVVNPRQVRAFARATGQLAKTDRIDARVLAHFGAAIDPQVTPMADEQTRELQAMLVRRGQLVAMRTQEKNRLAMAVGAVRQPIKEHVAWLDKAIGTLDIDLTAKLRSSPAWKEKEDLLRSFKGIGPVSARTMLVDLPELGQLNRRQIAALVGLAPFNCDSGRYKGQRHIWGGRARVRTLLFMAAVSAVRSNPAIRAFYKQLKDRGKPHKVAMVACMRKMLITLNAMARTQTRWQPPAAISA

SEQ ID NO: 271930 - protein, 346 aa, unidentified
MMIIGCDYHPSWQQVCWFETATGETGELKLEHASGEAEKFYRGLPGHALIGMESTGNCQWFVEMATTAGHDVWIGDAAQIRASEVRQQKHDRRDAVLILKLLMEGRFPRIWTPSGQEKDLRQLLIHRYKLVRIRAQVKTELQHLAMNQGVTKKRKLWSKAGERVLRELPLKPWASRRREDLLKVREMLNGQIALLDQAVVEAAEKNEKARLLMTQPGVGPITSMAFVLTMGDVNRFQRGKQVASYLGLIPREYSSGGKQRLGSISKQGNRFMRMLLVEAAQGAVRCDPGFRNEYLHRCHKKAKGVAKVAVARKLAVRLYWMLRTNTAYPEIVRVEGSSRVALVGAS

SEQ ID NO: 271931 - protein, 313 aa, unidentified
MQQSFVGIDISKNSLDVHVLPEGISYSFGNEPQKVKTLIRKLKKLKPTLIVMEATGGYEISLAVELSGAKLNAAVVNPRQVRDYARAIGKLAKTDAVDAYVIARFAQDVRPEAREQLNLKERQLKELVMRRQQLIDMRTAEKNRLSRAYTSQVQEELRCHIDELTTRIKAIDEQLHNEIKNDPNWNQKLKIITSVPGIGANTAHNLLMCLPELGTLNRRQIAALVGVAPMNRDSGMMRGKRTIAGGRAVVRRMLHMPTLSAVTRWNKRLKTFYDHLRQQGKKHRVALTACMRKLVIMLNSMLKNNQPYSENYC

SEQ ID NO: 271932 - protein, 356 aa, unidentified
MTRIAQLEPTRVTVGVDTHRDVHVAVALDQLGRRLGEIELATTRAGYQRLLAWAERFGAVEAFGIEGTGCYGAGLARHLRARKVLVIEVMRPNRQTRRRKGKSDPTDAEAAARAVLSAEAAGSPKAGDDLVEMIRVLRVARQTAIKARTQAINALRSLLVTAPPELRDELRALSTSRLVGKAARLRPGPLDSTLTASKLALRHLARRYQALEAEITSLDTQLAQLTAAASPRLLEAFGVGADTAGALLVAAGDNPERLRSEAAFSMLCGSSPINASSGKTNRHRLNRGGNRQANAALHRIVLVRMRYHQPTRAYVDRRTSEGKSKREIMRCLKRYVAREVYTALTQPGEQKLARAA

SEQ ID NO: 271933 - protein, 313 aa, unidentified
MAQIVATAGIDVSKDRLDVAVHPTDQQFSVTNDEAGWRILVRRLKPLGTRAIGIEASGGYERGAIVALFKAGLPVRSVNAWKLRQFARAAGLLAKNDRLDARAIAWFVATLPSREVRHDPAVDRLAELVTARRQLVDAIQQTGNQIEHLRDAALRRMQQRRIRQLERDLAQLDLRIARAIDESPVLAARRDLLCSMPGVGPVLAATLLALLPELGTLGSRPIGALVGVVPYDFDSGRMRGLRCIFGGRAAVRRILFMAAQAAALWNPTLKAFKHRLIAAGKKPKVAIVAVMRKMIVTLNAMLRDNQTWRTAAV

SEQ ID NO: 271934 - protein, 314 aa, unidentified
MRYVGVDVSKRKCRAAFIDEDGEIVEEFSFRNDFVGISMFLSRLSLGDRVVMESTGNLWVNLYDALEERGFSVVLANPLKMKAIASAKIKNDKVDARILAYLLRGDLVAESYVPSREVRDLRVLVRYRASLVRARTAIKNRVHSLLDRYGLKHGFSDLFGKAGLEWLRSLELSPLDRLILDGYIEHIECLNRLIRNVEGEILRRASMDEDVRLLFSLTGVGVYTALLIKSEIGDIRRFPNYKKLVSWAGLAPSLHQSGSIERHGRITKQGSRMLRWVMVEAARTAVRYDCRLREFYERVRRRRGGSEGDCCCCC

SEQ ID NO: 271935 - protein, 468 aa, unidentified
MPALVAMPGSPPVLASHARRLIRTLPKWLIEARRHAAWTLYREEDRQMSRSQRIVGFDCGEDTHSAVLLDTAGKYGKKFEVTNERGQIQELLAELMLVIGPEAELVVSVESKRSHGRIVSDVAVELGCDLRQVNTVALNHFRDLEGQPRKDDDWDAYLAARMVFLEMGGCRKAIVTTEEERTLSRLTRTHSRLVEDRKRHVARLRAVLLELVPEMLHTSWKGPKPGSKAMQYMLERWPGFEGLEKAHLRSIVKILRQCRYGSRAADVAKLIRKAARGISVAEDERRAITFELDLLVQQIRFCNESVDRVYTKITHRVERDPVGKKLLEMHGFGPIITGVLVSELVPVACTSTEPKCATYAGVTPLSRKSGKSLDNDKLTQGVNQRVLHALYTSSVVAIKNSAIDRTYYEKKLRDYAGHPKPHVAAFIALSRQRHKLVYKLITTEARYDKEILIASHLARLEQDRIAAA

SEQ ID NO: 271936 - protein, 419 aa, unidentified
MSKSMFCGCDVSLENNTIWLMLDDGSQPVKLFNVDNNQLGAEALVERVYNIAKEHCVSNILIGTEATSMYDWHLLEYLSESRLALEFNLKLYRFNAKWIKNFKKSLAPRGKTDPIDSFAIAERLRIGRLPKEYIPDTKYQPLRKLTRFRFHLMQQIAREKDFFLANLFLKASAYSRVAPFGSTFSATSLAVINDFFSVDELAAMPIEELTEFILEKGKSHFSKPAEIVDNLKRVARESYRLKPELAPTVNLILASTFNNIRCYKDQVKLVDTAIAENLKAFKHTLDSISGIGPVYAAGIIAEIGDVNRFSNDSALAQFTGLTWPKYQSGKFQAEETRMSHTGNQYLRYYFVEAANSVKRCDATYKAFYEKKYAEATKHHHKRALVLTARKLVRLVWTLLTKQVLYQPGYCSFEDLSKIS

SEQ ID NO: 271937 - protein, 336 aa, unidentified
MQVTTIGLDLGKRLFQVHGVDAAGTVMLRRQLKRRQVEPFFAKLPRCLIGIEACGTAYHWARRLGELGHEVRLIPPAYAKAYVRRNKTDPADAAAICEAVSRPSMRFVPIKSEAEQAIAAVHRVRDRLIGQRTMLLNALRGHLAEFGVVVSRGPAHVKELIEMLAEPGSVPEILRSVLLGLASVLARLERQIVLVDKQLMRWHRDNALSRRLATIPGLGPIISTAMAARVLQPQRFRRGRDFSAWLGLVPKQSSSGGQIRLGAISKQGDGYLRRLLINGAQAVLGSKRAKTDPWLKRLLDTKPRLVAAVALANKMARIIWAVMVRQTRFREAVATV

SEQ ID NO: 271938 - protein, 380 aa, unidentified
MASETTQVNHTIFTPNLYIAFELSNAEWKLGFTVGLGQAPRLRNLAARDMAGLREEIRLSKVRFSLPESAPVISCYEAGRDGFWLHRCLTAQGITNLVVDSASIEVNRRKRRAKTDRLDAGKLLLMLIRYVQGERQVWSVLHPPSPQEEDQRQLHRELMVLKRERTHHINRIKGLLISQGVSLALKADFLPQLEAVRLWDGTALLPGLRQSLHREYQRYQLVQEQVHQIDLERREAIRTGDTPAIRQVRQLLQLKGVGVNSAWLYVMEFFSWRGFRNRRELGSLSGLTPTPYQSGNSAHEQGISKAGNRPVRAMAVELAWSWLRFQPGSALSIWYQNRFAHGNSRLRRIGIVALARKLLIALWQYLEHGLLPAGACLRTP

SEQ ID NO: 271939 - protein, 402 aa, unidentified
MTFPFVEQIRVAVDVGCHRHRVAVAGPENRVLEEFDIEHNAQGMGTFFRRVEAHERRLGLPVAVAMEGFNGWARPLDTQILVRGWRLFNVNNLKLARFKEIFPGPAKSDPIDTRKMLELFELRTHLPLAKDVLQEIAVVPVENDKLKRITRRRRQLVNERMRVINRLQADLQAVSPGLCSITAKVDNLWFLRFLTCREHLDQLMRVQRRTVLNIQGIGQRCAETIQKWQKQAHFSAAVDYVGPMIIADARRILELKDQITVLENAIEELLLQSTIARLVDTIPGYGVICSAELAGEIGTIERFASEASLALYLGMAPLDNTSGKYRGSKSPRQVNARAKAAMMTGVDRHRKQVPQSQRYYDKKRAEGKTHNQAIRALGRQLVRVIWSMLTNNRDYQLKIKTD

SEQ ID NO: 271940 - protein, 356 aa, unidentified
MKYVGIDVHKKMCQAAVLDEDGELLDQIRFLNEKKEIKDFAMKLLTFRDDVKAVVESTGNLWIQIHDILEEFGIDVALSNPGKTRLIAEAKNKTDKVDAKILARLLRADMLFTCYVPGEEIRNRREFLRHRLNLVKMRTMVKNRIHSLLDKHTLKSPYNPWTKKWVAWLREQDLGFMDNAIIKGQLAILETFNEQIRVMEDKIAALAVDDPQVKLLMTMPGIGYFTASLLVAEIGDINRFSNDKKISSWAGLAPRISQSGEKTRIGRVGRGNKRVAALMVQSAHNARLHDARFQRAYKRVSRRGGKGKAIVAVAHEMIRIVYFMLRDNAPYRGQNVELTLRKLKNMEGRASIGLRI

SEQ ID NO: 271941 - protein, 326 aa, unidentified
MQGKEASEQETKAKSSVGIDVSKCWLDVHVLAADQRLRVANNCAGIRQLKRWLSRFDIVLVAIEATGKWHRQLHRSLVASAIPVALIDPYRVRMFAKAQGILAKTDRLDARVLAAFAAMMNPSVRAPAPQTMTELAELVVARASAVETQAALKHQHGAAEANFLKRQLERRIGRAAKDIAELEGEILKRIKADDALARRYAILTSIPSFGFAVAATLIACLAEIGSASAKQIGMLAGLAPIADQSGERNGVRVIWGGRKAVRRVIYLAALSATRFNADMKAFYQRLRARGKPPKVALIAVARKLVILANTLVTEDRTWQTRMPNHA

SEQ ID NO: 271942 - protein, 350 aa, unidentified
MVMIGTDSHKRTHTMVAVDDVGRRLGTKTVRANSDGHLDLVCWSAQFGDAVFAVEDCRHLTRRLEADLLVAGCRVVRVPTRLMAAERRGTREPGKSDPIDAEAVALAALRYRDLPVAELDGPAREVKLLSDHRRDLVVQRTRIASQVRWFLHELDPDLVVPSRGMRRQCVVAELEARLRGFDGVVARLTRELLIRCVELNRQINRLEAELRHLVRTLAPSLLAIPGCGVLSAAVIIGETAGVHRFRDKDAYARFTGTAPVPVWSGASAGKVRLNRGGNRAMNCALHMIAVTQARGIGPGRAYLAKQEARGKDKTAALRLLRRRLSDTVFTALRADQLNNNLQPVTLPAAA

SEQ ID NO: 271943 - protein, 422 aa, unidentified
MRIIHQRCCGLDVHKKSVTACVLVWDGQTAVEERKKEFGTTRKELGRLRFWLIACKVTIVAMESAGVYWKPVWHVLERQKRFKLKLVNAQHYHGVDGRKTDQIDSSWLAELLQCGLLKSSFIPPQWQRELRDLVRLRVSLLEEKNRIQNRIEKLLEDANLKLGSVASDTLGVSGRRILKAVVAGDKDPGWMADYAKGKLRSKRKQLEEALHGFVTDHHRTLLAMLLRQVETLEADVEFLEADIRHRLAPHQDVIERLMEIPGFGEVTAWTVIAELGLDMSVFGTPNRAASWCGLCPGNRKSAGKRRHGRTRKGNRWMRRGLTQAALGASNTKDSYLRSFYWRIASKRGAKKARIATAHKQLKIAFLIIRDGVRYHDLGSDYFDRRNLDRTKRYLTKRLEGLGFEVSLVAAPNNEPKADSLSC

SEQ ID NO: 271944 - protein, 366 aa, unidentified
MKKTSTVHVNGNMIFKGHKLTIGVDLGDRWSCYCVLDEAGEILLEQKLPTTPEAMKQTFEKIPRSLMALETGTHSPWVSRLLRELGHEALVAHAQKVQLITKSNRKDDRHDARTLARLARIDPELLGPVRHRSAQAQIHLTVIRARAELVRARTALVNAARGLVKSYGQRLPKCGTQQVSRELAAELSAELREVLEPLLKEIESLNERIKEYEVRMEKIAKESYPQVELLKQVKGVGTQIALTYVLTLEDPHRFPKSRDVGCFLGLRPGRRDSGESQPQMHISKEGDRYLRTMLVQGAHYILGPFGADSDLRRWGLKLAARGGKSAKKRAVVAVARKLAVLLHRLWVSGEVYEPLRNSHKALRAVA

SEQ ID NO: 271945 - protein, 407 aa, unidentified
MLFIGDDWAEDHHDVEVQDEQGRVLRRARLSEGMAGITEFGELVGRLLSEDGQAADVLVCTETDRGPWVNALIAAGYRVFSVDPKQAHRHREILSSSGAKSDKGDAHGLADMVRTRRHQLREAGGDSEIAEAVKVVARAHQTMIWERTRHMLRLRAALREYFPAILAVCDTVDLSLTSRPLLVLLGKAPTPELAAKLTARQILPMLKGYRNKDAKAAQIQQILRGEHLGQPPVVTRAYAASVRSSVAVLMVLVEEITHLETEVKAHFGQHPDAEIILSQPGLGPILGARVLAEFGDAPGRYRSSKDRKNYAGTSPITRQSGKMRIVAARYIHNNRLVDALQGQASCAILHDPDVRGYYDQLRARGTKHNAALRQVANRLVGVLHGCLNARTRYDRNTAWAHRHTAAA

SEQ ID NO: 271946 - protein, 481 aa, unidentified
MWDGSRFAPRIVPSRKALGRTVIRNNGESRAVIYSTGGFAMAKRKVRDGISDNDSVVVTEDNEVYYERCAGIDVHSGLLTVCLRIGRRSEIREFGTTTGEIRALSAWLKDSGCQMTAMESTGSYWKPLYNIFEQESIPAMVCNAYHIKNVPGRKTDIADARWIARCLREGLLNPSYIPDREQRELRDMTRFLKSQTEDRARNINRLQKFLEGANIKLSEHVSDIEGMSATELLELVIGKPDFTLDDVRSRMHKNMKSTPEQLFAALEGCITPVQRKFFEHVMNVITEQTRQIGETRALIDSVLSDNYKSAIKALDKIPGIGEASALTIVAEAGTDMNHFRSQHAFSKWAGVAPGNNESAGKAKKAKTTPGNKTLKSALTQSAKTAARNKVSFFSAQYNRLVSHRGKNRATMAVAHSLAIAIYFVLSGQEFKDLGSNYYNQFNREKKINSHIKQLSKLGVTVTVSDALKRQAAKKPPGVSVA

SEQ ID NO: 271947 - protein, 358 aa, unidentified
MKQISTSHASLTIGLDVGDKRSVAIVLDAAGEVLEELKIATTRAGIHSAFSGRPASRVALEVGTHSPWMHEQIASYGHDVLVANPRRVRLIGQSRKKNDRIDAEALARLARMDPKLLAPIQHRKKQARMHLMILRSRDCLVASRTRLVNHVRHEVKVWGERIPSFSTPAFGKKARAHIPEDLRAALNPILDQIETHTSMIRDYDKMVKHLCEQVYPETSRLLQVPGVGPLTALCFVLTLEDPRRFKKYRNIGAYLGLTPRQHESGSSAPELRITKAGDRTLRRLLVSCAQYILGPFGPDTDLRRWGLELAGRGGKNAKKRAIVATARKLATLLFVLWQSPKEYQRLRGEATSGSSEAA

SEQ ID NO: 271948 - protein, 424 aa, unidentified
MKMVRNKVCGADIHKKFLVATILSIDGIQISKRFGMKLDDILKFKEWLLENNCEQIAVESTGVYWVPIYTVLEDQIEVIVANPYQIKHTPGRKTDLLDSEWIAELCLKGMIEPSRIFPKEDRELRTLTRARENLVNNITQLKNRIHQALESSCIKISSVLSDIFGKTGRYILDCLLEGKNIEEILNGIKSKMIRKKEAELREAIKNSLDSAQILVIRINLELIEEFQKKIKTLDSEIMSRLKRLNEDLDIVMSIPGTGFISASSILAEIGNYRDFANGNKLAAWCGLVPSVYGSAEKIIMGSITKQGSKHVRRMLVQVAHAISRTKNSRLRSFFLRIKSKKGTKVAIVALARKVLCILHHLLVNREMYEENGNLKPKSLKFDRASSPIQITEQDMIDTLTKAGYIVKKMDKGGGSRGGYSTPLS

SEQ ID NO: 271949 - protein, 341 aa, unidentified
MGQVSTIGLDLAKSIFQVHGADASGAVVVRNRLRRSQVRPFLAAQPPCTVAMEACGSAHYWAREIAMLGHAVRLIPPAYVKPFVKRQKNNATDAEAICEAAQRPTMRFVAPKSEQAQAAALVVRARDLLVRQRTQVINALRGHLFEFGIVVAKGPAHVPQLVQAVENPDEPLPEIARPVLQILIDTLHRLDEQIALLDREIAQRAKADETAHRLMTIPGIGPVTAVALTALAPPAQTFRRGRDFAAWVGLTPLQHSTGGKQKLGATSKMGERTLRRLLIIGASAVLRWAARHGAPAGPWIARMLACKPPMLVRVALANKMARIVWALMAKGGTYQAPAARA

SEQ ID NO: 271950 - protein, 421 aa, unidentified
MENTLARKLKQVPQGYLIIGVDPHKKKHAAVAITHDFTVQAKSKFDNTREGLEMMLRQARMEMTKSGCRGVMFAIETGGHYWRNVAYFLDEKGIPFRFINQYTLKRRREGKDLNHRKNDYRDAEVAAQLLCTGEFVESVIPQGIYAELRTAHNGYRRLVKERTRITNLLKGLLDGLFPEFVRVFKDPCGLTALSVLSTCPVPGVIAGMTEEEFVATIEARHRGRLMRKKLRALHHTAEASIGIAAGAQSLSMEISFLVEKLNLIERHIGIIERTLIRLVDATDEGKYLLSIRGLNYIAVAGLLAELGCFKAYRSAKQMIKMTGSNPTESESAGKKGSRTPMSKQGRPVLRYCAWTAVIPMLRFNPDFRAWAKRRRERPVHANPLGGREIVGAALNRLLRLSFALVKNQTYYRSPQLVQVTG

SEQ ID NO: 271951 - protein, 344 aa, unidentified
MSKQSPDMMTVATVGLDLAKHVFYVHAVDGADQPVLAKMLRRRDVVPFFASLPRYLVGLEACCSAHHWARELAALGHDVRLISPAYVKPYVKRQKNDAADAAAICEAVTRPSMRFVKPRSIANQAVLMQHKVREMLVGQRTQALNGLRGHLAELGIIAAQGARHARALAEILCKGDASIPQEVRATLLPLAIQLDHLDVQIAEADAAIVKLTKSDPVSNQLMSIPGIGPVAASALSASVGVPSAFSGSREFAAFLGLVPRQNSSGGKPRLDRISKMGNAYLRKLGAHAVLYHRKQHSDALRCWADRLLESKPFKLVAVALANKLARLVFVIMSQNSRYRSVPAQ

SEQ ID NO: 271952 - protein, 370 aa, unidentified
MPKCTPLFVGLDVHKETISVAYAAGGVAEPPQFVGQIGTRQSDIDKLVRRLHTRSSRLVFAYEAGPSGYVLHRHLTGKGLDCRVVAPSLIPKKPGDRVKTDRRDAVELARLLRSGDLTGVYVPSVDDEAIRDVCRARDATRITLKAAKLRLKAFLLRLGFNYVGRADWNDAHRRYLAQVVCPTPAQQIVFQESLRAVDEQVERLARLEDQLRELAPSWRLYPVVEALQALRGVQWIVALTVVAELGDLTRFDNPRQLAAFVGLTPSEYSTGSSRRQGGITKTGNPRARRVLVEGAWAYRYPAKISAHIQKRIDKLPKVAQDIGWKAQLRLCKRYRRLIGRGKHANIVTTAIARELLAFMWAIAKEVPITA

SEQ ID NO: 271953 - protein, 317 aa, unidentified
MARAGVGIDVSKDWLDVATTESAAPWRVPNSAEGLNQLVAQLGAVDVHRIVLEASGGYETAALARLHAAGFAVVLVQPLRARHFARALGQYAKTDAIDAQVLARMALLAVDDAPRWEPIAAHLADLKALVDRRQQLLALRDAEKKRLRFARAVVRADLERAVAELTAQVADFERRINTLVASSRRLADEVELLESVRGVGRVSAATLRVGIPELGTLTRQQVAALVGVAPMNRDSGGKSGRRYIRGGRDLARHALYMAALAAARWNTVIQARYAHLVAKGKKPKVALVACMRKLLIHLNSLMRSHLQGPSATVPLGS

SEQ ID NO: 271954 - protein, 332 aa, unidentified
MYSIGLDISKSSVNVHVPLGALDLEIENTLKSFKLLYTKLKKLYKKEIDKVTFVFESTGSYSVLLYKFCADKHIKIFMINPKQARNFARAIAQRNKSDVIDARVLSEAIVVAREKEIKVPTIDPVAEEMKELMVYYRLKVKQRTQLSNHLESLTAKAGSKSLCRTVKSEIKSLKKSEESIIDDVHAIIFKSEYLKAKYDAITSVKGIGKIGGIVLLHLFIHYPHANQRQIVSLSGLDPIIRESGTSIRGKSRISKAGSRLYRGTLFMTAMASTLHNPQMKTFYERLKANGKHTTVAQIAVMRKLIVVAHSLFKSGEVYDQELYKKTTGIQSE

SEQ ID NO: 271955 - protein, 386 aa, unidentified
MQHATTSPAPQRTCSRGDCPTLFVSLELSRSTWVATALAPGSSKMSKHTLVGGDGRKLLDLLARLKTTAEQRIAAPVKVVTIHEVGLDGFWIHRLLEANRIESHVVDPASIAVPRRHRRAKTDAIDGETLLRTLMAWQRGEPRVCAMAVPPSPSEEDRRRVSRERAKLLQERVRHTNRIRGLLFGQGITNYNPLHKNRRKNLEQLRTGDGRSVPAHLKSAILREIDRLELVLRQIGEVETERDEMLQLAEPSSPAALLMRLKGIGAEFATVLYLEGLFRRFENRRQLAAYAGLTPSPWKSGSIDQEQGISKAGNPRLRSTLVELAWMWVRYQPASALSCWFRQRVGSKRGRIRRISIVALARKLLIALARYVSYGEIPAGAVMNAG

SEQ ID NO: 271956 - protein, 374 aa, unidentified
MLLPRQRFMLAKGTKDKEHAMSQTLKSAIAVIGIDIGKNSFHVVGHDERGAIVLRQKWSRGQVEARFANLSPCLVGMEACVGAHHLSRKLNSLGHDARLMPAKYVRPYSKGQKNDFRDAEAIAEAVQRPTMKFVATKTADQLDLQGLHRVRERLVSQRTGIINQIRAFLLERGVAVRQGLRFLRAELPRILATPPDVLSPRMLRIIEDLAGDWRRLDERVEGLSKEIEAIARQDAGCERLMSVPGIGPIISSAMVAAIGAGDVFTKGRDFAAWLGLVPKQISTGDRTILGKISKRGNRYLRVLFVQAAWVVLIKPQSWERHGLKSWIEAAKKRLHRNVLAIALANKLARIAWSVLAHGRSFEASKLAAAVTQPA

SEQ ID NO: 271957 - protein, 343 aa, unidentified
MDHSAGLDVSVKETSVCIVDDTGKIVREVKVVSEPEALLGVLKNPGYHFKRIGLEAGPLSQWLYSALAEAGLPVICVETRHMRAVLKAQINKTDRNDARGMAQMMRVGLYRPVHVKTLRSQKLRMLLTHRKLLQSKAIAIENDLRGTLRNFGLKVGMVGKMRFEARIKELVENLPDLAELVEPLLVVRRVLREQFVIQHRRLLAIVRDDEVCRRLMTVPGVGPVVSLTYRATVDVPARFRKSKAVGAVFGLTCAKYQSGEVEWTGRISRCGDEMMRVMLYEAAQSMLRSKKWSWLKAWAMQIARRRGMKKAIVALARRLAVILHRIWVDGTEFRWAREQAAAA

SEQ ID NO: 271958 - protein, 343 aa, unidentified
MYNAVGIDVSKGKSTVAVLQPGGTVIRKTFDVSHTSQNLNELADYLSSLDGTTKIVMECAGRYHEPMVKALSEAGLFISIVNPHLIKNFGNNSLRKVKSDPADARKIARYTLDNWTELRQYSGMDNTRTQLKTLNSQFSFFMKQKVAAKANLIALLDNTYPGVNKLFDSPTREDGSEKWVDYAYSFWHADCVRKIGLKAFTERYMSFCKKHHYIFQQDRPEKLFNASKELVAVFPKEKTYKLLIQQSIQQLNLASEHVERFRREMNELASTLPEYSTVMGIYGVGKTYGPQLIAEIGDVSRFTHREALTAFAGVGPGVDESGQHKSKSNRASKVGSARHCFRS

SEQ ID NO: 271959 - protein, 343 aa, unidentified
MYVGLDVHKKYCYYAMVDGRGTVVKKDRFRTTVEELEEFASALPQGDQVAIEASASGCFVYEQLDEQGIAVHLAHPTMVRPFAKKHVKTDKVDAIVLAQLLRMDYLPESYVPDEAMRDLRTVVRHRAGLVRIRTSLKNRVHALLTMEGVQPPAVSDLFGKKGREFLETVKIRESRRLVLDNYLKVLDELNERITGVEQFLEEKAESTEEVAWLRTIPGIGLHNAVLILSELGEVSRFSRPQGLVCYAGLAPKVAQSGDQVRYGHINRQSNGFLRWAFVQSAWSAVLSSTPNRFQRIYQKVKARRGAKIAIVATARHLAESVYWVLTKQEAYKEPKAQRASSSP

SEQ ID NO: 271960 - protein, 380 aa, unidentified
MPEAVIGLDVGKSSHWACVATRDGEILLSAPVANREDDLDSLFGRFPDALVVVDQSRNIGALALARARAAGMSAAYLPGLAAHGAARLFAGDAKTDERDAMVIAKTALGIPDALLPVGDPGPTVAAARALAAQRNFLTCENTRSKNRLRSILLESCPAFEALVDLSDGPQLRLMASLGGAWSVADAGPRRAAALTRGAARGKIEALVRSTTSSTRPDASVVAAEDRAVRLLARRISENSAEIEAITAEISALLEGDDTYRCLLTVPGIGPKTASELAISIDIEDFPSHDRLASYCGLAPRNRQSGTSISSVTASRQGNKRLKNLLIFSCNCLTRTEGRWGDYYARCRERGMPHGKALKALARKRLKVIYAIMRDRVPYAA

SEQ ID NO: 271961 - protein, 391 aa, unidentified
MVCVGIDVAKDKHDCVIINSEGEILADVFTISNNMAGFKQLHQAIQRCTCKTDKIKVGLEATGHYSYNILGFLLDNGLATYVLNPLHTNLYRKSLSLRKTKTDRVDARTIAAMLLSDVSLKPYTDTAYHNEDLKSLTRYRFDKVQERAKLKQSVSRLVCILFPELEKLVPTLHMASVYALLDEFPGAKQVADANLTHLKSVLYDASRGRFGRDKAIEIREAARSSIGSVMPAKSLELRHTIRLIRELNAEITEIESEIDKIMEELHSPITTIPGIGARMGAMILAEIGDFSRFDSADKILAYAGLSPSTYQSGKLTNCYSHMEKRGSRYLRFAIFNATKYVCLWDSSFSIYLAKKRAEGKHYNVAISHAAKKLVRLIYALEKSGRPYKAVA

SEQ ID NO: 271962 - protein, 427 aa, unidentified
MHYTQNDKIRQATEGTIVVGVDIGSEKNYARAFKGNGIEITRKAICFPNTMEGFKFFEETVTKLTVPLAEKKIVVGVEPTGHYWFNFADYCQGKRMTVVTVAPQHVKHSKEMDDNTQRKDDRKDPRVIAKLVIEGRYCIPYRPKGIYAELRVAYNRRCEIVEAETRAKNRIRRWFDLYFPEYRTVYGSVAAITGIEILKQAPLPQDIVSLGVDGILQIWRANKLRAAGLKRAKTLFEAAQRSICPPDAGRAVRMQLWQLLEEYEYIRKQLQEADIMIGIVTADIPEVNELMKIPGIGLITAAGMISEMGDMRRFDDPRQIQKLAGLAIIVNESGKHKGQSEISRRGRKRLRKILFQAALVLVRSNKEFKTIHDYFTTREKNPLKKKQSLMAVAAKLIRVCFGMVKNGTPYDPTKVLKDIRRTEPKAA

SEQ ID NO: 271963 - protein, 392 aa, unidentified
MRISVGIDIAKHTHWVAAIDANGVVHIDRKLDNTPAAIAALVEELSGLDAAARIGLDVVGGIAGLAEAMLAEVGFALLHVPGLAVNRARQGTVGGEHKSDPRDARIIAEQVRIRQDLRPIEPASENDLELRLLVGRRRDLVAAQTQRLSRLHDLLVGIFPGLERTLDLTTKGGLVLLCRFVTPAELRAAGKKRLVRHLKAAGGLPKVDQMADRALAAAVEQTIAVPGERMTARLIKELAAEALAVRGRLASLDGELQEMLDRHPDAALIRSLPGMGAVLTAELIAEAGSLTRFRSADALAAAAGLAPVLRQSGKVRFLRRPTGGNKNLKRIFYQSAFCSLGHPDSRAFYDRKRREGRRHHQAVIALARRRINVLWAMLNNRQAFQTKFKLAA

SEQ ID NO: 271964 - protein, 425 aa, unidentified
MREHDTRAEAGTVNTPGRGTMFEIEDVGVFLGLDVGKSNHHGHGLTPAGKKVFDKPLPNSEPKLRAVFDKLTAKFGTVLVIVDQPASIGALPLTVARDAGCRVAYLPGLAMRRIADLYPGEAKTDAKDAAVIADAARTMPHTLRSLELTDEITAELTVLVGFDQDLAAEATRTSNRIRGLLTQFHPSLERVLGPRLDHQAITWLLERYGSPAALRKAGRRRLVELIRPKAPRMAARLIDDVFDALDEQTVVVPGTGTLDIVVPSLAASLTAVHTQRRAMEAQINTLLETHPLSPVLTSMPGVGVRTAAVLLTTVGDGTSYPTAAHLASYAGLAPTTKQSGTSIHGEHAPRGGNRQLKRAMFLSAFACMNADPASRAYYDKQRARGKTHTQALLRLARQRVSVLFAMLRDGTFYQSRTPNDVELAA

SEQ ID NO: 271965 - protein, 405 aa, unidentified
MEGDKVHVLGIDVSRGKSNCALLHDHTVIKEFQIIHNKSGLAKLKSIITSDLPVMAVFETTGIYSRVLTRFFSEEGMNYLEINPLESSIRMAGLRRQKTDRSDAVKLALLGIDQKSLIHGRRPYSRPYEQLHLMAHRYLEITKERSRIINHLHAALDQTFPELNDIFNPIRSVLGLTFVSLFPHPDFLTGYIPGTMAKQIIGLVSPKIHSDLIVRRCNEVWQAGQLSYPAQPANSFLTNQIHSYCEEIQRYNQAHDLLKRQLITYAKTFPEFKLIASISGAGEISTALLLGFTGKIARFPSYKQLNAYVGIDLRRTQSGGLKEADRINRRGQSSARYIMFEMIRSMLRNKARIDNHIVDYYYKLKKGPHPKPDMVAMIACVNRLDRTIMNLVRTNQIYNYARTSH

SEQ ID NO: 271966 - protein, 410 aa, unidentified
MKMAGIDVDKKVLMVVVVDTSVPEEKPVRRRFVTLPSELQRFRIWLQDQGVEEAVMESTAQYWRSVWLELEPHMSLHLAQAFSNRAPRGRKHDFKDAERLVRRLMADELILSFVPKGEQRIWRSLTRMKLQLTRDRVRLQNQMECLLEEMRIKLSIVVSNLLGASGLRILHALAQGETDPKRLAELGDERLHCTEEQLVDALTGRVQPMQRGMLALQLQRLQLIDQQMAQLNSMIAQAMKSHQDAVIRLAEVPGLGVDSAQQIIAEVGAQASTFSSAAELTAWVGTCPGKEESAEQNHSSRSAKGNKYLRRVLNQAAHAAVAKKGSYFQVVFRRLMPRLGYKSAIWAIAHRLCRVVWKILHEGVRYIEQGRDVGPREKKQRAQMLARALRKLGYEVTITPINELAPKPAI

SEQ ID NO: 271967 - protein, 317 aa, unidentified
MTTPGIYVGIDVAKAELVVATTTAVICRVANDRSGYAELMRRLAKMTVEAVVLESTGCYGQGVVMALVESQVPVVVVQPGRVRYYARSLGIHAKTDPIDATVIAQFGQATRPRLFTPLSADVLHLRALVDRRDQLIELRIREENHLEAVTNPIITRDLRASIKRLLAAEKAYTRHIADHIAKHERLARLSAAFQDESGVGPQTAATLLAHLPELGTINRQQAAALGGLAPFDHASGTHDGKRAIYGGRKRVRRALYLAALTAGRCSDWLKGVYQALLQRGKPKKVAIIACARKLLVRLNTIAAKAYNPHTQIQGNAP

SEQ ID NO: 271968 - protein, 340 aa, unidentified
MTEVTTIGLDLAKHVFQVHGADSEGRPVLRKRLGRAKLLPFFADLPPCLVGMEACASAHHWARELQALGFEVRLIPPQYVRPFVKTNKNDAADAEAICEAVTRPTMRFAAAKSAEQQSVLMLHRVRELLVRQRTMLINALRGHCAEFGIVVAQGAPKVEELIAIIEDADDMRLPSVAREALGALVAQLRSAQGRIKALETRLTAWHRSSAASRRLAAIPGVGVITATALVATIGDGSQFRSGRQLSAWLGLVPRQHSSGGKQRLGRISKHGDGYIRRLLVHGARTVLRWRRAKPGAGIGWTDRLLARRPTNVVLVAMANKTARVAWALLRHERIYQPVPA

SEQ ID NO: 271969 - protein, 334 aa, unidentified
MKQVNQVGVDVDSEALVCMMKRAGQRLPLATFANTAAGHKKFIRWVTKGACPARVCLEATGIYSLEFALALHEAKNVEVMVVNPRAIKDFARACMQRAKTDAVDAGGILDYLERMPFAAWQPPAPEILELQAINRRIVQLNTELTREKNRRHAVEFAGASANAIANDIEVNMHHLERRIERMHESGLQLVRGVPALATKLAHLVSTKGIGEASAMRLLAELLVLPDDLAAPQWVAHAGLDPRPYESGTSVHRPRRISKVGNRHLRAALYMPALVAIQHEPNVKAFYDKLIAVGKKPMQAVVAVMRKLLHAIWGMLKHDQDFDGNKFFNIAAKIA

SEQ ID NO: 271970 - protein, 408 aa, unidentified
MARYYLGVDWADQSHQLYVSDESGRKIRELEVQQTADGLAELGRWLDESRSQGIELWAAIEKPEGRVVDFLLDHGVVVYPVNPKALDRARDRFRMSPSKSDGFDAYVLAEFLRTDHAHLRALEPNSAEGQELKMLTRDHQRLGRQKTRLLNQIGITLKEYYPVPLEVFESLDTKIALDFLKAYPTPQALSKLTRRGWKRFAKRDHHLSEARCSELWDKLNKPQLAVPTHVVRAKAKLLAALVMQLEASVKAVDSYSQEVQSFFAAMPAAEIAKTLPGGKSGTTVASIWAELGDAPKRWNSFRHLQAEGGAVPVTKASGKSRMVQFRFACNKHLRQAMYWFSFNSLQRSEWAKKYYRNQRAKGHSKHESLRALGAKWLKIIFVMWRDHKPYDENYHLANIARQMMRQAA

SEQ ID NO: 271971 - protein, 366 aa, unidentified
MKKTSTILVNGNMIFKGHQLTIGLDLGDRWSCYCVLEEAGQVLLEQKLPTTPEAMKQTFESIPRSLMALETGTHSPWVSRLLRELGHEALVAHAQKVQLISKSNRKDDRHDARTLARLARIDPELLGPVRHRSAKAQIHLTVIRARAELVSARTALVNAARGLAKSYGERLRKCGTQQVSRELAAALSVELREVIEPLLREIESLNERIKEYDARMEKIARESYPQVELLKQVKGVGTQIALTYILTLEDPHRFPKSRDVGCFLGLRPGRRDSGESQPQMHISKEGDPYLRTMLVQGAHYILGPFGEDSDLRRWGLKLAARGGKSAKKRAVVAVARKLAVLLHRLWVSGEVYEPLHNSDKAMRAVA

SEQ ID NO: 271972 - protein, 384 aa, unidentified
MAAQRISYTGERIDVGIDVHKETYTVTCLCQRQMVKTATVPADPARLAESLPRWFPGASIFSAYEAGFSGFVLHRVLTTAGITNIVVNPASVAVAANEKVKTDRRDAKKLARDLADGRLRGISVPTEAEELARLLPRTRAQLVAHRATSTRQIKAKLHQFGLITPGSRRLMSSRYLREMAAWQLPTELHVSLMLLADQWRFATRQLLEVRRLLREQAKAQVALETVYRSVPGIGEVVARTLATAWGDMTRFANERALLSYTGLTPSAYSSGTAIRRGHISRQGVSRLRHVLVETAWRALPRDPILQAMFDRIAATRGKQRAIVAIARRLIGRIRACFRHGTIYAVGTVSEALAPCGGAAWPHENWGHAVWPHRQRLQPSRRPKA

SEQ ID NO: 271973 - protein, 348 aa, unidentified
MGRFVGIDISKAKCRAAIMDAGGIILEEFTFTNNHEGIECLASRLTMHDKVVMESTGSVWTNLYNHLDERHILVALANPLKTKAIASARIKSDKVDARILAHLLRSNLIAESYVPPKHLREIRALVRHRAGIVKIRTMVKNEIHALIDKHGFRHDFSDLFGKHGLEWLRSLELPSLDRLILDNHLTHLESLNQQTERVDEEIHDKAVEDEDVRLLLSMTGIDVYSALLIRSEIGSIERFPHYKKLVSWAGIAPSLHQSGSVEYHGSITKQGSRTLRWIIVEAARVAVNHDERMRVYYERVKHRRGDQKAIIAVANKMLKIIWFMLTRREPYESRNEKRYRQKLNSIAS

SEQ ID NO: 271974 - protein, 338 aa, unidentified
MNYVGIDHHRQYSHLTVMDQEGQVLRSGRVPNVQVEIEKFLEGLEAVEAVIETGRSSYTMVDALEEMGVAVKIAHPNEVKAIARAKIKTDKRDSEVLAHLLRMKMIPEVYRRSVENRQAQRVLRQRAFYVSAMTALKNRVHALLAQQKEEVREEVARETNIFSERGRRMLLGLDLARGEKRLLEALLKTYRHLETRIGESTALVEKLYEESREAQLIRTIPGFGKYLAVLVAVEIADINRFADAAHLHAYAGVIPSTHSSGDRTHHGKILRAGNRWLRWAAVEAVWPGIRADYDLRFFFERLARGKGANKAKVATARRLLTIIYKVLKEGRNYIAYRR

SEQ ID NO: 271975 - protein, 410 aa, unidentified
MKEQKQKVKANTVKVDHRNIAGIDVGKRKHAATAVTPKGIVIASLKSFENNRAGVDLLERQVLQPATNRSKPLIAMEATGQYWSALHDELQRRGYSCVVLNPIQTGNRGNKRIRKAKTDPLDSVLIARTILAGDAQATLVPDETIYELRLLVRHRWRMIKVHGAVLRYAIGLLDQVFPEYDGIFCKPFITSVRTLIREVGLTPKTLASKQADVKKILEKASRKRLSAETIDELLKRAKISIGTQQGESVVNGQFRMVVDYLDFVENQVQSINEQLRERVATLDSPLMSLGIGAEVVATILAESGDIARFPGPGEYSTFCGLDPSVRDSGDSIRGVSHISKRGSPLLRWALYVSAPTMITKHRDFAKIYERHVNRHKGHRFALIAVAHKLARVIWRLVQDGRTFTKQPPKR

SEQ ID NO: 271976 - protein, 480 aa, unidentified
MKSKRQEKTNNQPTQHHWHEMNRKQRREMMRKIQSEDLRLEVIHPDAAGIDIGNESHYAAVPPGRDSQPVRRFGCTTTELKAMAAWLRHCGICTVAMQSTGVYWVAVFDILEETGFEVFLVNARDTKNLPGRKSDVQESQWLMKLHTYGLLRNSFRPSQEIRVMRTYWRQRNDLVQSASRHILRIQKALTQMNLQLANVLTDISGATGQAIIKAILAGERNPHKLAEFRDPRVKASEEQIAQSLEGNWQPDLLFLLKQEQDGYEFCQRQIAECDRQLAQYLQQREDRSQGAPLPEEKRKGRLKKKRGNKPRFDLRKGLFRMTGTDLTRIDGIDVMTATTVISEAGYDMSKWQTENHFVSWLRLCPDNRISGNKVIGKGRLPTNNPISIALKMAATTLRESKTYLGAQFRRLRTRLGAPIAIKAMAAKLARLVYRMLRYGMKYVDQGAAFYELRHRELQIKRLKAKAEKLGYRVTPIPVAA

SEQ ID NO: 271977 - protein, 316 aa, unidentified
MAKRVMEVTLGIDVSKDELVIFCWESATLVRLANEANTIRAWLRTLTGPVRIAIEPTSSYHCTVIELAHALEHTVYLVNPRQLVHYREAVNLRHKSDPDDAWLLARFLVTEGTQLRPFTPPGRKAQELWQFIKRRAVLVESRKQLQQSLAGVALGHRALLTQLQAVLLRIDQRIRALIQALGWNDDYRRCLSIPGIGPVNAAALVCAFNRGAFPGGDAFIAYLGLDIKRRESGHFKGKRKLSKRGEPELRRLLYCTAHPARCYAPFDRYYQAQLDKGLSKTAANIILGRKIARIAFSLLTHKQTFKKQEIAYSQAP

SEQ ID NO: 271978 - protein, 343 aa, unidentified
MDHFGGLDVSVKETSICIVDDTGRIVREVKVASEPEALLQVLGNPIYRFKRIGLEAGPLSQWLFSALAEAGLPVICVETRHMRAVLKAQINKTDRNDARGIAQMMRAGLYRPVHVKTLRSQKLRMLLTHRKLLQSKAIAIDNDLRGTLRNFGLKVGVVGTVKFEARIRELVENLPDLAGLVEPLLKVRRVLREQFSILHRRLLAIVRDDEVCRRLMTVPGVGPVVALTYRATVDVPARFRNSKAVGAVFGLTPSRYQSGEINRAGAISKCGDEMMRVMLYEAAHIMLVRLAKWSWLKAWAMKIARHRGMKKAIVALARRLAVIMHRIWVDGTEFRWTRETVAA

SEQ ID NO: 271979 - protein, 399 aa, unidentified
MLEQAWAGVDVGKEHHHCVVIDAEGRRLLSRRVANDEAVLLALISDVTGLAGQVRWAVDISTGEAALLLALLAAHDQQVCYLSGHQVNRAAGGYRGSGKTDAKDAAIIADQARMRRDLAPIRVPDEVIVELRMLVARRRDLQSDRVRAVNRLHETLLTISPALEKALDLTNQGPLILLTGYQTPAAIGQLGVTELTAWLRARKVRRAGELATRAVAAANAQQIALPGEALAAHLAGQLAEGVIALDEQIKHTDKLIEGRFHRHHAAPVILSMPGIGFLLGAEFLAATGGDTAAFATPDRLAGYAGLAPAPRDSGRISGNLYRPKRYNRQLQRVFYTSALISIRCCPESRTFYDRKRAEGKRHNQAVLALARRRVNVLWALLRDHRPYQASPPVSTAAAA

SEQ ID NO: 271980 - protein, 364 aa, unidentified
MLIIGCDYHPSFQQIAFVDTETGEVKEKRLVHREEAEKFYRDLAAEGRQVRVGMEASGHARWFERLVAELQFELWMGDASEIRRKRGRKQKTDRRDAQHILDLLLKNDFPPIWVPNWENRDLRQLLWHRHRMVQARTRIMNQLQAVALNEGLLCRKKLWRERGRQQLEAFRLARWASRRRQDLLQLLDRLNPTIAELSQAIEREVEKCPAAQQLMTHPGVGPLTALGFVLIIGDASRFQCGKQVASYLGLVPLEDSSGNRRRLGHITKQGSSMLRFLLVEAAQVTVRSLPEWRRRYAHLMMRRGRKTAKVAMARRLAIRLYWMMRQGWDYQQWSKFGSHAGQPGNRDGVQSNIEKLIGRPAPLS

SEQ ID NO: 271981 - protein, 344 aa, unidentified
MTYYAALDVSLRSVNLCVIDDQGAIKAETKLASEVEDIACYLHGLDYIVSSVGLEAGTLTQYLTYGLQSAGFEVICMESRQVKAALSAMRNKTDKHDARGIAQILRSGWYSRVHVKSLESHHIRLLLSSRKAVLSKCVDLENEIRGLFKVFGIKLPPKLGHGAFDAAVRDTIEADAALAHALLPLLEARLYLYHTFRELDNRTRKMANRDVVCQRLMSAPGVGFITSLTYKAGVDDPSRFKRSRTVAAHFGLTPRRCQSGEIDNPGHISRAGDPDVRCALYTAANAMLTRSSRWSSLKAWGMQLAKTRGHRRAVIAVARKLAVILHRMWLDDTQFRWGTEEVRS

SEQ ID NO: 271982 - protein, 403 aa, unidentified
MNNVAGIDVSKGKSMVSVLRPFGEVVAKPFSIGHTGSELKELADYLKSLDGETRVVMEHTGRYYEPVARFLHEEGVFVSAVNPKLIKDYGNNTLRKVKTDKADARKIARYGLDNWAELRQHTPMDTIRMQLKTLNRQQSLYSKTKTMMKNNLIALLDQTYPGVNALFDSPVREDGSQKWVDFATTFWHVDCVRNMSLTAFAERYRKWCKRHGYNFSQSKAVEVHAGAQDLIAMLPRDALTKTMVRQAIDALNAVSASLERLKAEMQALAAQLPEYPVVMVMHGVGDSLGPQLMAELGDVTRFTHRNAITAFAGVDPGADQSGTHEAKSTRVSKSGPPELRRALFLVMDCLLKTMPQDDPVYRFMDKKRAEGKPYLVYMTAGANKFLRIYYGRVKEYLASLEGN

SEQ ID NO: 271983 - protein, 357 aa, unidentified
MEKYLKQSLGIDVSKLNLSLSLGFLNGMLEKEFDSHPDVSNDLKGYKELLKWLKASVDSEVELLVVMEATGVYHQGIAHYLYEQGYSVCVMQSGRVKRYAQSLDQRSKTDALDSRMLSMLGLERNIRLWHPPSKELQELKGLSRERSSLLNDRTMETNRQGAIASSVHSNARALKRHKVRLKLLNTQIAAVEEEMGLLIEDNEELKRKLDYLTSIPGVSFISAATVIGETLGFESIVNAKQLASYAGYDVVLRESGNFKGKTRISKKGNSHIRAVLHMPSMTCVRCNTTLKQFYNRLKPNKAKPLVALVAVQRKLLILMYTLWKNEEKYDAEYEIKKQQKHETLAARDNSLINQPVS

SEQ ID NO: 271984 - protein, 387 aa, unidentified
MYFIGIDISKFKHDCAIIDEAGDTVTASWSFANNCEGFSLLKQLLDALDGQKKIGFESTGHYGHNLKLFLEANNFSFMEFNPLLVSKFVRSKSLRNTKTDSLDAVSIAQYLMTVEYKPYPPSFYHMDQLKSLTRFRDSLVRQHSRQLVELTNILDKVFPEFKPFFDGRFSATALYILTHYQSPEKIANMNAKSYEALRKKSRGKFSMVKFAQLKTLAKNTVGRSDAFLLKQMEITIDIENQLDAKIDEIESQILECIRALNPPILTIPGIGELTAAIILSEYGNINKFENPAQLLSFAGLEPGYYQSGLAEHQGHMVKHGSSHLRYALMNACLPLVTYEPVFAEYYAKKRAEGKPHRVALTHVAKKLLRVIFTLQTKNISYNPTLIR

SEQ ID NO: 271985 - protein, 417 aa, unidentified
MQIVHERCCGLDVHKKTVVACVLVTEAGGGARRRVRTFGTMTADVLALGDWLDGFAVAAIAMESTGVYWKPLFNLLEREDRRITLVNPQHMRAVPGRKTDVKDSEWLADLLRHGLVKPSFIPPVAIRDLRELTRYRKTLVQQRTQEANRLHKLLEGANVKLAAVASDILGKSGRDMLDALLGGEQDPTVLAELARGRLREKLPALRLALEGRVTPVHLTLLAQILAHIDFLDGAIGQLHDAIDQRLGPFAEAVALLQTIPGVSAKAAAVIVAEIGTDMGRFATHKHLASWAGLCPGNKQSGGKRLSGKTTQGNAWLRGLLSECAWASARGKTGYLAAQFRRLARRRGAYKALVAVAHSLLVIIYHVLRDRRPYADLGADYFDKLDVERVERHHVRRLNALGYSVTLTALPPPDPVPV

SEQ ID NO: 271986 - protein, 318 aa, unidentified
MKKAFFCGVDVSKDKIDVCFLTSIMSEKAKFETLPNNYELIKVYFDSFKNDEILVVFEATSNYHLVLQKALSDLGIRYCVTNPYKSSLFLKHLSTIKTDTSDSYGLAVYARTFKSEIAPDKYNAEYLEIKSYNSTLNLLQKINTQLKNFKSSQKTLNNKVIDDVIANLIKEIAKLQAMLQKLAFDLVKKAIPETEEIIKENKGFGIDLALNLFPQLYFNRDKSEKQFISFIGLSPRIFQSGSSVHKSQKINKMGNSNIRRILFMTALCAIRFNAKFKSRYERLLANGKKKMVAVVAVMCAIVRYLKSLFPFNPEIKAI

SEQ ID NO: 271987 - protein, 423 aa, unidentified
MAYRIAGIDVHKKKLAVVVADVEVEDEYPLERRRYGSNPEQLQRLAEWLREQPVEEVVMESTAQYWKPVWGALERYWKPSCEKREGAGRMSGTLHLAQALSNRGRRGRKRDFRDAERLVKRLVSQELTLSFVPHAEQRLWRTVTRTKYQLRRNKVRLHNQLEALLEEARIKLSSLVSDLLGASARRMLQALAEGETDPAALAALADQRLRATSTQLRDALGACTELNPVYRRLVKMALEELQLIEQQIGQLDQQIASLLHQHQDAVQRLAEVPGLGVDSAQQIIAEVGAKAATFPSAKNLSSWVGACPGEEESAGVNYSPRSPKGNRHMRRLLNQAANAAVKRKGSIFEIVYRRLVPRLGHNKTIGAIAHRLCQLIWMILYKGVRYEERGPAVCEQSKRVRTVRMIRTLRKLGYRVELQAHPA

SEQ ID NO: 271988 - protein, 389 aa, unidentified
MKKVFIGIDVSKEKLDATIIKSTDSRHETVGYEVFENSKDGIRKLSGWVRKTTKATKEECLYCAETTGGYDRLLCEQLYAKGCAIWRESALEIKRSSGLRRGKDDKADSKAIAEYAMRHSDKAEPYRPSDKKLEELRGLYLYRDSLVEEKKVKATRAKEIKATSASSPSATFMYKTSMEDVKRIESRIRECEKRIGRLIASDDDLARNYKHVTSVKGVSLVNGVALLVYTGNFTKFSSPNKLATYYGVAPFRNQSGTSVNSRADVRCYCNRKLKGQLSQAALIAVLYDSTLKAYYDRLISAGKPRGIALNNVKNKLLHIIFSLVEHDCDYEENHEWKRNERNGKTEQDSASSGLRKTSAEEASGYRQPTSKLFDQNTPPKPARFEALTE

SEQ ID NO: 271989 - protein, 448 aa, unidentified
MSKKMSLEIVHPNAAGIDVGSRTHHVAIGQALDDVKEFGVYDQDLKAIAKWLLDNNVTTVAMESTGSYWQNLFATLQEAKLEVILVNAMFSKNPSNKKTDVKDCRWLQKLHSIGLLSGSFLPDTDTEQLRTYCRHRNNLLDCSADTVRKMQKYLRLLNLRLDVVVNDIVGQTGLAIIDAICKGETDPAVLATLRNGRCKKSEEEISKALCGNGRKDYLFALKQEYEIYLNLQAKIKGCDTEIEKLLQEQINSDEQKKQLSIDKKKHKRINKNTPKNMDMNLLAYQYFGGVDLLAIEGVSHATVMSIMSEVGNCIHDFPSAKQFTSWLRLAPNNKISGGKVLSSKIPKGSNRLKIALRNAANVIGNLKDTALSNFFKKIAFRKGRKAAISATARKLAVIIWNMLVKKTAWQTTSPEEFVVQQRKKKVTEVKKLIHKFGIKTDELGLNFT

SEQ ID NO: 271990 - protein, 371 aa, unidentified
MKNHSTFIGLDVHKNSIDIAIADEGRSGRVRHYGKIDGSLSALDKVVRKLVSTGRQLHFVYEAGPCGYEICRHLTAFGLDCAVVAPSRIPRPSSDQIKNDRRDALMLARLHRAGELTAVYVPLPEDEAVRDLMRAREDAKADEKKSKQRLQSFLLRSGFRYTGRSPWSKAHMGWLSDIKMPHRGQQIVLQEYIDTVNQCKERVQRLTGQIRELLSEWQLFPIVQALQALRGVSTIVAATTIAELGDLKRFDTPSKLMSYLGLVPSVHSSGQKTKRGSITKTGNGHVRRVLTEAAWAYRLPARVSRILLKRQENLPQSIVDLSWKAQLRLCSRYRRLWNKGKAKQVVVTAIARELCGFMWAIANDIEGPVTV

SEQ ID NO: 271991 - protein, 401 aa, unidentified
MPDGITVGIDWGGSLHQVAIVDAAGRQIANFGVAHDVTGLAALDERLGAYGEGLPVAIERAEGLLVEHLQARGLRVYPVSPRIAARIRERYRVAPVKDDAFDAFTLADALRHEQTRWRPLAEPSPLLADLRALTRDRERIVAEQVRVKSQLHASLESYHPAATRLFSSLDRKTALAFVRDYPTPAQAALVGERRMARFLARNGYTGRVPAAVLAERLHDNLITAAPGTVAGKRFSACRQADLLELLTHTREAYDARIAELLARHPDAEVFLSLPGVASVLAATLLAEIGEDRERFPEAAALLAEAGLAPVTRQSGKVRRVRFRRAASHRLRQAFTWWAFNSLTESPWARQVYDANRGRGQRQYRALRGLAACWGRILYRCWQDGVPYGAGRHPGARALIEA

SEQ ID NO: 271992 - protein, 339 aa, unidentified
MWYSGIDWADEHHDALTIDEKGHQMGSIRVDQSPQGFAKLDTFLGQIIGSESKEHMACIIETTHGLLIIHLLEAGWPVYPVNPRTVDRRRSASGAKTDLIDAYLLAKTGRADFADLHRLIPDSDKVAELKQLTRDQDTLIRTQTRLVNQLTACLKASYPVALDLFSQLQQKSTLGFLQTYPTVEAARAASLKEIQQQLKQTRHPQPAQAAASIVEMLHPPQLQADAVLTRTKSRLMLALVSQLLPLLEQIATYDKEIHTLFLTHEDHAIFESLPRAGQHLAPRLLAEIGDDRTRDLDASSLQALAGTSAVLYQSGMYSKAHRRLGCIKPLRNALHQQCA

SEQ ID NO: 271993 - protein, 313 aa, unidentified
MNPHITYLGLDIAKLTLDLRLQPGVTPRTIPNSASGHRKLIKAVRALPGPVHLICEATGGYEHDLLAALHQAQIPFTRINPRQARDFARASGLLAKTDRLDAAVLAEYGRVFQPPPTVARTQIQERLSALVARRQELLGLLTQEQLRAEHHHDAFVCRHALGLKRTLQKHLDQIEAQIAALEQSDATLHARVERLSSIQGVGQRTAWLLLAALPELGTLARGQAAALAGLAPYNHDSGPCRGQRHIAHGRPLARTALYMAALVAARCNPVLRPLYQRLRAAGKPAKVALVALMRKLVELANLPLKNPQLALSI

SEQ ID NO: 271994 - protein, 461 aa, unidentified
MECYLGIDVSKGYADFVLLDQNKTKLEEVFQMDDTRTGHDSLKKLLESQMKQHQISMLYCAVESTGGFENNWYSSLIGFSKDMKLKVARLNPSGVKYNANAGLKRNVTDALSAVNIAEYLIGHFEKVEYNEQSSYYSSFRSINKHIKLLSKQQTQTINQLKMNLYSAFPEMVCFCKNSVPAWILEVLVKYPIAGSLKNISVEKLCKIKHVTPEKANSLIKKAKTGVASRTDEAMAFLISSLANQLIEKQKLIKEHKLYLEKHCKGEEVTLVESIKGIGAYSAAAIMVEIEDIRRFSSPKKLVSYFGLHPEIKESGDKKAIARMSKKGRSSMRGILYMCAQSGVIHDSHFKRIYHNQRSKGMSHKQAIGVIMQKMLRIIWGVLTNKKVYQSDIDKQNQDRNVIIVMDNHEKQELKAKRRFSTLGTDAPISNTQSKKRKVHLESQVELVERVRDHQNTPEVKI

SEQ ID NO: 271995 - protein, 423 aa, unidentified
MLPTLALTGQIANMILPSTIVRPVQAQEYIIQTRPQDLLDWVNQLRARYGEGKIAVGMEQKRGPLLYALCQYDNLVLFPINPRTVANYRKAFQPSRAKSDPVDARLLVELMRKHPEKFELWVAGCPQTRALRQWVESRRMLVGEKVRLTNRITASLKAYFPQVLDWFEDKDTLVFCAFMEQFPSVNAAQAATPAQLTQFFRSHHAGRKSAINRRIQQIQDAGPPLTNDEAIVVPAQALTSALIALLKVILNQLADFNAKIAELFETLPDAELFSSLPGAGPHLAPRLLVAFGAERDRFSSAQAFMSYVGIAPVKEESGKKSWVHWRWSCPIFLRQTFIEWVNQSRRFSPWAQAFYQLQKNAGKTHQTAIRALAYKWGRILWRCWQDNTPYDEQKYLAALARKKSPLIKLLGSKDKDCQTLKQA

SEQ ID NO: 271996 - protein, 345 aa, unidentified
MNKTIVGVDLAKKVIQVCIYTNRKVHSNTEMTPKAFTCWLVNSRPATIVFEACGTSNYWKQLASSHGHDARLISSRLVAVVRQNQKTDKNDALAIVQASLLPDVNFIQGKTAEQQQLQSIVRLRELSIRQKTASKNQLIALLSELNIQVSNRNGGLRATIDETLEDADNGFSPSFRQAISTAWDQYLSLVEAIDIYDNCLEESLNDHPECKKLLKIEGIGILNAVNLYIALGCADIGAFSKGKAAAACIGLTPIQHSSGGRAKIGSIGRGFKNTLFRSQLITGAMSIVSKVANRPPKTKKEEWLKNLIERRGKKCAAVALANKNVRTAFAILTQGTEYKAEPLVS

SEQ ID NO: 271997 - protein, 349 aa, unidentified
MKIIGCDLHPSYQQIAMLDSVTGEMMEKALSHERKEEVQAFYAGLEGAVRVGIEASGQSQWFERMLAELGHQVWIGDAAKIRASCERKQKTDRRDAELLLKLLVENRFPRIWVPTAAERDGRQLLLHRHKLVRMRTQVKNQLQALALNQGVQRKWKLWSESGRKQLESLPLLPWANRRRAELLQLFDHLEASIRELDRVVAEQAYQRREARRLMTHPGVGPVTALAFTLTMGPAERFGRGKQVASYLGLIPSEHSSGGHPQRLGHISKQGSPFLRGLLVEAAQSAVRYEPEMRRAYQRLAQRKCRALAKVAMARKLAVRLYWMLRLQVNYAQLIQGSHAGQPGTFCGRS

SEQ ID NO: 271998 - protein, 350 aa, unidentified
MNIIKYGIGIDISKSTFTASICTLQDDYSLRFGDSCEFDNEKKGFNQFLKWVKKQTIKGIEAFYIMEATGVYYEHLAYHLYYLKKPLHVALPSNTKHYFKSLNVKSKTDNIDSKILSQFACERKHNPWNPPKDIYLRLRAITRYLEQLKSQKTLINNRIHSKEHSYAVPKEIIKQEYRLLKELEKSISICEKQIEVLVQSDDELSLKVDKLSSIKGVGFTTVTIIVAETLGFEYFYNKKQVTSYAGFDVVYRDSGSSLNGKTRISKKGNSHIRRALYFPSLVAARHNKEMKIFYDRVVKKRNIKKIGSVAVARKLLELMYILWKTDQYYIEDYNQQKTASKKSEAVLDIF

SEQ ID NO: 271999 - protein, 316 aa, unidentified
MVVVGFDVGKDSLFAARLDRSGVVKEHWELANTQVALLPLLRSLRRKYKHLLVASEATAEYHRPLAQLCLTLNIPFSLINPITTKQFTRATVRKKKTDRTDAEVIARVAMQGQGTIVTKDTFNDTKPMLRTAVKLIQMSRMLTLMQYHVADVLSNEPVLLQQLATCQESLDVAAATFRSTARQQVNPSLSKLLQTVPGIGPQTAALLIAELGDISRFKNANSIVAYMGFDPRVKQSGTSLKRNTHLTKRGSPYLRRALYLAAAAAQRHDPELMATYDKKRAEGKRYREATIVVARRVINRVYAVWKRGTAYQKRIA

SEQ ID NO: 272000 - protein, 385 aa, unidentified
MAQQVIKYSVGCDISKDTFNACILEVYADMTSKIKASHKFRNETKGFNELDFWVNRHKKHEVPISFTMEATGVYYENLAWYLYEQECEVYVLLPYKTKHYLKSLGIKSKNDKIDAEGLSRMGAHQRHKPWKPYSKSIYTLRSLTRQHESVNKLKTRLINQLHANEYSAFKSAVVRKQLKSTLKLLEKQLEELDTEISRLIENDDRLKEKYNHFKVVKGIGKLSWATVIAETNGFETFENQRQLVSYSGYDIVENQSGNHVGKTKISKKGNSRIRRILYMPSLVTVRLKEPVLYNLYQRVTERTGIKMKGYVAVQKKLLVLMYHIWKNDKPFERNHIKTFGEEESKSLFPLGSAGTTKKSSPDKRATQDEHSYELSPEVLFPLIQI

SEQ ID NO: 272001 - protein, 391 aa, unidentified
MIFVGIDVAKDKHDCFILNSEGTVLADVFTIANNRIGFETLLSRIQSCSQGESKIKVGLEATGHYSYNLLGFLLDSGLATYVINPLHTNLYRKSLSLRRTKTDRIDARTIAMMLMSDVDLKSYSNTAYHNEELKSLTRYRFDKVKESAKLKSSVARLVNILFPELEKLVSSLHIAVVYALLSNYPGASYIANANTEELAETLCTASKGRYTKSKTAEIQVAAGVSIGSKMPAKSMELKHTIALIRELDKEISEVESAIDKITSQMDSPIFTIPGIGRHMGAMILAEVGDFSNFASADKLLAYAGLSPSTYQSGQLQNCYAHMEKRGSRYLRYALFNAAKYVCLWCPTFSAYLEKKRSEGKHYNVAISHAAKKLVRLIFAMQRSGKAFLADY

SEQ ID NO: 272002 - protein, 409 aa, unidentified
MYYVGIDIAKNFHVVTIIDENEVRITQKPIRVTNCIDGFSKFITKLETISSNTNDFIIGLEATGIYGENLWEFLNSHGFNVKLLNPFQTTRYREQHTMKKVKNDNIDSWIIALFLKDGKYSSGYVTDDEYQSLRTLYRNRASIQSDMKEVKKRILTQVTVTFPELENFIDIFSITGLALLDKYPTAHHYKHSSVDRILKIFRHIQGNSFNNQKAIEVLELAKNSIYSGKAKDARAIAIKSSIRLLKIYQDELSILEEEILALLEKKGIKEEKDVPTNSLIENLKTIPGVSSKTIAAVISECGDLSRFKTPIKFIGYLGLFPTENSSGNSKSTGHLSKRGSSLAKHALYMASVSCLLHNKELKQYYDTKKSQGKSKQEGIIAVARKLATIIYSIFRYNTPYDPSRVFSKS

SEQ ID NO: 272003 - protein, 456 aa, unidentified
MGNARARKIPAQLVEDEDYQLRHERVAGIDIAKAKADVCTRLPPQRDGGRRASRVEEVPARAREILDLAVRLISGGVELVVMESTSDYWRIWFYLLEAAGLNVQLVNSSHARQLAGRPKTDRLDAQWIARLAEMGLLRPSFVPPPEIRALRDLTRTRLQLVRDRTREWQRLEKLLEGALVKLSSVVSSLARTKTARVILEALAGGERDPRALAALAAAQVKGGRAAIERSLDGMMIGGHHPMLIRAHLDHITLLERTVAALEDEIEAALGAIPAARGITADGVPSAGPGPDAAALPAAERLAEIPGVSLTLARAIIAETGLDMTRFQTAAHLVSWAGLAPVASQSGPRSRKPGKGQGDAYLKGYCTQAATGAATTGTFLGERLRRLSRRLGGSRARCAVGRSILVIIWHLLADPEARFADLGPDWHARNGDRDRKIQAHLRQLRALGLDVTITPAA

SEQ ID NO: 272004 - protein, 381 aa, unidentified
MYYIGIDISKFKHDCAVIDDSGEIVTPSWSFTNDAEGFSQLKLLLNSLDTETRIGLESSGHYGMNLKLFLESNNFSFMEFNPLLINRFVKSKSLRKTKSDSIDCMMIAHYLMTVEYKPYPSSFYHTEKLKSLTRFRDSLIRLRSRQLVELTNILDKVFPEFKPFFGSRFSVTALYILSNYSSPEKIANMNSKSYEALRKLSRGRFSTVDFAKLKQLAKNTIGTTEDYLLLQMQIVLDIYRQLDSKVDETEVSIKECVSDMNPPMLSVPGIGIESAAVILAEFGDFSKFKNASQMLSFAGLEPGYFQSGTYETTGKMVKHGSSYLRYALMNCAQTVVNYEPTFAMFYSKKRAEGKPHRVALLKSCYVSSTHCKLKTLHMMPI

SEQ ID NO: 272005 - protein, 345 aa, unidentified
MSMVSSVVGGVDTHADVHVAAAIDSNGGVLGVESFPTDSAGYEALTEWLVGFGLVIRVGVEGTGSYGVGLQRYLHREGVEVVEVDRPNRQARRRLGKSDPVDAVSAARAALSGTATVTPKRRDGTVEQIRVLLIARRSARRQRNQTLNQLRQVVITGPDEIRARFKDRPKAGLVSEAARMRPRKGNDPITYTTNVVIRGLARRIRDLNDEMHTIDDALRGLIDATAPSLLDCYGIGVDTAATLLVTAGDNPDRLHTERSWAHLCGVTPVATGSGKTSGRVRLNHGGDRQANAALYRIVLTRMSSDSETRNYVRRRRAEGLSTREIMRCLKRYVARQTFKHLPRAA

SEQ ID NO: 272006 - protein, 316 aa, unidentified
MSSEVFVGIDVSQAFLDVGVRPSRERFRVAYDDNGLEELATRLRPLRPTLIVLEATGKLEALVAARLQMAGMTPVVVNPRQVRDFAKAAGELAKSDTIDADILAHFAEAIRPRVRPLPEEDLRALAELVTRRRQVQDMRIAEGNRLKRTESREVRRRIERHLAFLERELDDIDDALRRKVATSPAWQADMKLYCTVPGIGRTTATSVMAQLPELGRLSGREVSKLVGVAPLADDSGKRHGQRHIWGGRSTVRRSLYMAALVAVQYNPPIRDVYQRLLALGKPKKVALVACMRKLLVILNACMRDRQPWQPNRALAA

SEQ ID NO: 272007 - protein, 352 aa, unidentified
MTLVGCDLHSRKQQVAVLDTDTGEVLEQELLHEGDAVERFYRALPRPVTVGIEATGYTLWFHALMQKLEHTLLVGEAAKIRAMVVRKTKTDRRAAQHLLDLLKHDRFPTVWMPDPTTRDLRALIAHRVRLIRMRTMIKNGLHAIALNQRLALGPSLWTKRGLAQLQALALLPHTAHRREDSLELLTWLTTRIDQLDAQIAAAAAADAQAQRLLTHPGVGPLTALITVLVLGPAARFPTSKHVVSYVGLAPAISASADKYHLGKITKQGNALLRWILGQAAPLAARADDELKRGYFAVLHRRGRPKAKVALARKLLVRLYIMLRDQIDYDEFRRRGRARRAPTERHPVAAPAM

SEQ ID NO: 272008 - protein, 362 aa, unidentified
MNTIAHHDVVVIGGVDTHKDIHVAAVLDNVGRLLGTESFPTTRPGYRRLLAWLQSHGDLYVVGVEGCGSWGAGLARYLAARGVRVVEVNRANRQKRRRRGKSDVLDAEAAARAVLAGQATATPKAGTGPVEALRQLRVARAGAMKARTAAANQIHSLCDTAPDAIRAQLTGLTMPKKIALAERWRPGPSMTPENAAKRAIASVARRWRALDDEARTLQRHTMAILDELAASLLAVHGVGYDTAAQLLITAGDNPHRLRHERSFAALCGATPVPDSSGRTSGRLRLNRGGDRHANSALWRIVIVRMATHQETKTYVERRTQEGMPTIEIIRCLKRYVARELFPHILATADHHITVPQPATTAA

SEQ ID NO: 272009 - protein, 366 aa, unidentified
MDMNRVHYVGMDVDKEKIVLARLGAGRGAEVQEHVIANTPSAVKKHFTVLLADAEVHASYEAGCFGFGLYRQLSAMGVAVLVAAPGLIPRKPSDHIKTDRRDARTLAMALRAGQLTGIYVPTAQDESVRDYLRMYEDLRGDLRICKQRILHFLLRRGIRYDQGGPWTVRHKNWLSSLEFSDPRDRKTLDMYLSTMQEIEGKCSEAAEEVEQIAAQDRYREQTKKLTAFKGIKTLIALSFVADIGDFRRFPNARQFMAYLGVVPSEHSSGNKRRQGGITKAGNSHLRRLLVEAAWHYRSYHPSSRVLTERRKGVDPQILTYANRAGRRLSRKYMHLLLRGKRSQVAVTAVSRELAGFIWGAMTGQVA

SEQ ID NO: 272010 - protein, 343 aa, unidentified
MKPTTIGVDLAASVFEVAVSDSPGRVGIRRRLPRARFLRYFAQTPAAIVVLEACGSAHYWARQLQTLGHQVVLLPPHAVRPYVTRNKTDRTDAKGLLEAYRNEDLRPVPVKSVAQQTLTALHRLRSGWLARRTAALNTVRGLLREFGFLLPAGAGRVVPGARALLEDADSALPDTLRPALAAMLTEIQGLENRITTAEVDLRQLARQTPGVERLLTIPGIGVLTATALVASVGDIQRFPSGRRFASYLGLTPRLRSSALTRRLGAISKRGNPYLRMLLTHGARAVLWAAKSRRRTDRLRLWALEVERLRGHNKATIALANKLARIAWAVWKHGVDYRQEVPAA

SEQ ID NO: 272011 - protein, 407 aa, unidentified
MARYYLGVDWGEEQHGVCVREETGAIVWEGMVAHTPTGLSVWGRQLDEWRAAGIELWAAIEKPDGRVVDCLLDHGVVVYPVNPKAVDRARDRFRMSASKSDAFDGRVLAEFLRTDHAHLPPLRPSSVAAQEVKLLTRDHARVGRQQTRTLNQLTSTLKEYYPRVLELFGDLTTQLALDFLQTYPTPATLTTLRLSQWKRFAGQHRLGPARTTEWWAQLKAPQVPVPEHVARAKARLVAVLVAQVLVTHRAVTEYQAEIERFFETLPAAEWMQTLPGGRSGTMIPRLWAELGDAPGRWASWSHLQAQAGTVPLTRQSGKSCVVRFRVACNKHLRQAIWQLAFQSLRHSEWAKHYYQQCRARGHRHNQALRALGAKWLKIIFRMWQHQVPYDEAYHLANMTRQYLRATA

SEQ ID NO: 272012 - protein, 356 aa, unidentified
MSRDIKYIGMDVHKEAIVIAVRNTRGHVVMESIVETKANSILQFIHGLQGELHVTWEEGTWAAWLYDLLKPHVHQVLVCDPRRNALLKEGSKNDKVDARKLADLLRTGMLRPVYHGEHGLRTLRELARTYQTLSQDLNRVMNRLKALYRGWGIACGGTQVYAPRYREEWLGKIEPVGVRRRAELLYQQLDGLQALRRTLRPELLAESRKHKAAKLLRQIPCIGPIRAARLLALMQTPHRFRSKRQLWTYSGLGIETRDSAQYRFVRGELQRAKKPQQIRGLNRNHNHEMKDIFKGAATRASCGVGPLRNFYVALLDKGMKPEMARLTLARKIAAIALTLWKKEGHFDAEQLKPQAA

SEQ ID NO: 272013 - protein, 358 aa, unidentified
MAITTIAHADPTRVTVGVDTHGDVHVAHAKDQLGRRLDTVSIPSTPTGYRDLLAWARGLGQVAAFGVEGTGSYGAGLARFLREADQVVLEVNRPDRAARRRQGKSDPVDAEAAARAVQAGEVTITPKARDGHVEMLRSLRVARTTAMRARTQAVNALRSLVVTAPAELREQLRGRSTVRLVRVATTLDPGSLTSPTAAAMLALRILARRYQALDAEITALDSELDRLTAKAAPRLLALFGVGPDVASALLVAAGDNPERLRSDAAFSMLCGSSPIEASSGKTIRHRLNRGGDRQANAALYRIVIVRLRWHQPTKDYMARRTAEGKSKKEIIRCLKRYVAREVFPVLREMNQADPATAA

SEQ ID NO: 272014 - protein, 349 aa, unidentified
MKNTITIGMDLGDKYHMAVVFDNDGKELKIGKVTNTKIGIGKFFKPYKSAQVAIEAGTHSPWISRLLNEMGLKVYVGNPRKLRFIWDSIDKSDAKDARMLGMVCRLEPRLLHPIHHRSSQAQADLTTIKSRDMLIKSRTQLINHVRGIVKANGDRLPKCSTTSFANRCSAHIPKELVSAMTPLFEILTQLNKQIKELEKEIEQLSIKKYPETKYLRQVPGVGPITALSYVLYIEDPARFNKSRQVGPFLGLTPKRDQSGDVDKQLPITKAGNTYLRHLLVGCAQYIMGPFAPESSLRLHGLAIAARGGKNAKKRAAVAVARKLSVVLHQLWATGNKYEPFYNIQNKEAA

SEQ ID NO: 272015 - protein, 415 aa, unidentified
MCKVIMIGCDLHDSTTVLKVADGPDQTVRKGFATSDRSAMIEWIKDFASQRGAARIVFAYEASGQGFGLYDDLTDAGIECHVLAPTHLPHTTHSRKNKTDDKDALMILDEVRAHVLAGRTLPDVWVPDHQTRDDREIVRLRLEVATQRTRLKNQIRNLAKRSRLAFPDDFTSSGDWSKRSVEWLREVAAGKTGTLREGVRTALASLVELYQAMSVQIQALDQAIKRLSRTERYARSYRKLKLLSGVGTLSAMVFLTELGDLARFANRRQLAAYLGLAPSAFESGERDDRKGHITKQGPARVRHVLCQAAWAALRVSPEWRAKYDRIRRGSKSRSRIAIVAVMRQLGVEMWQAARSPELDALLDERDTLASQKTKKKTSARAPQKGAAPSTPPSPRPRRDEAEATATRKGLARHPE

SEQ ID NO: 272016 - protein, 415 aa, unidentified
MQTLYQRVAGLDVHKNSIMACVRITDAQGRVQETLRTFGTMTDDLLTLSDWLAENQVTHVALESTGVLWKPVWNILEAGDWKLLLVNARELKQVPGRKSDVRDSQWIAQLLACGLLRSSYVPPRAQRDLRDLTRHRAQLTAECTRCANRIHKVLQDANLKLSSVATDVLGVSGRDMLAALVAGETSPQALADLARGKLRGKIPELKRALTGRLTLHHQFMLEQLLDHLEHLEQQLAKFHERIEEALRPFVDEATFERLDAIPGVNRESIENVVAEIGVDMGQFPTAGHLASWAGVCPGNEESAGKRKRSRTTKGNVWLRRALCQTAWSAAKKKDSYFQAQYRRLAGRRGKKRASMAVGHALLGVFYHLLKNPLLKYHELGGNYFDSLDPQRLCRHLVKRIESLGWEVTLTKRTAA

SEQ ID NO: 272017 - protein, 423 aa, unidentified
MDVMHERVAGLDVHKETVVACVRIMVGGKATRECRTFETTTAGLESLLGWLTESGCTYVAMEATGVYWKPVWNILNEGKFELIVANAAHIKNVPGRKTDMNDAMWIADLLACGLIRASFVPEQEIQELRSLLRTRRQLTREQTRHVQRIQKTLEEANIKLDSVITDIMGVSGRRMIEAMIEGQRNPFKLAELADRRIKASRKELYDALHGRLTDHHRFMLRLHLRQYDALAHAIDQIDQAIDAAIERMDAEVVDGQATFCSLIGLLCTIPGVRELGATTILAEIGTDMGRFPTAGHLLAWAGLCPGQNESAGKRKSSRLRKGAPWLKTTMVQCAWAATRRKDSYYRAQFNRLTGKHGKKKAICAVAASMLTATYHMLRDGTHHQDLGANHFDHRSTEIRAKRLVAQIAKLGFAVELRPLTEAA

SEQ ID NO: 272018 - protein, 445 aa, unidentified
MQETGEDHDDGTVARVAAIDIAKASGMVCLRVPHDTIEGRRVQQVWNVSSTTNSILELGDRLVCQGVQRVVMEATGSYWRPFFYLLENRGLECWLVNARDVKNVPGRPKTDKLDAVWLAKLAERGMVRASFVPPKPVRQLRDLTRTRTVFVQERTRHKHRVDKALQDAQIKLSDVVSDLFGVSGRSMLDALVAGERNPRTLADLAKGSLVKKTQPLTEALTGQFEDHHAHLLRILLGTVDHLTAQLGELDRLITQTLGEITGPHDDAPAAITSGTDTTPGHTAADVAERLDNIPGVGATTAHIILAEIGLDMSRFPTPEHLVSWAKLCPRTIQSGAKNTAGPAGQGNPWLKGALGEAATAAARTDTFLGARYRRIVKRRGHAKAIVAVARSILVITWHLINDPDTHYQELGPDWHQRHLNPTRKTRDLVRQLQALGHQVTLEPAA

SEQ ID NO: 272019 - protein, 333 aa, unidentified
MVEGTKGSHHKEGSTKMSKTSTVVAGIDVAKEHLDIVVRGCSKVWQVANAREGFLELTRLMREHRVTRIGLEATGGYERDVVEHLRAEGFAVVVLQPLQVRAYAQMKLRRAKTDGIDAALIADFTADHATVREVPDARLAAIAEHLTWLEQTEEDMARIKIRLEHVRSPEAQRTWKDDLARLKQRRASMIAKLSATLRQHDDLATRLKLLLSIEGIGPRTAIALLIRMPELGRLSRGEAAALAGLAPFNNDSGKRVRQRSIAGGRTRLRTSLYAAALPAAFRWNAGLVALYNRLRAAGKPHKLALVACARKLLSYANTVLARGTPWIKSATPA

SEQ ID NO: 272020 - protein, 367 aa, unidentified
MKKVSTAAAKQIKNILEQKLTIGLDLGDRSSWYCVLDEAGSVVLEQRVSTSPKAMKEVFGGMPRCRIALETGMHSPWVSRLLSEGGHEVIVAHARSVRLIGESRKKDDRMDARTLARLARIDPQLLCPVKHRSAKAQADLTVIRARAGLVRARTALVNTARGLAKSYGERLRGCNVRNMNPEKAEGLSPELQRALEPLLAGIESLSERILECNERIEQLAQESYPQVARLKQVKGVGTLIALTYLLTLEDAHRFRKSRDVGCYLGLQPGRRNSGQSEPQMHISKEGDPYLRTLLVQGAHHILGPFGADSDLRRWGLKLAERGGKNGKKRAVIATARKLAVLLHRLWVRGEAYEPLRNSQQRALPAAA

SEQ ID NO: 272021 - protein, 472 aa, unidentified
MDYIGIGIDVSKGRADIAFLNQSGTQLAGSGAYDDTHAGHTRLQAALQEMRHRHPDAQLIAGVEATAGYERSWVAFFAREQPQRGKPVVVHRLNPLAVKRFLEADLHRKVDDRNAAHGIARFLLERRRETKVEAIPLDGRVTLYRMIRSLMLQRTAQQQRFHTLLAVVQPELVQYCASGIPNWILSVCRHYPTAARLSRCHVTALAALPHVGATKAAALRTAAQTSTASMTDDGTALTIELLVDDLFALDERIHAGQQRLEALMVNDPDVARIDGIPGIARWSAIALVLEIGPVERFADVRQLIAWSGLDPRVDESGDGVISRGISHRGNAHLRAILFPLTLAAMQHHPRIADFITAKVNHGKPKKVALVAGAAKLLRIIFALLASKQPYRADHEQLLASERATARQAARSAPAPTTLPTTPPDLSAPVSAKERRRRTTEQKKAAAQKSQECAVEPQRDQRATAPPSLMIPT

SEQ ID NO: 272022 - protein, 389 aa, unidentified
MKIFVGIDIAKLNHFAAAISSDGEILIEPFKFTNDADGFQLLVSKLESFDKNSIIIGLESTAHYGDNLVRYLVAEFYQVCVLNPIKTCQMRKNNVRKTKTDKVDTFVIAKTLMMQDDLRFITFFDLDMMDLKALGRFRQKTIKQRTRLKIQLTTYVDQVFPEIQYFFKSGLHQHAVYALLKEAPSPKEIASMHMTHLANLLKVNSHGHFTKELAKELRVLAQKSVGANDSAISIQITQTIQQIELLDSQLEKTEAEMTDIMKFNDSVIMTIPGIGYINGGMILGEIGDIHRFSNPNKLLAFAGLDPSVYQSGNFQAKTTRMSKRGSRVLRYALVNAAWNVVRNNATFKAYYDAKRAEGRSHYNALGHCAGKLVRVIWKMLTDEVEFNLE

SEQ ID NO: 272023 - protein, 368 aa, unidentified
MKTYTLEAAPAASAKELKTQEAPKAKRIVIGTDVHLRGYQAARKVDNAAIGAVANLRSETELLLYVDKQCEQAEEVVVVYEAGPLGYGLYRKLRARGVKCLVCAPDSSQQQRKRRKNNQIDARTLTSNLFNYLNGNEAALQLVRVPTPEQEQARLASRQHDQLVEERKRLGAEGNALLLSQGFGSCKHWWRSKALSRLEQLLPGWLFEMLQTWVDLLRALDEKIQRAKAALAKGYSGPRPKGAGANSLVQLGSEVLDWDLYTNRRKIACLAGMVPSEWSTGESQRRGSITKVGVPAIRRIMTEMAWRIIQVQPQYPPVQKWQEVLGGTNRTLKKKAVVAIGRQLIVDLWRLQTGRASAKELNLVMIGG

SEQ ID NO: 272024 - protein, 342 aa, unidentified
MTYYAGIDVSLEYSSVCVVDGAGKIMREQKIASEPEALIAWFRGLGFELERIGLEAGPLSQWLYAAIRASGLAIELLETRHVRDAFRAMPVKNDRNDARGIAQLMRLGWFRPVHCKSMAAQEVRALLTARKLVQSKLLDVQMSLRGLLRGFGLKVGATTPSRFAGRIRDLVEGNATLEVIAAALLVVHETLRRELAGFEKRVRSIARSDGRVRLLMSTPGVGAIVALTYVAAIDDPARFKSSKGVGAHFGLTPKKYQSGETDITGRISKIGDEGVRTALYEAGHIILTQPLKGCTALKSWAMRLAKRAGMKKAKVALARKLAVIMHRMLVDGTLFASAAVAA

SEQ ID NO: 272025 - protein, 355 aa, unidentified
MTSTKYIGMDVHKESISIAVRNSAGKVVMECVIETKASMILQFIDGLRGDLQVTFEEGTSAAWLYDLLKPHVTKLVVCDPRKNKSMREGNQNDKIDARRLAELLRLDHLTPVYHGEHGLRTLKELVRSYLTITKDLARVMSRVKAIYRSWAIPCSGKQVYAARHRAEWLGKINEPGVRRRAECYYQQLDALRVLRQGVRRDLLAESKKQKAWKRLCEIPSIGPIRAAVLLGILQTPHRFRTKRPLWNYGGLAIEMHSSADHRRVHGQLERSTKNVLVRGLNRNCNHDLKNLFKGAAVVASSKPGPFQEFYTALLAKGMRPEMARLTLARKIATIVLMVWKRGVNFDAQHLKPQTA

SEQ ID NO: 272026 - protein, 340 aa, unidentified
MKGTIIGIDLAKNVFEVYVEDGVKQTGTRTRLSRKKMLPWFANRSSALVGMEACGGAHYWARELEQLGHTVRLLAPQYVKPWVQTNKSDQADARAICRAVQEPEMRFVRIAGEAQQAVQALHRVRSRHMGNRTALVNQIRGILLEYGVAIPKGVASVRKALPLLLAEERWAPLIRQFLTDQQAELTDWDTKIEAVTAQINQESATQPVCQRLEQIRGIGPLGASALWLKVAGQPYQNGRHVAAAVGLVPKHTGTGGKIKLGGISKRGDRYLRWLLIHGARAVVAQVGEKQDRLSCWLRALVARRGMNKAVVALANKNARVAFALIHEDQTYDVTKMCRPV

SEQ ID NO: 272027 - protein, 349 aa, unidentified
MITIGGDSHKRTHTFVAVDEVGRKVAETTVAATTEGHLEALEWAAKWPERTWALEDCRHLTRRLESDLLRVGEAVMRVPPRLMAGERRGAREVGKSDPIDAMSVARAALREPDLPVARLDGETRQVKLLVDHRDDLVAERTRMQSRLRWHLHELMPEHVITRSALKRTVVLDDLDRRLRLLEGPVAKIAVELVGRIRELTRRANELEREITVLVRRLAPSLLELPGCGVLSTAKIVAETAGVDRFRSNAAYARWNGTAPIPVWTGSPRFRLSRGGNRQVNAAVHRIAITQWRGVGPGRDYMLRRIQRGDTKTSAIRALRRHLSDEVFRRLRLDQQQQVSASTTQPAIAA

SEQ ID NO: 272028 - protein, 343 aa, unidentified
MAIIGGFDLHRRQLTYDYLDVVTGQVERGRVVPADRGHLRSFLARFEAQAEVAFAVEGCTGWRYVVEELERAGIGAHLAEPAETAAKRGRKRRAKTDRSDARHLRELLVKGDLPESWIPPAHVLEARARVRLYKDLEEERTAWLQRVQATLYHQGVPVIASLTSAAGQARLAMAELSPAGQQAVEVGLRQLDRLTGELDPLRAELARFSRRQPGCRALRTTHFGIGPITSVAIWAEMGDTRRFASSDDAVRHAGLDITVYASDSKRARGHLARQGPATLRWALYEAAVCATRPNSPDHAYFLAVKRRADGHLGVISVARKLARRVHHTLRALGDQAWEPAPAG

SEQ ID NO: 272029 - protein, 339 aa, unidentified
MARLPQLVLGVDTHKDVHVAVLLDSLGRYLATASFGTTDAANRDLVTWTHRYGQVITAGVEGTGSYGYRLAQHLSSHGIDVVEVNRPDRARRRRKGKTDPVDAEAAARAVLAGDAHAVPKDRNGAVGELRALVVARRSAIKARTQATNQLRALLVDGDDELRRRLRGLRKAHLARACAQLAPAAGLSLALASLGRRWLALDDEIAALDDAITSRVRRTAPKLLERHSVGVQTAAQLLITAGDNPDRLHSEAAFAASPVQASSGKTLRHRLNRGGDRAANSALWTIANNRLMHEPRSRAYAARRTAMGNSRKEILRCVKRALAREIYPLILDALALRRLP

SEQ ID NO: 272030 - protein, 327 aa, unidentified
MNTSETLLFVGIDVAKDSLELALDVQGQTGNFSNDQDGIGQILAQIETARVAAGAEVGTIVLEATGGFERPLARALCVEAGWPVMVVNPRQARDFAKAMGILAKTDALDARVLVQFARTLHQSDRRDRLLMRLPEPHQEALQALLIRRRQLVEMRVAEDNRLASSHPSQHASIKAVRKVINQQLAEIDRDMDDQLKKHFSEKLALLKGFKGIGIATQASLMAALPELGTLTHRQISKLVGVAPLNCDSGKFRGKRVTWGGRAEVRSMLYMAALSAVRYNPLIKPFYERLIHRGKPKKVALVACMRKLLIILNAILKSGRAWDPSYQS

SEQ ID NO: 272031 - protein, 410 aa, unidentified
MDVFCGIDWAEDHHDIALADRDGGLLARARIGDDAAGLARLLELLAEHGDSAENPVPVAIETPRGLLVACLRASRRVYPVNPMAVARYRDRHSVAGRKSDHGDAVVLANILRTDLHAHRPLPADSELAQAIAVLARAQQDAVWDRITAHNKLRSHLREYYPGFLAAFAAAKGGITRPEARMILAAVPAPADAARLTLAQLRALLRKAGRSRGIDAEAARLRDALRKGQMRQLPLVEQAMGRQALALLRQLDAACQSAGDLEQAATESFNLHPDAGIITSFPGIGPLTGARVLAETGDDRSRFTDAKGLKAYAGAAPVTRASGKTRSVTRRHVKNNRLAQAGYIWAFSALTASPGARAHYDRRRSNGDRHAAAQRNLFGRLLGCLHHCLATGQHYNEKTAFPNQAAGPAAA

SEQ ID NO: 272032 - protein, 354 aa, unidentified
MNRRTKYVALDVHQTTTVASVREEGGRVIARSIVPTEESALVEFFGGMRGAIHVAFEEGTQAQWLHDLFEPLVDRVVVCDRRGKSRRGNKGDQVDADELSELLRRGGLRAVYHGSPDRATLRELTRTYQNVVEDATRVMLRLKALMRARGIKAPGKSIYQPKNRAEWLAKLPERGVRYRAETLYAQLDVLRELRPKVKAAMVAEARRDGAWGVLRSIPFLGPVRVALLLATMRTPWRFRTKRNLWAYCGLAVVSFSSSDYTLVDGRPVRRRRRPMTRGLNRNHNRVLKDVFKSAATAATGRPGPLQDFYHGMIERGMRDELARVTLTRKLAALTLRLWKTGERYDPAKLTMQAR

SEQ ID NO: 272033 - protein, 412 aa, unidentified
MEVVYPRCCGLDVHKQSISACVIIREHGKAEKLERRFGTFTHQLEELAEWLEEFGVTHVVMEATGVYWKPVWNVLEGRFDLMLVNPEHIKALSGKKYDRRDASHLADLLQHGLLQGSYIPPMEIRQLRDLTRNRARTVQEAARIKSRIQKILEEANIKLGSVATDVLGVSGRLTLKGLIEGEQDATKLADLAVGVLRKKRNQLTQALNGKVDDHYRLMLRKLLRALKEREAEIADDETDIRQQIEPFGKAVLAWMQLPGIDEVTAWSLVAEMGPDMAPFETAEQAASWSCVCPGNHESAGKQRDGRTRKGNPWLRSAICEAAWGASRTKKSYFHAQYARICVRHGPKRALMAVAHSMIVVGFYLIKYDLEFKDLGADFFDRRNREHATRRAVKRLIALGYKVHLEEEVSVLS

SEQ ID NO: 272034 - protein, 422 aa, unidentified
MKPPPAGLFAGIDSGARDHQVCALSPTGKILGNRSFAHSGDGLSALLDWLDSLSHGELGEVYVAIEVPHGPVVETLLERGCKVFAINPKQLDRFRDRFSLAGAKDDRRDAYVLAHTLLTDMHCFRAIKLDDPLVIQVRQWSRIYEELMAERSRLTNRMREQLRRYFPQYLQLTNDVGESWILALWKVIPTPERALKTSPRKIEKLLKEHKIRRVTPSQVLSALRKTPLCVAPGAAQAAIAYIALLIDRLQLTNQQIAQCRKAIDTLVDQLTDSAEEGDDESKREQRDIDILRSIPGVGRIVLATLLGEASQALRDRDYSALRALSGTAPITIRSGQSWRVVMRRACHPRLRYACYHWARVAIQCDARSREIYQRARSRGKTHGTALRTVADHLLRVACSMLRSGTYYDPNHTQAAQAKQVVA

SEQ ID NO: 272035 - protein, 387 aa, unidentified
MPQPNDLSRSLVALDQNSTIIAVIEMSQSSWLVAGVLPGIERQPRKKLEPNAEGLLGLLHRWRDEAIRAGKEITRIAVAFEAGRDGFWLARWLEARGVEAHVIHPSSVAVSREHRRAKTDRLDTELLKRGFLGWLRGERGHCSMVRVPTIAEEDAKRPNRERECLVGERTRIVNRMKGTLARLGIRTFKPTLRKAAERLATLHTPEGSPLPPNVSAELQRDMARLGFVVSQIRAIEEARQKRLEHEPETGPHAMVRLLARVVGVGIETADMLVHEVLSRPMRDRKAVARYAGLTGAPDDSGAKRREQGLARAGNARVRRGMVQLAWRFLLFQKESALALWYRARTADSRIGTRKTMIVALARKLVIALWRFVTTGETLEGVVLRPAG

SEQ ID NO: 272036 - protein, 403 aa, unidentified
MARCIGMDVHRSFAQIAVVEDGLVRDEGRIGVRPQDLREWAESFLRPDDEVALEATTNSDAIAVMLRESAGRVVVSNPRKTRAIAEAKVKTDKVDARILAQLLAADFLPETWVADDQTRRRRRLVARRVHLVKQRTRLKNQVHGILSRNLVPTCPHADLFGGVGRRWLATQVLPDDEQRSVDALLRQIDFHGDELAEVERDIAVDAIDDTVIARLMTVPGINVTVAMSIVAAVGDFSRFESPDRLVSYLGLNPKVSQSGDSPAKYGRITKAGRSQARGMMVEAAFSASRAPGPLRAFYSRVKDRRGFQVATVATARKMTVLCWHLVTKGEDYAFARPSLVAHKRRSLELAAGATPHPGPVAGPSRDYHVKQLRDAEKALVEQEERAYEVLVAHWQPQKPQPRG

SEQ ID NO: 272037 - protein, 401 aa, unidentified
MEGPIVSIDVSNGNSHYMCFIKNNKRFGKVKKIDHDIEGFKRLLEDIQKLEAETNEKVCAVFEATGVYTKPLERFLSKNSIKTYIINPLESARKRKEEIHNKKTDKLDPISISKVYYDKEEMMELKKKYETYNWLRKKNRLYEDQLNHLKKYKVTFQNQLSICFPGYLDLFKDGYSDIPMTILKKYPHPDLLKNKKAETVARYLEKNTCHTHKVSLEYALKIIEFAKKTYPGCEKDDVEVEIFKILLDKVIETQRECEKTLNEMITVASTLEEYRYISSIDGIGPNLAARIIAEIGDIEEFKSREALVAYAGLDPHIYQSGDQDGKHLKISKKGNKYLRCLLFLAVGCSIRGAKDNPVNRFYQKKKQQSNPLNSKAAKTACTAKLLKIIYGICKNKTTYER

SEQ ID NO: 272038 - protein, 354 aa, unidentified
MEMAVTKYLALDVHQATCTFTVRDPGGRILERGVVTTTARDLVALLHRFGQNLHVAFEEGTQAQWLHDLLLPHCAKLVVCNPRETRAKKNKSDRIDADQLSELLRLGTLRPVFHAQHSARPLKELVRAYDALVLDAVRVMLRIKAIYRSRLIASPGKVVYRPALRRDWLEKIPEAAARKRGELFLSQLDALTTLRQKAKTAMLREARNHPAFHLLQTFPMVGPVRAAGLIAIIGSPHRFRTKRNLWPYAGLAVVKQSTGDHRIVDNRIQRRARPAMTRGLNPNSNRGLKKIFKSIAVDLSHSDTPLGSAHGQRVERGMRKELALLTLARTVAAILLSMWKKGAPYDSNRMKNNL

SEQ ID NO: 272039 - protein, 392 aa, unidentified
MVISVGIDVSKDKHDCFILNSEGEVLAEVFTIPNTMDGFNCLLQKIQDSTTPQDKIKVGLEATGHYSYNLLGFLLDNGLPTYVLNPLRTNLYRKSLSLRKTKTDRVDARTIAAMLLSDVGLKPYTDTAYHNEELKSLTRYRFDKVKERAKLKSSISRLVCILFPELEKLVPTLHMTSVYSLLEEFPGAKQVAAAHLTRLKTLLETASKGHYKRDMALEIRDAARNSIGSRMPAKSLELQHTIRLTRELDREIDEIEEQIQSIMGELHSPITTIPGLGFRMAAMILAEVGDFTRFDSPDKLLAYAGMSPSTYQSGQLKNCYPHMEKRGSRYLRYALYNATKYVCYWDPAFADYLAKKRAEGKHYNIAISHAAKKLVRLIFAMEKSMQPYCSAS

SEQ ID NO: 272040 - protein, 398 aa, unidentified
MFYAGIDIAKHKHEASVIDQEGKALLDSISFSNTKEGCEKLLLLFEKFEIAVNDVIIGMEATGHYWLSVYAFFTELGYDVKVINPIQSEAFRKMYIRQTKNDSKDSYIIAQIMRFGQYSSTTLSEENIVALRQLSRYRLALVDSCGDCKRRVIALLDQVFPEYDKLFSDTFGVTSTEILLKYPTPEDMLTVSTRKLTTLLRKASKGRFGEEKAKQLKAIARGSFGVSFAKDAFAFQIKQLVEQLVFLENQIEELEEQISVLLHQINAVITTISGIGDTLGAIIISEIGDIHRFDSPSKLVAFAGLDVKVNQSGEFTGTKNKISKRGSPYLRRAIWLAASRAAFCDPVLSEYYQSLKSRGKHHLTAVGGVARKLCNIIFVILRDNRPYEPFPPNAKPPS

SEQ ID NO: 272041 - protein, 312 aa, unidentified
MAKDTIGIDVSKDRLDVFWHSRGEARSLPNSGEGFGQLCDWLGEEEGVLIVFEATGAYHRGLERHLSLAGLHFIKVNPKQARRFAQAIGRLAKTDSIDAKMLARMGVVLDLAPQVIEGEDVHDLRELLTARRALVKDQVTAKTRLATALNPLVREQLCRRIDDIGADIEALDEAIAQIAKQRGTIEARIRRLMTIPGIGRLTATTMLIDMPELGHLDSKKIAALAGLAPMTQQSGKWQGKERITGGRSSIRRAIYMPALVAIRFNQDLRDKYQQLLKAGKAKKVAITAVMRRIIVLANTLLREDRDWQPERP

SEQ ID NO: 272042 - protein, 359 aa, unidentified
MNKNSTIFLGLDLGDKFSYIVILNQDAEVIEETRLPTSKSAFKRKFSTIPSCKIAMEVGAQSRWVSDLLRELGHDVIVANARKLRAIYANPRKDDRTDAETLARLARLDPSLLSPIHHRSPQAQADLAVLRSRDALVRSRTLLINHVRGIAKSFGDRLPSCSANYFATKVAPSIPEPLQPALIPILETIASLSQQIRAYDRQVEALCKSKYPKTKLLRNVSGVGPLTALAYTLTLEDPQRFPKSRDVGPAVGLVPKRDQSGDRDPQLRITKTGNTFLRRLLVSSAQYILGPFGPDCDLRRWGLRLAERGGKNAKKRAVVAVARKLAVLLHHLWKTGEVYDPFHISKFFEAKPASVPVAA

SEQ ID NO: 272043 - protein, 343 aa, unidentified
MQTVTTIGLDIAKSVFQVHGIDAKGNVVIRRQIKRRQVLAFFQKLPRCLIGIEACATAHHWSRELQAIGHSVRLMPPAYVKPYVKRHKNDATDAEAICEAVTRPNMRFVATKTAEQQSCLSLHRTRHLFIRQQTSVINVIRALFAEFGIVAPVGRRGVEQLLRVAADLSDKRLPDIARACVAALGAQLRMLKAQILQFDRMIMAWHRSSEASRRLDDIPGVGPALATALVASVADPNVFRSGRDFSAWIGLVPKQNSSGGKDRFGGISKRGDRYLRSLFTTGALAVIRYAKIHGTQHRPWLTALLTRRPTKVAAIALANKIARMAWAIMAKGERYKEPAALTA

SEQ ID NO: 272044 - protein, 352 aa, unidentified
MHMIAFDSHKRYTVASVQSIDGQIIKESRIDHGRGNIVRFLTQWDKGSPVAVETIGNWYWIVEEIEHAQMQPRLVHARKAKLMLGMINKTDKLDARGLNRLQQTGTLPTVWIPPLGIRDKRELPRTRMVFAHQRTKLKNRIHSVIDKYGLQNKFTDISDIFGKRGRQMIQQSLKLFPEQTRYALETLLHHLNEVERQAGKIEKRMKEVFHPNEETKLLMTMPGIGFILAVVISLEVGDVGRFSGPERLASYSGTVPRVHASGEKVRYGRLRPDTNRYLKWAFCEAGSSISMNRNKWPHRHVSKVYARVRSRQGHAKAVGAVARHLAETTYWILTKKEQYRERGVSRVSLAEA

SEQ ID NO: 272045 - protein, 344 aa, unidentified
MNKVTIGLDTAKSVFHLISKNTQGRILNKKKLKRAQVLDFFANLPPSIVVMEACGSSHYWCRGISRLGHEVKAIPPQYVVPYRKGNKNDYNDAEAIAEAAQRENMRFVPLKSQSQQDVQLVHRVRERLIGQRTALSNQTRGLLSEYGIVLPKGLAQLTKGLPYILEDADNELSIMARHQFSDLLEELKSLQDRIKQVDSQIKTLVKNLPTCQRLINMTGIGPLIATALYAGIGNGQAFKSGRHLAAWFGLVPKQHSTGDNPRLLGISKRGNTYLRTQFINGARAALRCIADKQDTVSQWCRQCLERMSFNKACVALANKMVRMAWAMLHYQQDYQPGHVNKAIS

SEQ ID NO: 272046 - protein, 419 aa, unidentified
MSFKILKNNCCGLDVHKTWIFACIGITDSRSRTEYKQARFSSFSKGLQELCDWLAKYNCTDVCMESTGKYWIPVFNILEKNNVWVTLSHPKYTKPQKGNKTDRKDARWICDLYMCGMVKPSFIPPADIRELRDLVRYRYKLTCMITGEKNRAQNCLTVSNLKLDEVFSDVFGKSSRSITEQILQHPGEIFDVTPFVDGRCKTPIEEIQAAVDGAVSTEQAVKLKQCLNHIDELEMHKAEIEREIFRLSDKYEEALILIRTVPGFDKNPMTAIQVLSEIGGDMSVFPTAKNLVSWAGCCPRNDQSNQKIKSTRISRAGSYFKPVLVQVANALIKSKKHPEFTTRYRRIKARRGHKKAIIAICRMILTAIWHILTDLKPYTPEGFLESRPVNESKVLTTSQALNLLKQRGYIIKDDVVPVS

SEQ ID NO: 272047 - protein, 315 aa, unidentified
MGCSQKIRKRKATTRSMNYAALDLHERTVQCVLKDQDGRIVKESKTVKDEGRILAFLDGTDASVVMESGRNHQHIYDVLKERGYDVTVAHPLMVKAIAYAKVKTDKVDARVLADLLRADMIPESYVPGRDIREIRDLVRRRHYMVKLRTMQKNKVHAELATRWLKYEGDPFTEDGKVYLRSLAIDAVNDYLETIEFLNRKIHQLDEKVRRVVESDKYAKLLMTVPGISYYSALLISSEIADIRRFPDHEHLCSYAKLSPGVRQSGETQHTSKSMGNSMMNWIMIQCTRIHVRRYDSAITRFYQQVSKRRGRRSPS

SEQ ID NO: 272048 - protein, 351 aa, unidentified
MSQTFNAAVSVVGIDIGKNSFHVVGHDERGAIVLRQKWSRGQVEARFANMPPCLIGMEACVGAHHLSRKLNSLGHDARLMPAKYVRPYSKGQKNDFRDAEAIAEAVQRPTMKFVATKTADQLDLQALHRVRERLVSQRTGIINQIRAFLLERGIAVRQGLRFLRGELPRILATPPDVLSPRMVRIIEDLAGDWRRLDERVEGLSNEIEAIARQDAGCGRLMSVPGIGPIISSAMVAAIGAGDVFTKGRDFAAWLGLVPKQISTGDRTILGKISRRGNRYLRVLFVQAAWVVLIKPKSWERHGLKSWIEAAKKRLHRNVLAIALANKLARIAWSVLAHGRSFEASKFNEAIT

SEQ ID NO: 272049 - protein, 343 aa, unidentified
MKEVTIVGLDLAKRVFQLHGAGADGSVVFRKKLSQTQLLPFLQSQPRCTVAMEACATAHHWGREIGRLGHSVHLIPPAYVKPFVKRQKNDMADAEAIAEAASRPTMRFVAVKTEAQQARAMMFRGRDLLVRQRTRLSNALRGHLAEYGVVAAQGMLHLRQLQETMEAASSGLPPAVCEIGRMYLDQITLCSEKIAKLERMLRLEAARGEVTARLQTMPGVGPITAMAVEAFAPPKESFRRGRDLAAWLGLVPRQKSSGGKQILGKTSKMGQRDIRRLLIIGAMAVVRAKLRGGKIAMGSWLDRMLARKPRLVVAIALANRMARSIWAMLTKEQDYRDPVAAAA

SEQ ID NO: 272050 - protein, 336 aa, unidentified
MSHYCGIDLHSNNHVVVVIDEEDRRLYERRLVNDLSLTLRALSPYRGTLEGIAVESTFNWYWLVDGLQEAGFHPRLVNTVAVKQYEGLKYSDDVHDAFWLAHLMRLGILPTGYIYPKAQRAVRDVLRRRAFLVRAACSQLTSVQNQLWRSTGIQVSCNTIRKADFEPEGVDGYTRQGVEAGLAVLRTLYDEIQKLERSALDAVALSDEFRILRTIDGVGSILGLTIMLEVGDIGRFPSAGDFASYCRCVDAKRVSNGKKKGTGNAKAGNKYLSWAFSEAAHFAVRFQPLAQRFYERKRAKTNGIIAIRAVARKLARATWMMLKHQTPYEARLMFPG

SEQ ID NO: 272051 - protein, 342 aa, unidentified
MEKLYYIGLDIHKKTIAYCVKEIDGTVVHHGEVRAERKALSKWLADLPGPWMGAMEATLFTGWVYDYLKPHAVDLKVAHPAMLKAITAGKKKNDRSDAEKIADLLRVNLLPKCYMLSEEMRELRRIIRYRNLMVRIAVKMKNKMSGLLMEVGATYDKKKLHQKKYFCDLLERVEDVPNSVKEMLKLNRNGLEMFESVQKRLIKTLREDKRIRERVQRLMSIGGVGEVLALTWVLEIGEPSRFPSARQAISYCGLCSAQKESAGKEQRGPISKKRNKHLQTMLIEAAKLAPRWNPQLAALHEKELARGNRNRGTLSVARKLVEYMLAVERQQKDFVPMVLEAA

SEQ ID NO: 272052 - protein, 446 aa, unidentified
MRRLPERHPPSTAPAPDVWSSRHAVAGPGFPGAIVSVNVEIGTPLMAAKGGYRTTAWARNVRVVVPDGFQDCLNAKSRGAQGVQKAELSSLLIQRQPRRLLRKSMYYIGLDVHKKTISYCLKDASGRVHGQGTIGATRCEVDNWMKTLPQPWTVAREATIFTGWIYDHLLPHAAAVKVAHPVMLRAIAAAKKKNDRIDASKIADCLRCDFLPECQMASTEIRDRRRTLRYRHLLVRQMVQMKNRVSGLLLETGVSHNKQRLHKVKYFRELLATNPDVPDSIRPLLTLSRETIVRLQKTDYALVSSWQRDPVLVERIKNLRTVPGVGPITALTWALEIGDVSRFRSVKQAISYCGLCGDEKSSADKVLRTPLSKQRNKHIQHVLIEAAKLAPRQSHELALVYEKEQQKGHANRATLAAARKMVAYLLAVDREKRAFVPVEEPGRVAA

SEQ ID NO: 272053 - protein, 361 aa, unidentified
MSIVYYGGLDVHQKSIAAFLYCSETGECIEEEVPNDRVRLLRAVSRWGARGELRLCYEASSAGFVIKRWLDEVGVDCEVVAPAFIPKGSGDRIKTDRRDARRLAQLYQSGMLRTVRVPDSEEETVRSLVRYRDDLTRDMTRSKNRILKFLGLRGMRYTEGRNWGEKHRQWLQHLELEPLQDVVLQSHLSSLDQLEDQRQRIDERIAEVAQTPAYHDKVQRLMCLRGIALYSAMVLVTEIGDAHRFRGAPELMSYLGLVPREHSSGDSRHSGKITRVGNTRGRWVLSEAAWNQTRKPGTSVRLRKQRHSQPEAVAAISRKAEQRLYHKFWKIAVRKDRNTAATAVAREMAGFVWSLLTVEVA

SEQ ID NO: 272054 - protein, 344 aa, unidentified
MDHFAGLDVSVKETSICIVDDAGKIVREVKVASEPEALLAVLKNPAYHFKRIGLEAGPLSQWLFSALAESGLPVICVETRHMQAVLKAQINKTDRNDARGIAQMMRAGLYRPVHVKTIRSQKLRMMLTHRKLLQSKAIAIENDLRGTLRNFGLKVGMVGKAKFEARIRALVENLPDLAVLVEPMLIVRRTLREQIVILHSRLLTVVRDDEVCRRLMTTPGVGPVVALTYRATVDVPARFRKSKAVGAVFGLTCAKYQSGEVDRNGRVSRCGDEMMRVMLYEAAQSMLRSKKWSWLKAWAMQIARRRGMKKAIVALARRLAVIMHRIWVDGTEFRWTREQATAAA

SEQ ID NO: 272055 - protein, 415 aa, unidentified
MTEDTQWFVGLDWAREKHRVVVLDAKGESVAERDVTHDGAALSELCAWLIEVTGAQPAQIAVAIETPRGPIVETLLERGFVVYSINPKQLDRFRDRFTVAGAKDDSRDAHVLASSVRTDRRAFRRLTFDDPLIIELREWLRIEDELKQERIRLSNRVREQLWRYYPQANRLSDDVADDWFLDLWEQVPTPATAAQVNENTVAKILKTRRIRRFNAAEALAILRQQPLQVAPGTAKAATAHIRTMAVRLRLINEQIKQAERRLDELCAGIKASAPGQICEQRDVAILRSFPGLGRINIAALLAEACQPLRERDYQVLRVLSGSAPVSRRSGKSWIVLRRYACNNRLRNAIYHWARVAIQHDAVSKRRYDELRRRGHGRARALRGVGNRLLYVLCKLLQRQTPYDPEYKIQQMQLTA

SEQ ID NO: 272056 - protein, 417 aa, unidentified
MDIQASYQATVGIDWADQKHSVFVHFSDGDSYGRKIDSRPKAIQQWLLELQAKCTAAGKVAIALEQRRGPLFYQLCSHLEWIDLYPVNPQSLASFRQTFFSSRAKDDPVDSQLLEELVRTHGDRLRPYQPQPISERKLDQYCRLRRGLLDLATQTELKLISTLKQYFPLVLDLFGAVGLKADIALSFLSRWPTLALLQKAQVNTIRSFFYAHNSRSQSLIEERLGQIKEAQNVTDDLALIEPFVLTTKCLVGQLRYFKKVLKNFDYEIEQLFKSHPDHFLFESFPGAGKQLGPRLLAVFGSDRARWAAPMDIQKFSGIAPVIERSGKSVWVHRRLSRPKFICQTFHEFAQHSVLHSSWAEQFYRRQRQKGKSHHSAVRALAFKWIRILYACWKANQPYDESRYLRALQSKTFSVSSS

SEQ ID NO: 272057 - protein, 348 aa, unidentified
MSQNSNTSIAVAGIDIGKNSFHIVGLDQRGAIVLREKWSRGQVEARFANMPRCLVGMEACVGAHHLSRQLKALGHDARLMPAKYVRPYSKGQKNDFRDAEAIAEAVQRPTMKFVATKTADQLDLQALHRVRERLVSQRTGIINQIRAFLLERGVAVRQGLRFLRAELPHILATPPDVLSPRMVRIFEDLAGDWRRLDERVQNLSEEIEAVARQDAGCERLMSVPGVGPIISSAMVAAIGTGDGFSKGRDFAAWLGLVPKQISTGDRTILGKISRRGNRYLRVLFVQAAWVVLIKPKSWERHGLKPWIEAANKRLHRNVLAIALANKLARIAWSVLARGRGFEARPAVA

SEQ ID NO: 272058 - protein, 317 aa, unidentified
MNTPVCVGIDVSHAQLDVAVRPGKGFSVSNDAGGWATVVAHLQPLKLVRIVLEATGGLEVPLVGALAGAGLPVVVVNPRQVRDFARATGQLAKTDVLDAQILAHFAEVIRPPLRPLPDAQTQVLAALVARRRHLVEMLTAEKNRLRTAAPAIRRSLRQHLVWLQRERTQLDTELAETIHSSPMWRATDDLLRSVPGVGPVLTITVLANVPELGTLTNKQIAALVGVAPLNRDSGTLHGKRLVWGGRAHVRAALYMAAIVATRYNPVIKTFYQRLCQAGKAKKLALTACMRKLLTILNAMLKSGTPWRHGMDTVCAKG

SEQ ID NO: 272059 - protein, 478 aa, unidentified
MAGKMNRKQRKELMRRLRSDDPGLEVVHPRAAGIDVGNSAHYVAVRPDQDPESVRRFECFTADLHRLADWLQSCGVDTVAMQSTGVYWIPVYEILEERGFEVYLVNARHTKNLPGRKSDVQESQWLLKLHTYGLLNNSFRPTAEIRVARTYWRQRGEHVRGASTCIQRMQKALTQMNVQLANVISDLSGLTGQAIVRAILCGERDPKKLAELSHAQIRASREEIAKSLEGNWRAELLFVLKQEVEMYDTYQRRIAECDRELEAHLKRLADNVHQKPAEDRPVSEEQKDKKAPTKLPRSGKRAQGNAPSFDLRSELYRISGVDLTRIDSISVMVAQTVISEVGLDMSRWKTEAHFASWLGLCPDNRISGDKVLSKGTRHVVNRAATALRVAATTLVRSHSYLGAQYRRLRTRLGAPKAITAMAHKLARLMYRMLKYGQEYVDKGMQYYEDRYRWQQVERLKKTAAKLGLQIVEIQAVGG

SEQ ID NO: 272060 - protein, 358 aa, unidentified
MNYIGCDCPISTLDCAVVNERGQETKKQRVNTGVRELMEFVKSVPKPRRIIIEEGTLASWLLEVCTDYGEELIITDPKINRWIGRAGQKNDEIDASKLAQLARGGYIKEIHHPIGHRRRFRELVMLYHDTVKSQTRIKNKLKAKFRQNGIKCSGETVYSVKYREKWKKKLPQEKVVEVMVVGLWQQLDQVHEVQEELLSHIRKQSRQYSEIKRFKHIPGIGTVHAATISAIVETPHRFANKKKLWMYAGLGLAEKASGEKVYSRNLTRSYNRLLKSALKQAAEAAISARDNQFRRQYLRLTLEKGIPSHRAKLTVARSILATAYGTWKSGENYDPHIDKRRAESDTMQVRAYHLVRNG

SEQ ID NO: 272061 - protein, 439 aa, unidentified
MTNPLDLPIVNPHAAGVDVGSEKFFASVAGETAQVYLTVTRQMQQLCADLKAADVRTVAMEATGVYWINLYGALEEAGIEVKAVNGAHCRNIPGRKTDMKDCQWLAVLHAHGLLSGGFVPPEDIRRLRDYMRVRDDLVSMASQHVQHMQKAMDRLNVKIHVVISDITGVSGMRIIKAILAGERDPMKLVALCDGQILKTKQTPMIEALRGIWREEHLFALGLALASYENYQGQIAQCDERIAGALKGMSTGKATPELGKAKELRHNALVIDGLQQEVAQIYGHDLTKLPCLNASTVAMLLAEIGSDMSLWKDWRHFGSWLGLAPSYAQSGRRRKREKKYLTRAGQILCRAVQCMAVGKHTWLTSFYRRIRAKRGSKVAIKATAYKLAKLVFLVLTQGWQYVEQGIVKYEAKVREMQTKTLQKLAKKLNFVLVPKDSATV

SEQ ID NO: 272062 - protein, 339 aa, unidentified
MKTYAGIDLHSSNNYIGVIDAKDNRLYSRRHHNLMPDILKVLGKFKTTLQGVVVESTYNWYWLVDGLMDAGYSYVHLANPSAIKQYEGIKYTDDQHDAFFLAQMLILGILPQGYIYPKKDRPVRDLGRERLFLVHHKTSHILSLQSLISRCCGQRVSANDIRKFTVEDLQHLLTEQHIVLSAQANLETIVFLKQQIQRLEKAIQKKVKLNKAFQQLLTVPGIGLILAMTIMLEVGDIGRFPKVGNFASYCRCVSSKRLSDGKSKGHGNRKNGNRYLSWAFTEAAHLSRRYNVLFRSYYNRKLAQANTSLATKALSNKLARICYYIIRDQVPFRGNLLSQ

SEQ ID NO: 272063 - protein, 474 aa, unidentified
MTSIQKSRTELAALPMLPNEALYIGVDIGKFKHVAGFLSKTLLERHKHFENCPAFTFEQSREGFRAFVERIQAYCPLEHCFLLMEQTGHYHRPLQQYLLELDLPVYIIHIQRRQAGMIKTDKRDALGLANQLYTQLELGAQVADTLQVIRRAIPPSEAAAQLKGLMRHRYELVNEATRRKNKLIAICDELFPEFTNVLKDPNAPIALDLREHFPTPSAIAAANPVELRKIRRRNHPSEAQFLQIQQLAVQSIGTKDAARQHSLIIEQALLIQELRLLQNHLEQLEEEISQIVEQSREGQILTSIPPISPLYAAAILATIGSIGNFEDAAHLKSYFGWAPTRAQTGVSFDRTRLTRGGSREMKKVMFLVAWKAIQTDTEWAKLYKRLVPRLCTYDERMQAHKGKGKVLGHIIGRLITLIFALLKKDYELLNRLSPGTEPPPPTIYDPELHQRHRTGHYASLRREGPKNRIVQLSQ

SEQ ID NO: 272064 - protein, 352 aa, unidentified
MAVTIVETRAEIRAITGGVDTHAHVHVAAALDPIGGLLGVREFPATTAGYARLLDWLAGFGTVALVGIEGTGSYGAGLARHMAGAGVRVVEVDRSDRQDRRRQGKSDPLDAVSAARAAQSGRARGAPKGRDGAVEAIRALMVARRSAAGERTRAINQARALLLTGPDDLRARFTRHTPAALVAGIASLRPRPGDVAGYAVRVALRELGRRAQFLDGQLGRLDDLIVPLVTARAPGLLALYGIGPRTAALLLIAAGDHPGRLRSEAAWAHLCGAAPIPASSGKVTRHRLNPGGDRQANHALWRIVFTRLGSDPATRAYAERRTAEGKSKAEIIRCLKRYVAREVYPHLRPAGG

SEQ ID NO: 272065 - protein, 408 aa, unidentified
MELQSRCVVHGFSLLSDEGSQNMVIIGVDPHKSVHVASAVDPATNRRIDTIKAEASLAGYRRLLRWADKLGERRWAIENARGLGRHLAQWLVAREEVVDDVPSTATARVRELSRGGRRKNDVIDAAAAASVAALQGDANQVEPEDLTTVLALLDERRTNVVVQRTRLVNQLHALLRDLVPGGGPKDLTATTASRLLTSVRPTGPVETARKDLARDLVVEIRAADQRVRTLTAQIAEAVSSTGTRLLEVDGVGRVVAAKLLGRSRHASRFATAASFASYCGVAPIEVASADRARHRLPRGGDRQLNLALHIIALTQVRMRHSTGRAYYDTKIASGKSHNEAMRCLKRRLADHVWRLMVRDERTQTAGPGGHSGASLQSSAAGSTPTASSSDKSLPEPAEYNSTTQRSAA

SEQ ID NO: 272066 - protein, 388 aa, unidentified
MPAAETPVAYLGIDVGKSSHSACALDAGGGVAFRAELANRPDDIDRLLERAGSGALVVVDQKRNIGALVLARAHAHGNPCAYLPGYAEKQARGMFPGTAKTDAIDAEVIACPALGVPRALRPAPEEPEGAASLRILSSQREFASSARTRAKNRLRATLLEADPALEGAVDPSSRWQVSMLAEFGGAAGCSAAGWRRFSNAARRAGAPAAGARRLWEALLASSRSGRRLPAGEDVAVRMLAREIASLDADIEELDSLVADSLAGDEVYECLLTVPGIGPKTAAALVTSIDISAFRGHDELASYCGVAPSDRRSGSSIRSTSPQRGGNRQLKNLLIFSCNSLIGTDNRFGRYYGECRARGMRHSKALKAVARKRLKVIYAIMRDAVPYAA

SEQ ID NO: 272067 - protein, 409 aa, unidentified
MSHNIAGIDVHKKLLVVVVTGADHAQNIVSSRRFGTGHAALGELRDWLLSLEVKEAVMESTAQYWKPVWLELEPYLKLHLAQAQSNRAPGGRKSDVADAKRLVRRFVAGELYLSFVPDPEQRSWRTVTRARLQLIRERAQLQNQIESLLEEGRIKLSSVISDLLGASGRRILRAMAQGEEDPEALAALASERLKCDEETLKDSLQGSMTIVHQTLLAQHLDRIELIDGQIEQLNRLCAEHMQAHQAAIVRLVEVPGIGPETAQEIIAEIGPAASAFPSGPQLASWVGACPGSHESAGQNRSGHCAKGNRFVRRVLCQAAQAAVKTNGSYIQSTFRRLIVRMGYTKAIWAIAHRLCRIIWKILHQGVQFIEHSAAVNPKAIRRSVNKHLRALRRLGYIIPASVVPSAARE

SEQ ID NO: 272068 - protein, 401 aa, unidentified
MVSDFMKGRYNLMKIFVGIDIAKLNHFAAAISSDGEILIEPFKFTNDADGFQLLVSKLESFDKNSIIIGLESTAHYGDNLVRYLVAEFYQVCVLNPIKTCQMRKNNVRKTKTDKVDTFVIAKTLMMQDDLRFITFFDLDMMDLKALGRFRQKTIKQRTRLKIQLTTYVDQVFPEIQYFFKSGLHQNAVYALLKEAPSPKEIASMHMTHLANLLKVNSHGHFTKEQAKELRILAQKSVGANDSAISIQITQTIQQIELLDSQLEKIEAEMTDIMKFNDSVIMTIPGIGYINGGMILGEIGDIHRFSNPNKLLAFAGLDPSVYQSGNFQAKTTRMSKRGSRVLRYALVNAAWNVVRNNATFKAYYDAKRAEGRSHYNALGHCAGKLVRVIWKMLTDEVEFNLE

SEQ ID NO: 272069 - protein, 417 aa, unidentified
MAEEIEWFVGIDWASQSHQVCLVDARGECLGERAVAHGGLGIEELCDWLIARTGATPEVIGVAIEMTQGPVVEALLERGFCVYGINPKQLDRFRDRFTVAGAKDDRRDAHVLGDSLRTDRHAFRRLSNDEPVIVKLREWSRMTDDLQQERTRLASRMREQLWRYYPQMLELADDFAADWFLDLWNQAPTPAKAVRLRETTIERFVKAHRLRRWPAPEVLRILKQKPLSVAPGVVEAASDHIRTLTVRIRLINQQLKTAHRKLDELCAQLIPSEEDEPGQQCEQRDVVILRSMPGLGRIILAVLLAEVWQPLRRRDYHALRSLSGVAPVTRRSGKTCVVVRRYACNKRLANALYHWARLATQHDALSRRRYAALRQRGHSHGRALRTVADRLLSVACTLLEQQTLFDPSYEVRDAAAA

SEQ ID NO: 272070 - protein, 347 aa, unidentified
MSSPYDCVQWVGMDLHRRRSVLVRMAADGQRLGEMVRFNNDPARLKREIAKAGPQPKVVLEATLGWYWAADALAEAGAEVHLAHPLGVKAFSYRRVKNDERDAADLADLLRLGRLPEAWLAPPETRELRELVRGRHKLVSLRTSCRNQAHGVMGKLGIAVPMSDLFGTTGSAFLDELPLTAGYAARVRALCAVMHELGQQIEMLDKEIAARLASDPGYRAIQKIGGIGPVLAAVFTVEIADVTRFPDPQHLCSWAGLTPRHRESDTVVRRGHLTKQGSKLVRWAAVEAVQHAPESTPMRAHKDRIESRRGAGARNIAKAAAARKLLTLVYYGLRDGEVRCLTRRDPV

SEQ ID NO: 272071 - protein, 476 aa, unidentified
MGEDYTREGWLEVDVSSCREHDAECDSGTDRHTQLYLQNGEYAEQSLERSRSEPALMRRNQMDVMYSKCAGLDVHKQSVFACRIYANGDGEVVSEVRKFGTFTGELLQLSDWLREVQVTHVAMESTGEYWKPIYNVLEGQFELVVANAYHLKNVPGRKTDVKDAEWIAQLLRHGLVKASFVPSQTQRDLRELTRLRTTVVEDRARTVNRLQKVLEQANIKLASVVSDISGVSAQAMLRELAGGNTDALALAQLAKGQLRDKTAELEQALTGRVRPIHQFMLADGLAQLDSYDARLARIEEEIEHYMHPFEAVVQRLDTIPGVGRTTAQVIVAEVGWQVESFASAERLCAWAGVAPGNNVSAGKNLGSKTRKGNRALKTALTQAAQSATRKTRSGETYLKVQYHRIAARRGRKRAVMAVAHSILKIAYYLIQRETGYEDLGADYFDKRDHERLTRRLTTRLERLGYTVVLTQQPHAA

SEQ ID NO: 272072 - protein, 348 aa, unidentified
MNKRIAVDLAKSVYQVAESVRAGQVSQRKRLNREAFRRYIQDQAEPVEWLMEACGTAHYWGRFAQSQGHRVILLHARYVKPYRRRNKTDRNECDAILEAARCADIHPVPVKTHEQQQLQQLHGLRETWKKSRTQRINLLRGIFREMGLEAPAATAAFLHAANELVECPEVVALRGQLQIVLAEINLYEQCMVECEQQLQRWHADDAIVRKLDEVSGIGLLTASALKTVVGQPERFASGRQLSAWLGMTPREYSSGNRRRLGQISCLGNTYVRTLLIHGARAALLAAQRLYCRTPERLTQLQRWAVATAARIGHNKAAVALANKLVRICWAVWCRERRFSGNWQSSRPA

SEQ ID NO: 272073 - protein, 376 aa, unidentified
MITCFIGIDAHTTNYTLSTAIDAEDKPFNTCKYAPKLTYILKYANALCKKYNLKKEDILLGYEAGCLGFKLQRALNDNGFNCVVMVPSTIPGTAINRRKKTKNDIRDAEAIAKALRNDDYSSVATPDEEDEAIREFIRAREDVRMELKRCKQHIMAFCNRHGQHYEETGWTQKHMKWLNNLAFSQPVLKETLNSLLLEYEYLTEKLEEKDRRIEEFAQMDKYRESVHKLTCFKGIKTLTALAVIVEIGDFARFMKAKNFVAYLGLSVGEQSSGNDHNQTGITKQGNRFIRKLLTEAAQCFSRATSKKSKELKKRQEGNVEEVIAYADKANERLRKRYHHLVIHNMKSPNKAKCAITRELACFIWGMMTDNIHTVLV

SEQ ID NO: 272074 - protein, 400 aa, unidentified
MLSIGIDVSKGKSTVCGMKPEGEIVYAPFEVQHTREGMSELVSLLHNSGEEVRAVLESTGSYHCPVVAALLENGIFVSVINSLRMKRFCSQSIRKVKTDRIDAMQIALYGLAYWQELQPTRLPEDTYRELQRLARQYYQMTSMLIKAKVDFNALCDQVLPGMQELMSDHAGRHKLSDFVLRYRHTTHILEMGETRFRKDYCKWAEKKGYRNCERMAALIFATAQNGIPVLPNAPSTQIVITEAIRVLHTVEASRDAILTQMQALAKTLPEYSLVREMPCIGDTLAPRLIAEIGDVRRFHSKRALIAYAGIDAPPYQSGKFRANNRHISKRGNRYLRKTGYEVMQSYVMHKPANDPIFTFIEKKRGEGKSGKLAMVAGLNKFLRVYYGKVTELYRSLPAIE

SEQ ID NO: 272075 - protein, 324 aa, unidentified
MAKSITICAGIDTGKHKLDVALDGRKDQLQVENTPAGHLALLSWLRQHRVRRVGIEASGGYEQAVVAELRRNRFVVVVFQPAQVRAYATFHALRAKNDRIDAALIARCTAAAQTIHAAPDPRIRPFAEQLTTIDQLGEDIARLKNRIESCRDARAKALWAEDLTRLQKRKTAMFKALLASIRAHSDLAERLVLILSVDGIGLPTAVAILVRMPEVGQIGREQAAALAGLAPYDDDSGQRVGIRHIDGGRTRLRHALYTASLAASFRWNPQLIALYRRLIAAGKGHKRALVACARKMLIFANTVVARGTPWHRNALVTKAAQMTA

SEQ ID NO: 272076 - protein, 343 aa, unidentified
MISSKTVVGVDIAKRVFQLHWVEPDTGEVVSRQLKRDRFLEYFTNRSPCLIGMEACGGSQHWARQLTALGHEVKLMPACWVKPFCGSNKSDAQDARAIWSAVQQPGAKTVAVKTEAQQAVLALHRIRQQLVKFRTAQINGLRGLLTEYGEIMPLGRAALAKGVVAAFERIAERLPAVLIDTFREQWSRIATLDDQINEIERRLQVWHRNDASSRRIAEIPGVGLLTATAAIASIGDPRAFNSGRELAAWLGLVPRQSGTGGRLRLLGISKHGDTYLRTLLIHGARSVLTHSKAPPTWATKLAQRRPQNVAIVALANKMARTIWALLAHERRYQRDFVSKPTVP

SEQ ID NO: 272077 - protein, 348 aa, unidentified
MVTDELDAVIGVDTHRDIHAAALVRPTGAVVSQTQIDTTGEGYQALLDFALQHAPGPRLVWAVEGTRSYGVGLTRFLHAHGQVVVEVDHPKRPTRGRAGKSDALDAVRAAREVLARDHQAIPRQDGDREGVRVLLVARASAVTSRTAAINSLKALVLTAPDPLRDRLRHHAAAAQAGVCAKLRRSPHRSPSDQARVLALRATARRVLALSAEIDELERELAMMVKQWAPQLLAHTGVGVVVAAQLLVSWSHRGRVRSEAAFAMLAGVAPLPASSGTVVRYRLNRTGDRALNRALHLAVLSRIAYDDETKAYVARRLAEGKTKPEIRRCIKRHLARRLYRAMQALPDQT

SEQ ID NO: 272078 - protein, 455 aa, unidentified
MAHRKSKIPAQLVEDEEYQLRYERVAGIDVAKASAVVCTRLPPARAGGRRRSRTEEVAAVAAAITGLAAALLADGVELVSMESTSDYWRIWYFTLEAAGLNVRLVNSSAARQLAGRPKTDRADAQWIARLTEMGLLRPSFVPPAEIRALRAWTRTRLQLVRDRTAEWQRLEKLLEDALVKLSSVVSKLAGNKTARAVIEALIAGQRDPRTLAGLAKGSLRGRRGDLERALDSMAFREHHAWLARLHLDRIDVLDRQVAAIDDEIQACLDAIPAAQGITADGTRTPDPGPDPAVLPAAQRLAQIPGVSLELARAIIAETGLDMTRFPTAGHLVSWAGLAPVARQSGPRARKPKKGQGNGYLRRYCTQAANGSGETDTFPGQRLRRLSRRLGGARARCAVARSILVIIWHLLADPQARYTDLGAGWHDRKTDRDKKIRGHLRQLRALGLQVTITPAA

SEQ ID NO: 272079 - protein, 437 aa, unidentified
MTYVGVDWSDNFHVVYVTDETGDSLAAFKVDHTPEGIESLFLKVKEHAQNPAEVLFALETPKGLLSSAILEAGFTLYPINPKAVDRYRDRYKVSGKKDDYFDAMVLANILRTDRQNHRALVPDSLLTRELRAYTDGYQALVKTQTRLTNQITSCLKNYYPVALGIFGKIDQSITLSFLSRFPTPDSFRRGSKAKIENLLKKNHYPGAREKMLEIYALSKKPQFEIEEPIARANSLLLLSLARQTKETLASLKEFELKIAELLEQHPDTDVFSSLPGAGKITTAKLISNFGDNRERYRKVSCVQADAGTCPVTIGSGKSLRVSFRYSCRKPFRAAITQFAFTSLQKSEWAKQRYDKYRHNNSKDHNLALRCLGNAWLEVIFPMWRDRKPYDVEKHLIGVFKEQGIFSKDVKMPVFASEPMIARNYRGSSPQVSTIGLT

SEQ ID NO: 272080 - protein, 355 aa, unidentified
MEDYDGRQVVGMDLHRHRSVLVRMTEDGRRLGTARISNSAAALRNEIGRAGTHPRVVLEATYGWYWAADVLEAAGAEVHLAHPLGVKAFSYRRVKNDQKDAADLADLLRMGRLPEAWIAPHPVRELREITRYRHKLVKLRTSCKDQVHAVLAKLGIAVTCTDLFGTGGQAWLDGLKLPQPYAGKVTSLRHLTGELTAEIAMLTDVTGDLLAGDRGYQVIQQLPGIGPVLAAVIVAEIGDITRFRNAGQLCSWAGLTPRHRESDTKVARGHVTKQGSRMLRWALTEAIQRTPAGNPVRQRKDSIIARRGKEARNIAKVAAARQLLTLVFYGLRDHQIRCLARPAASPPAPPRQQAA

SEQ ID NO: 272081 - protein, 322 aa, unidentified
MGYFAGLDVSLEETTICVVDEAGRILREARAVSEPEALAEFFRASGMDMERIGLEACSLSAWLHAGLTQAGLPAICIEARQAKAAMGAMPNKTDRNDARGIAQIMRTGWYRAVHVKSPSCRSWRALLTARRLVLNKRRDVENGVRALLREAGLKVGTPSRKDFAARVRELAGDDPVLASLSESLLSVIAVMTQEVERLTKRVLDEVKLEPTCRRLMTVPGVGPLTALAFRATIDQPGRFRRSRDVGAHLGLTPRRYQSGETDVQGGIIPGLADRDSCGRQVLVCAPGWRAAARETKTLIPRVAISEPWYKPVRRRAGPNRAV

SEQ ID NO: 272082 - protein, 380 aa, unidentified
MKEFTQQSIGIDISKESFSACVCQRNLSNENLLSQVREFKNCKTGFNQLVKWTRKLTQSGTPVVFVMEATGNYYENLAYHLYTLKQQVCVLLPNKVTYFAKSLNIKTKTDAVDAQVIARLGAERKLRFWQPPPQIFKCLKELTRQHSELVREKTSFSNRLHSVKSGYEPQPFIIKSNKSIIKALAKQIENCEVEIETLIQSEVWLWHKVKNVMTIKGVGFMTVAIILAETQGFEHVQNIRQLTSFAGLDVIRRESGTTVMGKTRISKKGNTRIRAALYFPALVAIQHNEDMRNKYHRIKEGKPSKMVGVTALQRRLLILTYTLWRKNEAYIDDYEQIQITKKQNQVNEKTNPIKSKAGRGLTNLPAQDDLQPKRLEISFV

SEQ ID NO: 272083 - protein, 355 aa, unidentified
MESTEYIGMDVHKDAIAVAVMNSAGKVVMESVLETKAATILQFIRGLRGNLLLTFEEGTWAAWLYDLLKPYVTKVTVCNPRKNALLRSGNKGDRIDAQKLAELLRHGSLSAVYHGERGLRTLRELSRSYLTISKDLTRVMNRLKALYRSWGIACSGTQVYAPRHRAEWLNRIKEAGVRSRAEFTYHQLDGLQALRQAVRRELLAESRKHRATKLLRQIPGIGPIRAALVIALLQTPDRFRTKRQLWAYCGLAIETRGSGEYCYVEGKLRRSQKPVALRGLNKNHNHDLKWIFKSAAVRASSSAGPLHEFYESLLAKGMKPAMARLTLARKIAAIILIVWKKGARFNGEYLKPQAA

SEQ ID NO: 272084 - protein, 341 aa, unidentified
MESIYYIGLDIHKKTIAYCVKRSDGVLIRQGTVFAERKALLEWISGLPGSWIGAMEATMFTGWVYDFLKPHALELKVAHPEMLKAITAAKKKNDQADAEKITDLLRVDLLPECYMAPEELRELRRILRYRNMVVRTAVGMKNKISGLLMEVGATYDKRRIHGKRYFNSLLERVEDVPPSVKELLALSRSNLELFTAVQKKLLKTLKDNNLIRQRVERLMSIQGVGEVLALTWVLEIGEPSRFNSSRQAISYCGLCSAQHESAGKQYHGPISKKRNRHLQTMLIEAAKLAPRWNDQLAMVHAKELARGNRNRATLAVARKLVKYLLAVDRKNSDFEPLQQAV

SEQ ID NO: 272085 - protein, 462 aa, unidentified
MTKKNIKCKTGNSSGKMRVSSEMTKINANAAGMDLGSEEHWVCVPCDSADENVRRFGVYTEDFRELADFLRSSRISSVAMESTGVYWIPLYEFLDKAGFEVVLVNARHLKSVAGRPKTDIYDCQWIQRLHSYGLLQGSFRPSDEICELRGLTRHRASLVAEAGTKVQHMQKALQQMNVRLDKAVSDITGKTGTMIIERIIAGERDPVSLAKLRDSRVHASEKEIAMALDGNYRSEHLFALKQSYEATCFIQSQMNECDGEIKRVLDCLDRKLDSSMVASLPPRKGSKRSNKNQPLFELRPALYEIYGVDLTQVDGFQSSTVLNILAELGPELCKFRSDKHFTSYLGLCVNKEISGGRVLKNKTRKVQSRAAKAFRMAAQALKESNCYLGKFYRRIKFKAGSPKAITATARKLAVIFYNMVTKRQEYKPIDPDTFDRKHKERTLKALKKRAQTLGFDLVPAKA

SEQ ID NO: 272086 - protein, 459 aa, unidentified
MKKNTKFYKTKPAELSLLNPKCAGIDVGASEIFACVAKNASEQEVRSFSTFTADLRRMLTWFKEKGVESVSMESTGVYWIVPYEMLDEAGFEVLLVNPRFFQSVPGRKTDVQDCQWIQRLHSYGLLPGSFRPSNEIVELRSYVRQRSRLFELAGVQVQLMHKALTQMNIQLNHAISDITGASGLNIIRAILKGVRESQALADLSVGGCRKNIELITKALEGNFRKEHLFALEQAYAAYEFFHGQIHSCEKAIEEILSSIQTETEPPSSKSDNAESAHPHKCAKKTAFNRSPYYFDASNAIKKITIADLTTIPGIDASTAMKILSEIGTDMSRWKNAKAFASWLGLSPGNKVSGGKVLSSRTKPSDNRAAQALRMAAASLYRSKTAIGAFFRRMRARLGAPKAITAAAHKLARTIYRMLTDGTSYREAGENYYEQQYEARVVANLTKRAKELGYNLVLQQ

SEQ ID NO: 272087 - protein, 349 aa, unidentified
MIGIDPHKRTHTAAAVEQATGELLGELTRPARERGQGELVRWGRSLGEERLWALEDCRHVSGRLERFLLACGERVVRVPARLMAGLRRSARSRGKSDAIDALAVARAALREPCLPAAQLEGRSREIRLLCDHRDHLVDERTRIQQRLRWHLHELCPELEVPAGALDRRVWLQRIARRLARAQQLTQVRIARELVRRIGELTRRADELERELEGLVRSEAAPLLELVGCGTLTAAKLIGETAGVARFASDARLAMHAGAAPLDASSGEQCRHRLNRSGNRQLNCALHRLAVNQGRWHPGAAAYLARKQAEGKSRREALRCLKRHLARVVYKILVNVTQPTAAPATTLALT

SEQ ID NO: 272088 - protein, 463 aa, unidentified
MARRRNAKRRAPSARKPAGSLPIVNPNAAAIDVHSDNHVVCVPADRATPNVRTFGANSCELLKIAAWLKECGITTVAIESTGIYWIPLFELLEAQGFEVCLIEPGQASRCGARPKSDVLDAQWLQRLHSHGLLVGSFRPPDVVIALRAYLRQRLMLVSLASMHIQHMQKALEQMNVKLTEVVSAITGLTGMRIITAILDGERDPAVLAAFRDARCKNDEAAIARALEGTWRDEHLFELRQAYELYRTYQMKVTECDKEIEQTLAKLPDRSAGAKLQPKVKKCHRKPNTLRFEATEPVFRAMGVDLTAIEGIEDHTALVILSEIGVDVSKFPTEKHFASWLGLCPNHQESNGKRKSRRVRKGKNRVAIALRLAARSLQRSHSALGAYFRRMNSRLGFKGAVTATAHKLARYVYAMLKHGEAYVSQSLEQYEAATQERIERTLRKKARALGYDLVPRQPSSPAVS

SEQ ID NO: 272089 - protein, 355 aa, unidentified
MNGTKYVAMDVHTATISVAVLDDHGKLIMESVIEAKGATIIQFIQGLRGELILTFEEGTWSAWLYDLLQPYVANIVVCDPRRNALLQEGSANDRIDARKLAELLRAKLLRSVYHGQNGLRTLKELARAYLTITKDLVRIMSRIKAIYRSWGIPCAGESVYNPRHREEWLRKIAQPSVRRRAEFFYGQLDALVPLRKQARQELLADSIKHPAWKLLRSIPSLGPIRAAVVMAIVQTPHRFRTKRMLWKYSGFGVVTQTSADHRYVDGQLRRSKKPAFVRGLDPAHNHQLKDVFKSAAIQASTTKGPFREFYESLVAKGIRPEMARLTLARKIATISWIVWKKGVAFDAKNLKPQTA

SEQ ID NO: 272090 - protein, 404 aa, unidentified
MGYRAGLDWGATAHAVCVLDEASGQVVARLDIKHSAEGLAEMLARLARIAPAAELPIAIERPSGLVVDTLIEAGYPVVPVHPNVVKACRPRYRAAGAKSDPGDAYMLADILRTDGHRFRPLQPCSDEIKALRALTRTRDDLVAERVALANRLRSLLDSFWPGATAIFAEIDSPIALAFVQRYPTPDSAARLGEKRLAAFLAQHSYCGRRAPAELLGRLRAAPAGRAGEAEAEINGELVRSLAAILAALVGEIARLTARLEHAVAALPDGEIVMSFPRAGRVNAAQILAELGDVRERFLTEDQLAAEAGMCPVTHASGKSRGVVFRWACNHRLRKAIACFADNSRHSSPSAAAKYRGARQRGGDHPHAIRVLGRAWVRVLWRAWLHRKPYDPAQHRATQLVAARG

SEQ ID NO: 272091 - protein, 428 aa, unidentified
MNKVERTRLEEFRQLKKGIRGSEEYVIVGIDIAKDKHNAFFGTATGKTLLKRLVFENTIEGFGRLRARTEAMKVQHCLNKVVYGMEPTANYHKPLAEYLIKCGHHVVLVSGMAVNKNRELLDGRWDKHDTKDSANVADLISQGKCLYYDYPSPQLRDLRNLLSLKRRLKKQEHGTRVRIRNHLLAQYFPEFDRYFGKGCSESLEIVKWCLNPSMIAGMEYDEFVQLVAPRMKTIGQEKRLKSIWGMAIKSVGCEAGQSLDFEAKLMVEDLQQIKDSIRAVEDHIEDICLGFPEYSYLLTIPGFGPDVSSKVLAAIGNPFRFDNGKQVLKLAGYDLGAHRSGKTSDTSVPVISKRGKAYLRYALYQAAFIASTSNRHFIIYYTNKLCDRQREKGIKTKMKVKLAAKMLIIAWTLMKKKEVFDCKYLNTE

SEQ ID NO: 272092 - protein, 370 aa, unidentified
MSNATTFVGLDVHARSVKACAFVPETGETIRRSFGYEPCEIASWASSLPQHAKCVYESGVTGFHLCRELRSMGVDCVVGAVSKMHKPAADRGRKTDRRDAQFLAVQLALGVVTEVHGPDAECEGARDLTRALADARDDAVRAKQRLSKFLLRHGFVYDERNSAGQRRNRWTRDFWAWVGRIDLGDGAAMATLDHYCVRVREADAAKAALEAKVKALAQQPRWKPTCDALKCLKGVDAVTAVSIACEVDGFARFAAASGFAAWVGLVPSEHSSGESQFHGGITKAGNKHLRKLLVEAAWHYKGASRSPKGLVKGQIVDEATRRHANAGVRRLVDRRRAMDDAGKQSSVANVAVARELACWCWAVGRMAEGA

SEQ ID NO: 272093 - protein, 352 aa, unidentified
MMIIGCDFHPSWQQVSWLDTETGETGERKLVQASGDAERFYRQVAAPALIGMEATGNCHWLVDLLSELGHELWVGDAAQIRASYVRQQKTVRQQKTDQRDAAHLLKLLVEGRFPRIWMPSSEVRELRQLLLHRYKLVIIRARVKNELQHLCLNKGVQRKRKLWSAAGQQILRELPLKPWAARRRDDLLKLMAMLDQQIEPLDQAVQEEAQRDKMALLLQTQPGVGPITALAYVLTMGDVSRFPRGKQVASYLGLIPREHSSGGRQKLGAITKQGNRMMRMLLVEAAQIAVRFDPEFRKQYLHRCHSKPKAVAKVAAARKLAVRLYWMLRTQTKYPAVVRIESSPRVPLVGAS

SEQ ID NO: 272094 - protein, 395 aa, unidentified
MFIVGIDVAKRSHEVCMITSDGQTVQRPFSIRNNCTGYNLMLEKIRKHTNIKSQIVFAMESTAHYWLALFTRLRKDGYHVILLNPIQTSAMRDMFIRKIKTDAKDSFIIAELIRFGRYAESNVAQDRLLALKELCRNRFYLVDMAGDLKRKLIALIDRVFPEYEAQFDTIFCKSSVALLKKYPTPQKLSNAHLDKLTELLWNSSNGHFGEWKARELRELARNSFGVEDCDGAYSTLILLMLDQIQSLSGKADALEKEISRLFQSFDTTVTTIPGVGPIIGAVILSEVGDISRFSSADKLAAYIGVDPSVNQSGEFQAAHAHMSKRGSPYLRRCIWMASQVAVQRDPMFRAYYEKKAAEGRKYMTIIGHVTRKMTAVVFAILRDHKVYEPILPTAA

SEQ ID NO: 272095 - protein, 332 aa, unidentified
MYYVGIDLHKRDLVAAMEDERGPVGKPRRFACRDEAAIVAHFSGLRPFRAVIEASASYRWLHDRLAPLGEVVLAHPLRLRASIARPAKTDKLDAALLARLLRMDQIPESYVPPKAYQELRELTRARARLSRSATEAKDQLHHLLTARNIEAPYRRPFGVRGRRWMRALDLGLVGDLPRDELLGRLEHYAAEMGHLDEALAEMAKEFPQIEALSDIRGIGQYTALLIVAEIGEPERFTQPGQVSSYAGLAARVYQSGEHDYHGHITRQGSPWLRWALVQAAMKAIGKDRKLANFYERVRKRSSRHIARVAVARKLAEISWIRLRRWHRAEAAA

SEQ ID NO: 272096 - protein, 344 aa, unidentified
MSKVSVIGIDLAKNSFQVHGVDSQGKPVLRKTLKRSQVAPFFANLPACIVGMEACASSTYWSRVIESCGHKAKRMHPKFVKPYLMAEKNDSNDAEAICEAVQRPRMRFVPNKTQEQADIQAIHRVRNNFVRARTAAINQVRGLPAENGMILKQGACHVRFHLPGILGDPENGLSGIMRRLLRCQYENITFLDAQIVEQDRLLKDIAREHEACRRLMRIPGVGVMTATMLLTVAGTGQDFKNGRQFAAYLGLVPRQHSTGGKRRLLGISKRGDRYARTLLIHGGRAVLRTLKMNREPLGDGARHAWLVNLLDRRGSNRASVALANRTARIAWSMLVHGTEYANAA

SEQ ID NO: 272097 - protein, 385 aa, unidentified
MHQVESECSVLDGVAVFVAIELSKSAWLFAAQASPSGKTSSHRLESGDITGLLTLLRRLQARERQACGGGAVQVVVGYEAGYDGFWLQRRLAAEGITCWVMDPGSLQVNRRARRAKTDRLDAAMLLRALIAWCRGDRAACHMVQVPSVAREDARRTHRERQRLVVERVQHVNRIKGLLATQGINDYQPLRRDRSARLGEVRTKDGHALPPRLRREIERELQRLELVLEPLEAVEAERDTAVAAPAVDDADAAKVALLARLGGIGNELATVLVREGLYRSFTNRKEVAAYAGLTPMPFASGERHREQGISKAGNPLLRKAMLELAWLWLRYQPDSALARWFTDRVGSVRGRIRKITAVALARKLLVALWRYVTAGLMPEGARIKAA

SEQ ID NO: 272098 - protein, 342 aa, unidentified
MNNVTTIGLDISKRAFHMVQLDESNNIMMRKKLRRSQLDSFFSKLPTCVLSMESCGSAHYWARKFSAMGHIVKLLPPQHVKGYLRGQKNDFNDALAIAEATVHAAIRPVGIKTLEQQDEQAQHRMRSLIIRDRVALSNHIRSFLYERGIVLILGISVIEKQVPSLLEDAENDLSDNARELLARLYQQFERLSEDVQWFTNRIEAQAIQDETSVRLTAIPGVGPIVSSALKGWMGDGQHFNKGRDASAALGLVPRQHSTGGIDKLLGITKKGDSYVRALVVHGARSVVAHSDKKSDSLSLWVNRIKERRGYNKAVIALANKMVRIAWVVIAKGEDYQPKIVAA

SEQ ID NO: 272099 - protein, 408 aa, unidentified
MQVLYPRCAGLDVHKDTVVACVRCVSEPEHHETRSFATTTRELLALGEWIASHGCSHVALEATGVYWRPVWHVLEGQVELVLANAHHIKNVPGRKTDVNDAMWIADLLAHGLIRSSFVPPQPIQELRDLTRTRKQVVREISQHSLRIQKVLEDANIKLGSVLSEVLGVSGRAMLGAIIEGERDPHKLADLAHGTARRKHDALVEALHGHIRPHHCTLLKLHLNLIIALEHTVAEVDAAVGKCLDPIRQCVCLLTTMPGVRDTVAEVIVAEIGIDMTRFPTPGHLVSWATMCPRNDESAGKRRSTRLLKGNNWLKTALVTAAWAAVRTKTSYLRAQFLRLKARRGAKKAIIAVAASMLTAAYFILRDGVPYRDLGPNHFDRQQRGKTVRRLLRRLHDLGYNLPLQNQPV

SEQ ID NO: 272100 - protein, 383 aa, unidentified
MTTAIDTRDVCCVALELSKTSWVCAFAVPGESKVAIHKIKAGDTDRLMAVLTGSKARAEQQLGRPLQIVLCYEVGYDGFWLARYLIARAIHTIVFDPASFLMPRRSRVAKTDRLDAEGMTRILRRWLSGDREMARPVQIPSVEQEDAKRIERERKYLVEERISIIGRIKGLLALHGIWLVKKNIGKGLRQRLDAMKTGDGRPLAPFLRSEIERMLTRYDLISRQIADVEADRKAALNNEKGVFPHADKVRRLTTLGAVGETTATVLVAEIYHRTFLTRRQVASFVGLAPSPYKSGEVDRDRGINKAGSKLARHMLVELAWFWLRYQSNSQLSQWWHARFGNQGMRGRKVGIVALARKLAIALWRFVEDGIVPDGSTLKVRHAS

SEQ ID NO: 272101 - protein, 419 aa, unidentified
MSFKILKFNCCGLDVHKTWIYACIGITDSNNRTEYKQARFSSFTKGLNELCDWLAKYNCTDVCMESTGKYWIPVFNILEQHNLWVTLSHPKYTKPMKGNKTDRKDAKWICDLYMCGMVKPSFIPPADIRELRDLVRYRYKLTCMITGEKNRAQNCLTISNLKLDDVFSDVFGKSSRSITEQILQHPGEKFDVAPFVHGLCKTPIEEIQAAVDGAISKEQAIKLRQCLDHIDELNKHISEVEQEILCLSDKYEAALNLIRTVPGFNKNPMTAIQVLSEIGCDMSVFPTDKHLVSWAGCCPRNDKSDRKIKSTRISRAGSYFKPVLVQVANALIKSKKHPEFITRYKRIKVRRGHKKAIIAICRMILTAIWHILSDLKPYTPEGFLESRPVKKEKILTTSQALNLLKLRGYVIKDDPLPTS

SEQ ID NO: 272102 - protein, 342 aa, unidentified
MQVTTIGLDIAKNVFQVHGIDAKERVVVRKQLRRSQVIAFFSALPPCLIGMEACATAHYWARELRKLDHEVRLMPAKDVKAYLKRNKNDAADAEAICEAVRRPTMRFVQIKSAEQQGQLMQHRTRDVLIRQRTQIINALRAHLAELGIVAAQGDAGVNELCAIVADDRDERLPIDARASVIVLAAQLEALQRLIGSIEKRIKMQHRSNETSQRVETIPGIGVLGATAIVATVADPTIFRSGRDFAAWIGLVPRQDSTGGKQKLGPISKQGDRYLRRILIVGAIAVLRRAQENPGKYPWLTQLLARRPFKVVAVALANKMARTAWALMAHGGTYRAPELAEAA

SEQ ID NO: 272103 - protein, 408 aa, unidentified
MRIIGLDIHRAFAEAVAWKDGKLSRLGRVIMRREQLEEFAKQLSNSDIVVIEATGNAASVAAVIGPHVSRVVIANPKQVRLIAHAKIKTDKIDASVLAQLYASGFLPEVWIADEATQALRRQVTRRNQIVRQRSRLKNIIQSILHAHLIPSCPHQDLCGPIGRAWLCEQILPGDERLAVERHLREFDRLTDDLKVIERDLAQSALADHRATRLMTIPGINMVVALALIAAIGDIKRFAKAEQLVGYLGLNPSVRQSGPGPAYHGRITKQGRGHARGMLVEAGWVAARCPGPLRSFFLRVQSRRGQHVAAVATARKLAILIWHLLTKNENYLWSRPALHARKLRDLELKAGHRSARGQKGTAHAYNLKSQRDQERRWVEQAEAGYARFVAGWNARGPKARTGAAKEERQ

SEQ ID NO: 272104 - protein, 466 aa, unidentified
MENNYILYVGMDSSKGKADAAILKVSDRRSVKPKFLRKKLSFKFVKSEVTSFLETVRSYSDDNCTSICFALEVTGIYSTNVYNFIKDNLNDNESIKFLNTDFVNQWRNAHNIAKSDPLDAQTISTIIGTDSDVQYVNDNVFENKNGYQDLKALVHRHYQIKKIYSQEINRLIAQCDCLFPELQYVFEPKSAAFIAVLSSYPTTHDIINASRLEVFNVVYEATKHRCSMDKIDKLFDLCHDTLVPDNISSYGRSIILDLVENIKNIKGQLKMIERYIKDIASLNPAYKLLLTITGCGPITAATVIAETGNIRRFKNADCFVSYSGTSPRNKRSGTSVETMGKISKKGSRYLRHAIYMIAEFARRHNPVLKHQFERIKNGNKKRHKLANIAIANKIARYIYSIMKNESSFVILHEHIMRLPEETQNTFFNSISLDFPENTRKQIYQYSDIDGEVHKFVYTKLEETMII

SEQ ID NO: 272105 - protein, 382 aa, unidentified
MSQTASRGDFTAMGSELFVSFELGWNRWRLAFASAMGQRAWQITIPARNVLALTDAIRKARGRLGLSQDCPVFSCYEAGREGFWLHRLLQQMSVANLVVDSSSIEVNRRARRAKTDRLDAEKLLSMLLRYHAGEKKLWSVVHVPTPEQEDRRHLQREIRTLKKEQTRQINRIRGLLANQGVAIKANRRGLLEPLDAIRIWDGSSLPSGLQRRLETEVARHTFVHRQLLDLESERDALIRQSQDRAAQIARRLMTLRGIAEVGAETYARELSWRAFKNRRQVGSLIGLASTPHQSGDSSRERGISRAGNRHMRGIAIDLAWIWLRQQPHSDLTLWFNRRFANASPSLRKIGIVALARKLTIALWRYADFAEIPKGALLKSKVT

SEQ ID NO: 272106 - protein, 377 aa, unidentified
MKNVRFVGLDVHAETMAVAVAESGGEVRSLGVIPNRTEAVRRLIGKLGKPEQLRVCYEAGPTGYVLYWQLSELGVRCEVVAPTLVPVKAGDRVKTDRRDAQKLARSYRAGDLTAVWVPDAAHEALRDLVRARLAAKGDQLRARNRLSKFLLRQGRRAPEGINAWTDKHLQWIRRQVRFEHTAQQITLEDYLHEVDHAAERLARLERSIDGAIRDLPVRQRAVIEALQSLRGIAQLSAVSIMAEVGKLSRFEHPRQLMGYSGAVSCEHSSGERIRRGAISKAGNAHLRRIAIEAAWAYRHRPALGKTLAARQRHCSAAVTALAWKAQHRLHQRYVRLQSRGKSRQQTITAVGRELLGFIWAIGVHVEREQSVPLPQVA

SEQ ID NO: 272107 - protein, 398 aa, unidentified
MTRKNTLKSLPTDTEFRVVGLDLAKSDVSVAAIPVDDNTPSLVDQMTYADLLDWAGKISPTLFAMEPCNGYSLLCLQLENLGHEIKVISGSTVSMWINTHLSGQKTDLNDAIALARLAVSDAELTPIRHKSITEIRIQTVQAVRQQLMSQRSKSIVSFKALAQQWGIPCAAGHRNLKKLRESIEAKVDLITRPVANAMLFLLDAVKSLDRQIGQLNQTLQELVMSDERGRLLQSVLGVGTQISARVITVVGNVERFNSPRSLVAYVGVAPRNFITGHKNLTKKKHGNCPDLSHKGQGKISRRGDKLLRSLFIQGAACLYMQFCKDQLPECQLKRWILKQLAMQKPYGKLMVSLAAKLIRIVWAVLTYREKFNIQKAGMTRSMWSEMALETPLNKEVPA

SEQ ID NO: 272108 - protein, 446 aa, unidentified
MQMDIINSSCAGIDIGSRSHFVAVGQEPEEIKEFGVYADDLTEICLHLKRHDITSVAMESTGNYWQNLYVELIKHGFEVTLANGKFTKNIKGKKTDVKDARWIQKLHSIGLLTSSFLPDETTETLRTFCRQRQNMLDLAAEASHKMQKYLKLLNFRLDIVVNDICGLTGMAIIADICKGNLDPEKLSNLRHGNCRKSKEEIAKALKGNNRADYLFGLKQEFESYNFYQKKIEECDKQINSFLKKQINTNPEKKKLKTDTKIHKRINKNAIKGIDLNQASYQYFGGVDLMRIEGVSHATILTIISEVGPEGFYKFETAKQFASWLRLAPNNKISGGKLLSSKTPKGSNRLKIALRNAANAIGNLKDLHLSNFFRRIAFRKGRTIAVSATARKLAIIIWNMVVKKMPYKPPTEYLFVDQKRKLAVLNRIKKQIDKFALTNQELGFVNA

SEQ ID NO: 272109 - protein, 347 aa, unidentified
MLHVGLDLSRKRLDICAISDQGELVDELAAPFDEEGLCRLSERMAEKHAGRVRAVVESMNGARFVHDTLEAQGWDVLVADAQRVKVLAPLACKTDKVDARVLAELSFRDLVPAIWLPDPQVRRERELARFRLHLVRHRSSLKNRIHSTLITFGKPCPVSDLFGVAGRKLLERLDVPEPWRENVEASVVLIDQLDRQIDAVASELKYVGADHPYVPVLMSAPGVGWLVGFSIACEIGDISRFSSPTKLCGYTGLCPRVIQSGESDRRGPISKHGPKYLRWALFEAALNACDHPLYKEHYERTKKRLGRQRGPKVAQIELSRKLAEAIWHMLTRNQPFAPAGAPFRLAA

SEQ ID NO: 272110 - protein, 360 aa, unidentified
MITPEDAHMLMTVGLDVSDKTIQACFLDHHGEIVEESRLKTTDAALRRRFSGEPQYRIVLEAGLHSPWISRLLMDLGHEVYVANPRRLRAIYENENKSDRVDAQYLARIGRLDTALLYPLRHRSAEVQADLAVIRSRAALVRARATLVNHLRGTVKSAGGRLPRCETKYVADRAADHLPSELVPALSPILSTIAQLTARIAEYDKQIEQMAKERYPETELLRQVPGVGAITATTFVLTVEDPARFPRARAVGSYLGLRPRRAESGTLSPQMHITKAGDKHLRALLVECAHHILGHLGPDTDLKRWGLGLAERGGKAAKKRAAIAVARKLSVLLLRLWVTGEVYEPLRNSEVRSEVPAPAP

SEQ ID NO: 272111 - protein, 373 aa, unidentified
MYSNTQNSKIAAITERTLVIGIDIGSETHYARAFNWRGIEFTRKPFIFNNDDEGFEAFRVWIEELKTGHDLDKVMPGMEPTGHYWFNLGAFLQDNGMRPVHVNPHHVKKSKELDDNNPSKNDRKDPRVIARLVIEGRYSYPYIPTGIYADVRNLSILRLQAQGELTRIKNRIARWFAIYFPNYKDVYGKLDAVTGLAVLKVAPLPEDIVKLGAEGVNKIWRDAKMRGAGMKRAMTLVAAAEHSVGCTEASEAARYEIRILLSDYDLYAERESELMGMINESIAEIPYIDKLLEIKGVGLKTAIGFVSEVGDISRFDDPKQVQKLAGYAIVENESGKHKGEHHISYRGRKRLRYVLYEAAISVVAHNAEFKEIY

SEQ ID NO: 272112 - protein, 394 aa, unidentified
MYIVGIDIAKRKHEAAVIDESGTVIMKSFSFTNNCSGYNRLIGALRKASLPLTEVQFAMEATGHYWLPLFARLQREGFRVQVINPVQTNSIRSFYIRQAKTDPRDALLIAEVIRFGHFSESTLHPENIYELRELCRGRHAVVSIQSDVKRKIIALLDQVFPEYEKVFTDTFGDTSLAILLNCPTPRELTDMNTDELCQLIQTPSRKRFGMAKAQELQELARSSFGFNMVSDIFSAMIKLYAQHIVFLKQQIQEMDDKIAEIMSSLDTCITTITGIGPTLGAIILSEIGDISRFPSAAKLAAYAGIDPTMRQSGEYNGVRNRMSKRGSPYLRHAIWLATSSAVLHDPALRAYFQKKRAEGKPYMASLGHACRKMVSIIYAVMRDNKTYIPNILSA

SEQ ID NO: 272113 - protein, 341 aa, unidentified
MRFIGADLHKKSITFCVVKLVSGKVQVVHRRRILCSQPGKIEQYLKSHQPYQVVVEATIGYDWFAELAGQTAERTVVAHAGKLRVIAESTRKTDKIDAYVLAELLAKDMIPEAWRPSPRIRQHRSLVRRRAKIQSRITSIKNTMRGIMTRYNADRQDLFSKCGWNTAMQTRLLATERWLLEDLKEDLAQSVTRLAKLDARLSEFASMANDKEAEARALLATIPGVGPVTIEVVLAELGDWERFRCADAVASFAGLDPGVRQSDGKRYELKLSKSGSPLLRWIMIQLSHRLKRTSSRWKAVFERISKKAGKKKATCAVARRLMLVMYAVLRDGRPYQHAIAA

SEQ ID NO: 272114 - protein, 351 aa, unidentified
MKRDKYMGLDVHQATTVVSVIDAEGKIVWETIVATETGAIRRLIESISGPIHVTLEETTQAEWLDDLLQGFVAEVVVCDPRRNKLLVEGSKGDKADARKLADLLRTGMVGSVWHARQTTRGLKELVRADETFVMDTSRTMLRIKALYRSRGIATKGSAVYQKRERDHWLKQLTEVGMQQRAAWLYEQLDQVRELRKRAKAAVLNEGKRHKAVQLLRTIPQVGPIRAAQIVASAGTPHRFRTKRQFWSYSGLAVVTHTSAEYEMRDGRVVRRNKPVATRGLNTNCNRRLKSVFISAATSGGASWQPYLNHLQEKGMKADMARLTLARKIAALALAIWKKGESLDPKKLNWTK

SEQ ID NO: 272115 - protein, 339 aa, unidentified
MTHTIVGVDIAKNVMQVHWVDPETGEIVNRPIKRAAFLEYFANRKPCLIGMESCSGSQHWARRLIEMGHQVKLMPAKFVKAFNIRNKNDAADARAIWMAAQIASKEVAVKTEAQQAVLALHRMRQQLVKFRTMQINSLRGLLTEYGEVMGVGRAALDKSIVGVLERLSRRLPAILIETLREQWKGLDNLDRQICQIERRLHVWMKDDQSAKAISAIPGVGVLTATAAVATMGHAKAFRSGREFAAWLGLVPKQTGSGGKVELQGISKRGDTYLRTLLVHGARSIVYRVKEPGPWVVQMKERRPLNVVIVAMANKLARIIWAMLAHQRPYRMNYESVKAA

SEQ ID NO: 272116 - protein, 367 aa, unidentified
MAKTKAVHSSYVIGGVDTHKDLHVAAVVDQNNCVLGSEFFATTRQGYRQLLAWMASFGTVKRIGVECTGSYGAGLLRYLQSAGVDVLEVTAPDKMERRRRGKSDTIDAESAAHAAFSLIRTVTPKTRGGMIEALRVLKVCRKTAVAARRTALQMIQMNIVSAPDELRDQIRNLTRMQLSRTLASWRPDVTAYRNVQDAYRIALKSLARRYLELHDEIADLDVMLASIVDELAPELIKRNSVGYECASQLLITAGANPQRLHSEAGFTALCGVSPVPASSGKKNRRRLNRGGDRAANSALHIIAIGRLRTDTKTQEYIGKRVAEGHSKMEALRCLKRYISREVYTLAYSGEDERWFRRKVNALFPNAP

SEQ ID NO: 272117 - protein, 353 aa, unidentified
MTISIANYDLLFPMDVDKKRIHLAVMNKERLIRKVTVPYDPVNLLNYVRNGFPGQKGIFVYEAGPTGYGLHDFLIEKGEDCVLAVPSMIPKAPGQRVKTNRLDAFNLGVQLRTNDLKLVQVPEKKYRDLRHLTRLRLKYGKRIVSTKNGLKSLYLFEGIKFPDGKWSRQVISELQQIKYRSVVEFKVQQLLIDLQFFRIQELKTKAEIRRFCREDQEMNGCIAYLMSLPGVGWTVSTYVLGALGGFKHLISVKKTSGFLGLGPRENSTGDKVRRGEITAVGDPSARKMIIQASWVGIKKDLELRSVYDKVYSRNPEQYGKQKAIVTVGRKMICRIHAVLRDQRPFENRLKKVA

SEQ ID NO: 272118 - protein, 462 aa, unidentified
MAGHSKRRPHKPATVSPTALPAVRPRVAGLDVGSSQHWVCGPARDDDPPYVRSFGTTTDQLNALADWLLTQHVESVAMESTSVYWIPIYEILESRGIEVVLANARQLHHVPGRKTDVSDCQWLQALHSCGRLRGSFRPSEAITRLRALQRQLGNLVAERTRCVQWMQKALDQMNVQVHRAVSDLTGATGLTIVRAIVAGERDPARLATYRDRRCRHSADEIARYLTGTWRDEHLFNLASALRLFDALDAEIAAYDARLLQELEALHPPDRHEAPVPPHPNPAKEKAIKARGEQPARATLWRFAGVDLTRVDGIGAGAARVILTEVGPQLTAVPSEDHFVSWLRLCPRTPISGGKPLKKRRNGLGANRIAGVLRMAATSLHRSKSALGASFRRIARHKGGAVAVFATARQLARLIYRMLRYGHDYVDIGEQAYDRRFQVRRLAALTDTAKTLGYALVPNVATG

SEQ ID NO: 272119 - protein, 421 aa, unidentified
MNLPSDQPFAAFIGIDWADTKHDICLQPAGSDKRELIVLAHRPEDIDVWACALRDRFQGQPLAVCLELTRGPIVHALQKYDFFVLFPVNPETLAKYRQAFAPSRAKDDPTDAQLQMELLLHHRDKLRALKPQSTAMRKLLRLVEQRRRLVGEKCRTTNRLTDALKQYYPQALECFETRDTGIFCDFLTRWPTLRQAQQARKTTLENFFREHHVPSLSVTQRRITALKNALPLTEDPAVIEPNALLVQALLEQLRVTLQAVKRFDAEIVLVAETLPDYALFRALPGAGPALAPRLLTAFGEQRERYASAAEFQKCAGIAPVTERSGQKSWVHWRWQCSAFLRQTLVEWAGETISRSFWAGTYYRQQRDKGSSHQAAVRALAFKWTRILYRCWKTKTPYDESTYLNALRRHGSPLLEQMAKAA

SEQ ID NO: 272120 - protein, 348 aa, unidentified
MRFYTKQHKYYCGIDLHARSMYICILDQEGKTALHRNRKASPEAFLKAIEPYREDIVVAVECMFVWYWLADLCAKEKVPFVLGHALYMKAIHGGKSKNDKIDSKKIATLLRGGNIPVAYVYPRKMRSTWDLLRRRNHLMRKRSELLSHIQNTNSQYNLPEFGRKLSYKANRGGVAEHFPDPSVRKSIEVDLKLLDFYDQLLSNLELYIVKKAKADDVYSWYRLRSIPGVGKILGLILLYEIHDINRFPTVQDFVSYCRLVKCPRESAGKKFGTKNSKIGNGHLKWAFSEAACLFLRGNEQAQHYHARLVSKYGKGKALSILAHKIGRAVYFMLKRKEPFSMNVFFQQT

SEQ ID NO: 272121 - protein, 356 aa, unidentified
MSSKLNTAIAVAGIDIGKNSFHVIGLDKRGAIVLRQKWSRGQVEARLANTPPCLIGMEACVGAHHLSRKLQALGHDARLMPAKYVRPYSKGQKNDFRDAEAIAEAVQRPTMRFVATKTGDQLDLQALHRVRERLVGQRTGIINQIRAFLLDRGVAVRQGLRFLRIELPGILAKRTDVLSPRMLHLIEGLADDWHRLDERIEVLSSEIGALACGDPACDRLMTVPGIGPIISSATVAAIGNGAAFSKGRDFGAWLGLVPKQISTGDRTILGKISRRGNRYLRSLFVQAAWVVLVRVGPKHWDRYGLKSWIEAAKKRLHHNVLAIALANKLARIAWAVLNKERKFECIRTNKMSPRAA

SEQ ID NO: 272122 - protein, 344 aa, unidentified
MQITTIGLDLAKNVFQVHGIDATGQVVVRRSLRRSQMLPFFAKLRACLVGIEACGTSHYWARELVKLGHDVRLMPPAYVKPYVKRGKTDAADAEAVCEAVTRPTMRFVPVKSPEQQAALSMHRTRDLLVKQRTQLINMIRGLLAEFGVDIPKGLERALLMARQIVDGKAPEVPIEAAKIVTTLSQQALDIHVRLREIDRDLAACLRGNDVARRLMTIPGIGPVGATALAASVTDPHQFRSGRQFAAWLGLTPLQKSSGGKERLGRISKMGDKYLRKLLIVGMTSLVRHAKYNPATIDPRLADLLARKPSRVATVAMANKTARVIWAIMARGETYRAGHRPALAA

SEQ ID NO: 272123 - protein, 450 aa, unidentified
MSTAIVRYVGLDVHKRLVEACIVDQVGNVVHRERFALNRRTLELFATKILRPADHVALEATTNCWAVADILRSHVAKVLVSNPMATKAIAQAKVKTDKVDAHVLAQLLRCDFLPAVWQPDEATRQLRELTGRRSTLVGQRTMMRNRIHSVLAMRLIEASSGLFCGDGLEWLAKAELDPQARLLVDSDLRQLEFLQKEIDALDAELARRGHASDPVKLLMTLPGVDVATAESVLAAWGDVKRFPDGDHAASYLGLVPSTKQSANHCYHGPITKRGNSQARWMLIQAAQHLDRHPGPLGHFFRRLCRKKNRNVAVVAAARKLAMIGWQMLISNEPYRYAIPRSTEDKLSRLRVRATGQRRKRGLVKGSKGTAKAADHVAHGARSRTIKALAAVCQSEGLPQPLPLGPGEQRTVQQAGCEDFLARIGQTQVVPWKQALTGSSSLVRSNGHGKH

SEQ ID NO: 272124 - protein, 344 aa, unidentified
MSASTSGLGSFHQLIMLPDGSTTINRRCQMSEANLRTAFTGLGADVHVHLEAGELAPWVRSVIAPAVKRVVISHPQTNAWIAKDPNKGDRIDAFKLADLLRMNRFTEVYYAADEARRVFKQLVQHYDELTAQQARLQCRIKARLRVQGIIRRDAALFSAAGRAPVLQQVTSAELRAAISQLYDLLDQARVAQHQARQLMLRAARAFPEIKLRQTAPGVGPIGACRFSAYIQTPHRFSSKRKLWRYCRLSISFRSSDGKPLRYPKLDRAGCGRLKDVSRKAFEAARQTKTDNSFKRAYHEALARTHDETHARLSVQRKIVATLRAMWLSMSPDRDELGERALTQT

SEQ ID NO: 272125 - protein, 344 aa, unidentified
MIYYAGLDVSLRTVNICVIDDEGKFFAETKLASDVQDIVGYLDELKLDIESVGLEAGTLAQYLTYGLQSAGFEAICMEARQVKGALSAMRNKTDKHDARGIAQLLRCGWYSRVHVKSMQSHHIRMLLSSCKAVLSKCIDLENEVRGLFKIFGLKLPPKLGHGAFDVTVRDIIEADEALSHALLPLLDARLVLYRTFRVLDNRTRKMSHTDPVCERLMTVPGVGFITALTFKAGVDDPHRFKRSRTVGAHFGLTPRRFQSGELDIEGHISKCGDADVRATLYTAANALLTRSAQWSSLKAWGMKIAKTRGHRRAVIAVARKLAVILHRVWIDDTQFRWGTEGARS

SEQ ID NO: 272126 - protein, 354 aa, unidentified
MSRKTTNLEAVATIGIDIGKNTFHLIGLDEKGAIVLRQKLLRGQVVTRLANMPLCLIGMEACVGAHHLGRQLKALGHDARLMPARYVRPYLKGQKNDFRDAEAIAEAVLRPTMKFVAIKTVEQLDLQALHRVRERLISQRTSVINQIRAFLLERGIAVRQGLRALRTEIPIVLAMTDKLSPRMIRMIEDLCTDWHYLDERIETVSDEIATLSEQDEGAKRLMTVPGIGPIISTATVAAIGRGDVFSKGRDFGAWLGLVPRQMSTGGRTVLGPISKRGNRYLRMLFVQAANAVLLHPQSWEKHGLKSWIEAAARRLNRFKLAIALANKLARIAWGVLQGGRNFEVRSMKSAAQAA

SEQ ID NO: 272127 - protein, 396 aa, unidentified
MSTHQRIWVGVDAGKAHHWAVAVDSDGTKLLSRKVVNDETEILDLIGDVCPLAGEVRWAVDISSRPSALLLALLLAHDQEVVYIPGRTVNRMSGAFAGDHKTDAKDAQTIAETARMRSDFRPLEVAPGLVGELSLLTSYRSNMTADRVRMINRLRELLVGICPALERAFEFRKRPGLVVVSGYCTPSSLRRIGVTRLSAWLAKRDVRNAASFAEKAVEAAKSQTTALPGEKRAAVLASGLARQILDLDERIKKIDREIAEVLVQDERSAIIQSMPGMGPLLTAEFIALAGDLSGYRDAGHLASHAGISPVSRDSGKRTNNNRRPKFYSRRLCRLFYLSAQSALLRPGASQEYYRRKRAEGMLHPQAVLCLARQRINVLWAMLRDGRHYAHPVASAT

SEQ ID NO: 272128 - protein, 371 aa, unidentified
MTRMTLRRDDVVVGVDTHKDEHAAVLLDGHGGTLTELVVPATTAGFAHLLAVATGHVGPQGRLIAFGVEGTGSYGIGLARFLRRHGHEVCEVNRPPRKGERRLTGKSDLLDAEHAARQLLSGAKLATPKTADGDVESLRLLKIARDTAVKARTAAMIALKATLVTAADDLRTQLEPLTDHQLIRACAALDSAADLPGPDAAMRHVLSSLARRWLQLHDEITLHSRHLKMLTKAAAPQLLELVGVGFDIAAEMLVTAGDNTDRVRSEAAFAKMCGACPIPAGSGRTNGRHRLYRGGNRQANAALYRAVIVRMRWHQPTIDYVTRRTAEGLSKREIIRCLKRYLAREIYRRLPPLNSEPAPITDVESTDLDAA

SEQ ID NO: 272129 - protein, 343 aa, unidentified
MQIRSVGIDLGKTTFHLVALGDNGKLLLKRKFTQKQLIAFTANLQTSLIGMEACSGAHFLGRALRGQGHDVKLIPAQFVRPFVKSNKNDFIDAEAIAEAVDRHNMRFVPIKTDDQLDLQALHRVRDRLITRRTSVINQLRAFLLERGLVFAKSPARLRERMPEILENADEDLTPRMRNLLALLWNEWKELELQIVEMNDEVEQIASSDAACTRLRQIPGIGPLVATAIVAAIGNGAAFRKGREFAAWMGLVPKQYSTGGKAKLAGISKRGNLYLRKILIHGARAVVLRSKRERISMGAWLTALEARAPRNVLIVAAANKLARIAWAVLSSGQDYRAVQELVAA

SEQ ID NO: 272130 - protein, 341 aa, unidentified
MGSYVGLDVSDKETAICVIDEAGEKRWEGKVTTTPGLLVKRLREHAPDACKIGLETGPLCVWLWHELNEAGFPVVALHARHAAAALSLQTNKNDKNDAAGLARLVRSGWYRAVVVKSMQVHRLRTLLATRDHLVGVSTGLINRIRGTLKTFGVVLGQGRGGTFERKVRSALPADPMVAKLIESMLALWQTIQRQKRDIDNELARVVRQDSVLRLLTTVPGVGPVTAISFATAVGDPTRFRRSRDVAAYLGLTPKQYQSGEVNISGRISKCGDRLTRKLLFEAATVVLLRSRAPTALKEWGLGIAARSGTWKARVAIARKLATVLHRMWISNQTFQAYPTAA

SEQ ID NO: 272131 - protein, 429 aa, unidentified
MSNEDIIRLMEFRQLKEEIRGSEDYLIVGIDIAKDSHHAFFGNATGKTFKRRLIFKNDLEGFSKLITHAEAMKTQNGLSKIVFGLEPTSNYHKPLGMHLIRCHRMVVMVSGVAVKRNRELLNGRWDKNDTKCAANVADLISQGKCLYYESPSSGISGLRELLLLRAYMKKKHHSLQMRIRNGLLAKHFPEFDRYFKQNTSESQAIVKWCLDPGRIAGMEFDEFVNTVTTKDRGIAQKRRLRNIYDLAVESIGCSVTQFTEFEAKILIDSLVETKRIVQEIDDQIDQAARSFTEYHCLLTIPGFGPYVSAMVLAIIGDPFRFENRGQVLKMSGFDLSANRSGKRSKNAVPVISKKGNTSLRYALFQAALVASARNSHFIKYYSEKLRGREKERGIKIKMRVKLAAKMLIIAWTLMKKKIDFNPDFLLIEE

SEQ ID NO: 272132 - protein, 409 aa, unidentified
MDQLIERCGGLDVHRDTVAACVRVPGPNGKRQHEVRTFGTTAGELLALRDWLEVHAVTHIAMESTGVYWKPVFYVLEEAFTCLLVNAAHIKQVPGRKTDVKDCMWIAQCLEHGLLRGSFVPPAPIRELRDLTRHRKVLIQERTRVANRVHKLLEDAGIKLASVATNILGVSGRAMLEALVHGTTDPEVLADLARGRLRKKLPALRQALVGRFRPHHAFLVSQLLAHLDYLDESIATVSEEVEGRLAPYAAQLRQLDTIPGINRRTAEVLIAEIGVDMSVFPSDRHLASWAGICPGNNESAGKHKSGTIRKGSRWLRMGLIEAAAAAVRTKDSALRARYLRVMRHRGHNKAVVAVAHAMLRAVYHLLAEGTTYREPGIDYYDRRHTHRITRRAIQLLERQGYRVVLEPAA

SEQ ID NO: 272133 - protein, 344 aa, unidentified
MKITTVGIDLAKNVFAVHGVNEHGRTVLKKVLKRNHVAEFFANLPTCVIGMEACASAHYWARKLQAMGHTVRLIAPQFVKPYVKTNKNDAADAEAICEAVARPNMRFVPVKTVEQQSVLSLHRVRQGFVRARTAQANQIRGLLAEFGIVAPKGIGHLERQVPELIEDAENELTGSFRLLIQRLMDQLKELDRQVKELEAQIQAWHRSDERSRRLARVPGIGPLTASALVASVGDAKSFSSARQLAAWLGLVPRQNSSGGKNVLLGISKRGDVYLRTLLIHGARSLLQVAKRKECKSGWLHGLLQRRNANVAAVALANKNARIVWALLVHGREFHPDYHAPAATV

SEQ ID NO: 272134 - protein, 372 aa, unidentified
MQQDSAVFVGLDTSKMKISVALAEEGRQGEVRFLGDVDHTPEAVRRLVTKLAGRYGRLLFCYEAGPTGYGLQRQICVLGHDCAVVAPSLIPKRPGERVKTNRRDALTLARLHRAGELTQIWVPDPGHEAIRELVRAREAAMADLRTKRQHLQSFLLRHGRIYPGPRPWTQVHARWLSNLSFEHPAQYLVLREYRQAIDDAEARLERLTQQVAGVVSSWSMAPVVEAYQALRGVAFLTAVTFVAEIGDVRRFETPRQLMAYLGLVPSERSTGAQVWRGSITKAGNPRARRVLIEGAWTYRYPARLSRPLQVRQESLPTVVRAIAWKAQLRLCARYRRLMAAGKRQTVVTTAIAREMAAFLWAIGHAVEPRPAA

SEQ ID NO: 272135 - protein, 352 aa, unidentified
MAKGTKLDFTGQHIYIGMDIHKKSWSVSIYTEHFEHKTFTQPPEVKKLTNYLQRNFPGATYHCVYEAGFSGFWIHDRLTEEGIHCMVVNPADVPTKHKEKTGKADKVDCRKLARNLRSGDIKGIYVPSRVQAEDRHLIRTRQSMVRKQTRCKNQIKAILFFYGILIPEEGHWSRNFINWIETIRMERASGDLALKVHLEELNYLRQIIAGLNKAIRALSRTDTYRDKVLLLRTVPGISTLTAMTLLTELCDISRFSSLDKLASYAGLVPDIKSSGETEYTSGITHRRNPALRAVLIEASWVAARKDPALIIAFHKFSLRMKKTAAIVHIARKLLNRVRFVLINQERYVPAVV

SEQ ID NO: 272136 - protein, 416 aa, unidentified
MKIVRPICCGMDVHKNIIVATIGITNKKTRITEYIQETFSTLNPDLLNLKQWLINHKCFDACMESTGKYWIPIFNILEDEINIYLTHPKYVKAIKGKKTDKKDSKWICDLFKHDLIKFSFIPPKEIRALREISRYRYKLVGMRSSERNRYQNCMTVSNIGIGSVFSDPFGKSAQAIMKEVLESDIIEDEKILKCIHRSCKNKDKILDSIKHCNIETDQRFKMNESMTHMEELQVHINNCEIEMMKRAAPMFDQFMHITQLPGISTLSAILIISEIGVDMKQFESDKQLTCWAGLAPANNESANKKKSVRISKAGQYLKPLLVQCALGAIKDKDGYFGIKYSRIKKRRGHKKAIIAIARMMLVSIYHMILTGETFNPSDYESFRNPNPPIKQQVLTEESAIEFLKKSGFDVSKLTKP

SEQ ID NO: 272137 - protein, 339 aa, unidentified
MELYGGIDLHGNNNVIVLLDEEDRVVFEKRIVNEMDSVLHYLEPYRDNIVALAVESTYNWYWLVDGLMDSGYMVHLANPAAMKQYEGLKHRDDKTDARWIAHMLRLGILPTGYIYPKAERPVRDLFRKRSQLVRYRTSNLLSMNNLITRNLGFSVSGNRLKQLEEEDIDALMKDADLSLAVKSNLAVMHCVEERIKIIERVVKKRAKLRPEFEQLLTVKGIGEILAMTIAFETGDIGRFPTVGDFSSYCRCVRSDRTSNGKKKGKGNSKNGNKYLAWTFVEAATYATRFNDRARRFYQRKTAKTNAVVAKKALANKLARACYYIMRDKVPFDNERLFAT

SEQ ID NO: 272138 - protein, 319 aa, unidentified
MNTTSKPNIHRNGRHVGIDISKTTLDIYVLESDSHWQSDNSEAGIKPLVSRLARYKLSRIIVEATGGYERKLVELLASKGLPVVVVQPVQARQFAKAQGVLAKTDKIDARILAQFGAIMQPQVRPIQSVKIRYIRDLLARKRQLSESRPQELNRAQKAEQVIASSHRRLIKVLDKEIDWVNARLEKCVSEIAEWKATYDLLTSVPGVGDGVAFTLLGELPELGSLTSRQVAALTGLAPYNHDSGNMRGKRRIKGGRAPIRTMLYMAMMCAIQHNPVMKSFYARLVEQGKHKKVALTACMRKLMTILNAMVRDGKAWQQA

SEQ ID NO: 272139 - protein, 356 aa, unidentified
MGQKWLMYFSQFKPKMMKKQRGFFLGIDVSKEWFDISLMAVINFQKQPMITERFNNSNEGLVLLKNWLKAQKVTFDTDTLLVIENTGIYHRLLWKFFSENNIPIHIGNAAHIKKSFGIARGKNDKIDSQRLCNYAYKNDDELKATAALNPVFLHLKDLITSRTRLNAQLGANRTYLKELKSINDKATQKMMEKAYKMALAGLRNSIKEIEKQIAVTIKTDKSINNNYKLLISVPGIGPVTATYILCCTNNFAGKVSGKQLACYAGVVPFQERSGKSLKGRNKVHKMANKELKSLLHMCALTSIKYYPEFRNYYNRKEVEGKHPNSILNAICNKIVLRAVAVVNNQKDYVENYKKAA

SEQ ID NO: 272140 - protein, 423 aa, unidentified
MMKLKYSICCGLDVHKNVIVATIVTTNKDGISEYLQKSFSTINSDIQRFHNWLIENNCYHVCMESTGKYWIPIFNYLENDIDVCLTHPKYVKAIKGKKTDKKDSKWIADLYKFDLVRCSFIPPKDFRQLRELSRYRFKLVCMKSSEKNRIQNCMTISNVGIASVLSDPFGKTATEIISYLLEHTADSMDEKAVRKLIKKGAKSKSDEIIEAIKGYTIETDQAKKLELARGHLEYLDDMITQTEVELYVRIKPYYEFVEFVSTMPGMTELSSTIVLAETGVDMDIFDDAKHLCSWCGLSPANNESAGKKKSVRIAKAGDYLKPMMVQCALAAIKSKKQPYFAIKYGRIKKRRGHKKAIIAIARMMMVCIYHMASEKKPFTPTDYEELMDPQNHVESVVLNENNVFAYLESLGYDSSKLVKRNDN

SEQ ID NO: 272141 - protein, 369 aa, unidentified
MKKTIKNIGLDVHKKSISIGIADDGRDGEVRYYGKIDNDMNQLDKVIRKLISQGAVLRFVYEAGPCGYGIYRYLTNNDIDCVVVAPSKIPQQNGNRLKNDRRDCLSLARLHRAGELTAVYVPTEADEALRDLTRAREDATRALRTAKQQLGAFLLRHDKVYSGRSKWTKAHFNWLADIAMPHPAQQIVFQEYIDTVTDCSNRVRRLTEQVRQQSQESSLHEFIKALQSMRGISLIVAATIAAELGDLTRFENPGKLMAFLGLIPSEHSSGDRVKKGPITKAGNGHVRKALVEAAHAYRFAAKKSRELHKRQEGLPKDVLDISWKAQCRLCTRYHYLVAKGKKTNVVKTAIAREIAGFSWAIAHVLPKAA

SEQ ID NO: 272142 - protein, 394 aa, unidentified
MDAAGRVLARKRLPEGVAGIARLHALIGQELGPDAGEDAEVVVGIETDRGPWVAALVAAGYTVFAVNPLQASRYRERHGVSGAKSDRGDAHMLADMVRTDSHQLRAVAGDSPGAGAVKVVARTHKTLIWERTRQVQRLRHQLREYFPAALAAFDDLDAPDALELLARAPDPARAARLTRAQVSAALKRARRRDITGKATAIIAALRSDQLGQPEAVTAAYAVTARSLIAVITVLNEQVKTLESQVEANFGRHPDAEIYVSQPGLGSILGARVLGEFGDDPDRYDSGKARKNYASTSPITRASGKKKVVAARFIRNDRLTDALMAQAFAALTASPGARALYDAERARGAGHNAALRKLANRLVGILHGCLKTRTLYDEATAWGHRENLPQSSVAA

SEQ ID NO: 272143 - protein, 272 aa, unidentified
MGSRIGVESTGSYHESVAGLAHHLGFLVFMLNPKDTRHYAKAVGLRGKTDRVDAELIARMIAHEHTKLHAWIPPTPQQRELDRLLKRRATLVSLREALEMSLHELDGFGTDLKALRTRFNQLIARVDLRVKALVEADPERKRNLTRLCTITGVGPVIGTALVNTLERVPLESADAFVAFTGLDPRPDDSGQHRGKRRLSKRGPAELRRLLYMAAMSAIKTKPWRPLYDHYRAKGLSSTATFVILARRIARTARSIYTHKTEFDPGRLTKFLT

SEQ ID NO: 272144 - protein, 338 aa, unidentified
MKSNMGTPVSVGIDVAKATLSVSICDHDGHEQALAIRNTDTDITTKVLPYLRHYSGKVVMESTGHYHWTPALVLREAGIDIRIVNPLLAKQYTSGTIRKVKTDPADARGLARMATVCDNLPETFTVSRARLIIRKKLATISTMGRHLQALKANLASLREGQVLLDEVDTPVVAELAESIRQLGISLKHLEVECVQLTESDEDSLEIMKRLETIPGVSLFCAALATNWFDINTATSAKSFIGYAGLDISSRESGTWKGHCRLTKRGNPFLRKRLYCAAWGAVMNYPEYRAYYDKLKAGGRGHKEAVVIIARKLVRTMYCLLRDGVSYDSAKVSFPNRII

SEQ ID NO: 272145 - protein, 419 aa, unidentified
MKSNLSKRKGIINEKTLIATIDFGKTKNVGYCRCPDGTELSSMEFTNTGEGFKKFWSKVSWMQSSHSLDEVVVGFESTGPYAEPMMHFLKKRGVRLVQVNCAHTRRVKEIYDNSPNKTDDKDPKVIADLIELGRFLSVVIPEGVIAELRRLSHTRERHQERRKTLYNQLHDAVYLVFPEFLSVMKDLESRSSHHLLHNYPTPETILMLGLDGLTEVLRRVSHGRLGRERAEALYGLAQNSVGLQDGQDSIVDEIKQILCLIAHCDEFIEAIEQKMAFYLEKVPYSHLIVSIKGIGVVTVSGLIGEVGDFSKFKTISELLKYAGLNLFEISSGKQKGRRRISKRGRPLIRKLLYFAALNVVRKDGILHQQYQTYLDNGMVKLKALVAICRKLLGIIFALVRNHCEYVTDYSNTQLLRQAA

SEQ ID NO: 272146 - protein, 334 aa, unidentified
MEQVTTVGIDLAKNVFSLHGVDGAGRTVLRRTVRRDRLLETVAGLSPCLIGMEACSGAHEWGRRFQQHGHTVRLMAPKFVAPYRKSDKNDGNDAEAVCEAVSRPSMRFVPVKSTEQQALLAMHRVRQGFVVERTAIINRLRGLMSEFGVVLPLRSVTVRRQAAQAAEELPELARRAVNDLLEQLRGLDARIDGYDREIEAQARLSEPARRLMKIRGIGATTALAIVATVGDAREFKNGRQFAAWIGLVPGQYSTGGRPRLGHISKRGDAYLRNLLVQGARSVLQTAPAHQDRLSRWARELQARRGYYRTLVAIANKNARIAWALLAKNDTLHTA

SEQ ID NO: 272147 - protein, 338 aa, unidentified
MELYAGIDLHSNNSVVSVLDEQDRTVYAKRLPNDLGSIVVALRACAGEVRGVAVESTFNWYWLVDGLQAAGFTVHLVNTAAVKQYDGLKHGGDFSDARHLAHLLRLGILPVGYIYPREERAVRDLLRKRSQLVRQRSSQILSIENLIARNLGARASGNEVKRWDAKCIDAMELLDEQKQAVKANLVVMNCIDGQVVQLERRILAKAKLRKDFKALKTVSGIGEILALTIALETGDISRFAGPGNFASYARMVDSRRESNGKKKGEGNAKCGNKHLAWAFIEAAHFAVRYDAAIKRWYQKKCASSLSVVAIKAVAHKLARACYHVIKDGTPFDAAKAFG

SEQ ID NO: 272148 - protein, 414 aa, unidentified
MPIATCGVDWAQDHHDIAIVDTDGRLLAKRRIPESIAGFTELADMLAEAGDNPNDPIPIAIETPRGLLVAVLRASGRPVYPINPMSVARYRERTSMSGKKSDHGDAVTLANILRTDADQHRRLPADTELAQSITVLARAHQDATWRRTRASNELRSLLREYFPGFLHTFADRPGAISSPEARAVLAIASTPAKAARLTKPQIVAALRRAGRRRGLTSLAATIQQHLRAPQLRHPTLVEDTFGVQALAVLATLDAEYDSVDRLGEATAAAFNEHPDHQIITSFVGLADLTGARLLAEIGDDRTRFADARALKAFAGSAPVTKSSGRSIRITHRHVKNNRLAAVGFVWAFVASGCQGPTRAHYLARRDRGDRHPAALRHLYNRMLGQLYHCLQTRQPYDPIKAYGPPPTPPEQAAA

SEQ ID NO: 272149 - protein, 351 aa, unidentified
MTNGTRWVGIDLHRRRSQIAIIDEQGELTLSRRVVNDPDTFRELLGDPDGTHVALEATYGWEWLADVLQEAGYEVHLAHPLRVRAIAAARVKTDAVDAPTLAHLLRTGLLPEAYIAPPELRDLRDLLRHRATLVHLRTSIKNRVHALLARQGVLPDHSDLFGTAGRAFLAAVELPEGSRRRLDSLLSLVCDFDREITATTREIDQRAKTDERVKLLCRIRGIGRYTAMLIIAEVGEVKRFPTARHLCAWAGLTPTVRSSDGKARLGHISRQGSTILRWALCEAAQHTPTGGGPLRAQYERIAKRRGPKIARVAVARQILTLCYYGLRDGEIRCLTNQQPTNDLNTELADAA

SEQ ID NO: 272150 - protein, 375 aa, unidentified
MKDKVRFLGLDVHAETIAVAVAEPDGEVRSLGTIANRAESIRKLVKNLGPVEQLRACYEAGPTGYILYWQLAELGVKCEVIAPTLVPIRAGDRIKTDRRDAERLARSFRSGDLTSVWVPDEGSEALRDLVRAREAAKQDQLRARHRLAKFLLRTGQRPVAGVKAWTLGYMAWVRQLRFEQVAQESTRQDYLHEVEHLAERIKRLEQAITEAVKLASPALQEVIGGLQSLRGVAQISAVTIAAELGNISGFDTARKLMGYSGAVPREDSSGKRTQRGSITKTGNAHLRRIAIEAAWSYRLRPGVGPALRKRQEGVAEEIKEIAWKAQHRLHKRSMRLAAAGKDQRKIITAVGRELLGFIWAIGIKTETAGKLRMAA

SEQ ID NO: 272151 - protein, 357 aa, unidentified
MEGNQESSDRRIVGGVDTHKDLHVAAVVDEVDRVLASQCFATTRHGYKQMLAWMRTFGSLQRVGIEATGSYGAGLLRYMQKAGVEVLEVTTPDKHDRRKRGKNDDLDAQNAAHAGKRTVTPKSRDGMIESLRVLKACRKTAVAARRVALQMIQNTIVCAPDELRETLRKMTRMQLIRTRAAWRPDLTDYRNVASAYRITLKSLGRRYLELHDEIADLDTMIVAIVDELAPALVARNSSGHETAAQLLLTAGDNVQRLRSEASFAALCGVSPVPASSGKTTRHRLSRGGDRAANSALHIIAIGRLRTDPRTQAYVAKRITEGHSKLEAIRCLKRYIAREVFSLIKQRSQERHPAPTAA

SEQ ID NO: 272152 - protein, 330 aa, unidentified
MNSICLSTDQLTAALPVLGLDVAKKSVQAELRTNGKRVRFGFENNAKGFAQLARMLKEQGAPKVWAGLEATGPYSHALALWLHGQGHRVSLLNPRRVKQYARSAGNRNKTDLLDAAIITDFVCAHLPAAWQPPTLEVAQLQALVRRREELSLMLQAEKNRLEGVASHVRCSLERIIDTLSAEKTRLEKLITQQIRSHQQLSRDHQLLCTIKGIGSLTAAILLAEMARPGQVERARQAAAHAGLAPRREQSGTSVRRNRGLGKEGNRYLRKALYMPALVAIKYNAPLRHFASRLRTAGKPKMSIVCAVMRKLIHIAFGVLKHQKPFNPSLA

SEQ ID NO: 272153 - protein, 343 aa, unidentified
MKAIIIGLDIAKSVFQAHGADANGKCVFKCKLGRSEVSAFFAKLDPCEVVLETCGSAHYWARVISSVGHDVRLVPPDRVKPFVKKGKKNDAVDAAAICLAAIHPDTMCVPIKSEEQQGVLSLHSTRALLVKQQTMLSNALRALASEFGLIAPLGTRHLPELMAKIETSADLPATMKQSAILLFEHYEKVVQSIDALEVQIRARAKSDEDARRLMTIPGVGPITASLIVASVADIGSFASARHFAAWLGLVPRQHSTGGKTRLGRITKTGNRQIRTLLVLGATAMLHRAHKWDSAAGQWLCELMARRPRRLATVALANKMARIIWALLSRKEIYRPAGVSVSAG

SEQ ID NO: 272154 - protein, 428 aa, unidentified
MIDQVHSTAAGNLVAIDIAKDSNVALVQEASGQRHRFKFANRRVDHDYFVQFLHSLAGPVKIGLEPTGDYHRAIAHRLLTEGFQVVSISSLALARFREARFGTWDKNDPKDAQVIIAMMEHGLVQVYWDPLTSGAHDWQELSNTYFQITLARTRLQHSLLLHHLPLYFPEFLRYWYSTRSTWFVNFLERFPTPASIRTLDRQTFIAEAWKVAGRKVDKRAKLEEIYDLAAESIGVPVALDSPAIETFRLQLSRYAQLNQQRARLELRAQELLHDQPDFQRLQTLPGIAAITALTILAEAGDLRRFGHHRQFLKYCGLDLAKSQSGQSKGHEVLSKRGNKRLRLAFWMAGLVAIHQRENIFRDKYERYLRATPFDADRKRKALTAVAAKMARVAYALVKHGSEYQRFFEQRVPSGSIPLARAVEANPTS

SEQ ID NO: 272155 - protein, 396 aa, unidentified
MTAIWAGIDAGKTHHHCVVIDDTGKRLLSRRVANDESELLKLLGDVLGLGDEAIWGIDLADGGAALVIAILLNHGQQLLYIPGRVVNRASEGYRGDGKTDAKDAAVIADQARIRRDLTPLRTGDDLVAELKVLTRHRRDLSDDRTRTINRLRGHLNEIFPSLEGELDLGNIGPLVLLSGYQTPAAIRRAGLRRLATWLRNRKVRSADELAARAVQAAESQHTSVPGETMTAHVVRSLAEEVIALNEKIAESDKLIEGRFRRHRNAEVIASMPGIGALLGAEFLAATGGDMGAFASADRLAAFAGVSPTPRDSGKVSGNLHRPTRYNRRLQRVFYTSALISIRCCDESRRFYDRKRAEGKRHSQAVMALARRRVNVLWALLRDGRCYQPIPSVAPAA

SEQ ID NO: 272156 - protein, 317 aa, unidentified
MMIPISTSLPRVLGCDVGKDEIVVFDAASGRARRIPNRPEALAAFAAELDHDCLIVCEATGGYELALLAALLAAGVPAHRADARKVKAFIRSFGILGKSDTIDAKALTRYGTERRALLPLWRARDEERVRLQSLVLARRDLVGDRVAYQNRRNAPGAEALRGTFDALIAAIENAIAEIEAEIRALTESCDPIREAVEALVAIPGFGQTTAVAVVALLPELGTIDNKQIAALAGLAPHPHQSGAEYRYRRTRGGRPEVKKTLFMAAMAARRHNPELAAFFNRLVARGKKPIVALTAVMRKLVVIANAVVKPLRAAPAA

SEQ ID NO: 272157 - protein, 366 aa, unidentified
MKKVSTVATKQSRNFSQHKLTIGLDLGDRSSCYCVLDESGRIVMEQKVATTPKALQAAFGAMPRSRIALETGMHSPWVSRLLSALGHEVIVAHARNVRLIGESRRKDDRLDAQTLARLARIDPQLLCPVKHRSAKAQADLTVIRARAGLVRARTALVNTARGLAKSYGERLRGCNVRNMNPEKAEGLSPELQSALKPLLTALESLSEQIREYNERIEKLACESYPQAALLKQIKGVGTLIALTFLLTLEDPHRFRKSRDVGCYLGLQPGRRNSGQSEPQMHISKEGDPYLRTLLVQGAQHILGPFGPDSDLRRWGLKLAERGGRNGKKRAIIATARKLAVLLHHLWVSGELYQPLRNSQPAIAAAA

SEQ ID NO: 272158 - protein, 350 aa, unidentified
MDRYIGLDAHTSSCTVAVVGPSGRRLTSQVVETNARSLVSAIEAIPKSRHLCLEEGALAGWLYEMLAPHVQEIVVTAVPQSRGPKSDKRDAFGLAEMLRIGAIPRKVYKQRGRFTQLAYLARAYQMLVSDDVRVQNRIKSLLRSRGVQVAGSAVYTTAGRSAYVDRLPVEPKTMADLLYQQHDHLAHLRKQAQKEMIAEARKHPEYRCVKSCPGLGDVRAALLLPVVVTPYRFANKRQFWAYCGLAVISRSSSDWVRTRTGEWMKAPVQQTRGLNKNFNHTLKTVYKGAATTVVGQAQDEPLYQHYQRLLDGGTKPNLAKLTIARQIAAISLALWRNQEDYDQSKFKQPT

SEQ ID NO: 272159 - protein, 347 aa, unidentified
MKKVTVIGMDLGDKNHKAVGLSESGEEVDRAEVVCTPEGVRAYLARHPGALLAIETGTHCRWVARLAEEMGHKALVGNARKLRMIWQSSRKDDWRDAEMLARVARADRKLFHPVQLRDADNQRLMRLVKSRDVLVRNRTAIINQVRGFCKAEGARLPRCSAEAFVNLKASLPPEVMDVASHLFKMLRELNDLIRRYDRIIAKALKRLRGEDAALLEPIAGVGPMTAAAYLAAVGDVGTFGGAREAGPYFGLAPRRDQSGATDKQLRISKEGNEIVRRLLVTAANYIMGPFGKESDLRRHGMRIAERGGKNARKRAKVAVARKLAVVMLAVLRNRTAYRPLADVGAVA

SEQ ID NO: 272160 - protein, 436 aa, unidentified
MNDSEQWQQHRAFGALDWASQKHSVIVVNQTGKVIEDFEIEHSALGWKNFRERLQAYGPIPFAIETSQGAAVEQLLEAGMMVYPLNPKSAQAYRERKAPSGVKDDRLDAWSFADALRVDGQGWKALRPEEPLIKELRLLCRDEVALIEQRTAFIQQLRHALAEYYPAALEAFKDWTSVSAWMFLQRFPTPESLAQAGKRKWQNFLHSRRLWGSEEGPRRMEIFAHALEFAGTAPTVKAKSLLALSLVQMLFAVEKQLAVYRHRIEELFARHPDHDLFGSLPGAGPKLAPRLLSEIGEDRGRFDGDPQALQCLGGTAPVTKRSGKKRKYCHVHQRWACDKHLRHAIHLFAEQSLSRCVWAELYYQHHRQKNCSHANALRRLGHRWLKIIHKMCSIAPLTTPSSITAIKSNTAPGFFSFNLTNNSIFPPQTNRKSFRA

SEQ ID NO: 272161 - protein, 411 aa, unidentified
MHNRQNYLYVGVDLHKEHHTAVIINCWQEKLGEIQFDNKPSAFSKFLLEVETYVSDGLSVVFGLEDVGGYGRALAKYLVDHEQVVKEVNPALSFLERKSQVMIHKNDSWDAECVARILINKFNQLPDAKPNDLLWSIQQLVSRRNALVKAQSSLKNQLHIQLNHHYPSYKKFFSELDGKTALAFWEQYPSPSCLEGANIKQLTAFLLDVSNNTCSVKKASEILKLVKEDGQTMKEYQETRDFLVRSIVRDIEFKKKEMKYIERELKQLVKLLDYQLETMPGIELVTASALIAEIGDVRRFPNANKLARFAGIAPVYFGSGGKGKTHKSKQGNRALHALFYNLAVQQVQVAKGRKLPRNPVFHAYYQKKLKEGKTKGQALVCIMRRLVNIVYGMMKYKTAYELPIVEEKEVV

SEQ ID NO: 272162 - protein, 343 aa, unidentified
MKTITTIGFDIAKSVFQVHGVDAAGEVVIRRQLKRRHVLAFFQKLPSCLVGIEACASSHYWSRELQALGHTVRLMPPAYVKPYVKRQKNDMADAEAICEAVTRANMRFVPTKTPEQQSCLMLHRTRHLFIRQQTAVINSIRAHLAEFGIIAPVGRKGVTELLHVVADPSDRRVPEVARACLAALGTQLLRLKQQILEFDRMIMAWHRSNQTSKRLHYIPGVGPILATALVASVADPRTFRSGRNFSAWIGLVPKQHSSGGKDRLGSISKQGDRYLRSLFVAGALAVIRYAKVHGTKHRPWLTALLGRRPTKVAAIALANKIARMAWAMMAKGERYKQPVALAA

SEQ ID NO: 272163 - protein, 337 aa, unidentified
MNKITLIAIDTAKSVFHMVGIDRHGKYVWRKQVTRRKLVSTLAQLEPCKVVLEACAASHHWARQINACGHDARLIAPQHVKPYRRGQKNDYRDAEAIISASLSPGIHFVGIKTTGQQAEQALHRVRSRLLSHGNAAANELRGLLGEYGYAFAKGHKALRTGALAFIDSGQAEALGLVELITDVLEEMVHLEQRLQHYERQIEQRVKVDAVSSRMREELSGVGVLSASALRVKVADARDFGDGRNFAAYLGMAPGHRGTGGKVKIGKIRRNHDRYLRQLLIHGARSALRHLGDKQDAQSRWLRALVERRGFNVACVALAHKNARQAWAILAKEQALQS

SEQ ID NO: 272164 - protein, 319 aa, unidentified
MEKKENTFVGIDIAKNELVVHVLPTEQQLTVPNSTEGIKELVKQFKMIEPKQIVFEATGGLERELLTHLAAQGFAVTLINPKQARDLAKGLGELAKTDAVDARILARFAQLQCLPVRTLPSLEMQEMNDLVTRRQQLIQMRTMERNRLHSAREKSIKKSIEQIINSCTKQIEEIDARIEEMIANNPDWSEKDKIIQSVPGVGAKTSQVLISALPELGTLNRQEIAALAGLAPFCRDSGTKSGSRHIRGGRANVRAALYMATLSAIRCNKAFKEFYQRLIARGKKFKVAIVAAMRKMMTILNVMVKNNTVWKEKEVHMEN

SEQ ID NO: 272165 - protein, 361 aa, unidentified
MHATTVAIDLAKSVFQIAVADDNWKVVAQERLTRGQFERWFQNRSVGLVVMEACGSAHHWGRWFNRLGIPVKLLPAAYIRAYVKRNKTDAADACALLEAARCADIVPVQVKSLEQQALQGLHRIRSRWMATRTSRINTLRGFCREFGLVVPQGARTGVEAMSRALAEPESKIPLLIRESMRLLIEEIRLLELRISRLEGELTALARQSPACTELLTIPGVGLLTATALVAATGGSVAHFKDARHFASWFGLTPKESSSGNSRKLGRISKKGDCYLRMLLTHGARAVLRAAELARRNGRPLDALRTWATEIQTRAHHNKAACALANKLARVCYAVLRDHAPYGNPQPRQEKKLTRTAFAIAT

SEQ ID NO: 272166 - protein, 341 aa, unidentified
MNLFVGLDVSQKKTAVCVVDASGAKVCQASIETSPQAIYQFLVEKGFTHSKIGMETGPLAVWLYHGLQAFGLQIDCIHARHVHAALTMQLNKTDRNDALGIARLVQSGWYRPTHVKSLQCHQLRLVLTAREKLVQIRVTLINQIRGLLKTFGVVLPAGRNSVFERSVVESSPSIAEVKPTVLMLMQTLKDIGTQVRALDKKLLSFTRTDVVCKLLTSIPGVGTLTAISFKTAIDDPARFGSVSDAGAFLGLTPKKYQSGEVDRNAGISKHGCRQTRSLLYEAATCLLTRYGKDTTLAAWGKRLWERLGFKKAVVALARKLSAVMLSMWKSGELYREARAIS

SEQ ID NO: 272167 - protein, 428 aa, unidentified
MNCNTQNAKIASITEKTLIVGIDVGSVTHYARAFDWRNYEYTKKPLEFSNTEEGFLTFKAWVEDVAEKYGKTAVIPGMEPTGHYWFALGKFLQDCGMKPVHVNPHHVKKSKELDDNNPNKNDRKDPKTIAALVNEGRFSYPYIPTGIYAEIRNLSNLRFQTQEELTRIKNRIARWFSIYFPEYQDVYGDLKAVSGRMILKVAPLPEDIRRLGAEGVNLIWRDAKLRGAGMKRAKTLVTAAEHSVGSKEAPEAARIELRNLLSDMDVYALRLEELLQSIEEKLKEIPYMDKLMGIKGIGLVTVSGFIAEVGDIGRFDNPKQLQKLAGYAIVANDSGKHNGESRISYRGRKRLRYVLYEAAISLIGKNPEFREIHEYYRTRKENPLKKMQSVVAVACKILRIFYKILTTGVAYDAEKLKGDIRRPQLQTA

SEQ ID NO: 272168 - protein, 429 aa, unidentified
MNYNTQNAKIASITEKTLIVGIDVGSETHYARAFNWRNYEYSKKPFAFSNDEAGFASFKAWMNDMAEKHGMETIIPGMEPTGHYWLNLGAYLQEQGMKPVHVNPHHVKKSKELDDNNPSKNDRKDPKTIAGLVNEGRFSYPYIPTGIYAEIRNLSNLRIQTQEEITRIKNRIARWFSIYFPEIKDVYRNPDAISGLMVIKQAPLPCDIKELGVNGVNKIWRDARLKGAGIKRATTLVTAAEHSIGNTEAPRSARKEIRNLLNDYETYKNRMDELMQEIKETLSEIPYIDKLMEINGIGIKTVSCFIAEVGDIGRFDNPKQVQKLAGYAIVADSSGKHNGESRISHRGRKRLRYALYEAAISVIGKNKEFKEIHSYYRTREKNPLKKMQSVIAVACKLIRIFYTILTKGVDYDSQKMLNDIVRPEIQLAA

SEQ ID NO: 272169 - protein, 376 aa, unidentified
MEHNSEAFIGIDTSKLKNAIAIAESGRDGEVRYLGEIETTDAATRKLVKKLATKYRKVTFCYEAGPTGYGLYRLITSLGHECSVVAPSLVPKKPGDHVKTNRRDAVGLAKNLRAGELTAVWVPDTRHEAMRDLSRARETAVDDLKSKRQQISSLLLRLGLHYPGEKTWGKSHRNWLASLKLDQREQRIVLEELFGAERQAQERVDRLVSAIIDAVPEWSLAKIVTALMAVRGIDLVAAVTIMAELGDLSRFASPRELMAFLGLVPSESSTGDSVKRGGITKAGNRRARRILVESAWSYRYPPRISRDKLAKVAAAPEPVRAIAWKAQTRLSSRYRALIKRGKRPTIVATAIARELCGFIWAIHRAVTAPGGRQLAS

SEQ ID NO: 272170 - protein, 400 aa, unidentified
MISVGIDVSKEKSTICILKPYGEIVSKPFEVCHTEKELSELTSMLLRLNDDVRVVMEATGIYHLPVLCYLQEKGLFVAVVNPFEMKEYRCQGLRRVKTDKQDAVTISNYGIDHWYRLKEYEPEESIYAELKLLGRQYRHYMRMRVESVLELTHLLDYTMPGIKTLLKGWNETNGKDKLGDFVEEYWHYDNITKKSEEQFIESYLKWAKEKGYHQSQDKAAKIYMLAKEGIPTVSSDTSSTKMLVQEAVRVLREIDNTLMTILTQMQALSKSLPEYPVVRAMGGVGNVLAPKLIAEIGDVRRFHSGKALIAHAGIDAPPYQSGQFTGTERKISKRGSSSLRKIGYEVMRCLKTHKEPEDAAVYRFILKKEKEGKSKRAAKIAGLNKFLRIYYARVMEVYQK

SEQ ID NO: 272171 - protein, 350 aa, unidentified
MEHNSIIGLDIAKSVFQVHRQDASGGVIERRRLRRSALLAYFAGLPRSCVGLEACASAHHWARSISALGHEVRLIAPSYVKPYVQRQKNDAADAAAIAEALTRPHMRFVPIKTVAQQGALMLHRVRDLLIKQRTMTLNALRAHLAELGLVSAKGRDGAAALVRLVEADAEDGRQRQGLDALARSALLGLVTQLRVLQGEIAVLDRRILAWHRENEVSQRLASIPGIGVLSATALAATIGDGSAFQSSRQLAAWLGLVPRQNSSGGKERLGKITKQGDPYLRRLLVIGATSTLIRAKRGSGKPSLYPWAAALLQRKPYRLVTVALANKMARIVWAVLSSGQLYRPVAGARI

SEQ ID NO: 272172 - protein, 415 aa, unidentified
MLLVGIDWADDHHDICFVDETCQDLSSILDRFRIPHSADGFELLHEKLRQREAAPDQICVAIETPHGLLVHDLIRYGCRVYAINPKSVSRYRDRHSPSSAKDDERDALALAHLLRTDRHRYSPLEMLPEDYRLLDEFCRDLRQMIEDRTRILNRLTSCLKEYYPQAVGLFSRPDSLIGIAFLRAFPDPASLRTLTKKRFAAFLIKHHYPVPSRTGELYATLSAKAPTADTVVIQAGRLRMLTLLDQLVALQEHVRDYERRIQKLFETLPGCKGISNLPGVGERVGPELAAALGPKPEGDPKRHSSCRALQRLAGSAPITKQSGRYRHVLFRRACDKRLRTTLHDWAKASLNTSRWARAYYDYHKTQGHRHNTILRNLACKLLKILHRLWRTGEEYDEGRHIDTLKSKGVAWATNL

SEQ ID NO: 272173 - protein, 390 aa, unidentified
MIYVGIDVAKDKHDCSILDDEGRKLYPVFTISNDKVGFDELFSRIEEATSDKTEIKVGLEATGHYSNNLLASLVDKGFPTVVINPLHTNLYRKGLSLRKTKTDKVDASSIAIMLMADRTLKPYSETSYHNEELKSLTRYRFDKVHERSKLKSSLARLVNILFPELEKLVPSLHLNSVYTLLEELPGANYIAGCHLTHLKKLLEESSRGHYSRDKAIEIRNAAIDSIGTPMDAKSMELRHTIHLIWILSEEIEEIEASIKAIMDEMQSPIMTIPGISYRMGAMILAEVGDFARFDNADKILAYAGLSPSTYQSGQLDSSHSHMEKRGSRYLRYAIFNATKFVCKWDESFGIYLRRKISEGKHYSVAVSHAAKKLIRTIYRMELTGQAYSPS

SEQ ID NO: 272174 - protein, 344 aa, unidentified
MHYKLITIDLAKTVFQVAAFRDDNTIAFNKRVKRAQLLDTLRQCEPTRVVMEACYSANYWGREIAKLGHDTRLVSARVVKAMLVGNKNDSNDAVAIGEAAQRPRVQLLRVKGLHQQDIQSLLRARELLIKERTALINQTRGFLAEYGIIVAQGLAQLQQALPALLEDAENGLTTTIRSLLKRWHERWLQQNQELETLTHELIALISHDEVFKLLQSIPGVGPIVAAAIMASVNEITDFRNGRQFAAWLGLTPTQYSSGLVNRLGSISKRGNEGLRRLLIHGARAVLNWCEKKEDGLSKWLQQLKARKHSCKVTVALANKLARIVWAVLTTRQEFDITKACQAMK

SEQ ID NO: 272175 - protein, 366 aa, unidentified
MKKISTVQTFKSEIFREQKLTIGLDLGDRWSFYCVLDEAGKIILEQKVPTTPEAMKQTFSRIPQSRIALETGTHSPWVSRLLTELGHEVIVAHAQKVQLITKSNRKDDRHDARTLARLARIDPELLGPVRHRSVQAQIHLTVIRARAELVSARTALVNAARGLVKSYGQRLPKCGTQQVSRELAAKLSAELREVLEPLLKEIESLNECIQEYDERMEKIAKEVYPEVSLLKQVKGVGTQIALTYVLTIEDPHRFLKSREVGCFLGLKPGRRNSGESEPQKKISKAGDRYLRTMMVQGAHYILGPFGEDSDLRRWGRKLSERGGKNAKKRAVVAVARKLAILLHRLWVSGEVYEPLRNSQNAVRAVA

SEQ ID NO: 272176 - protein, 374 aa, unidentified
MVWTPPLPNGIVMCQSGRCYDHFNEEEESGMKTTTIGLDIAKSVFQVHGVDAKGKVVLRKVLKRRQVLEFFANRAPSLIGMEACAGAHYWARELGKQGHEVKLISPQFVKPYVKGNKNDANDAEAICEAVGRPNMRFVPVKTAEQQDLLALHRVRSGLVKERTAQANRLRGLLGEYGIVIGKGLAQLRKRLPEILEDAENDLSDLMRALFADLHGRILALDQQVAAYGDKLKTLNQMSAVCRKIGQVPGVGPITATAMAMAASLGDGQAFETGRQVSAWLGLVPGQQSSGGKPKLMGISKRGDTYLRTLLIHGARAVVRAAAKKHDAKSRWINALVQRRNANIAAVALANKNARVIWALLRRGENYRAPVSANA

SEQ ID NO: 272177 - protein, 344 aa, unidentified
MTNYAGLDVSLRSTHICVIDDEGELLAEGKTDSEVADIIAFLDAFDIETTAVGLEAGTLTQYLTYGLQFAGYNIVCMEARQVKAALSAMRNKTDKNDARGIAQLLRSGWYNRVHIKSIESHQVRALLSSRKAVLTKCIDLEQEIRGLFKIFGIKLPPKLGHGSFDPKVRPLIEADEALSQSLLPMLDARLVLYRTFLQLEYRVRNLAKQDPVCQRLMTAPGVGPITALTYKAGVDDPTRFKRSRTVAAHFGLTPRRFQSGEIDFDGHISRAGDANVRSTLYVAANSMMTRSSQWSPLKAWGMKLAKTRGHKRAVIAVARKLAVILHRMWIDDTQFRWSAEAARS

SEQ ID NO: 272178 - protein, 391 aa, unidentified
MSMYFIGIDISKYKHDCCIISAADQKVVSKVIIKNNKAGFNELLTIIHSLANPADIRIGFESTAHYALNLELFLENSLLTFMEVNPVLISEYKKSKTLRRTKTDSVDCESIARWLMTVEYKPHSKGFYHAYSLKSLTRLRDKLIRQRSFYLVKITNVLDHTFPEFKPFFNERLSKTALYLLENYGSAEKMARMNSASYEKLRSVSRGKFSPQQFLRLKELAVNTVGVNNSIFDVELNSLLSLYKSLVKEIDTIKKEINQLIEEVHPHYMSVPGIGPLSAAVIYSEYGDISNFTNPGQMLAFAGIEPGINESGTESHGGKMVKRGSSQLRYTLINCCLPLIRFDMTFATYYAKKRGEGKPHRVAITHVAKKLIRVIYALESQDIDFNAQELR

SEQ ID NO: 272179 - protein, 416 aa, unidentified
MLNSFEWYLGIDWGSEEHHLCLLNAGGGVCGTRPVAHTAVAVHDALQWVRAETGAAPETIAVGLETPRGVLVDTLIEQGFTVFALNPKQLDRFRDRFTAGGAKDDPRDAQVVADALRTDRRAFRRVRPDDPQIIQLRELCRIVEELQEQEGRLANRLRDQLYRVHAPWLTLTAAADEPWLWTVLADTPHPDEWRHLPRRRINAALRAHRIRRLNADDIVTTLRQPTLAVAVGVAEAVAIRIASLVPQLILVRQQRTTAERQIDRSLERLAETTDSELREHRDVEILLSLPGVGRMVTATMLTEATGPLADRDYATLRAYTGAAPVTKRSGKRAYFVQMRYACKWRLRQALYHWARTSIQRDDAARLYYDALRARGHHHARALRSVADRWLRILVAMLRTRTLYDPSRFVQAVAIPA

SEQ ID NO: 272180 - protein, 390 aa, unidentified
MNTNTNTTTASTTILAIDLGKYKSVACVHDQATGEFAFTTFDTSRAELRKLIGKTQPAVVIIEACLLAGWVHDLCAAMGVRCLVANTASEAWKFKYLKRKTDKDDALRLAQLYLLDQLPTVTLPPTAVRQWRSLIACRQALVGRRVAVPNRLRALFVAQGLPTPRGAKAWAATGLAGMATWAKPLAECMADELWRGLLELSLTEYRQLCELINQAETKLDAIGKQHADVVLLETAPGLGPRTAETVAAYLHDASRFQTGKQVSAYSGLVPRQHQSGEMDRRGRITKRGPALLRKMLVECAWCMIRYNAWARGIYQRLTGGGQRRKKQAIVALARKILVRCWAMLRDRKPWHDPQTGPKPTLSPSKQRRRAEAQQRRQAKQQPALAPVATP

SEQ ID NO: 272181 - protein, 344 aa, unidentified
MDHFAGLDVSVKETSVCIVDDTGKIVREVKVASEPEALLAILTNPAYRFKRIGLEAGPLSQWLFSALAEADLPVVCVETRHMQAVLKAQINKTDRNDARGIAQMMRVGLYRPVHVKTLRSQNLRMLLTHRKLLQEKAIAIENDLRATLRNFGLKVGMVGTVKFEARIKELVENFPNLVVLVDPLLIIRRVLREQIIILHRRLLAIVRDDEVCRRLMTIPGVGPVVALTYRATVDVPARFRKSKAVGAVFGLTCAKYQSGEIDRSGRISRCGDEMMRVMLYEAAQSMLRSKKWSWPKAWAMQIARRRGMKKAIVALARRLAVIMHRIWVDGTEFRWTREQTTAAA

SEQ ID NO: 272182 - protein, 340 aa, unidentified
MKLTAVGVDVAKRVFQLHWVEAETGEIISKQIKRAAFLEHFVNRAPCLIGMEACGGAQHWARRLIEMGHQVRLMPGKAVKAFVSGNKNDVADARAIWTAVQQSSVKSVAVKSEAQQAVLALHRMRQQLIKFRTMQSNGLRGLLTEYGEVMAVGRAALNKAMTDVLARLSERLPAALVDTLREQWSRLGDLDEQIAEIERRLSAWMKEDRSCRKLAEIPGVGLLTATAAVATMGDAKAFKSGREFAAWLGLVPGQVGTGGKVRLLGISKRGDTYLRTLLIHGARAVLTHAKEPGPWVEQISKRRPPNVVTVALANKMARTIWALLAHDRSYERSYVSVKPA

SEQ ID NO: 272183 - protein, 324 aa, unidentified
MIDGILGIDVSKNTLDASMSSSNKVRARSFVNSPDGWRHLLDWLMTLRLRRVHACLESTGRYSLGIACALNEAGHVVSIVNPAQIRDFARTKLGRNKTDGVDASHIREYCELFKPQPWVPPSEAHRRLGELQTIRAGIVAGLTEWKNRKNSGMVDPVAQSLADVTISHFTGQLGVVDEAISQTIKNESVLRRRHDLLLSISGVGETLAGVVLAELPGPDVLRSSAEVVAYASLNPRQHQSGTSIDRVTRISKIGNAVLRAALYMPAMSAMRHNPAIVALVTRLKSRGRLNPKQIVVAAMRKLLVLCFGVLKTGKPFDPAIAMGC

SEQ ID NO: 272184 - protein, 408 aa, unidentified
MKLLYFLGIDAAKHKIRAALSAGRETLLLEKDLPATATGVGQLLAMLKERVKEPEQLLVLIEATGVLHLNWSAALTEAGYAVAVINPLIACRLYRVENSIRDNKSDPIDARGLCAIGVLHGEKLLAHYRFALKPEQFALQRLQRVRKALRSSLTNLKKTYVSLLDLQFPELGQLLELDGVGIRQLLAVAPTPAAIARMPLSTLQKNWMLRPKAVQLKTLARDSIAHPELAQATAPALRALLHSLSAMEERLRALDKQIAHLASTTLDQKTRTLLETLPGFGPINVAKILAWLPNEILHSGSNRKVAARLQAFMGNDPRLRQSGQWKGHTKMSKRGVEMLRTAFFQSASSAALHDPELRAYYQRKRLQGKRHEVAISHLMRILTRRLVAVLRSEKPYSSTYNLTLQNAA

SEQ ID NO: 272185 - protein, 316 aa, unidentified
MANLTKSKSSVNVGVDVGKNFLDVYIHEKQIYFQEENNYKGIQNILKRLTHYQVERLVVEATGRYEFALAEAAYLKEIPVCIMKPLSIRRYAGAVEQLAKTDKIDAAIIAEFAAVIKPKPTPQKSKNLIAIKDLLARRRQVMEMRTQELNRVKIMGKALDASCKRIIKVLDKEIDRLEKSLNNYVDEQSEWSEKRELLISTPGVGNTLVYTLLADLPEIGTLNNKEIGALVGVAPMNRDSGSLRGKRKIKGGRASVRTILYMATLSATQCNPIIKHFYKKLVEQGKHKKVAIVACMRKFITILNAMVRDKKEWCND

SEQ ID NO: 272186 - protein, 399 aa, unidentified
MNARYTPHELQIGIDIGSINHAIAISDNQGNILKEFEISHSNKGFDSFFQIVDKLSTKHHANINVAMEGYNGWARPFDALVLEHGYKLYNVNNVKLARFKEIFPAAAKTDSIDARKIVELFSLRKHLPIAKEVLQEVKPSDTTNAQLKKLTRRRKQLVEERKAIANRFGSDLQAEVPDLKATTSSVDNLWFLRFITLRDNLVSLSRLHRNSIESIPYLSFKNVEKIIAWQKDARFTKSIEYISSMLYDDAMRILALKDKIKELEIQIKALIPSSKIATLIQTIPGFAHVSAGSLAGEIVTLERFESEASLALYLGVTNLDNSSGKSKGSKRNLATNRQAKMAMITATMKHTQHVEESKKYIEKKISEGKRYQQAIRSMARHLVRVIWNMLQQDRAYEIR

SEQ ID NO: 272187 - protein, 348 aa, unidentified
MLADEVDYVVGVDPHRDSHALAIVHVLSGAVVFEATIAASSQGYAEALQLVDAHAPGRRAFAVEGSGSFGAGLTRVLTGRGEWVLEVSRLRRERRSGGKTDALDAIRAARSVLGQERPATPRAGGERQALQALVAAREGAVTAKCAGLAQLRDLLITTPEPLRTELRPLTQAPLLRRLAATRPERRRDPELRGSMLALRSLARRVLQLQAEERELGRQIEALTRKLAPQLLDQPGVGPHAAAQLVLSWSHHGRIRSEAAFARLAGAAPIPASSGQTVRYRLDRSGDRKLNRALHLILVTRKRTHPPTRAYIERRIQEGKTRREATRCLKRYLARNLYRLLEHRPPIAT

SEQ ID NO: 272188 - protein, 316 aa, unidentified
MSMSKTFIGVDVSKERLDCFCRPTGTAFSCDNTPSGIAALLQWAEAQQPQLIVLEATGGLERPLVAELVVGQLPVVVVNPRQVRDFARAIGQLAKTDRIDAAVIAHFGEAVNPEARPWPDHLTQQMDALMTRRRQLVQMLAAERNHLVSAPVQVQNYVKEHIVQLEELIKKLDQDIDQMITTSPIWKTKENLLRSFKGVGPVLSRTLLAELPELGRLSRQEISKLVGVAPLNNDSGKHKGKRSCWGGRASVRMPLYMAALSATRCNPVIKEFYQRLLAKGKLKKVAIVACMRKMLTILNAMIKSNKPWDASLAQIG

SEQ ID NO: 272189 - protein, 387 aa, unidentified
MQKPHDDSKACLTAFVQDSTLTVVIEMSLQSWLVAGMVPGVDREPRKKIAPDPEVLLLLLYRWRDEAIKAGKEITRIAVAYETGRDGFWLARWLRARGIDANVIHATSVAVSREHRRAKTDRIDTAMLQRGFLGWLRGERGHCSMAIVPTVAEEDGKCPHREREILVKQRTSTVNRMKSILIQFGVRNFNPVLRKAPEKLESVRSPEGIPLPPNAVAALQRQMERFRVIKEQIKAIERTRLQRLQRDPAEKFNAMVFLLVRIIGLGIETAEQLVHEILSRNLRDRKAVARYAGLTGSPDESGSKRREKGLSRSGNGRVRKILIQLSWRLLKFQPESDLVLWFKKRTANAQRSRKPMIVALARKLIIALWRYVNTGLVPQGFQLKSAA

SEQ ID NO: 272190 - protein, 352 aa, unidentified
MEIIALDAHKRYSQVCVQKKDGRLLCEKRINHSKGQIGQFLSRWTAGSPVALETVGNWYWIVDEIEQADMKPKLVHAHKAKLMLGSVNKTDKLDARGLNKLQRAGTLPCVWIPPGGIRDQRELPRTRMVFANLRTRLKNRIHSVFDKYGLHTDFDGISDIFGRRGREQMALTIKQLPAETRYTVRCLLRELDMVEQQIRRIEKRMKKVFSKTEQVKRLMTLPGIGFILAVTIANEIGDISRFATPQRLASYAGTVPRVHSSGGHTRYGKLRNDVNHYLKWAYSEAGNSTAVNHKRFPFRHTSKLYKRIREKKGHAKAVGAVGRHLAEASFWVLTRNEDYKEPEIKSVSPTAV

SEQ ID NO: 272191 - protein, 345 aa, unidentified
MLIIGCDFHPGFQQLAIFDNQTGEIQCRRLGHPEEARQFYTSLPEKALVGMEACGHAQWFERRLAELGHELWVGDAARIRASVVRQQKTDARDAEHLLTLLLEKRFPKLWVPSAEERDLRQLLVHRHQRVRMRTQVKNQLQALALNQGLQRKRKLWTKAGREQLEKLSLLPFAARRRDELLKMLDELDQQIAALTQVVQLEAGKRPEAVRLMTHPGVGPNTALGFLLTIGPVQRFDSAKRVSSYVGLIPREHSSGGKQRLGHISKQGSPWMRFLLVEAAQTAVRGDAELKRAYVRLALRKSRGQAKVAMARRLATRLYWMLRTGKTYAQLKASGAGKPVSSRGAA

SEQ ID NO: 272192 - protein, 350 aa, unidentified
MLAELVHHVVGVDPDRDWVTLAVVDARTSGVIAEGRFPATGDGYRDAVELVDGHSVDTERAWTIEGSAGYGRGLAVMLSHLGEWVIEFDRPTRKTKDGAKSDALDAIRAARETLGRDRFSTPRAHDGVREAIRVHTVTRAAAVRARTGAINELKAIVVTADETIRSPLRGLRTNQQVAACARFRDRSSADIAQRCTRACLRALARRIEHPDAEVVDHDRVLKELLDQAAPQLPAERGIGYVTAAAFYIAWSHPGRCHSEAAFARLGGTSPVEATSGQNQSRHRLNRGGDRQLNRALYLVAITKQRCDPATKAYIARRTADGKTNREAIRCIKRFIARRVWRLLEHPPITT

SEQ ID NO: 272193 - protein, 337 aa, unidentified
MNYCGIDVASKSSDISIINGQGKQLRRREIDTEASDIGKTLTGFGELKVIIEAHPLAEAVAGIVEELGHTPVIIDARAAKNLMDAMKKTDRRDAQTLAEIGRCGWYVEVHRKSAAARQMRSILQARQALLKSHKALASSIRGLLRSHGIRLGKVSKGQFVAQVKKVTEQEVPGLLAALSGMLDAWVVTGERAEQIKKAMVKECKQDEISGYLESAPGVGPLISTAYRATIDDPHRFKRGEEVGDYLGLAPRVYQSGEVEYRGRITKQGDALLRSLLVEGAHVLLTKGRDCALKRWGLSLEKRKGSAKAKVAVARKLAVLLWRLWKEEKMFDAFPQSV

SEQ ID NO: 272194 - protein, 312 aa, unidentified
MMIGIDISKARLDVYFSVTDRHQAYSNDEAGIGALTQALVAAKPERVVMEATGGLERALVAQLIAANLPVAVVNPRQVRDFAKAVGRLAKTDRIDAQVIAHFAQAVRPALRELPAAAAQEFADQLTRRRQLVEMLAMEKQRCRQASGTAVRKDIKIHIEWLVNRLRAADTGLKAAVEASPAWQSQYDLLSEVKGLGPVTTMTLMACLPELGKLDRKAIAALVGVAPMNRDSGQSRGRRSVWGGRAAVRAVLYMATLTAVRHNPALKAFYTRLRASGKLAKVALVASMRKLLTILNAMARDQTPWRNDFAQIA

SEQ ID NO: 272195 - protein, 361 aa, unidentified
MKILSLDMGKFKTVWLVYLTGGVGEKQYGKIATGPREVHDLLVEHQPDRLVLESGPSAGWVCDMAAALSIPAQVANTNDERWHWKKSKKKTDRIDALKIAQMSEMGCLPTVHVPTPKVRQWRELIAYRHGLVDRRTAVKNSIRAIFDRRGERLPRGNKAWSVAGIKQLRAEARELCQCGADELWRGQLHEELQQLESMEKNIATVESKLDELAAGDERIKRLKTAPCVGPRTSEPGLTALVDPHRFKTTRQGGADAGLSPRQWQSGQSLREGHISRMGNRLLREVLVEICWLGIRTDPWMKQVYEGVRRGSDKRKKIAITALSRRLFIRLWAMLRDGTDWIVPPLRVEESAVSARGMSVAG

SEQ ID NO: 272196 - protein, 451 aa, unidentified
MKEQLNYQQMPVIHQQVAGIDIGSKFHVVAVGDNPKTDVKEFGVSTKALFEIALFLKENDVQHVAMEATGGYEKPLVSVLQQEGFDVLVTAGANTKNYRRFKSDVSDAIHIRTLHQLGLLPPIFITDEFATTIRPLVRMRQSLIEDGADYIRRIQKTLRLINVRLDATLTDSTSVSGLAIIKAICEGEEDGAILAALVDKHCKKTPAELTQLLTGNWTPSIRLQVQSSYRLYQAVQAEMTRLDAELDRLFTEHTQHLPRAEATKKKPRKHRNAPKVAVEQYARQMLGVNLHEIPGFGRTAILTLMSEVGESIHRFNSAKAFAKWLGFTPNNKASGGKLLSRKTLKNKSNLPNTFRQVANSIGNMKDSNPLVNFFRRVAFKSSRKKAITATARKLAVLVYTMLKRGEAYQPEKLERDQEQVKVMQIRKIKKNLHKFGISIQDLGWTVDFQTA

SEQ ID NO: 272197 - protein, 410 aa, unidentified
MEAIIERVAGVDVGQAIVVATVLVGAAHERAKKETRTFRTVTRELLELREWCLAKGVTHVAMEGTGIYWRPVYALLEDAFAMILGNAQHIKNVPGRKTDVKDSEWLADLARHGLIARSFVPPKPLRQLRDLLRYRRKVMESRTAERNRLLKLLETANVKLASVVTDVFGVSGRLMLQALLEGTSAPAVIAGLAKGRLRKKVIELEQALEGRLDDHHRFLLRLQLRRLDQTDTDLATLDARIDEALVPYQEQCQSLQQIPGVSRVVAAVIVAELGTDMTVFHSAQHAAAWAGVCPGNNESAGKRKRAGARQGNVHLRTALVEAGIAASHKKGSYLRDKFYRLRARRGTKRAAMAIGHKILIAAYYMLSTRAPYKDLGAAYLDGFEKRRTTRNLVRRLEQLGFEVTLGPKAA

SEQ ID NO: 272198 - protein, 338 aa, unidentified
MSLYCGIDLHSNNSYVAVLDEERRDVDCRRLRNELPAVLGFLEPYKEELEAIAVESTYNWYWLVDGLMRAGFDVRLMNPTKATAHRGLKYTDDKHDARWIACLLALGTLPEGHIMPVEERGLRDLLRRRLYLVQKRTAHLLSLKGIFARSTGKQVSVADIQKWDCEAIREVIDDPLVVESITIMLPVVRVLTAQINAVEKRALEIGKLRDEFGLLQTAPGIGQVLALTIMCETGDIRRFPGVGNYASYCRCVPSDRMSNFKRKGRGNRKNGNKYLSWAFSEAAHHAIRFEPLAKRYYDRKRARSHLMVASRALANKMARACYHVLRDQVPFDPARAFC

SEQ ID NO: 272199 - protein, 345 aa, unidentified
MHIASIGIDLGKATFHLVALGEHNKVLLRKKFSRPQLLAYTANLPASLIGLEACAGAHFMGAALRGQGHQVRLIPAQFVKPYRKSNKNDFIDAEAIAEAVTKQNMRFAQLKTQEQLEWQAMHRVRDRLVRRRTALINEIRGFLLERGITFAAQPIHLRKNLPAVIEDAEQNLSPRLRWLLDRMWQEWKQTETEIEAITDEIERISEEDARCRQLRQIPGFGPLVSTATVAAIGNGSAFRRGRDFAAWVGVVPRQYSTGGKQKLYGISKRGNVYLRRMLIHGARAVLFRVKYDTAGFGQWVHRLAQRAPRNKVVVAIANKLARIAWAVLSSGKDYRHQPLLQLAAA

SEQ ID NO: 272200 - protein, 341 aa, unidentified
MNHPKVVVGLDVGAETFSAAALRTAGEAVEMKGSFENTPEGFDAFAVWMKEYRITKEKSAVCLEATGVYGEALCYDLISRGYRVAVESPLKVKRAFAASAHKNDTVDARQIAEYGHRFYDELQWWSPPSEVMEQVQMLLSAREQFVTQRTANINALKTMQRKVIKTVTGMKAYEQAIKQLSENIEEIEREMKRLMKEDDSFHRLIKTLTSTPGIGLLLATNLAVTTNGFLRTSNHKRIASYAGISPIEHTSGTSVYRRPRSRSFGPPRMRKLLYLAAMSVSTHNPEFRRYYLRKVAEGKSKKLVLNNISNKLLKVVCALVRTETEYIPNYRYVNPILLKSA

SEQ ID NO: 272201 - protein, 486 aa, unidentified
MAKRKKSTFERLQSNRLNRQQRKELQRQFDADSVELAIVHAHAAGIDVGNASHFVSVPPDRDQEPIREFGSWTEDLRRMGRWLKSCGITSVVMQSTGVYWIAVYDVLEQEGFEVYLVNARGTKNLPGRKSDVQECQWLRKLHTYGLLRKSFRPPDQIREVRTLWRLRGRVLEDASRAVQHIQKALTTMNVQLANAISDVSGVTGMSIVRAILQGQRDPHELAKLRDPRIRASEEEIAHSLEGNWQRDVLFELQQVVEGYDFHRQQLATIDTELQKYMAALPTRAPVGEASVEVSKLSAKQRKKLKANRKSKDNRPTFDLGAELTRLMGVDLRLIDGIDVMTVQTIYSEVGADLGAWPNEGAWTSWLELAPRNDITGGYVIKKKKRPSNNRVATALRNAAESLVRSDSYLGARYRHLTGRLEGLKGVKAMARYLACLVYRLLTKGQAWVDRGVAYYENKRREREMVSLHRRAAAAGMQLVPIALKNS

SEQ ID NO: 272202 - protein, 430 aa, unidentified
MKSNTQNAKIEAITEKTLVLGIDVGSETHYARAFDYRGIEYSKKPFKFSNTEAGFVTFKEWILDLKERHEKDKVVPGMEPTGHYWFNLGKFLQDNEMKPVLVNPHHVKKSKELDDNNPTKNDRKDPKVIAGLVREGRYMIPYLPDGVYADLRTASNIRFQLQAELTRIQNRISRWFNIYFPEYKTVYGKPDAKSGMLILKAAPLPEDILTLGIDGVNQIWRDAKLRAVGKARAKTLIEAAEHSVGSKEGAVSARMEIRMLLEDYESRNIRLQEVMTLIEGLVKQIPMAEKLLKIKGVGIKTVSGFLAEVGDISRFNTPKELQKLAGLALVESSSGKHKGETTISRRGRKRLRYLLFEVAMSLVAKNPEFRELHNYYTTRRLSPLKKMQSLMAIAAKLIRVFYAMLTKGVDYDPKKMVSDIKRPAVYLQAA

SEQ ID NO: 272203 - protein, 325 aa, unidentified
MDRSVLGIDVAKSSFDVFLIQGEQQQHRSFPNQAEGFEKMSSWLRECGSQQAHACMEVTGRYGDALAEHLFEQGHHVSVVNPARIRDYARSKLTRNKTDKLDAKIIAFFCLNEKPTLWQPPAPEIRELQALVRHLEALLDMRTQENNRLKSGVPSKQVCSMLEEHLAFLDQQIWQIKKRIKQHIDQHPGLKRDHDLHITIPGIGDTTANKLLSENIQAFSDGRALAAFAGLNPSLFFSGTSVHHRGRLSRIGRSTLRKSLYFPAISAMRFNPQIIIFCDRLVEKHKPSMVVIAAAMRKLLCLSLGVLKSGLPFDPNYTQDAYAIP

SEQ ID NO: 272204 - protein, 409 aa, unidentified
MKRYYIGVDWGDRLHQVCVCDEQGNKAKEIQVAETAQDLAEMGRWLDEKRVEGCELWAAIEKPTGRVVDFLLDHGVAVYPVNPKAVDRVRDRYRMSDSKSDLFDAYVLAEFVRTDQAHLKVLQPSSEQAQELKLLCRDYRRMVRHKTRLLNQLITTLKEYYPRALEVFGDIDTEVALDFLTQYRTPAHLSALKRRAFHRFATQQHHLSKERCEELWNKLIPAQLPVPEHVIRAKAQLTEVLIDQLRAAIKAVKTYEHKVERFFASSPVALIAKTLPGAKSGTVVATIWAELGDATGRWESFHHLQAQAGVVPVTKASGKSRVVHFRFACNKELRYALYWFAFNSLNRSQWAKTYYRKQRAKGHHHPQALRALGAKWLKIIFVMWRDHKPYDEKLHLANVALQNMRQNAA

SEQ ID NO: 272205 - protein, 423 aa, unidentified
MWTKQNGHVVRETCSFGTTTAELLRLQDWLLAWECSHAALESTGGYWKPVYNIPEGQVEILLVNARHVKNVPGRKTAVGDAEWLADLLRHRLLCASFVPPCGQRELRDLTRQRSNLVRERAAVVNRLQKVLEDANIKLASVATDVLAVSERAMLEAIVGGETDPTVLAKLACGRLRDKHEELEQALTGRVRDHHRFLLETHLRRIDFLDEQIEQFNQRIVSHIEQLSPAPAQVTSPDPATVPATASEKPALSWNNAIELLDTIPGIDRQLAEVLIAGIGIDMGRSPSEHHLSSRAGVAPGDNESVGKRRSGKTTPGNPPLRKALVQAAHAARRKNDCYLGAQYHRLAARRGKKRATLAVVHSILVIAYQVLSRQEPYQGLGGNYFDERKRESVANRLVRRLEKPGCRVALEMQPNSTGSAAAT

SEQ ID NO: 272206 - protein, 349 aa, unidentified
MAEPRISYTGERIDVGIDVHKETYTVTCLRQRQIVKTATVPADPARLAESLPRWFPGARLFSAYEAGFSGFVLHRVLTTAGITNIVVNPASVAVAANDKVKTDRRDAKKLARELADGRLRGIYIPTEAEELARLLPRTRAQLVAHRATITRQIKAKLHQFGLITPGSRRLMSSRYLREIAAWELPPELHVSLTLLADQWRFATRQLLEVRRLLREQAKAQAALETVYRSVPGIGEVVARTLATELGDMTRCANERALFSYTGLTPSEYSSGAAIRRGHISRQGVSRLRHVLVETAWRALSGDPILQAMFDRIAATRGKQRAIVAIARRLIGRIRACFRHGTPYAVGTVG

SEQ ID NO: 272207 - protein, 498 aa, unidentified
METKSRKQVKRLMSGSSYSSEELSSLTMDDGTTVVYSVNGDIKRSICGSVDVHKKILMAAICITDPASLKSTFFVRKFTTMNADIRTMAGWFKEHGVQDVCMESTGKYWIPVFNILEQNDIKPILTHPKYVKQAKGHKTDFRDAIHMASLFRMDLVIASFIPPAEIRDLRELCRYRLKLTYIRTSEKNRFQNSMTISKVRLDSVFTDPFGKSASAIMEYLISTDPEQVNDDDILALISRRGNVKASNEEILDSIHGYELIGVQRDKLQIIRMHITQIDECIDMIDSKLEYYRQKYANIINHLTTMVGITSMSALYILGEIGTDMSVWRDDHSLACWAGLSPANNASAGKKKSTKVGNGGHYLKPLLVQCALAAVKSTKKDPYFHHKYETLKKRRGHKKAIIAIARKMLVAIYHMIRDDTNFHPIDKEEVTQKTKKTQGLNLKNVLIFLKEHGADGNMIRMVEEQCSENTEIKDAKEKQSNLAITDASQPIQESVNGMS

SEQ ID NO: 272208 - protein, 408 aa, unidentified
MTVVGIDVSKGKSMVAAMKPGGELVAAPYEVRHSDIELSRLALDVLCMEPDTRVVMEATGRYHEPVAALLHSEGIFVSILNPLLIKQSGAGSLRKVKSDPKDALKIAKYGLDNWSTLREYTPMEAIRQQLKLCARQCDLYNKSIVMLTNNLISLSDKTFPGVNELFSSPEKADGHLKWVDFYRTFWHCDCINRMSPDAFGERYKKWCKKKGYHFSADATDALYAASCGLYTTLPRDNNAKLLVTVAADQLIALRENQSKLEAEMLNLCKQLPEYETVMAMYGVGKSTGPHLMAELGDIRRFPHRSSIVAFAGVDPGVVGSGKMQLSSVATSKRGSPQLRKALFQVVSTYVKRKPENEAVYQFYAKKRDEGKPFFVCTTAAANKFLRIYYARVKECLNAAESAVQTEEG

SEQ ID NO: 272209 - protein, 443 aa, unidentified
MKTHLFDLIIGLDRSDRKADLYYIDTRTGRRWCQSIDTAPEALWKWLLELRQQYPQARVALCLEQPAVHLITFLESYEWITLYPINPITLQKYREAFVTSRAKDDGKDARYMAELLWSHADQLRAWAPEDSATRALQQQVFHRRAVVDERTALTNRLQALLKQYFPQALELCGEDLWRPLATNFLLKWPSLGAVKRAKTATLKSFYYQQGSRSQKLIQERLALIERAVAVTDETVVIQSFVLRVQLLCRELQLVQRTIGQFDQQIAQAYAAHPDRQIFASLPGAGPVLGPRLLTSMGSQRERFGVAASQLQHYSGIAPVTKRSGGSCYIHRRYLCPKFHRQSFHEYAKESILWSRWAAAYYLQQRTKGSPHQTAVRALAFKWQRIIWRCWQDHRPYDEQRYEAALRKNGSPIVALFDQIEVGKSPWKSLVKKTKKSLAGLPQR

SEQ ID NO: 272210 - protein, 353 aa, unidentified
MSMLADLVEVVIGVDTHKDTHTAAVLDARTGAVLARVRVNTDPDGYAELVALADEQSGLRAWALEGTGGYGAGLHRYLADAGELVVELDRPKRPTRRAGAKSDPIDAERAARDALARTRLTQPKTGPQRAALQMRLTARRAAVEAATAAQRQLHAMVITAPEAVRTRFRGQRTRTMITTAGRLRPTTAGGDIEAATALAVLRDLARRIRTLETEAASHETAIRMIVRSWRPDLLDLTGVGPIVAATVLTAWSHPGRCRNDAAFAMLAGAAPIPASSGKTIRYRLNRSGDRQLNRALHTVALSRLRYDEPTRAYADRRRAQGKTDREIKRCLKRYIARDLYGRLESPPQPLDAP

SEQ ID NO: 272211 - protein, 339 aa, unidentified
MEINRVAIDTSKHVFTLHGVDERDHPVLRRELKRTQVEPFFSKLGPTEVVLEACGGSHHWGRMLAAMGHRVRLIPPQYVKPFVKRGKNDRNDAEAISEAAARPSMRSVPVKSAEAQAEAMALSVRELLVKQRTQLINALRGHACEFGVISAKGTANAGKLVERVEADATFPAAAREMFVVLGREIARLDEALRDIDRKLAVQHKANPLSQLLVEVPGIGPIGALTLALKVDATQFKSGRHFAAWIGLTPKEKSTGGKQRLGEISREGNERLRQLLVLGATSVIKVAKPGSKHATPWLLGLLGRRPRKVAAVALANKMARIVWAMMTSGEAYRPAPVAAG

SEQ ID NO: 272212 - protein, 365 aa, unidentified
MASLPSGPEVVHVGMDTSVREIVCGVLRPGHDVPVVERIANDGESVRRLIGRLGDRRLLAVCYEAGPSGYELHRLISSMGAACVVVAPSLVPRGGSERVKTDRRDAVRLTLGLRAGILTAVRVPSPEEEAVRDLVRARGDLLDDRRRTQQRLNAALLRHGRIWGGTKWTCAHRDWIDRQRFAEPALGQALDAYRGALEAREAELRAVEALLSPWAGRDPLAAAVARLGAYRGIAELTGLTLAAEVVDWHRFPAARAFMGFTGLVPSEYSSGTRTRRGSITKAGSEIVRTALVESAQAYRYRPAIGAGLRARQAQAGPDTLARSWKAQQRLHATWVKMTARGKPHGVVAAAVARELAGFVWAEMTS

SEQ ID NO: 272213 - protein, 385 aa, unidentified
MNQISCSATSSHTLHCALELSKKSWLLAIQFPDREQPSVYSIKGGDTEKLMAKLTAARDCWAKVSGSLPVITVCYEVGYDAFCLARFLKARGIECLVIDPGSLQVNRRGRRVKTDRVDVKMLLRTLIAWCRGERHVWSLVRIPSVDEEDLRRSHRERSRLVRERTAHINRIKGLLFAQGIRDVKVKSQYKTLAVDKLLTADGHRLPPRLASEIARELQRLAMVQEQIAEIERERDTAPTPCEATERKRQLLLQLKSIGPAISALLSREVYYRQFANRRQVGSFRGLTPSPYSSGEEERCQGISRAGSGQVRAIMIETAWLWIRHQPKSALTRWFVERTAGQSTRMRKIMIVAVARKLSIALWRYVEQGLVPQGAILNPPTTGRAR

SEQ ID NO: 272214 - protein, 330 aa, unidentified
MKQYSYFFGVDVSKRTLDINLLKESVSTHRQFSNDTEGMEELMQWFTTLEVDFSQTLFCMEATGLYCFVLTDFLARHEIDTWIEHAAQIKKSTALARGKNDKVDSKRIALYAAKNLERLRLWKPTSATLQKIKHLAALRERLVDTKKRLATPVKEFEEAGNAAMAKLLAKSIRSTLSALDKDLKNVEAKIIEIVNEDENLKRLFLIVSSVVGIGFVTAVNLLVYTGGFTQLRDARKLACYCGVAPFEYTSGSSIRGKTKVHFMANKKLKCNLHMASLTAVKLDSELKAYYERKVAEGKNKMSVLNAVKCKLLARVVAVVNKDEKYMNKVA

SEQ ID NO: 272215 - protein, 313 aa, unidentified
MKKTICGVDVSKAKLDVCIEPAHRLASFNNDTAGIAELAKFCREHKVDLVVMEASGGYERRVFIELWEQDISCALTNPRSVRRYAEAMGILEKTDRIDASVIARFADAKGLAPTPLPSQAQLRLKALVARLRQVTDDLTVQKQRRSSMFDNTEMQASVDEVIALLKRQSRSLEGEIASMIDDDPLWAKLADTWRELKGVAGRTVARLHAELPEIGTLSNKAIAKLAGLAPLANDSGKRKGKRPTRGGRAGVRSILFLVAAIVARYDKNIGTFKERLVKAGKEKMVIRIALARKLLVILNAKARDARAQYANAT

SEQ ID NO: 272216 - protein, 302 aa, unidentified
MDACIRAFKLRQTWLSTARGHRKLVVWLRKHQVNKAVMEASGGYERDWARVLREAGIEVRIVDPKRVRSFALSAGRLAKNDAIDAEMIAWFAETFSEAPGQPHDAAREELQALVKARLDLIDFRMRLVSRSEHAAPGLVQKAHAHILKSLASEIAKLEAAISAKIKSTPDFAERAEIIESVPGFAQTSSANLVAGMPELGQVSDEIAAALIGVAPYDDDSGKRRGERHIKGGRRWVRNAIYMPCVGAATQNNPVLKAYYQRLLAKGKEPKVAIIACMRKLIVILNTMIARRQKWDPSRYVLS

SEQ ID NO: 272217 - protein, 345 aa, unidentified
MEAYAGIDLHSSSNFTAVIDETDKKIYGKQLPNKIDAVLSALRPFRENLKGVVVESTYNWYWLLDGLQEHGYRTHLANPSAIKQYEGLKHTDDRWDSFWLAHMLRLNILPEGYIYPKKDRPVRDLLRRRLLFVRHRTAHILSLQSMITRNLGTKMSCRAIKGFSGEDAESLFDSPYLVLAAKNSISTIGFLTEKIKKIEREVKMTLDFKKEFKCLLTIPGIGLILGLTIMLEVGDIRRFAKVGDYSSYCRCVRSERLSSGKKKGENNKRNGNRYLAWAYVEAANFAIRFSPDAQRFYQRKMARSNRIVAIKALSNKLARASYFIMRDQVPYNGNKLFKQSARVQQ

SEQ ID NO: 272218 - protein, 403 aa, unidentified
MNAVGIDVSKGKSMVTILRPFGEIVSSPFEIKHTSSDIHSLIKLIHSIEGESRVVMEHTGRYYEALAHQLSAADLFVSAVNPKLVKDFNNDSLRKIKSDKADSVKIARYALDKWQSLEPYSITDELRAQLKIMNRQFHFYVKQKTAMKNNLIGLIDQTYPNANTYFNSPTRSDGSQKWVDFVSTYWHVDCIRKMSLNAFVEHYQNWCKRKKYAFNKSKAEEIYTKTKELVPVFPKNEITKHIIRQAVDQLNSTSVTVETIRTLMNETASKLPEYSIVMQFKGIGPSLGPQLMAEIGDVTRFTHKGALTAFAGVDPGVNESGSYAQKSVPTSKRGSSNLRKTLFQVMDVLIKTMPQDDPVYQFMDRKRTQGKPYYVYMTAGANKFLRIYYGRVKEYLSVLPDPS

SEQ ID NO: 272219 - protein, 388 aa, unidentified
MDVLYQSCAGIDVHQATVVVCILHGPLTSTRPKREMAQFDTTTKGLKACHDFLSQFHVEAVGMESTGVYWRPVWHELCDDFELILAQPAHMKAIPGQKTDKKDAHWIAQLTRIGLLPRSFVPDETIQELRELTRQRKHYVESRNRETNRIHKILQSGGIKLTTYIEDIMGASGRNLLQLLIDETPITPRIVHQSVYTSLKRKVPQLLEALDGYFSAHHRFMLAQSLEIYDFYQKQIDCLEERMNGYLNLYERPVEILDSIPGIDLTTASVIIAEIGVDMNRFPTAGHLASWAGLCPGNNESAGKKRSTKIRHGNSYLKRCLCQTVFAAKKQKGSPLAERYCQIQSRRGPQKATIALAHQLLKIAYILLKENLTYQEFVLQKRLLETSQ

SEQ ID NO: 272220 - protein, 331 aa, unidentified
MHRNQFTVCVRLEHGRTYLREWRLEALSQFVKKLRPTDEVAVEVTGNTRLFYDAVRPHVARVVVVDTNQFRVITQSVKKTDANDAQLLALYLAKGLLPEVRMKDKQRGQIASLTQTRDTLVKLRTTLKNKENNILSARGINLAKEALSSEKKLDEVLALPFEELVRIELRVIVAQIRSLNGSIRELEKTIAEEASKLEGHESITSIKGIGKITGAILLSVIGDVNDFPDEHRLASYFGIVPRVSNSNETEHSGHIHKRGSKLGRTAWVQAALIAANYSPYLRSFYERVKARRGAGRAIIALARKFLGIIYRTLKNKWVFEDFPHFVLAEAA

SEQ ID NO: 272221 - protein, 417 aa, unidentified
MSDSSYTIYVGVDWADTEHRVIVLNAAREPLHDWVVPHSGAGLTAFAARLTELTDGDASRVAVALEVPRGPIVDALLERGCRVFAINPKQSDRFRDRFSAAGAKDDRRDARVLADALVTDRGAFCRLAPEDPLIIHLRELSRVDDELQQDARRLTNRLRAQLHRFYVQPLALCPGADEPWLWALLQLAPTPAAAARVREARLATLLRAHHIRRVTAGELRELLQRPALPVAPGVAEAASSHVALLLPRLQLLHEQRHTCGQQIERLLQQLSEGAGAADPQRQHRDVTILRSLPGVGRTVAATMLAEASQPLAARDYHVLRSQTGVAPITKASGGRRVVRLRSACNRRLRQAVYHWARVSTQVDPLSRAHYTALRHRGHSHPRALRGVADRLLRVLITMLRTGTLYDATRRRTQHLAA

SEQ ID NO: 272222 - protein, 451 aa, unidentified
MKKGVEKRKIIKMGTGLPVFNLHAAGIDIGGSLHCVAINDGKGGHEVKTTSSFTCDLKEIVDYLQSNGVTTAAMESTGVYWLPLYIMLEEAGIEPYLVNAKHVKNVTGRKKDDTDSIWIQKLHTCGLLQKCFQPDNEIRQLRNYTRQRRNLILLASDSTRRMQKALELMNIKIHTVISDILGISGMKMVKAIIAGERDPQILCTLCDSRIKASQEEIIKSLQGIWKEEYLFMLEQAVENYEFHQKQIKNCDEKIKQQLLKQVAIIKEGDITSLEETPKKKVKPRKNQFDFSISPYLKAITGVDLCKISGVSEVTVLGFISEVGVDMSKWNSYKHFTAWLNVIPNTKISGGKIISSKMMKKKNKAGQYLKQAASSLSSNKSPIGDYYRKMQARLGGKGAALCTAHKLARIIYTMLLKKTEYNAGMMIDNQEKLKEDKIKKLEKQLARLKQVA

SEQ ID NO: 272223 - protein, 462 aa, unidentified
MSKKRTYGSADVEHVDVAALVAMLTVGCIVAVDVAKTKFVAAIAKATGEVLKIVRFSHPVQTLTFLKLVEAIRDAKLSPRVVMESTGTYGDALRYQCHLRGVAIEMILPKHTHDFAEVVDGVPSTHDAKAAVTLVQLTLIKPGRRWTPDDDGRRDLRALLDQRSLQTKELDVYHGHLEAYLARHWPELLSLIDVREQRSWMTLLKAYPGPHRVAEAGSEAAKLLHTASHGRFSKEHIKAIVDAAGTTFGVPMRQSEEAMLRFIVEKMEEHTKGIDALDDELAQRVKEDDVASRLAAVVGPACAASIVSRLGSPTLFASAGALEKAMGLNLKVRSSGEKQGQLHITKRGPAQVRQLLYFAVLRMLQADPIVAAWCKARKSYDGESGKRKAIVAVMRKLVRALWHVAKGPRFDASKLFDVRRLDLTSASAESKVSPPTSVPQLAPTRAPSRSRRRAKDISQQVA

SEQ ID NO: 272224 - protein, 312 aa, unidentified
MTQDIAGIDVAKRSLDVCLLLGGEPRRFDNDTQGRKRLIRWLRRQRTRIVGLEPSGGYERAIIKALLAAGFDVRFADARRVRLLAQAHNAPAKTDAIDARFIARFIAETGGRAVRLDAAREALAELMAGRRNLIDVAQRLSQQAQSIDHATARRALARQAQKALTEAKMLEAAALAHVRSHADLAAAARLLMTAPGVGAIVAATLLAEMPELGALSGKQAARLAGLAPYVRESGAWKGRAACGGGRVVPRNLLYLAAMAAKRKCGAERAFFDRMVAAGKPKMVALVALMRKLLTALNAMLRDQTPWIAHAPA

SEQ ID NO: 272225 - protein, 406 aa, unidentified
MISVGIDVSKGKSMVCIMKPGGEVLKTPFEMLHSMESILHLVKLINSYDEEVRVILEDTGHYHLPVVTLLVEKGIFTCCVNALRMKKFCSQSIRRAKTDKIDAVHIAQFGLTYWDELSPVKPPEDVYQELKLLARQYYQIVSMLVKAKVNLSNLLDQTMPNIKDLMNDSPGNHKLTDFVKRYYHYGHILEMGEKRFTSDYCKWAKKQGYRVYERLASEILAVAQNGIPVLPNSPVTKAVVVEAVRVLHEIEISRDTILAQMQELAKSLPEFSVIREMPCIGDTLAPRIIAEIGDIRRFKNKHSLIAYAGIDAPPYQSGAFNATERHISKRGNSYLRKTGYEIMQCLIQHKPIGDPVYDFICKKRLEGKSGKEAMIAGLNKFLRIYYGRVTELYKEINEQLIFGSYL

SEQ ID NO: 272226 - protein, 345 aa, unidentified
MMVTLGTDAHKHSHTVVAVDEVGAEIATLTVKATPQGHLRLVKWSARWGQRLWAIEDCRALSRRLEADLLAAGERVVRVPPKLMAGARRSARTRGKSDPIDALAVARAALREPDLPTARLDGPDREIRLLVDYRESLVKDRTAAQNRLRWRLHELAPGYDPPAGSLDRYKTLTAIDELLDDHHSVVADLARREVSRVRELTREANQLGRDIAARVAVLVPSLLAVPGCGALSAGKLVGEAADITRFKSRDAYAMWAGTAPIPVWSANNQRFRLNRGGNRQTNAALHRIAVTQIRMHPDAQAFIARRLGNGSTKREALRALKRKLANVVYRAMLADAQQPALAKAA

SEQ ID NO: 272227 - protein, 345 aa, unidentified
MEPMYYIGLDVHKRMISYCVKESSGKIHSEGSIPATRLELDCWLKTLPQPWSAAMEATLFSGWIYDHLKPHAAALKVAHPLMLRAIAAAKKKNDRIDARKICDCLRCDFLPECYMASTEIRERRRTLRYRNLLARQMVQMKNKIAVLLMAAGVSYNKQRLHQAGYFRELLATNPDIDEGLCSLLRVCRETVVRLQRTESALVRSLERDSLLMERVERLMTIPAVGPITALTWALEVGDVQRLSSIKKAISYCGLCGAERSTGNTVIRTPLSKQRNKHLQTTLIEAAKMAPRISSDLAALYDREKQKGNANRATLAVARKLVAYLVAVDRREKGFLVVKNENRTAA

SEQ ID NO: 272228 - protein, 341 aa, unidentified
MKITTIGIDLAKNVFQIHGADERGKAVLKKQLKRDQVVPFFANLVPCKIGMEACGSAHYWARKLQALGHSVQLIAPQYVKPFVKRNKNDAADAEAICEAVTRPNMPAVPIKNASQQAILSVHRARQGFVKARTAQANQIRGLLAEFGIIIPQGISHIAKRVPEIIEDGENELPGSFRLLIQRLVDHLKVLDQQVGELEREIQAWHRENEASKKLAKIPGIGPMTASALVASVGNARSFRNGRQLAAWLGIVPKQHSTGGKATLLGISKRGDTYLRTLLIHGARAVIRVAERKPQPDAWLGKRLTRRNKNVAAVALANKNARTIWALLAHDRAYESDYRMAA

SEQ ID NO: 272229 - protein, 307 aa, unidentified
MNTYVGIDIAKAELVAHALPQEQQRSFANTAAGLTELVCWLQEIGSTRVVFEATGGYERALLKALFDAHLPAERLSANRPRELARALGLKAKTDAIDARVLAMAAQLLPASPSKPLPEKTALLREWLQARSALVSERDAHRRRIKQLESAPVQAVLKGCIARLQKQIQQIEKTITKLLAETPDRLEKAPGLGPILRATLAARLPELGSVNRRQIAALAGLAPYNRDSGLWRGQRHIVGGRADVRRVLYMATWSAIRCDPDIGNCYRRLVEAGKPKKAAAVACMRKYLTRLNAMKRDNAPWKVVPMTA

SEQ ID NO: 272230 - protein, 411 aa, unidentified
MEGLSPLHKVVAGIDVHRMLHVITVLVENEDGALTKHQQSFGGFKRDMKAMVLWLLELEVERVVMESTGIYWKSAYSHLERAGIFAMVVNAHFIKHVPGRKTDMCDSEWLAVLARFGLVRGSFIPPKDLRELRLVSRYRRKLSAMLASESNRLHKTLDDAGIKLGAVVSDIKGVSAREMVAGLIAGKTIDDLLDMARGSLKSKRDDLAASLDGDLSSRHLFILAELHEHVIQLEQKRAKIDAYLIEAMQPYQWAFNLLQTIPGIDAIASAMILIEIGDDMSQFGDADRLASWAALCPGNNESAGKRKSGKTRKGNAIVRYILCECANAARNTKSSLAAKYRSLMARKSHKKAIVAIAHKLIRIIYFMLSRHEPYCDPGVDYEAMSAQKNAPRWIKALKKIGKFPVTKPALA

SEQ ID NO: 272231 - protein, 431 aa, unidentified
MKKPASSVIKPTPLLYAAYIGIDWADQKHDICLYDPTTEQFEFSIISSQPEAIATWAEGVRKRFNGGAIAICTEQKRGPLIYALCKYEFLVLYPINAQTVAKYRQAFAPSRAKSDRSDAQLLVELLLKHNDKLQAWQPGSAILRSLQQLVENRRMLVAEKVRLTNRITAALKGYYPQVLDWFEDKDTQVFCEFLTRYPSLNAAQVASKQELEQFFKSHHVVQAKTIGRRLEQIQQGVALTEDVGIVEPLQLLVTALIAQLRVLLPSITTFDTKIEELFNSHSDAELFAALPGAGPHLAPRLLVAFGEERTRFQTAQDLLRYSGIAPVKESSGQKSWVHWRWSCPKFLRQTFVEWALQTRKHSFWAEAFYQMQRKKGKTHHGAIRALAFKWIRIVFRCWQDRVPYDEVKYLMALQRKGSPLVQNLALTGETK

SEQ ID NO: 272232 - protein, 334 aa, unidentified
MALELLAIDLGKRAFHIYGIDTDGVILSRKASRAKLAEVVGDLGPTAIAMEACASAHYWARCWLTAGREVRLINPRFVKPFVKGSKNDAVDAEAIFEAAMRPTMRFVPVKSTDQQDLQSLHRARDRLICQRTALINHTRGLLAEYGVVLPQGPWRFMAQAPTAVAGADLSDLARAIFGELMDQLDDLDRRIKKLDAMIVALCRTNETCRRLAKLPGVGPIIATAIVGSVNDGRQFRSGREMAAWIGLVPRQYTTGGKPRLGGIGRRANHYLRRQLIHGARAIVSRSAKHDDRQSTWLKALVARRGFNRTVVALANKTARIAWVLLSRKEEYAAP

SEQ ID NO: 272233 - protein, 457 aa, unidentified
MGDDVLVSVDPHKASNTLAVMDPVTKTVIARQRFMNTAVGYRRLREFAGGWTHRRWAVEGCHGAGRALAQRLVGDGEMVLDVPAKLAARVRVYSQGHGRKTDADDAISIGLAALNSTRVAVVRRDDTLVSLRLLCDRRDELGGLRTQAVCRLHRLLCELTPGGTHRGLRASRAEQLLAKLRPVDPVDVVRCQLAHQHLDDIRALDAKMTAVRAQIAALVDGTGTRLTELYGIGPVIAGRILAEVETIDRFPSKDHFASYNGTAPIDASSGEQVRHRLSRAGNRRLNHALHMMAVTQIRQPETIGRRYYERKRLEGKTPKEALRCLKRRLSDVVYWQLVADRRATITQCGSATTPTRTRPTSTSATTPVPRTAPPRRPPHPTASTGSSHSTGKTAASSASKSSTPAVGSPKTSSTKQKTRAEATRKPRTNSAAVPDRRPTSAAAAGVKAGAATRRARP

SEQ ID NO: 272234 - protein, 343 aa, unidentified
MKISRIGVDLAKNVFQLHGVDRRGEVVFKRRLRRDQWLRYVFANTEPDCVIGMEACGGAHHWARVLQSRGYTVRLIPPQFVTPYVKSKQSDANDAEAICEAMSRPHMRFVSVKAVEQQDIQATHRIRSELMKQRTAKAQQIRGLLCEYGLVVPTRLTTLRKAIPGWLEDAENGLTSRFRALLHGLWQDLLRLDDRVSELDGEIKAIAKADPVAQRLQQLRGVGPLVATALLASVGDGKQFKKGRQMAAALGLTPRQHSSGEKTRLLGISKRGDPYLRSILIHGARAVVSHAKHKDDHLSEWVTQIAQRRHTNVAAVALANKTVRIAWSMMRNESDYDPAFAAG

SEQ ID NO: 272235 - protein, 419 aa, unidentified
MTQEQNTTAISIMHPVCCGLDVHKMKISACLITIDSDGQEQSEIKEFGAFTDDLISLRTWLTTNNCPIIAMESTGIYWRPVHNVLEHHLEIILVNARHIKNVPGRKTDISDSKWLASLLKHGLLRGSFIPEKDIRHWRELTRQRRKVTESLSDYKKRVHKVFETANIKIGSVVSDLFGKTGMNLIERLCDENLSLVEADISECACGRLKSKSTELYRSIQGFFEDHHRFELCSLMRIISILGSEIGIISDRISWLMTSHNEVISRLEKIPGVGTRSAQIILSEVGYDLKTFPNTASFASWAGLCPGNNESAGKRKSGKTSVQKHPFKTIMVEVAWAAVRTKGCYYKDKYYRLRSRRGAKKAIIAIAHRIAKAIFYVIKHGEVYRELGEDYLKQKRQHKKLKSLRQQASALGLQLIPVEG

SEQ ID NO: 272236 - protein, 329 aa, unidentified
MGIDVSKKKLDIALLVNGKVKSKVLDNTPEGYEELLVWLNKSKALKADLHVCMEATGVYYEAVALALVEADLQVSVVNPGCIKGFGRSENIRNKNDAIDAGLIARYCLAMKPAPWTPPPLEQRQLRAWSLRVQALKDIRQQEENRLEAHAITGMADVAAHVKEHIKWLDTEIKKLETEIDDHIDRHPGLKHDAELIASIPGIGATTVVRLLGHLGDIRRFESAKAFAAFLGVTPKQRSSGTSIRGRTMISRSGSSTLRAALYMPSLVARRHNPILNKFAERLLSKGMAKKAVICAVMHKLTHLIYGVIRTEKPFDPDYLPRGLAIRDGI

SEQ ID NO: 272237 - protein, 340 aa, unidentified
MQVRHIFVGIDMGDKNSVARIAVDRDKSERFGFLNTRQGRARLFREAKRRSEQADGATIVMAYEASSCGFVLSDEAEALGIKCRVLAPTKMEKSVEQRQHKNDDRDANDVLEKLRGHVLAGNRLPTVWVPDLKTRDDRELIRTRLDLTEKQTQIKAQIRMLIKRHGLEKPSGLGAGWTIGYRRWLQALRESEQLLGWSTRQALDSLLRQLQCLEAEIDRVQKPLEELANEPRHKPIIEELRQEAGVGLLTAMVYRTEIGQAGRFGRGRQVGKFVGLTPTSHESGQQSDRKGHISRQGPPRLRKVLCQASWVHIVHDARAGRIYQRLVSRNPKRRRSHSSP

SEQ ID NO: 272238 - protein, 343 aa, unidentified
MEAYAGLQFVGIDLHRRRTVIVRTTDAGEVLEAVRIVNDVQRLASVMARAGQCPEVVLEATYGWYWAVDALQAGGASVHLAHPLGVKAFEYRRVKNDFRDAQDLADLLRMGRLPEAWIAPPPTRELRELVRHRAKLVGLRSHCKAEVHAVLAKCGVQVLMSDLFGVWGTELLDGLDLPAPYAARIASLRRLMDDVDFEITLFAGIIRGRMAQEPGYTAVQKIPGIGPTLAAVLVAEIGDITRFASAQKLTCWAGLTPKHHESDTHVRRGRITKQGSRLVRWAAIESVKTVSKTSEVGVLRERVADRRGRNIGSVAAARLQLEFVFYALRDGHVRALEHLPRVA

SEQ ID NO: 272239 - protein, 385 aa, unidentified
MSQFSGFPQAAVDYDSTIIGALELSEKKWVLGVHLPGVDRHSRHVLDACGDTLVSFVERLKARCASAGRKIARVILTHEAGRDGFWLARFLARRSIEVHVMQPSSLPVDRRARRAKTDMIDVEMLLRTLMAWLRGEPRVCSMVPIPSEADEEARRAYREREDLTRERRSIVNKIDGILATLGVKGYKALRRDRREQLNCARQPGGDPIPQKARARIERLLDRLELVLELIDQVELARDAVLKKDAPADEAERMIRSLTDLRSVGPDIATLLVREAFVRHFRSRRALAGYVGLGGTPFSSGGSERDQGIGKDGNRRVRAAMVELAWMWLRWQPDSALSMWFRGRVGAMGGRIRKIMIVALARKLLVALWRYVTDGVVPDGAKLKAG

SEQ ID NO: 272240 - protein, 507 aa, unidentified
MAAVMIGVDPHKASHTAVAISAAEEPLGELRVRACAVQAERLLEWAAAWPQRTWAVEGAGGLGHLLDWQLLSAGERVLDVPPKLGARVRLLAAGDVNKNDPNDARSVAVAALRSPGVREVRPDDHAAVLKIWSKRYRDLGRSRTQVVCRLHAVLCELVPGGISKAITAGQAAQVLGSVTPPDAVAAARCELAAAFIEDLRGIDARIRETRNKLTAAVQAAGTSLTGLFGVGPVVAAVVIGDVRDVSRFAGRDNFAAYDGTAPIEVSSGQRKVHRLSRRGNRRLNHAIHMVAITQVRHRHSEGRAYYDKKLAEGKTPKEALRALKRQISNAIFACLQADARRAAARAGGPGGQPGNDCVASAAGLHPGHRLFGQATPGPVTTLRPRPAPQPPALPGGTDTVPGAGLAIPRSLPPCRRRRRRSRWSARSEARTNDLEARRDDGHTRPRGRPRAEVRWRSRSARRAPHKPGKRPTEPLDTKRHSFGTLWCAVPMTMDAAPKGAFCASTRR

SEQ ID NO: 272241 - protein, 351 aa, unidentified
MEYIAFDSHKRYTLASVEKPSGGQSCELRLAHQPGSIRQFLSRWTPGSPVAVETIGNWYWIVDEIEEAGMVPRLVHARKAKLMMAMVNKTDKLDARGLNRLQRCGTLPTVWIPSRELRDQRELPRTRMVFSRTRTRLKNRIHAALAKYGLSIPQVADLFGKKGRELLPQVLAQLPPHTLFSTEQLLAQLDTVEKQIQQFERRIKEVFAPSVELARVMSLPAVGFILGTVILLEVGKVDRFPSAAHLASYAGTTPRVHASGGKMHYGQLRPDVNRYLKWAFLEAANVICLNHRHLPQRHVHRLYQRVASRKGYQKAIGAVARHLAEATYWILKKEEPYREPQASKKVSSTKG

SEQ ID NO: 272242 - protein, 342 aa, unidentified
MQKIATIGLDLAKNVFQVHAATADGSTVFNRKLRRSEVLAFFAKVPSCLVGMEACSSAHYWARETRALGHDVRLMPPAYVKAFVKRGKTDAGDAEAISEAVTRKTMRFVSVKSAEQQAAAVLVKSRTLLVRQRTQAINALRSHLAEFGIIAGAGVTKVAELIAVVRDGSEQRLPLVARQALQEIARQVESLAVQIKRLDRQIVVLSRQDADTRRLTTIPGVGAIIAASVKAFVPDPAGFRSGRHFAAWLGLTPRPHSSGGKERLGRISKMGNPLLRSLLVVGATSVLRVARNNPQASPWIAGLLARRPSRVATVALANKMARIIWALLVRGSVYRAPSIAQA

SEQ ID NO: 272243 - protein, 357 aa, unidentified
MKYIGCDFHPSFQQIAMLDQETGELVERRLLHTEEARVFYAGLQGPVLVGIEASGNTHWFESLLARCGHQLWIGDAAAIARQNGRKQKHDRRAAELILKLMVEDRFPQIWVPTVVERDLRQLLIHRQHLVRMRTRVKNQLQHIALNQGWQKKHKLWSEAGLALLRSLELEPWTQQRRDTLLEMLGELEEKIRPLDQAVEKEARACEAARRLDTHPGVGPVIALATVLTMGEVGRFADSRSWVSYLGLNPSEASSGERRRLGGISKQGNPFLRYLLVEGAVSATKGDKDLARMYARLKAKKHHGVAKVAVARKLAVRLYWMARTEKSYPEVVRTQGSQSHLVAEVRADRLNRPPASRQ

SEQ ID NO: 272244 - protein, 343 aa, unidentified
MKDTIYDHYIAIDWSIKNMAIARMTKKSNKITAIDVPSDIEDLQAYLKNLRGTKILAIEETTTSQWLYTELKEYVDRLFICDPSRNKLLNEGPKTDKIDATKLVRLLKAGLMKEIYHSTDKFLYLRRVVSGYEDLVKAGVRLKNQRYALLRACGKSGNEKIGSTLDFQGEQFVLKCLDRQINAYEEEKEGYEKEFEKLARKNLEIKHQKSLPGIGTINAVKIVARVVTPHRFPDKGHYLSYTGLIKLDRISGGRSYGKKNPRYSRQLKSVYKSGILAAIGGNNPINDYYEHLIQEKNYPDHNARQKACRRLATLSLGVFKSGKKYQPFRRNDVKGSKESTSGL

SEQ ID NO: 272245 - protein, 345 aa, unidentified
MNELYEGQQFVGMDLHRRRSVLVRMTETGEHLETVRIVNTRDRLAEVMTRAGESPEVVLEATYGWYWAVDALAELGASVHLAHPLGVKAFSYRRVKNDQRDAADLADLLRMGRLPHAWIAPPETRELRELVRHRAKLVAMRSRCKAEVHAVLAKGGVWVPMTDLFGVEGNLLLDTVTMPAPYLARIASLRRFVEAFDAEIDLFTGLAQRRLTHDAGYTAVQQIPGIGPVLAAVFVAEIGDVHRFDGPAQLTCWAGLTPRHHESDTTVHRGHITKQGSRLVRWAAIESVKILPAASRIGAIRDKVAHRRGNRNIGAVAAARRQLELVFYGLRDHHVRALHRSPRAA

SEQ ID NO: 272246 - protein, 347 aa, unidentified
MNFYNNMHPYYCGIDLHARLLYVCIIDNTGLILVHKKIKDDPDALLKLLKPYIGDIVVGVECMHCWYWVADFCKEHTIDFILGHALYMKAIHGGKAKNDKIDSHKIAKLIRGGNFPLAYVYDKDMRATRDLLRRRTKIVRHGADLKAHVANTASQYNLPAHNVNLKNVCDREKMRYYFPDPVVQRSINLNMAILDCYHKELKPLEHYIEQMAKQHNPVHLNILQTINGIGRILALTIIYEIGDINRFSSVQKFASYSRLVKCKAESAGKTYGTQGNKIGNAHLKWAFSEAAVLLLRHNHNANKYLEKLQKRMSKAKALSALAHKLGRCVYFMLKKETVFDEAKFLKS

SEQ ID NO: 272247 - protein, 344 aa, unidentified
MLYVGLDLSRKRIDYDARLADGALFERGAVPPVGDGLRGLVARLGDAPVVAVIESMNGARFVHDRLELHGWDVRIADAVKAKGLAPLACKTDRIDAWVLAELARRDLVPEIWLPDPAVRAERERARFRLHLVRHRTALKNRVHAILIAHGIPNPTSDLFGVEGRRLLERLELPEPWRSTTAASLALIDVLDEQIAECEQELRALGADHPYIPLLMTVPGVGWVLAYTIASEIGDIGRFQTPAKLVGYSGLTPSVDQSGARDRRGPLRKNGPDHLRWALVEAAHTASRHSLYKPIVERHRERHGRKRGSKTAALTIARKLTHSIWHMLTTHQPFAPAGATPSLAA

SEQ ID NO: 272248 - protein, 384 aa, unidentified
MNESITLFVGLDVHKESIDVATAQAGRDGELRHVARIRGDVAALDKTLRKLRSTGHQLHVVYEAGPCGFVIHRHLTKQGVRCEVVAPSSIARPAGERIKTDRRDALLLAKLARSGDLVAVRVPDEADEAVRDLVRAREDAVREQRNGRHRLKALLLRNGIPYAARANWSSAHLRWLASLRLPQPGQQIAFQEYLHSITESSARIGRLEQAMRDTLPSWGLAPVVQALQAMRGVQLIAAMTLVAELQDFQRFPSPRQLMAYVGLVPGEHSSGAKRRQGSITKAGNSAARRMLVEVAWHYQHPARVSPIIAKRHDGLPKSVTDIAWKAQQRLHTKFVRLTARRVMKNKAVVAVARELAGFVWAIARDVETSGWKGIAATTRLATTP

SEQ ID NO: 272249 - protein, 353 aa, unidentified
MKQYIGCDSHKRYSVFVTMDEMGRTGPAERIEHDSIEFRRYLEGLPSGAPVAVEASGGWYWLVDELEKAGLDPRLVNPVEARKRMPGKHKTDPIDARGLAMLLRNGTLPEVWIPPAKLLDLRGLLRARLSLRQQGTLLKNRIHAALARYGIRPEKPRQDLFTGKGRVQLSVSVGRLPLETRLATLHEWELLDQREAHIQELEQRMRERIGTIGWVRLLKSLPGVGSILGATIYLEIGDVKRFASAAHLASYAGLVPTIHSSGGKHWQGRTAQAANHYLKWAFIEAANCIVTKKEKWASQHVVQLYQRLKAHKCHGKAATAVARHLAESSWWILTKQQVYREPAPLTVSSSKNG

SEQ ID NO: 272250 - protein, 392 aa, unidentified
MYIIGIDIGKNHHEASIVSPKGRQIGHSLRFATTHKGADSLISFIFKNIGDSPCVFGMEATGHYWYPIYSFLKFKGYTIYVINPIQSDSLRKMYIRQTKNDSIDSFLIAEVIRFGQFEATSMADETILAMRQLCRYRDSVVSSGTEIKLRISTIMEQIFPEYGKQFSSLWLGTSMGILEKYLTPENIQNAPIDELFEIIKDKSHNNLTIKKSVSIKDAAADTFGIKIAQDAFAFQLKQLIDRLNFLNEQLEALDHEILSYYEKFDCYLHTIPGIGMIAAATILAEIGDIHRFKNSSALVAFAGIDPTVRQSGEFNSIHNHMSKRGSPYLRHAIFLAATTCSFHNSPLNAYYKKKREQGKHHLTATGAVARKLTTVIYAVLRNGKPYEPKSFC

SEQ ID NO: 272251 - protein, 448 aa, unidentified
MPKRNRIASLPVIEPNAAGIDIGATEIFVAVPADRDSEPVRCFPTFTVDLERVADWLQQCQIRTVAMESTGVYWIPLFQILENRRFDVRLVNAHHVKNVPGRKTDVADCQWIQHLHSVGLLRGSFRPADEICAIRSLWRHRDNLIELATIHLQHMQKALDQMNVQLHHVISDLAGSTGLAIVDAILAGERDPAKLAQLRNWRIRASEETIMKSLVGDYREEHLFTLRQSLESYRHYQDQIQNVDAQVKTMMQTVSSRVAEDEKPPKEKNPRKSPWRNEPAQLRDDLYRAFGVDLTQIPGVNTLTAQMIFTEIGPDFSRFPTAAAFCSWLRLCPDPKISGGQVLSSRTRPTKNRAALALRMGTQGLHRSQSYLGDCFRRMRARMGTPKAMTAAAHKLARIMYHMVTTQQEYDATVFQEQERRTQDRKRARLHAQAKELGLQLVPVEVVP

SEQ ID NO: 272252 - protein, 452 aa, unidentified
MAKLQKNEDIGKLKVQHSRCGGIDVGATLMQVCISVEDREHGSNRSFGTDTQSLRDIVNWLLGHGITHVAMEATGVYWIPLFNMLVKNGIEAVLLNAADVKNYTARKTDVNDAAWLMTLMSYDLVKPSFQIDELSRALRNCTRHRMSLVSTCSDCIRRMQKTMELMNIKLTEVISDIAGPTGIRIIEAILAGNTSPRDLAALASDRCKSSKEDIAGALEGTWEDELIFILGQHYRQYLLYREQTMQLDSVIEGNLKLLVERILKMNDGEVRTVIRSKKGTPHMKNRISFDIEALSVQIWGVNLMRIEGVSGITMLSLMGELGCNFVGSFKDAAHFCSWCNLSPCHKITGGKIISSKMKKRVNPVGLTLRNCAQTLANSKSPLGDYYRRMRSKGGGKYAVCATAHKIAAIIYTMVRNQQEYDPSKVSVNDRQWLEKRIKHHEKLLKKLKSMAS

SEQ ID NO: 272253 - protein, 340 aa, unidentified
MNATTYGLDVAKRVFQLYWVDAHTGEIVSRRFGRDDLIGFLAQRPAGRVALEACGSGHWWARKIQALGHQVVLLHAKFIRPFVQTNKTDAADARAIWTAVQQPEMRTVAAKTEDQQAMLALHRMRALLVKFRTMQVNQLRGLLYEFGVTFRAGRVAGLAEMRARMAELEDALPAMLFDGLQDQLKRINGLEHDIDQLERRIGTWHKQEAACRAIAAVPGIGRLTATALVAMIGDARTFKSGREFASFLGLVPRQSGTGGKLRLGSISKRGDPYLRTLLIHGARSVVCRTKVPTAWQAAIRARRPANVATVALANKMARTAWAILAHGRAYQKDYVSVRPA

SEQ ID NO: 272254 - protein, 387 aa, unidentified
MPQPNDLGRSLVALDQDSTLIAVIEMGQASWLIAAIVPGLNRHPLKKIAADEEQLLQVLRRWKKEAETAGRMIKRTAVAYEAGRDGFWLARWLGARGIEAYVIHPSSVPVSREHRRAKTDRLDTELLKRAFLGWLRGEPDHCSMAAIPTLTEEDAKRPGRERESLVSERTRIVNRIKGALARLGIRNFRPMLRNASQRLETVRTPEGVALPPNTLAELRRDMARLSFIKQQIKEVETARLERLQRAPGEGANAMVQLLTRVVGVGVETADMLVHEVFSRNLRDRKAVARYAGLTGAPDESGKRRRERGLAKSGNARVRRGMLQIAWGFLVHQRDSALATWYRARTADARSATRRTMIVALARKLLIALWRLATTGEVPSGLLLRAAA

SEQ ID NO: 272255 - protein, 319 aa, unidentified
MAQNDLVVAGIDVAKDKVDVCIRSLSLKRTFASTAEGRRELTSWLRRHKVGKAVMEASGGYERDWAKALRNAKIEVRIVDPKRVRSFAQSAGRLAKNDTIDAEMIAWFAETFDEARGQAYDAMREQLHQMVNARQALKEMQAKLENQGEHALPATVQQIHARIMKTIAVELVKIEAAISAMVQATPRFTELAEIIESVPGIGRTTSAALIAAMPELGQANNKIVASLLGVAPYDDDSGRRRGERHIKGGRRRTRNVFYMACLGAATQHNPVLKAFYDRLVAKGKQKKVALVACMRKLISILNIMIERRQKWDANRHALS

SEQ ID NO: 272256 - protein, 318 aa, unidentified
MNTKTKQNINVGVDTGKYQLDIYIRPLDIYFTVPNDDKGIKEAVKTIKKYKPERIVIEATGRLEMPFILACANANLPFTIANPIHVKRFAGAIGQRAKTDKLDAQLIAHYSEAIKPKLSQLKPDTMQAMSDLVTRRNQLLTMQTMEKNRLQIMPKALAMTIKPVLTLFNNQIKKIEEKIVKLIESCPEYQAKNTILQSMTGIGKIAAASIISNLPELGYINSKQASSLIGVAPMNRESGRYKGHRKIQGGRPQVRTVLYMAMMSAMQSNPVFKVTYQRLLAAGKPKKVAIIACIRKMIVILNSMLRDGVRWEAPKVNN

SEQ ID NO: 272257 - protein, 405 aa, unidentified
MEIFCGIDWSEAAHDVAVVDETGRLLARRRIADDAAGFTALTELLAGYAGRPERVDVAIETGRGLLVAALRAAGHRVFAINPKAVDRYRDRHGVAGAKSDPGDARVLADILRTDRDRHRPLPADSDLAAAVGVLARAHQDAVWARVQDANRLRSLLREFFPAALTAFADLTTNTALAVLAAAPTPTAAARLSRANLTDLLRVAGRGTRPTEAARLAEIFTVDQLRQPPVVEAAMGQAVRAIVRTLTAANQSISDLEAALAAAFDQHPDGEILRSLPGLGPILAARVLSEFGDDPTRFPDPASRRAYAGTAPITRASGRSRVVLARHVRNKRLADACYLWAFAALNRSPGARAYYDTRRAAGDRHNAALRRLASKLLGQLHHCLTTSRPYDEALAWPQPDTTPAAA

SEQ ID NO: 272258 - protein, 323 aa, unidentified
MATNDSIEIYAGIDVGKDYVDVCVLNAAGQHLWSQRVRRQSVALEKLAAKLGPQSCAVLEATGGLEALPAAVLETAGIRTTVENPAKMRHYALSHGLLEKTDRLDAGVLAKYAHERRPRPRRRRDAPQQAVAKLVTRRHQLVKLRASERTRLGWESDSFCRRSIGKVIDSLSELIEACEEQIRKQVQASPELLARAELLQTAPGVGEWTAYALLAWLPELGECNRGEIAKLAGVAPLVRQSGQWRGKMMIQGGRARVRAALYMSAMGTVRRDGYWYDFYLRLLTRGKEKKVALIAVAHKLLLVLNQMVARGCPWDGSYRRIAA

SEQ ID NO: 272259 - protein, 343 aa, unidentified
MEYGAIDLHTKESQIRIVTSEGRVVLDQRIATRRDRFTWLFGDRPAMRILLETGTESEWVAQHLESLGHEVIVADPNYAPMYGERTRRIKTDKRDVAALAEANRREIYRPAHRVSVAQRDVRRRLRVRTHLVGMRRQAISVMRAHLRAEGLRLPTGAAESLLTRYRKLDVPAALQAVFAPLVELLETLDPLIRQADQWAKQQATRDPVTARLMTAPGVGSIVALSFRATVDDVTRFRDAGQVSSYLGLVPREASSGDRRCRGAITKAGPGDMRTVLLQAAWTVWRTPSGSAALHAWVRRLGERRGRKVAVVGLARRLARILFAMWRDGHLFQPTRLTRSTVAA

SEQ ID NO: 272260 - protein, 439 aa, unidentified
MVRKKSNTTQLTVLRPNAAGVDIGATSMFVALPPDRTEEPVREFGTFTADLNELADWLIKHGVTTVAMESTGVFWIPLFQILESRGLEVFLVNARHAKTVPGRKTDVRDCQWLQYLHSVGLLSASYRPAQEIAAIRSVYRHRQNKVRAASRCIQHMQKAMQQMNLQLHHVISDISGETGLAIITAIVQGERDPHKLAKLRNRRIKASEERIFRALQGDYRAEHIFVLKQALSEYQFHQKQILEIDQEIARITAEFNRTSAENIKASFTGAARENFMRQEMKQAFGVDLLMIPTFGIETVLTVFSEVGPDFSKFRSAGAFASWLTLCPDPEKTGGKVKRTKTRQSKSRTAQALRNAAQSLAREKGYYGELYRRLRAKMGPQKAITAMAHRLARLLYHLVTTKQEFSESKFAEAASRHRVRRESSLRRAASALGYNLVPAT

SEQ ID NO: 272261 - protein, 342 aa, unidentified
MQITTIGLDIAKNVFQVHGIDAKEKVVVRKQLRRSHVITFFKALPPCLIGMEACATAHYWARELRKLGHEVRLMPAKDVKAYVKRNKNDAADAEAICEAVRRPTMRFVQVKSAEQQGQLMQHRTRDLLIRQRTQSINAFRAHLAELGIVAAQGDAGVTELLAIVADEQDTRLPIDARASVIVLAAQLEAMRTLIGAIEKRIKTQHRSNETSQRVETIPGIGVLGATAIVATAADPKVFRSGRDFAAWIGLVPRQDSTGGKQKLGPISKQGDRYLRRILIVGAIAVLRRAQENPGKYPWLTQLLARRPFKVVAVALANKMARTAWALMVHGGTYRAPELAEAA

SEQ ID NO: 272262 - protein, 386 aa, unidentified
MRQATTLPAPQRTCSRGDCATLFVSLELSRSTWVATALAPGSSKMSKYTLVGGDGHKLLDLLARLKSRAEQRIAAPVKVVTIHEVGLDGFWIHRLLEANGVESHVVDPASIAVPRRHRRAKTDTIDGETLLRTLMAWQRGEPRVCAMTVPPSPSEEDCRRISRERAKLLQERVRHTNRIRGLLFGQGITNYNPLHKNRRKNLEQLRTGDGRSVPAHLKSALLREIDRLELVLRQIGEVETERDEMLQLAQPSSPAALLMRLKGIGAEFATVLYLEGLFRRFDNRRQLAAYAGLTPSPWKSGSIDQEQGISKAGNPRLRTTMVELAWMWVRYQPASALSCWFRQRVGSKRGRIRRISIVALARKLLIALSRYINHGEIPAGAVVKPV

SEQ ID NO: 272263 - protein, 318 aa, unidentified
MQTSIVFIGVDVGKFELQVAASDGEIVTGVLPNNRSSIVGWLKRVPATSVIAMEATGGYQELLARTAHERGFEVYVLIPTQVHHYAISLGNRGKTDRLDAAVIAQYIAQHHKKLHRYEPISPELQEVRALQALRSTVVRVGTSLRLSAQRHGCVSSHQKKALASLTAWSEQLEREMIAKIKAQSDWAKTYGLLTGICGIGPITGVALTSLFSRIDFASSDAAVAFCGLDPRPNESGRKVGRRRLSKQGDKAARTLLYNAASSAARTAQFKDYYAMLRARGLASTAALVIIARKLLRIAYGVWRTGQPFDSEKLRPTTA

SEQ ID NO: 272264 - protein, 411 aa, unidentified
MLLVGIDWAERHHDVCLMATDGSVLARERITDGMAGVARLHELIASWVEEPAEVVVGIETDRGLLVGALVAAGYQVIAVNPLAASRYRERHTISRAKSDRGDARMLADLVRTDRHHHHHHHHHRPVRGDSGLAEAVKVLARGHQQLVWARQRQANIVRSALRAFYPAALAAFGSDPGGRDAVAVLGLAPTPELGRRLSEAELVAALRCAGRRRQVDARAAAIRAALVGQQLEAPPVLAAAYGQVVAAAVAVIANLSEQLAGLEAALMAAFTAHPDAGIVRSQPGLGVVLAARVLAEFGDDPNRYASARARKAYAGTAPITRASGLRQVVLARAVGNRRLSTACHPWPFAALTGSPGARRSYDAHRARGATHHQALRALANRLVGILHGCLRHPQPYDEQLAWPTSTASAAA

SEQ ID NO: 272265 - protein, 391 aa, unidentified
MIYVGIDVAKDKHDCFITNSNGEVLFKAFTISNSQDGFNDLYQRIESVMEDITKVKVGLEATGHYNYNLLGYLIDKGLTTYVINPLHTNLYRKSLSLRLTKTDKVDARTIAYMLMSDVNLKSYSDTSYHNEELKSLTRYRFDKVKERAKLKTSVSRLVCILFPELEKLVPTLHMTSIYALLSEFPGAKYVAGAHLTRLTNLLSDASKGRYGKDTAITFREAARASIGSNMPAKSLELKHTIKLILELASEIDEIENEIKIIMDEINSPILSIPGISYRMGAMIIAEIGDFSRFDSPDKILAYSGFSPSTYQSGQLDSAYSHMEKRGSKYLRYALYNAAKYVCHWDSTFARYLTKKRAEGKHYNVAISHAVKKLVRVIYHLVKSNQQYIKVA

SEQ ID NO: 272266 - protein, 409 aa, unidentified
MERQLERCCGLDVHKDSVAACVRLGGRTGKPEQYVQTFGTTVAELLVLHDWLAAHGVTHVAMESTGVFWKPVFYALESDFTCLLVNAAHIKQVPGRKTDVKDCVWIAQLLEHGLLRGSFVPPAPIRDLRDLTRYRKALIHDRTRVANRLHKALEEAGIKLASVASDILGVSGRAMLAALVQGTTDPAVLADLARASLRRKLPALRQALASRFRPHHAFVLGQLLAHLDYLEEAITTLSTEIERVMAPFAEPLRRLDTIPGINQRTAEGILAEMGPDMSAFPSAGHLASWAALCPGQHESAGKHKSGKTRKGNRWLRTALIEAAAGASRAKNSALQARFRRVLRHRGPKKAVVPVAHALLRMVYHVLADGTVYREAGADYYDRHHSQRITRRALQTLERQGYRVTLEPAA

SEQ ID NO: 272267 - protein, 398 aa, unidentified
MEVMDAAGRRLSAAKLPEGIAGMARFHAMIAAQLDPDADLDAQAGQVLIGIETDRGPWVQALIAAGYQVYAVNPLQAARYRERLGVSGAKSDPADAHLLADMVRTDSHQLRVVAGDSDLAEAVKVVTRAHKTLIWERTRHTLRLRSTLREYFPAALAAFEDLTDADTLELLAKAPDPASAARLTTTQIMAALKRARRHHRDRRAGEIQAALRTEQLGQPAVVAGAYAVAVRAQVAILGVLNEQINLLQEQVEAHFGRHPDAEIYTSQPGLGQILGARVLAEFGDDPTRYGDTRARKNYAGTSPITRQSGKKKVVLARYVHNDRLLDALGGQAFAALTRSPGARAYYDKQRDRGLGHRAALRQLANRLVGILHGCLKTGTRYDEATAWSHAQQDQQVAA

SEQ ID NO: 272268 - protein, 349 aa, unidentified
MRFYTKQHQFYCGVDLHASAMYLCIINALGEVVLHKNIPTKPKSFLRLIKPYRENLVVGCECMFSWYWLADLCEAEGIEFVLGHALYMRAIHGGKAKNDKIDSYKIAALLRGGTFPLAYVYPKGWRATRDLLRRRNHLSRKKSELIAHIQNTATQYNLPDRLGRITRPSERDDLLDKFPDPVVRRMVLLDLEVVENYERLLGSLERDLERMTQHHAPVEIALLKSIHGVGRILGMVILYEIEDIARFPRPQDFSSYCRLVKPVKESNGKKYGYSGKKIGNAHLRWAFGEAVVMMLKGNERAKAALQRLASKHGKGKALAILSHRLGRAVYYMLKNQVPFDQEKFLRKIT

SEQ ID NO: 272269 - protein, 324 aa, unidentified
MDIFPLGIDVSKSKFDVALLLDGSKLHHRVFLNSPAGFQQLSTWLSKRKVNSVHACMEATGTYSEALALYLLDAGHTVSVVNPAIIKAFTKTEMTRTKTDKTDASLIARFCHLHQPPAWAPPPPEISELQALLRRLEALIDMRQQEVNRLAAGIQAESVKNSVTDHIAYLDEQVAQTQSLIKDHIDQNPSLRQQRDLLSSIPGIGDLTAAKLLSEIIDINHYESARQVAASAGLVPRHNESGSSVRGRAKLCKAGTPRLRKALYFPAIVATQHNPVIKAFSERLRERGKCPMQIIGAAMRKLIHIAYGVLKSGKPFDPNYGKTA

SEQ ID NO: 272270 - protein, 368 aa, unidentified
MHESITAYVGLDVHKDSIAVAVAGNDREVPHFVGTVRPEFKQVRKALSRYGSPSSLQVVYEAGPCGYTLARQLLADGFGCQVIAASRITRSPTERIKTDRRDALTLARLARSGDLIAVRIPDERDEAVRDLSRAREDAVRACLKARQQLKAFLLRHGRPLRGSKPWSPTGELYLSKISFPHPAQNIAFADYRQAVLDTHARVERLTEALRAQCENWRMQPLVSALACLRGVDFLTALILVAEIGDFTRFAHPKELMGYLGLVPSEYSTGEHHHRGDITKTGNAHARRVLVEAAWNYRFPARLSHKITRRQDGQSKPVRDIAWKAQLRLGHRYRRLQSRKLHQNKIIIAIARELSGFLWDIARHVPLAA

SEQ ID NO: 272271 - protein, 341 aa, unidentified
MEYYAGIDVSLECSSVCVVNASGKIVREAKVASEPEALIGWFGSLGLGLERIGLEAGPLSQWLYAAMREAGLAVELLETRHVRDAFKAMPVKSDRNDARGIAQLIRLGWFRPVHCKSMDAQEVRAVLTARKLIQTKLLDVENSLRGILRGFGLKVGKTTARSFAGRVQELVAGHPKLEAIGEALLSVRAVLQREFNAFERRVRAMARLNARTRLLMSTPAVGPIVALTYAAAIDDPARFKSSKQAGSHFGLTPKKHQSGETDRSGRISKIGDASVREALYQAAHVMLTKPTKGCSELKGWAMRIARRAGMNKAKVALARKLAVILHRMLANGTPFNPAAAA

SEQ ID NO: 272272 - protein, 325 aa, unidentified
MTYIGIDISKATFVAAFTQGNGYRTETFQNDSKGIRKFISKLDPAIHHCVMEATGNYCFLLLYLLDKGGIRASLVNPKKIKNYARVMMSVTKTDSKDACLIADFGERFKPEPYKFPSEQIMMLKQKKTVLRQLQKQLTATMNLLSSLEPLPVKDRKCLNSLKQTVTFLEKQIRYMRKEMEEVVTDVFDRQLKLLTSIKGIGVTLATALIIATGGFTYFDNAKQLSRFIGICPTIEQSGTSINIRGHINRNGDETLRSMLYVAAWSASQHNTECNKLYQRLRGRGKPGKVAMVAVANKLVRQAFAVVISNKSYIDGFVSTKPDTAV

SEQ ID NO: 272273 - protein, 350 aa, unidentified
MKIIGCDFHTRYQQIAMMDEATGELIERRLDHESGEAHTFYRDLQGPVRVGIEATGPIRWFERLLAELGHELWIGDSAKIRASEVRKQKTDERDARLILDLLLAKRFPKIWVPTPAERDLRQLLWHRHKLVCMRTMLGNQLHALALSEGLCRKKKLFTKKGRVELLHLGLGPWASRRREELLKLLDQLEPTIAELDRAVMEEAQRREDAVLLMTHPGIGPVTSLAFVLAIGPIARFARSKKIASYLGLNPSEESSGGRRRLGAISKQGNTMVRWLLIEAVYPAVRKDPALRQDYQRLKFRRGHAVAKVAIARKLAVRMYWMLRSGAEYAQLVRRQGSPGATLMDASSSLG

SEQ ID NO: 272274 - protein, 350 aa, unidentified
MEYLGIDWSYRRAAWCSLSDAGAIVGEGAVPADADGLARLVLERGTDVRAVVEMMSGAIWVRDQLAAAGWRVQIAHARKVRDVAPLACKTDKVDARVLAELARRDLVPELWIPSLDDRALRERLRRRMHLVRMRASAMNRIFGLQTQWGLRISLQRLRSADAMTLLERQGMPSVWRRSIAEALDVIELLDARITPIDHELRPLARADARVVLLDTIPGIGDLLGLTLASEIGDVARFGSARKLIGYAGLAPKIDQSGDRSRTGALSKAGSRTLRWAAVEAAQHAWRPTNPWHQLYTDIAKRAGKNPAKAAVARKILIAAWHVLSRQQPFKRAAPRRPDPASASSRCVLAA

SEQ ID NO: 272275 - protein, 352 aa, unidentified
MYSPITIGIDLAKEVFAICILDDRGAVLERRVLRRAAFERWAAQAPDGVIAMESCSSAHHWGRWFSARGHVVRLIAPEFVTPFRKGGKNDAADAEAIAVAARQPTMRFVTVKTVEQQAILSWHRARQGWVDERTALINRLRGLLAEFGIVLGRSRSTLRTALPRLTEDARLPAQVRALLLEAREQFAALDDRVARCDAEIAAHLVDSAPAQRLRALLGIGPLTASALVATVSNASSFKNGRQFGAWLGLTPQQHSSGGKARLGKVTRHGDGYLRSLLVQGARSALQSALRCLPEHLSRLGRWIVDLCHRKGYHKTLVAIANKHARMLWAMLAHDETYDPLAWQRYRAPAATV

SEQ ID NO: 272276 - protein, 317 aa, unidentified
MERPVVLGVDVSSARLDVAVGSSGEAHQFGNDADGCTALVGLAQRGGVTLVVMEATGGLERRAWLVLSAAGLAVAVVNPRKVRNFAQAMGRLAKTDRVDALVLARFGEALSPSATLVPEPGRDTLAALLTARRGLVEARTAMRNRVRATYDPTASAHLERAAKTLAEEIAAIDGSIASAMAEIPEAKEAADRYKTVPGVGDGLAAVLVGELPELGLLDRREIAALVGIAPFNDDSGKHKGKRRIWGGRGEVRTLLYMAALVATRFNPVIREHYARMLQRNKPKKVALVACMRKLLTILNAMARHKTQWNVATAGVDD

SEQ ID NO: 272277 - protein, 388 aa, unidentified
MNVVADKSEPLTAIHTDLGAIFVSLELSRSSWLITSLSPGGGEKMSKHSVSGGDFAGLMERFAQLQQKARLRTGQSFRIIVVQEAGLDGFWIHRALQNEGIESHVVDAASIATSRRRRRAKTDKIDGETLVRVLLAYKRGEPRVCAMVKAPTPDEEDRRHLCRERKALIAERVRHVNRIKGFLFSQGISRYQPLRRDRRQRLEELQTSDGRAFPQHLKALINRELDRLELLLKQIKTVEAARDALLAVGQTAMPAPAAMLLDIRGIGPEFAAILWSEGLFRHFENRRQIAAYAGLAPTPWQSGAVDREQGVSKAGNPRLRTTLIQLAWLWLRNQPRSALSIWFHQRVSRNGGRLRKTTIVALARKLLVALWKYVTAGVVIEGVTMKVA

SEQ ID NO: 272278 - protein, 309 aa, unidentified
MRVAGIEVSYRTFTLVINQNGRLGKPRTLGNMPEESPDLIQVLRKARVSRVCLKAMGLYHLDPALVLDGTGLEVMVIDPKTAKRLAETIQTRARTAAVDAAVLAVRACAHHIAALSAMRTRTENELHAVRQTAAMPDFLLAELQQSVAQFDAQIQHLHRQVLDLIAADQDLQQTFELLVSVTGIATAGAIQLLGELLVLPQGMSAKQWVAMAGLDPRTPQSGSGANKKPRLSKAGNRDLRSALYRPALNASCHDPQVRAYYHHLIETRGLKKTQAVCAVMRRLLHAIHAMLKTRTPFDSSRFHTPTERF

SEQ ID NO: 272279 - protein, 343 aa, unidentified
MQVTTVGLDLAKRIFQVHGVDAAGKVVIRRRLQRSEIAAFFADLPACLVGIEACATAHHWARLIGASGHQVRLIPPSYVKPYVRRSKTDAADAEAICEAVGRPSMRFVPVKSAHQQAALLHDRARDLLVRQRTMLINAIRGHLGEFGIIAPAGRRRVADLANLLQGADDAEVPALAREALQSLFVELSALEIRIKVVEAVIMREHRSNAVSRRLTTIPGIGPITASALAGTIADPFAFKSGRELAAWIGLVPRQHSSGGKQKMGRVSKQGDRYLRRLLTVGATAVMRRLPGKTDGLSLWVRALLDRRPFRLVSLALANKMARIAWAIMVRPETYKASAMTAAA

SEQ ID NO: 272280 - protein, 339 aa, unidentified
MYKSGQPIPIAPNQLPTKENNMSKTMFVGVDVAKDKLDVAWRGDVNYSHQQFDNNLEGFNTFLVWLNQQTACPWVCMEATGHYSELLADYLTEHGIKVSIINPLQIKQFARSKLTRNKNDILDARVIAQYAQASQPRIFQPRSQNQKELKDLIKLVDTLKAQVIQLKNQLHSTQGEIAKQSIKSLIKALEVKIIELEKQLAELVDTEQHLSTRFALLLSIKGVGKLTAYKILSQTPDIGIYQKAKQFAAAIGVTPQQNQSGKFQGKTTISRLGDARLRKALYMAALVAKRYNPILKSFAERLKQRGKAPKAIICAVMRKLAHIIFGVLKHQKPFDSALA

SEQ ID NO: 272281 - protein, 532 aa, unidentified
MATKRKSRKSRKPCPAVLGKPNGVIQPRVQAVGPERFGVVAVDCAKARSKWMLCDFYGNILIPPTDVEHHRAGLQMATVMLKEACRKHGLQDHIVAVEMTGTYHKPVQRAFREAGSETRLVHPFASKHYRLPAHADNKTDDHDLEAIFRAAVNGFGLLEPTWHESYLQLQLLARHRRDLVEKRSKLQCQIRQYLERCLPGYAALFPDDDLWTRPVAMAVARRFGDAETIRQAGVSGVTRELKEEKMRFQARTVERLVSWAANAAKADPLAAHLARVWHALHDDWQAKTAQITRLELELAEILVKTPYILLLSQPGINVVSAGELAGEMGPIEHYAHARAITGRAGLFPSRYQSDKVDRANGPLAQFRNARLRAAWLRIADNLIKCNAHYRGKFQLWKQNGVDARDIRCRVANRATRTIFRMVSGRKLYHHSSQLDRQYVLDKLLKFHQDHGTPPHEILRDLQEAAQQIPRSDQAAEASPLKQTCERIRRSRRRDPQPIGTILIAVLAKLGITELQSESEALSPDANMSDVSS

SEQ ID NO: 272282 - protein, 333 aa, unidentified
MAECSKEPVVTIGIDLAKNSVHVYGVDAQGRQVISKKVTRGKLSAFMVNLPACLVAMEACGSAHHWARVFREVGHEVRLIAPQFVKPYVKSNKNDAVDAKAICEAVQRPNMRFVAVKSVEQQDIQAIHRMRSLSVERRTAQINQVRGLLLEYGVEIPKGRTAVMRRIPESLEDAENGLSERFRAELSELAEELRHLDERVRHDDARIQAIAQHDPTAQRLMTIPGLGAQAATALLAAAGENPQVFGNGRALAAWIGLVPRRHSTGGRERLPGIGKRGDVYLRNLLIRGARAVLRRVESKEDPVSRWAATLKGVAKPMSPSSPWPTRLPASPMP

SEQ ID NO: 272283 - protein, 409 aa, unidentified
MQSLFVGIDVSSRSNVVCLMLPDGTRHSVFNVGNTFDGARELSGKIVKVCGQHELSSVVIGLEATGVYGDNLLCFLREDAALAALSPKLHLLNPKQISKFKDAYPELSKTDAIDAFIIADRLRFGRIPPSVYTVDYRYHALRMLTRARCAAVENLSRQKQQFMNYVFLKCSALAQDKVFSNTFGATSLAVLEAFESPDELVNMDLDQLIDFLVEKGKNRFPDPSAVAQAVQAAARGSYRLPKTVNDSVNQVLSISISSMRAVQAQIKALDIEIERQLALIPNTLLSVKGIGPVFTAGIIAEVGDVRRFPNQAALAKYAGLAWKTHQSGQFEADTTRLIQSGNRFLRAYLCEAAFALVRCDTEFRRFYDLKYREVNRHQHKRALALTARKLVRLVFRLLTDNRLYIPAAG

SEQ ID NO: 272284 - protein, 443 aa, unidentified
MSDLAVLDPCAAFVDVGSEKMHVSIAGGSPAVFGTVTSQLHALRDYLAEHQVRSVAMEATGVYWLPLYGVLEAAGMEVVMVDGRQTRNLPGRKTDMKDCQWGATLHAHGLLRAGFVPPAHIRRLQDYLRLRGDHIAAAAGHVQHMQKALERMNIKLHDVISSLTGASGLAVIRAILAGERDPQVLLGLCDIRIRNVKAERVVESLRGDWAEEHLFALAQAVQSWDHYQGLIAACDRQIAVVLGQMPDAKAPPSAASTKTGKPRTRPGANAPDIADLREILAQICGAKDLTTLPAHSEYSVLQLIGEVGTDLTKWRTEKHFTSWLGLAPGSAQSGKRKASVKRRRNRAGQIFCVMARALARSKYVALGGFYRRMAARRGGLVANKALARKLATLFWRVMVKGLDFVETGVAQYEARVLETKHRILHRLARQLGQKIVPNPAAVV

SEQ ID NO: 272285 - protein, 352 aa, unidentified
MAVTIVETRAEIRAITGGVDTHADVHVAAALDPIGGLLGVREFPATTAGYARLLDWLAGFGTVALVGIEGTGSYGAGLARHMAGAGVRVVEVDRSDRQDRRRQGKSDPLDAVSAARAAQSGRARGAPKGRDGAVEGIRALMVARRSAAGERTRAINQARALLLTGPDDLRARFTRHTPAALVAGLASLRPRPGDVAGHATRVALRELGRRAQFLDGQLGRLDELIVPLVTAHAPGLLALYGIGPRTAALLLIAAGDHPGRLRSEAAWAHLCGAAPIPASSGKVTRHRHGPGGDRQAGHALWRIVFTRLGSDAATRAYAERRTAEGKSKAEIIRCLKRYVAREVYPYLRPAAG

SEQ ID NO: 272286 - protein, 342 aa, unidentified
MAAIGIDTHKATLAACAIDELGRPIGEATFANDPCGHTAFITWARSMAPDATVGIEGSSSFGAPLARSAQLAGLAVREVPPHLSRVERRRTRRPGKSDPGDALAIARVTAREANLPPIRLPDRSTELRLLLEAREDLVGEATRTRNRLHAHLLVLVPGYGGTVANLVAACHRAKVAGLLRGNATVQAELAHSLLVRLARLEREIEALKRRIGARVAGHPLLGLPGAGPITVARLIAEVGDIRRFRSADALAALAGVAPIPASSGQVQRMRLNRGGNRQLNRALYVIALSQSRFHPPAKAYVHRRMEADGKTWREAIRALKRQLVRTVFRLLVEGSEVQLAAA

SEQ ID NO: 272287 - protein, 263 aa, unidentified
MQCRRSGRDRTVILRRRMHRDSVVKLAAELSACVVAMEACCGAHHLGRVLDGQGHTVRLMSPEYVRPYVKAQKNDERDAEAIAEAATRPTMRFVELKSEEQLDLQTLHRARDRLVGARTALINQLRGVLLERGIAFPRGRRKLELRLETMTAEEAVSLSSGTRLLIDDMRAEWRELDRRIAAFDDEFAARARSDEAARLLATIPGIGILNATALTAAIGSGHAFGRARDVAAWLGLVPNRSRPAAGRGCWASASAATSICASC

SEQ ID NO: 272288 - protein, 352 aa, unidentified
MKSTFIGVDFSKQTIDVAILKQSKKSQKEFACLKFSNDEESYKKLFQWIKEQTHTPQEQWLICGENTGLYSLGLQRFLNLRHIFFWLENPLQIKRAQGMVRGKNDKMDACQIALYAYRFQDKACNVELRNDILDMIRDLLVLRERLIKNKKQLLTASKELVRVKNNQTSAFIDEHTNKLIKCIIDEIKETEKKILELIKEDEQIEENFDRLCSIKGVGFVNAIWMIIATNNFIDFNDPRKFGCYAGCVPFNYESGTSVYRPDRVSAFANRRIKTILTCAAASAIRYNENIKAYYWKKKTEGKPWRLIVNNVRNKLIHLMFAIIRSQRTYQENYVPAFNQKNADSTRLNLAQS

SEQ ID NO: 272289 - protein, 407 aa, unidentified
MEVVYRCCCGIDVHKKVIVACLVNGGEQELREFGTTTSEIKTLANWLTESDCEMIAMESTGVFWKPLYNLFELMDLDAMIVNAAHMKALPGRKTDVKDAEWIADLLRHGLLKASYIPNREQRELREITRYRKSLTEERCREVNRLQKILEGANIKLDSVVKDITGKSARKLLQRIIDDDIPDSDEVSKLVHGRMRPKLEQIVASIEGITTPLQRKLLAQIIDHIDDLNRRIGELDKLVQEYMAEYEAAIEAIDEIPGIARRSAEVILAEIGLDMGRFPSAAHLCSWAGVCPGNYQSAGRRKHGKTTKGNKALKTILTQCAKSAKTVKSSYFFAQYQRISARRGKNRATLAVAHSMLIAIYHILKNKTAFHDLGSDYYDSFNRDRKINGYLKRLKALGWEPDAIPSSA

SEQ ID NO: 272290 - protein, 345 aa, unidentified
MPIVGGLDIHRKQITFDYLDTVTGEVRRGQIAPADRAHLRGWLARFAGHDDVAFAVEGCTGWRYVAEELAAAGIGAHLGEPADTAALRGRKRRAKTDKTDARHLRALLAEGRLPECWIAPAQILEYRALLETYHDLRREHTAWVQRIHAVFFHQGAPPLGEGALRTEPGLGGLRAAAAAHLSAAGQQQITTALDMLAATEAQLGPLRRQLRDAARHLTGAKVLAARLYGVGPVTGLALTCWLGGAGRFSSSRKAVRFTGLDITVHSSDRKGPPGRLSRQGPPVLRWAVYEAGKTHARAAAPDHGYYAAVAGRKNTKRAALSEARKIVRQACHILTELGDDALTAA

SEQ ID NO: 272291 - protein, 335 aa, unidentified
MQIKHFIGIDVSKDTLDLSVVVNGKPLSHYCIRNNTKEIKSTVSKIMKDLDGSFDDTIFCMEHTGLYNLPVVKWLHKNQGKMWLESGVHIRRTLGLVRGKSDKVDSSRIAMFAYTNRHQVKLWSPPRHVIEIIAALLSQRARLIKAKKQLATANKEQKKFLDKDIMHSLNKYTNRATTVIDKQVDAIENEIIGLIKDDDKLKRMYQIITSINGIGLVTASYILVTTNEFININDPRKYACYSGVVPFEHTSGTSVRGRNRVSHIANKSIKTLLHMAAISTLNTPGEIQDYYNRKIAEGKNKMCIINAIRNKLILRIFACIKQNREYEKNYCYKLA

SEQ ID NO: 272292 - protein, 366 aa, unidentified
MEATEEQGEWNGRTESGNPVWVWFGLDVSKESFTAARFHGLTKEASRPKEKSFPLKKEGVAAFLKWRKSFGEKLLEDAVAMEATGPYTGRLCRLLLAAAPALRVSVCNPLSVSLYTKSHTPAKGDGTDAVYIAMFACDRQPREWRVPDRDQAHLRALENERKKLVELRTGLSNLGQTIEFKDVAKINREMIEEVEKRMERIEAAMKEIIKSRRDIAEEIALLDSVPGIGFTSAAAIYAMLGSLKQYTRKELSALSGVCPANAQSGKSLKKSRIDRRGPSHLRQILFCDSKWATKIPSVKALKDRLDAQENSSRMRSRCACMRKMLLVCRAVVVSGKPFDKSYNASNSLQESDEKSEKKSEIAVQTA

SEQ ID NO: 272293 - protein, 460 aa, unidentified
MKKRHQSEQMKKKRIHKHLEQVNLFAAGIDIGSQSHYVAVPEDLDNKPVREYSSFTGDLNQMANWLVEMGIQTVAMESTGIYWIPAYEILEERGLVVLLVNARHIKNVPGRKTDVVDCQWIQQLHTYGLLEGAFRPPEEIIALRTYMRQRETLTQQASDQIRRMQKALRQMNLLLDNVVSDIDGVTGMKIIRAIIDGERDPTVLAQFRDGRCKKSEQVIAASLEGHYREEHLFTLKQTVELYDIYQEKITACDSAVQAHLDRIESKGDKKDLPPSKKPKTKSSPKFDVRGELYQMTGVDLTQIDGLNENSVLKILSETGVDVSAWPTEKHFSSWLGLSPGNKITGGKILSSKTKPSANRAAAAFRMAAFGLLNSHSALGAFCRRQRTRLGAPKAITATAHKLARIFYSMMKNGSEYVDKGQDYYEKQYHDRIIKGLKKRAAEMGFELMSKVESIPVESKA

SEQ ID NO: 272294 - protein, 354 aa, unidentified
MTKDTSETIGCDLGDKWSDICVLDAAGEVKLRTRVRTTGSGMRGFFSRPATHVVIEVGAHSRWVSALLTELGHRVTLANPRQVNLISQSHKKDDRKDAELLARLGRADVKLLAPVQHRSMQAQADLAVAKARDVLVATRTKLVNHIRGTVKSFGAALPKCSAESFARKTRDLVPIELRAALDAVYQALERIDEQIIEQDKMIERVAKKYPEVEVVSQPKGVGVLTALVFVLTLENKERFTKSRMVGPYIGLSPGKRKSGNGDPQLRITKAGDPFLRRLLVNAANYVLGPFGQECDLRAWGQELAKRGGKNARKRAKVAVARKLAVLMHRLWVTGEVFEPLGYHQRQREERKLAA

SEQ ID NO: 272295 - protein, 348 aa, unidentified
MLHAGLDLSRKRLDYCLLEESGERVEVGTSPPDGDGLIAFAQRVAERHGRVEVRAAIESMNGARFVHDTLERCGWEVEVADAVKVKGLAPLACKTDKIDAWVLAELSRRELVPAIWLPSFERRQERERARWRLFLVRKRSSLKHRVHAQLLAFGHTCPVTDLFGRSGRQLLERLQFPEPWRSGVLAATGMIEDLDQQIRGIDSELKALGADHRYIPLLMSAPGIAWVLGYTIAAEIGDIDRFASAKKLCGYTGLCPKTYQSGSKDRRGHLTHAGPKYLRWALIEAAQHAGRHPLYRERYQQTKRRLGKQRGPKVAQVDIARRLAEAIWHMLTRNQPFAPAGATSALAA

SEQ ID NO: 272296 - protein, 379 aa, unidentified
MSFKLWLTLRARIEECSAQVAMIGIDIGDRVSELCVLSHDKQVLVRGGVATDRATMERFFQPLAPTVVVMETGTHSPWMDRLIGQCGHRVLVASAREVSRVLKNKKKNDRRDAEQLARLAAADETLLGLVKHRSQEAQLDLGKVKVRDHLVKIRTELCNTARGLVKSHGHQLPKVAPEAMSRQVGETLAKELQDLIAPLLKHIEQLNESIKELDKEIEELGKEKYPQTSQLQQIYGVGPIVSLAFVLTMDDPQRFGKSRDVGSYLGLTPAQDESGASKPELRITKEGDGLMRTLLVNAAQTVMRKNSPECDLKRHGMKLAAKGDKTAKKKAVVAVGRKLAVLMHKLLVSKAPYNPQHNVQERIRAEQARQQQVARKAVA

SEQ ID NO: 272297 - protein, 372 aa, unidentified
MKEHSEVFVGLDVSKLKTSVALAEDGRNGEVRFFGDIDASPTAIAALAAKLAKRGARLHFCYEAGPTGYDLYRQIIALGHDCAVVAPSLIPQRPGDRVKTNRRDAVSLAKLHRAGELTPVWVPDVGHEAIRELVRAREGAMEALRRARQQLLSFLLRHGRVYTGRTPWSKAHSSWLCGQTFEHPAHQIVLAEYRHAIEEAEVRLKRLTAQVTETAASWSMAPVVKAYQAMRGVAFMIAVTFVAEIGDVRRFDNPRQLMAYLGLVPSESSTGERVRRGGITKAGNSRARRVLIEGAWTYRFPARMSRLIQGRQDDLPKAVREIAWKAQVRLCGRYRKLIAAGKLKAVTVTAIAREMAAFLWAIGQLVVPVLAA

SEQ ID NO: 272298 - protein, 332 aa, unidentified
MDLQLRRSVLVRMTEAGEHLETLRISNDPRYLAQVMARAGEAPEVVLEATYGWYWAADTLAELGATVHLAHPLGVKMFSYRRVKNDERDAADLADLLRMGRLPEAWIAPPATRELRGWVRHRAKLVGVRTGLKCQIHAVLAAAGVQVRMSDLFGLSGQQLLSSVRLAPESRARVDSLMRAITAVEFEIDMFARLVAGRLRADPGYTAIQAIPGVGPILAAVFVAEIGDITRFDRPQQLASWAGLTPKHHESDTTVHRGRITKQGSRLVRWAAVEAVQRVPAHTRLGQRRDQVAARRGHNIGVVAAARDLTGLVFYGLREHRIRSLPSRPAAA

SEQ ID NO: 272299 - protein, 414 aa, unidentified
MVVCRANITTTTEEDVAQPTLWAGIDAGKAAHHCVAINGEGQRVLSKRVTNDENALLELIRAVNELAEGGSVQWAIDLNSGGAALLITLLPNHQQELLYIPGRTVHHASGAYRGEGKTDAKDAAIIADQARMRNDLHPIRHRDKTAVDLQILCAHRTDLAADHNRAINRLRAQLLEYFPALERAFDYAHRKAALVLLTGYQTPDALRRIGTARLEKWLRDRHAYNASDLATRAIAAADAQRTVVAGQRVAATVVARLAQTILDLDAELADVDAMIEQTFHGHRHASIIVSMPGFGNLLGAELLAATNGDITTFETADRLAGVAGLAPVPRDSGRITGNLKRPRRYDRRLLRVFYLAANNSIKTCPESRTFYDRKRSEGKRHSQAVLCLARRRLNVLWAMQRDNTSYQPGMPRAA

SEQ ID NO: 272300 - protein, 429 aa, unidentified
MTKTHHKTGQPVLVAIDIAKHRNEVLIAVPGRRRRKRLTVRNVREDIDRFVETLTAFGVPVQVGFEPTGDYHRPLAWRLHQAGFELKLISSLSLARTREAMHNSWDKNDPKDAQVMLHMMQTGLTQIWHDPLVHGVNDIQELSKTHAVISQTKTEFWHRLRTHYLPLYFPEAERFMGNSRSDWFLAFLEQFPTPGSITCMSEDAFIEAAWGVVGKKASIARLLADIYATAADSIGLPVDPETPAIRMFCLVLGQGRHLIAQRDQIEQQASDLLGTHPDFVRLRTIPGIGPINALTILAEAGDLRRFGHHRQFLKFCGFNLSTQQSGIFRGQTKLSKFGNARLRRTFWMAGQVAIRQRENGFRDKYERYIARDHSDPHLKRKALTAVAAKIARTAHSVIKTETDYRPFFEGRGPRRKDPALQVPLRHASS

SEQ ID NO: 272301 - protein, 320 aa, unidentified
MMSQNDPGVVGIDVAKDKVDACIRAFKLRQTWPSTAQGHRKLVGWLRKHQVNKAVMEASGGYERAWARVLREAGIEVRIVDPKRVRNFALSAGRLAKNDSIDAEMIAWFAETFSEAPSQTHDAAHEELQALVKARLDLIDFRMRLVSRSEHAAPGLVQKAHAHILKSLTSEIAKLEAAISAKIKSTPDFAERAEIIESVPGFAETSSANLVAGMPELGQVSDEIAAALIGIAPYDDDSGKRRGERHIKGGRRWVRNAIYMPCVGAATQNNPVLKAYYQRLLAKGKEPKVALIACMRKLIVILNTMIARRQKWDPSRYALS

SEQ ID NO: 272302 - protein, 408 aa, unidentified
MGRAAEVVAPSSSIRTDGDCPVAQVNDLSRSLTAFDPISTLVVVVEMSKASWLVSGAVPGVERQPLKKLEPDATALLRLIERWRNEAVRAGRPISRIALAYEAGRDGFWLARWLIARGIEAHVIHSASVAVSRERKRAKTDRLDAAMLMRVFLGWLRGERGHCGMVAIPTMEEEDARRPSRERESLVDERSRITNRMKSALARLGVRGFKPHLRKAPERLAGLRTAEGTGLPMNIIEEFRRDMARLALVREQISSIEKTRAERLERAPDTGPHAMVRLLARVIGIGIETADMLVREILSRKLRDRRAVARYAGLTGSPDESGLKRREKGLAKAGNARVRRGLIQLAWRFLVFQKDSALARWYRTRTEGPSGARKTTMIVALARKLLIALWRLVTTGEVPDGVELRPAA

SEQ ID NO: 272303 - protein, 351 aa, unidentified
MKEHSNERVVKVIGIDLAKRSFHVYGVDERGQRVISKTFTRARLREFVANLPACTVAMEACGSAHYWARTFRAYGHEVRLIAPQFVKPFVKSNKNDAVDAEAICEAAQRPTMRFVAVKSVEQQDIQAIHRMRSLVVERRTAQVNQIRGLLLEYGIEMPQGRAAVGRCLAEMLEDAANGLSDRFRAELRELAEELRHLERVDHDDAQIEAIAQSHPQARQLMAIPGLGAKGATALVAAVGEDPQLFKNGRGLAAWLGLVPRQHSTGGRERLLGISKRGDVYLRQLLIHGARAVLRWVERKDDATSRWATALKARRHPNVAVVALANKIARIAYAVLATGQPYDPTKGALVQA

SEQ ID NO: 272304 - protein, 348 aa, unidentified
MDHIIRIGMDTSKHVFQLHGVNAAEEPVLRRKLRRNDMVVFFERLAPTIIAIEAAGASHHWARLLRSFGHEVKLIAPQLVKPYVKRGKNDAADAEALCEAMSRPTMRFVPVKTAERQAALMLLGLRDRLVRNRTQLANAIRGYAAEFGLAAAKGIAHLAPLLARIQSDESLPGLARELFAAHAQEYAQLQAQIDEVEGKLMAWHKTNPGSRRLAQIPGIGPIGAAMLIMKTPAPEMFRSGRQFAAWIGLTPKDHSTAGKVRLGVITRAGDEGLRSALVVGATAVIRHLRNGKGRSMLSAWVEQLLKRKPPKLAAVALANKLARIAWKLMVTGETYAAKPRPVASAGVA

SEQ ID NO: 272305 - protein, 397 aa, unidentified
MIAVGIDVSKSKSTVAILNGDGSIRAKPFDVHHVADELQALVDYIKRTSEPPTILMEPTSHYHYPLLKAFTEAELPVCLINPYQMKKYGDTELRKAKTDKRDSLRIAQYALEKSYSLIPYTPQDQKYEDLRFLSRQYSQRISTLTVAKVQLLSLLDETMPGITTILPLKSRDPDNCVLLRFIKRFKSFDVIRKMGKTRFLDSYQVLVKKTKDRFAGSKGLAIYELVLNSVTTRGENPLSAMTQDQCVDLVSTSRKAADEINLQMRIIAETMPEYKVLRSMAGVGDRLGPIILGEIGDIRRFHSGKALNAYAGNDAPPYQSGQFESRNRHISKRGNPALRKACFEVMQGLKLTKPQDDPVYLFLLKKEQEGKPYNVAKMAAVNKFLRIYYARAMELYK

SEQ ID NO: 272306 - protein, 327 aa, unidentified
MDVMIGIDVSKAKLDCLWLKGLNTLKVKTKVLANTADGHKALINWVQKNTGAYLSDCSFIMEATGIYHEALAYALHESGANVYVVNPTRVRDFAKSLGTRGKTDKKDSMVLARFGAVNTLQPWQPEAPEIRTLRALLARLEALDKDIQREENRLEKAEISQASAQVIESIQLMLKALKDEKRRLEQQINDHIDGHPTLKNDQALLQTIPGIGRVLSRVMMAVIRSRNFESARQCAAYLGLNPIPWESGSSIKGPPRMSKAGPSLIRAKLYMGAIVASQWNPDIKAHCDRMITRGKSKMSALGGAMRKLVHICFGVLKQQTEYVPQMT

SEQ ID NO: 272307 - protein, 340 aa, unidentified
MKHTVVGVDIAKNVFQLHWVEPETGEIVSRQLKRAGFLEHFANRMPCLIGMEACGGAQHWARRLTALGHQVKLLPGKAVKAFVSGNKNDASDARAIWTAVQQPGVRTVAVKTEEQQAVLALHRMRQQLVKFRTMQGNGLRGLLMEYGEVMAVGRAGLNRAMTDVLARLSERLPAMLIDTLRQQWEMLGKLDEQIAQIEQRLQAWMKQDKACKAIAAIPGVGLLTATAAVATMGDARAFRCGREFAAWLGLVPRQTGTGGRVKLLGISKRGDTYLRTLLIHGARSVLTRAKECDAWIEQLGKRRPPNVVTVALANKMARTIWALLAHDRPFEKTHVSSRPA

SEQ ID NO: 272308 - protein, 394 aa, unidentified
MINFAGIDDSSNNHSIKIIDQNQEILEDFDFENNNDGFQKLHGKLSNYSQILVGLEMSHGPLVDFLRKNQYNIYSLNPLKIRRFKESHCVSGDKTDKIDCGAIAHYMLNNHKTLRPMQFSSQVIEELKIHGISHDRLTKEHTRYTNKLLFIIRQYLPLYEFLFSEISSKILLKLLISYPKWDDLRALSTEEFVGFLKKNYYRNNKYINKVINKINKYIHNVSPEVENALAIEAQCIARVLLMIKDELHNLEAKMKSITDSHRLGAIFKSLPGAGDLLAGKLLGVFGDNKDKYDSAAGMQALFGTAPINYQSGNYHKVIIRRACNKRARAILYKFAFSTLQYSEWSRSYYDGQREKGKTHSVAVRALSNKWVRIIYKLWKDELIYSAEEKNYQAA

SEQ ID NO: 272309 - protein, 342 aa, unidentified
MDHFAGLDVSVKETSVCIVDDTGKIVREVKVASEPEDLLQVLRNPAYHFKRIGLEAGPLSQWLFSALAEAGLPVICVETRHMRAVLKAQINKTDRNDARGIAQMMRAGLYRPVHVKTLRSQKLRMLLTHRKLLQSKAIAIDNDLRGTLRNFGLKVGMVGKMKFEARIKELVENIPDLAVLVEPLLIVRRVLREQFVIQHRRLLAIVRDDEVCRRLMTVPGVGPVVSLTYRATVDVPARFHKSKSVGAVFGLTCAKYQSGEVEWSGRISCCGDEMMRVMLYEAAQSMLRSKKWSWLKAWAMQIARRRGMKKAIVALARRLAVIMHRIWVDGTEFRWTREVAAA

SEQ ID NO: 272310 - protein, 427 aa, unidentified
MNDSKYQPTLCVGADVHLDKIVLRAVDKALGHEVLERFRVTNNLPGAQTAVATIAETATNLSYTHIQIGWESTGMLWIPFHRYLSSDPLLHPFELELICFNPKLVAKFKDGLVLRSPKNDDRDAFDVAARLRFGELPVSYVPTDFWQGLRRLTRYRHRLSKTLSREKNRFQSYAFLKCSDWKRVNAFSNIFGATSAALLTEFTRAELQEMTHDQLVDLISRRGRGRFDDPTATARAVRQALRTSYPINPQMDEMVTAALAAGWDHICYLQRSMKRLDRVIARHIDLVPNPIISIKGLGAVTTAGILAEIVDALRFPEQKHLAQYMGLTWQKRSSGGFVSQNTRLTKVGNVYLRYYFILGANLLRQHNLEYKAYYWRKYQEVSKYQHKRALVLTARKLVRLVHALLTKNEPYVRPRTTDCIQEDALLQ

SEQ ID NO: 272311 - protein, 415 aa, unidentified
MSGQIGWFVGLDWARDQHRACVIDAEGRGVAERDVAHDGAALAELCAWLVDRTGAQPCEIAVAIETPRGPVVEILLERGFAVFAVNPKQLDRFRDRFTVAGAKDDSRDAHVLGASLRTDPQAFRRLTLDDPLIIELREWSRIHEELKQERTRLANRVRDQLWRYYPQAAELTDDVAADWFLDLWGQVPTPAKAARVAEKTLARILQNHRIRRFDAAQAMRILRKQPLWVAPGTVEAATAHIRTSAARLRLINRQIKDAERRLDELCEAIEASAPGQICEQHDVAILRSLPGLGRINIAALLAEACEPLRRRDYQVLRVLSGAAPVTRRSGKSHIVVRRHACNSRLRNALYHWSRVAIQHDAISRQRYDELRRRGHSRARALRSVGDRLLYVLCTLLERQTLFEPDHQTSRMLAAA

SEQ ID NO: 272312 - protein, 340 aa, unidentified
MDTTTPTSYHHFLGIDVSKDTIDCWLRPRGEYSQWTNRDEGFQRLHRWLNTHNCPQQHTIICIEDTGIYSDRLLASLTRQGWRCALLKTTAAKKVAPEHHRKDDRFDARLLAEYGDRYADQISLTPPPKESVKQLQQLYAERQRLIKARNATQNRKQQGSHGLVDSELLAQQWQQQLRLYSKQIDSLESQIRNLISCHSELNRYDQLLRSIPGVGQVTAWLWLILFYGEQQLNHKQIASRFGFAPHRFSSGSSVRGKTRSSGHGNSQMRSCMTMVARSVSHHHERFARYKQRKLDEGKPWPVVRNNLINKMIKIICAIWNSGECYRKDYESRIDRQKKVA

SEQ ID NO: 272313 - protein, 265 aa, unidentified
MNVKTIGIDLAKNVFQIHGVDEHGKRLFNKQLRRAQMASFFANIPPCLIGMEACASAHFWANKLISMGHNVKLMAPQFVKPYVKTNKHDAADAEAICEAVTRPNMRFVPVKTAEQQAVLALHRSRQSFIKQRTAQANQIRGLLAEFGIVVPRGIQQLQRRLPELVEDADNPLPVLFRTQLSLLQHHMAYLFDVIATLDKQIEQCYRQNALCQRIGKIPGIGPVTASALIATIGKANNFENGRQLAARLGLVPRQHSSGVNKSCSG

SEQ ID NO: 272314 - protein, 415 aa, unidentified
MALKIVYKICCGIDVHKTFVVACIASTDSKGVTTYEHHRFSTYTKGLKDLLQWLLKHNCKDVCMESTGKYWIPVYNVLENDCTIVLAHPKYVKAIRGKKTDKKDAKWIADLFKHDLVAGSFMPPADIRQLRDLMRYRFKLTCFMSSEKNRLQNCLTVSNIQLGNVVSDTFGKSAQAILDTLLENPADTSFDLEPLVYKSLKKKLPELRDAIDGYITPEQAGKLKVIKAHYENLESRKAELEELILALAAPYQQELAILQTAPGIRSDFTAIGIISEIGTNMEAFPSAKHLCSWAGLTPTNNESAGKKKSVRVSKAGCYIKPLLVQCANAVITSKKHPEIRNRYLRLKKRRGHKKAIIAIARMLLTALYHMLKNGENYNAELYRKSDLPPVDREITVEQAIIIARNQGYKIKSATT

SEQ ID NO: 272315 - protein, 412 aa, unidentified
MNPVVGLDVSKGESQVQAFLDKSQPYRKSFSVKHTVEGFEYLLGFLKEIERVADGKKPSVILESTGHYHSPVIQFLEEQQYVYIIVNPLISHRARSTSLRKVKTDAVDAYHLCELFYKEEVEPYKKRGLQLLNLRNLTRQQEIITGISTQTKVQLLTVLDQVFPEFRGVFGDLYSKVSLQTLSLFPTSEHVLNTTESVLTNKIASLCTRRSEKWAKEKAQKLIEAALRNPFQNNLYESHIFNLKMLITIVLQYQEHLSQLEAEIDTLAKEIEEYKIIQSIPGIGEKIAATIISEIGEIDRFNHPKKLVAFAGIDPSVYSSGRFTATKNRITKRGSRRLRQALYMAVYCGIRDARKQKTSDTIIPRNKKLREFYDKKRDEGKPYRVALIACVNKLLHLIYALLKNKTTFQELA

SEQ ID NO: 272316 - protein, 310 aa, unidentified
MSEVFIGVDVSKDQLDVHVLPAGVAFAVARTPAGLSALIEQIRPHAPYLVAFEATGGLESVVVAALAGAGLPVVAINPRQIRDFARATGKLAKTDALDAAAIARFAEAVRPEPRAVLSEDAKALSELVTRRRQVIEMTVAERNRRRLVAAKPVLKSIDRIIAALEKQLADLDHDIGQRVRDTPAWREKEELLKSVPGVGDQTARTLIAALPELGELDRRQIAALVGVAPINRDSGKLRGRRMIAGGRADVRSALYMAALVGVRANPVLRAYYARLRQAGKRPKVALVAATRKLLTILNAMLKTKTAWAGA

SEQ ID NO: 272317 - protein, 346 aa, unidentified
MNYIGMDCHISTLDFAVVNETGRLVKASSVATSVNNFMEFVKKVPPPRTIYMEEGTLAAWALEVCVRYGEKLVITDPKENHWIGSSGQKNDSIDALKLAQLARGGYIKEIHHPVGQRRRFRELMEAYHDTVRSEVRIKCKIKAKFRQNGIQCIGDTVYAKNHRQEWKDKLPQEATLLLILEGLWLQLEQLEQTEKEILKAAKAQAKYYPEIKHFEDIPGIGFINAATISAIMETPYRFTNKRKVWMYAGLGIIKRSSGSKLYPEKLSTNYNRLMKYTIKQAAEAAIRAEDNPFRRKYLDMTLLHGIAPNLAKLTIARNMLATMFAMWKKGEKYNPEVRERDNHKQS

SEQ ID NO: 272318 - protein, 402 aa, unidentified
MINIEYFGIDVGKGKSYVAHYCNNEFKKEFELIHNKDGFDALNEYIKGYAGVYFLFESTGIYSKVIQRFCKENHIAHCMINPLEAKFLTTTLRTWKTDKSDAHKLALLAKNFNKRPSKNLSKDIYIKVRELTRWYEELNDQQSYLKISIIQILDMSFPEIQRLFKSRYSKFALEIVKRFPHPSYVKNINIPDLINIIGACTDKNISLQRKEKYAEMLISFANESYPALSENSFYIEKLIALVNDLMLLMKRQEKIKQSLMELSKELEEFKILTSIPGIGDLTAMLIIGELGDIRSFSSHKELNAYIGIDIKRYQSGKTQYKDKINKRGNRRARALFYIVIMNIIRGKRHYSNHLVDYYYKLRKQPNGKGHKTAVIACVNKLLKTIQYLVVNNKEYDYQMSPH

SEQ ID NO: 272319 - protein, 313 aa, unidentified
MTIPLRCVGIDVSKHHLDIFDETIGASERIANAPHAITERVARWRCDAFVVFEATGVYDRELREALSQAGIRFSRINPARARDFARASGRLAKTDPIDACMLAAFARAMRPATEQVSTAARNALARLAKRRDQLVLMRAQEKNRRSEVDDRAMAERISRLIEVLDHEIAEIEAEINVLIKAEPELSEDAQLMRSLPGVGPVTCIQLITQMQELGHVGPKQVAALAGLAPFNVDSGAYRGKRKIGGGRKRVRDALYMAALNAVRRADPFKAFYTKLRKAGKPAKLALIAVARKLLTILNAMLRDRKPYMHAQTT

SEQ ID NO: 272320 - protein, 367 aa, unidentified
MEKITRSGARGEAVRVGVDLAKRVIQVHAVDDAGHVLTSRALARDKFLAWCAQLPAGCVVAMETSSSAHHWARKLVALGLDARIIAAQLVSPYRKQGASGKNDANDAAAICEAAGRPQMHFVPIKSIEQQSMLCVHRLREGFKAERTACINRIRGLLAEFGLVFAQGPSALESVLADVLEDASNEMNALARLVLQRAQAQWRELDAHLDWCDQRIAAHVKDNSAVKTAATLMGIGPVTASASVATVGDFKQFRCGAQFGAWIGLTPRQHSSGGKNNLGGITKRGDTYLRSLLIQGAKSAVMSAHKRSDPISQWAAALTQRVGWQKAAVALANKNARILWAVMTRGEAFDARHVSVKPGASTSLAVPA

SEQ ID NO: 272321 - protein, 386 aa, unidentified
MPQPNDLSRSLVIFEQDATLIAVIEMGQSSWLVAGIVPGVERLPLKKLAVDESALLNLLHRWREEAEKAGQKIKRIAVAFEAGRDGFWLARWLRARDIEAHVIHASSVAVSREHRRAKTDRLDTELLKRAFLGWLRGERDHCKMVAIPTIKDEDGKRPNRERESLVGEQSRIVNRMKATLIRLGIRGFNPKLKKAAERLEGLRTPECEPIPPNTLAELRRDMERRRLVSAHIRQIENARLDRLEQAPHDGAHAMVRLLARVMGVGIETADMLVQEVLSRNLRDRRAVARYAGLTGSPDESGRRRREKGLARSGNARVRRGMIQLAWRFLMFQKDSALAQWFRARTENARGTRKTMIVALARKLLIALWRLVRDGVVPDGVVLRATQ

SEQ ID NO: 272322 - protein, 350 aa, unidentified
MLIIGVDFHSRFQQIAMVDTESGELSERRLDHSNGEAQKFYAGLQKPVRVGMEATGYAQWFERMLAKLGYELWVGDAAEIRAAMVRKQKTDSRDALHILDLLLTNRFPRIWIPSPAERDLRQLLRHRHKMVCLRTSVRNQLQALAMGQGVYRKRKLWTATGRTELEDLRLDPWASRRRRELLAILDQLDPSLAELDRAVAKEAEQRPAARCLMEQSGVGPVTALMFVLTIGPVERFRRSKQVVSYLGLNPRESSSGGKQRLGAISKQGNSMARFLLVEAAQTASLYDEELRRDYRRLKFRRGTAVAKVAIARKLAVRLYWKLRKHSSPAPPARMQGSPKNPVVGASLSGN

SEQ ID NO: 272323 - protein, 411 aa, unidentified
MDVFCGIDWAEDHHDIALTDRDGRLLARRRISDDAAGLASLLALLAEHGDTAEDLVPVAIETPRGLLVACLRATGRKVYPINPMAVARYRDRHSIAGRKSDHGDSFVLASVLRTDLHAHRPLPADSELAQVIAVLARAQQDAVWDRTTAHNKLRSHLREYFPAFLAAFAGARDGITRPEARTILAAAPTPADAARLTLAQLRALLRKAGRTRSIDAEAARLREAFHAGQMRQLPLVEQAMGRQTLALLGQLNAACTAASDLEHAATESFNLHPDAGIITSFPGLGALTGARVLAEIGDDRSRFQDAKGLKAYAGAAPITRASGKTRSVTYRKIKNNRLTAAGYSWAFSALTASPGARAHYDRRREAGDRHAAAQRNLFGRLLGCLHHCLTTGQHYAEDTAFPTTTTLTAAA

SEQ ID NO: 272324 - protein, 421 aa, unidentified
MQEQASEFAAFIGIDWADRKHDVCLQVPGASTPEVSVLEHRPRVIDAWARALRERFGGRPIAVCLELAQGPIVSALLEYDFFVIFPVNPSTLAKYRRAFVPSGAKDDPTDAALALELLRRHPEKLAPLRRESENMRALRRLVEARRDLVQDRVRVTNRLTFTLKDYFPQIVEWFRDKETDVFAAFLERWPSLQAAQRARRETLVAFFHAHSVRRATVIDKRVHEIQTERPLTTDVAVIEPALAVVATLLPQLRALTAGIARLDADIAARCDTLPDFRLFVELPGAGPVYSSRLLAAFGERRERFADAAAIQKCVGIAPVTERSGNKHWVHWRWACPTFLRQTFVEWAASSIQHSFWARAFYDSHRAKGSSHNATVRALAFKWIRILFRCWVDRTPYNESRYLAALQKRQSPLLKFAAAQPS

SEQ ID NO: 272325 - protein, 406 aa, unidentified
MDIHKNFLVACIATTDERNHTTHQIKRFSTYTGDLRKLADWLAANNCRDVCMESTGKYWIPVFNTLETSCNVCLTHPKYVKAIKGKKTDKRDAKWISELFKCDLVRSSFIPPPDIRQLRDLCRYYVKLTCMCSGEKNRAQNCLTMCNFKLDDVFSDVFGASAQRIIAKLLENPDGNFDIAPLLHKGCKASVEDVRAAIDGKLSPAQSEKLMFIQHHMNVIDKLKTALETLILQIASKYQPQIALLLTVPGITEPLTAIRILAEIGADMSVFETSKQLCSWAGLTPQNQESAGKKKTTRIGRAGAYLKPLLVQIALNNGKSDKCPEFKNKYQSLKKRRGGKRAVIAISRKILTAIWHILSKSESYNTELYRKSDKPPTNRILSHEQAFALLRSKGYIIRDLEFVAPS

SEQ ID NO: 272326 - protein, 310 aa, unidentified
MTLSPTWIGIDVSKAWLDIASSGGEGVQRIANTMDAIAAFAATLEREGTLVVLEASGVYDRSLRAGLALAGIGHVRVNPQRARDFARASGQLAKTDALDAAMLAEMGRALRLVADPLPEAGRERLGLLSRRRDQLVAMRIQEKQRRIEITDPFIDADLDRHMAGLNQAIAAIEVEIQNQIGSDAALAQDQALIRSVPGIGPVTASVLAALMPELGRRSGKQIATLAGLAPLNNDSGLRRGQRSIRGGRRRVRQALYMAAVASLRTQSPLNAFYHRLRQAGKPPKLALVALARKLLVTINAIMKTRTSFAT

SEQ ID NO: 272327 - protein, 329 aa, unidentified
MGTSEERQWVGIDVSQAKLDVALRPSGRYWQVANDESGWQRLLNELQAVTVALVVVESTGGMERGVVQVLQRHEIAVAVINPKRARDFSKASGRLAKTDRIDASMLAHFGEALQPLPKPLASEHQEALSDLVHRRSQVIEMLNSEQRRRHSARNRTAQADIDTHIDWLKQRVKALDAEIDQLRQADETRQQRYEWLTSVPGVGRVVATTLLALLPELGQLSTKRLASLVGVAPFNFDSGKLRGKRHIVGGRALVRSTLYMSALVAIQHNPVIIAFYQRLLSAGKPKKVALIACAHKLLGILNALVTQGQSWRDPKDTEPAQTATPATSG

SEQ ID NO: 272328 - protein, 322 aa, unidentified
MTMLSCCGIDVSKDRLDLAVWPDQQSLSVSNDASGWAELVEQLRGYPIAAIGVEATGGYERGIMRALLGAGMSVRQINPFRLRQFANASGVLAKSDPIDARMIASFVAVMPTRPAQRQARALERLAEVLAVRRQLSDEKVAAENASRLLEDAMLQRLSRRRIARLATDIEQLDKRLAAIVAADSALAHRYRRLVSMPGVGPVLACTLIALLPELGRLNRKQIAALVGVAPYAFDSGKFQGRRCIWGGRAPVRNMLYMAAMSASQHNPVLKTFHARLKAAGKQPKVVIVAVMRKMIVMLNAMVRDDVDWADRSAGRHIVPTAR

SEQ ID NO: 272329 - protein, 353 aa, unidentified
MITIGVDAHKHAHMAVALDERGQVAGQWQGANSAAGWDEATRWARALGDERQWGIEGGGGYGRGLAQHLVGLGEVVYDINPRLTATERRRSRRMDKSDAFDAQAIAQVVRREDAQLPRVTVEDETVALDLLTAEREDAQAEATRLRNRLHHLLLQLDPEYHLHLPALTSVAGVQAAKTYTTTSASLVQQERAAVVRRLAGRLRLAMEQVAELGGRIEALAQARYAPLTRLCGVSLLTAGSLAGILGPGRRFASEAQLAAYAGIAPLETSSAGRVRHRLNRGGNRRLNAIVYRIALVQARWSPEAKAYLARRVAEGKTKREAFRALKRYLVRAIWRLWGACLPPAAVESVRRAA

SEQ ID NO: 272330 - protein, 373 aa, unidentified
MYNRTFIGLDVHAVSVVGCALVPDTGELVRMQMDSDPAVVLDWIRRFEPPVKAVYESGPTGYVLARFLREAGIDCVVAASSKLLRAPGDRIKTDKRDARLLAEMLALGQVTEVRVPTREQEDLRDLSRLRATAAKNLAHARQHVNAVLLRHGIRYPKETKWTREHVLWLHRQCFDSPVLQFAWEADVEQVELLAAHLKRIDQHVELVARDCEYAEVINALMCLRGIQVTTGFGLAVEIGDWTRFTGASIGSYVGLVPSEQSSGQSRHQGPITKAGNKYTRKLLVEAAWQHRRPYARPGIRLLRQLELAGPATRIRALEGNRRLHHKWEVFDARKKRSVTANTAIARELAGWCWSLATPLQQGEHGQGGRMNAA

SEQ ID NO: 272331 - protein, 407 aa, unidentified
MHYLRIDISKKSFTVSILDEEGEAITKFLTFPCTRKGMEKLVDKICSLKLEKDKTVIGIEATGNLWENLYSFLEGYKVIILNPYQTRKYHQLLSKKAKTDKVDSLVIAGLLRSKEALTSYVPEDEVQVLRELVRLRHYLQKDKKNYLRKAYTLLNLVFPEYTNLIRSPFKKVSSMILLKYPTAVDMARAKKTDLVKWVRRIQGNNYSFELADKLIEAAKESIYSGKASEVRGMALRILIDEIQSLQNKIKEIEDKIDEILSFNEPSSPQKRLLSIPGVGPKTVAAFLGEVGDDVSRFSSANKLIGFIGWHPRISESGNSKNLHPKMSKKGPSALRASLCMAAVASLKHNPHLRSLYHRKISEGKESKQALVSVGKKIICIMYSMLKYEAEYDPQRIFFQFEKEQVLI

SEQ ID NO: 272332 - protein, 369 aa, unidentified
MNDITYVGLDVHKATVCVAIAESGRGGEVRAVGVFENRPDVLRKMVARLGKHRRRLNFCYEAGPCGYGLHRLLTGLGHDCVVVAPSLIPMKAGDRVKTDRRDALMLAKLHRAGELTPIWIPDAAHEAMRDLVRARATAVRALSKARQHLQGFLLRHDRIYHGARAWTLAYRRWLTTVRFDHPAQQIVLQDYIHAVEDAESRRDRLTRQIEELMPSWSMAPVAAALQAMRGVALVVAVTVVAEVGDFRRFTNARQLMAYLGLVPSEHSSGSTVRRAGITKAGNALARRVLIEGAWTYRMSARVSRKLHDRLEPLSAAIRDIAWKTQVRLCARYRRLAAIGKPKVVVTTAIAREMVGFIWAIARVAQPELI

SEQ ID NO: 272333 - protein, 316 aa, unidentified
MTTTAVVVGVDVAKDRLDVAVRPSGEVWSEANDETGITTLVARLRPLGPALIVCEATGGFERAAIAALAAAGFPVVVANPRQVRDFARATGQLAKTDQLDAGILALFAERVRPTPRPLPDAAAQLLDAVLTRRRQLLEMLVAEKNRLGFAPKPLHRGIQAHIRWLERQLDDVTKELAGLIEASPVWRAKDDLLQSVPGVGPIVSFTLLGELPELGTLSHKQIAALVGVAPLARDSGTLRGKRLVWGGRASVRTALFMAAMCGRRWNPTLKVFYERLKAAGKPTKVALIACARKLLTILNAMVRDQSRWTPNVQYSC

SEQ ID NO: 272334 - protein, 338 aa, unidentified
MYVGLDVHKTYNQACVMDESGEIIKEQKFLNTKEELDQFLETIPEDSVIGIEACSVWQAIYGEIESKGFDVRLAHPMDTQLIAKSKVKTDKIDAQALAKLLRLDEFPEAYVPPEHMRKLREIVRHRYALVKIRSHVKNMVHGILLKTGNQLELTDIFGKTGMLTMRSTEFNIQPQYRFELNHYLDLIDYINQQIEETNAYIDVQAKQIPQVEILKSVSGFGTYSALLLYAEIGEISRFNNHKQLCSYAGITASVYQSGSTTRYGHITKQGNKMIRWILMQAVLKTARRPNGIQRFYKRMLNKKGMKIAKVASARKLLVYIYIMLTYNVRFDQLRVNSA

SEQ ID NO: 272335 - protein, 409 aa, unidentified
MRFVGIDWAHESHAVVVLDATGQVVGQRTIQHLAADLAALTAWLEEVAPAASGRVVGMETGAGLLCEYLLDRAQAVYLFNPKVVDRYRDRLSPAGAKDDRRDAEVIAGILRTDRERFRPFEPDSELTTEMRLRVRGRQRLVEKRTAATNELYDALRNYFPAAVRLANHWSDPWFLDFLRRFPDPDAASTAKPAALARLLRQHRIRKWNAADLRAHLARERLPVREAILRGQRAVVLDLVEQIAVLNDRIEHADQDLAGLLKQHPDRDVILSLTGVRTTLAARMLAEIGDDRTRLADHSTLQARAGTAPVTKQSGKGRVQVTMRRACNRRLQNAFFQHARTSRARSPWARAYYDEQRRAGRSHAAATRNLSNKWAKILATMLFRKEKYDEARHLRHLEESRVPWWIRQAA

SEQ ID NO: 272336 - protein, 399 aa, unidentified
MFVGIDWANESHDICVVDPAGKIRGRATIAHSQEGFDELTKHLGRWAEQGEILVGIERPEGRLVDRILEAGHPIVLIPTFAMKDLRRRYAVGGAKSDPGDAYVIADVTRTDGHRLRHLEPLSEETRALRSVVRARGDLVDQRVALGNQLRACLQAYWPGAAVIFADVCSEIALAFLERYPTPDAAARLGEVQLASFLKKAGYSGRRSAIELLERLRSAPEGIGGVEAEARADSVRAMLRVMRSLNRSIKDLDRAVVAHLGEHPDAEVFTSLPRSGRINAAQMLAEWGDCREAYPCPDAVSMLGGLCPVTHASGKHRDVAFRWACNKRLREAITTFADNSRHASPWAADIYRRAVGRGCDHPHAVRILARAWVRVIWRCWQDRRPYDPALHGAAVLLEAA

SEQ ID NO: 272337 - protein, 412 aa, unidentified
MEEVFTCCAGLDVHKESIESCVRRIEPNGRLHQETRHWGTMTGDLLAMAEWMTAQGVTQVAMESTGVFWKPIFNILENRFSVLLVNARHIKQVPGRKSDIRDCQWIAQLLQHGLLKGSFIPPRSQRDLRDLTRYRTQLANEKVRTANRIHKVLEDTNIKLSSVATDILGISGRAMLEALIRGEEDPVKLADLAQRRLRGKIPQLERALQGHLTEHHRFMLQLLWKQLAEQEKLIDELDDKIKKQARPLAAELDRLDAIPGVDRRVAEVVLAEVGANMQPFPSHENLASWAGMSPGNEESAGKRQRRRITPGNRWLKRTLAQAAWAASHVKNSYLASQYRRLASRRGKKRALIAVGHSMLVIVYHMLKAGTTYADLRGDFFDHLEPKRLTHYYITRLERLGYKVTLESYAPAA

SEQ ID NO: 272338 - protein, 332 aa, unidentified
MAYDFVIGVDVGKYFHHACVLDPQGRQVLSKRINQHKGSLRKLFGQFLADNTSVLVIVDQPNNISRLTVAVAQDMGADVRYLPGLAMRQLSRIHVGNSKTDVRDAFVIAHAGLNLPDALRSVDRVEEVFIQLKVLNGIDEDLARAYTRLINQMRSALVGTNPAFDHVLRGQMIHRKWILHLLAKYGGPTKIRRIGKTRLAAFARSHKARNPEPVIHAMLAAIHTQTVSIAGAEYPELSVAMSAKDALAKLAHRKEIEAQVLKLIQDIPQTEILLSMPGIGPRSAAQILMTVGDMSDLPDAAHLASYTGLSPRTNQSGTSIMPNSPNRAGNKN

SEQ ID NO: 272339 - protein, 402 aa, unidentified
MNCVGIDVSKGKSMIAVMRPFGEVVVSPFEVRHTASELSELARLLKNLDGETRVVMESTGNYHAPVAWLLHGAGFYVSVVNAMLVHDYGNNSLRRGKTDKKDAVKLANYGLDHWLTLPRYVPEEDTRLMLKTCYRQYQQYSKVQTMLKNNLISLLDTAFPDANRLFTSPPRADGSEKWVDFVATFWHCECVCDLSEKAFAAKYQKWCRKHGYNFSEDKALDIYASACRHFGVIPKTDTAKLLVEQAISQLQTTSAALAALKQEMQSLAASLPEYPVVMEMFGVGPTLGPQLIAEIGDVRRFHSKKALVAFAGIDAPPYQSGQIDVRSRSISKRGSASLRRTLFLVMGVLLQCAPMDEPVYQFMNKKRSEGKPYRVYMMASANKFLRIYYASVKAYLDSLEHD

SEQ ID NO: 272340 - protein, 418 aa, unidentified
MHEIQSWFAGVDWASQKHDVWLADAGGKRLGQRTFAHSGEGLAQMCDWLIGTSGGKPEDIHVAIEVPHGAVVETLLDRGLKVYSINPRQLDRFRDRFSPAGAKDDSRDAETLSSSLRTGRRAFHQVSLASPAIIELREWSRMADDLKSDQVRHANRLREQLQRYYPQMLQFDSDLAEEWVLKLWEAAPTPVKAARLRQAEVEKLLKRHRIRRIGAAEVLAILKEQALVVAPGVTEAAVAHIRALIESIRLFTQQLKEAHRQLDKLCNLLAEPIASENEQTGPKPEQTLVAILQSLPGAGRIVLSTLLAEAFETLQRADYAILRKLCGVAPVTRRSGKSRAVTRRLACNPRLRNAIHYLADAARRCDEKSKTKYLALKARGCSHARALRAIGDRLLYVACAMLKNRTLFDPRLESQNCA

SEQ ID NO: 272341 - protein, 322 aa, unidentified
MAMLSFGGIDVSKDRLDVVVLPEEECSSVPNDAAGWAELVERLRGFSITAIGIEPSGGYERGAMPALLAAGMPVRQVNPFKLRQFARASGVLAKNDPLDARMIASFVTIMPTRPAQRQTPAAERLAEMLAIRRQLSTEKVAAENASRLLEDAMLQRLSRRRIVRLAADIDLLDKRMVEIVATDDALVHRYRLLTSMPGVGAVLACTLIALLPELGRMSRKQVAALVGVAPYAFESGTLKGRRCIWGGRAHVRQVLYMAAMSASNWNPVLKAFHDRLTAAGKLPKVVIVAVMRKMITMLNAMVRDDVVWADRLSGRHVLPTAR

SEQ ID NO: 272342 - protein, 354 aa, unidentified
MIMIGADYHPGFQQIAFVDSDSGEFQERRLQHREEAEKFYRELAAQRMEVRVGMEASGHARWFERLLAELQIELWIGDAAEIRTRRVRKQKTDRQDAQLILKLMLKNDFPQIWVPSWENRDLRQLLWHRHRMVQARTRIMNQLQAVALNEGLRCKKRLWRKHGRQQLESFRLAPWASRRRRDLLELLDRLNPTIAELSQAIEQEAEKFPEARCLMTHPGVGALTALAFVLIIGRADRFQCGKQIASYLGLVPLEDSSGNRRRLGHITKQGSSMLRFLLVEAAQVTARNLPEWRSKYFHLAMRRGRKIAKVAMARRLAVALYWMWRKGWDYERVKKFGSHAGQLEPGHGVQSNTE

SEQ ID NO: 272343 - protein, 524 aa, unidentified
MPYHVRRIRRDSPKSKPRSIKTLQKPNGVISPRVQKVGGEHFAIVCVDPAKHRSAWMMADYFGNVLIEPQVLQHVGAGFKLAVEQIHQVQQKHDIQDLIVVVERTGNYYLPAKRAFAGAGFETRVVNPFATKQYRMPANPGNKTDETDLFAQHRAAVAGFGLCEFELESPYRELQLRARHRRNLVQQAAALACQIREHLHLGMPGYANLFDRLFESPTPLAIAAACNSPAKLVELGALGLSRHLRKRKIPHRSPSIEKVLAWAAQAINGPIKDGPMHHAIWTDLHELYQHFHTQVAALERELASDLVQTPYIRLLAIPGINVVSAAELAAEMGPITRYANANSITGRSGLYPSRHPSDQTDNDRGPLIRHANRRLRCVLMRIADNLACHCNYYRAQADLDDRRGVDKRASRVKIAKRFSRLALACVANDEPMRHSCFQQPDSILEKLRRFHQDHETPVDRLLTDLNAAVGQLPYNTRRHEAKIVAGVLQERAQRRRGASAIGDLLPAVLARLNATEENKCGDRS

SEQ ID NO: 272344 - protein, 409 aa, unidentified
MDVIYPRCCGVDVHKREVVACVVSSGPDGAPSKAIRAFGTMTPDILALADWLAAHEMTHVAMESTGVYWKPIWNLLEDQFELLLVNARHVKAVPGRKTDVRDCEWLADLLRHGLLTGSFVPDRPQRELRELTRYRTSLVRERTAEANRLQKTLEGANIKLASVATDILGKSGREILAALVAGETDGAELAQLAHGRLRDKLPQLERALAGRSGPHQRFLVAQQVAHVDFLDVAITRVSAEIAERVRPDEDAIARLDTIPGVGRSVAELLVAEIGTDLTRFPNAKHLASWAGLCPGNHESAGKRRSGKTRKGSPWLRACLVQAAHAAARTKGTYLAAQYRRLAARRGRAKAAIAVAHSILIIVYHVLMDGTVYCDLGGNYFDERDRQGVERRLVHRLEGLGYRVSLEPAA

SEQ ID NO: 272345 - protein, 388 aa, unidentified
MYYVGIDIAKYKHDCFIFTSEGEIVLESFTFENTREGFDKLKLVLDALDHSQKIKIGLEATGIYGKNLKLFLSSIGYDFDELNPLQVKRFTNALSNRKTKTDKIDASQIARFVSTGASRTYVYSSYHTEALKQLTRARNSLIDERSKHQTVLTGILDVEFPEFKEFFNNKFTDTALYLLNKYKTVKRISKLSHNDCVLLHNKSRVISTSRFEELRESAKNTCGHHFDYNDSLISANLQIIKCLNNEIDKIEKEINSIMSTINSPVVSIPGISAISAASIIGEFGDFARFDNAKQLCAFCGVEPSIYQSGTSYHEGKMVKHGSSNLRRTLFNAVPYIIMHNETFKTFYNKKRSEGKAYRVAQSHVVKKLLRVIFTLEMTGSTFDPSKLY

SEQ ID NO: 272346 - protein, 310 aa, unidentified
MNIHPGFVGCDVAKHFLDIFDARTGVCERIANAGPEAAALAAKLAASGDLIVFEATGAYDRTLRTALSAAGARFARVNPGRARDFARAAGALAKTDKIDARMLACMGQALELGPETIPDPEREKLTLLVKRRDQLVETRAQEKVRRGEIIDKKIRANIDAHIAWLDKHIARLNLEIALVCKQCASIAREIALTRTMPGVGAVTASVVAALLPELGQRSPKAIAALVGLAPFAADSGQRRGRRSIKGGRRRVRQALYIAAVSAVRADTPFKAFYLRLRAAGKPAKLALIAVARKLLTTLNAMVRDNVAFQR

SEQ ID NO: 272347 - protein, 371 aa, unidentified
MDRVCGLDVHKDSVFMCILTANGEKIEDVFGTLTPELDRLRDTLVSHGVGKVAMESTSIYWVPIWRILECDFDVKLVNPYFIRQLPGRKTDIKDAQWIATVLQKELIKGSYIPDSKIQELRQYSRRIFHLTRRKQQAESAIDLTLQRCNIRLSNYVSDIGCKSMRKVVNALICGETDSEVLALLVHKRIRNKHCHEVIKSSLTGIVSSSDRDMLKMSLEEVELYDRQLLECKEKMRIICEGHYAEELEILQTAPGIKEESAMRIIAEIGVDMKAFLTASALVGWAGLRPRNDQSAGKIKGRKTLHGNKYLRVMLTQCAWGACRTQTSKFYSRYHTLKKRMNHKALMANARKLLVVIWNLLAKKQPYMPFVN

SEQ ID NO: 272348 - protein, 314 aa, unidentified
MTNPKQRAGINIGVDVGKFQLDIHILERDRHFSVENSPNGIREALKIICRFKVSRIVLEATGRYELDFATAAFEKGLPVCIVNPIRVRSFAKADNQLAKTNKIDAKVIANFAAMMKPEPCAHKGKNIRLIRDLICRRRQLVEMRTQEYNREKIMGSKVERSCNRIIKSLNQEIRWTKNHLAKAVQQQDEWSQRKEILLSMPGVGDTLVYTLLADLPELGELSNKQIAALTGLAPMNRDSGNLKGKRRIIGGRHAVRTTLFMATLSAIQCNPILSGFYRHLVKKGKHKKVALTAVMRKFITILNTMVKRNELWAH

SEQ ID NO: 272349 - protein, 442 aa, unidentified
MDEKAQIVTWESHVYFMGFDWATKHHAAVVLDRAGRVVLDLQISHTAEGWRHLREQLAQVAGPELQQVAAAIETTCGPAVEQLLGLGCTVYPLNPKSAQRYRDRKAPSGTKTDHLDAWSFADALRTDGHAWRRLKPEDPKIQELRLLCRDEVELIGQRTALVNQLRDAVEAYYPVILEAFEDWTLPAPWEFVQQFPTPEALQKAGKRRWEKYLHTHHLSDPRTYTKRLDIFGRATEFCGGPAATNAKSLLAISLSKQLQLLHRLLRSYRDRIEQLFRQHPDHDLFGSLPGVAEKLGPRLLSECGDDRSRFEDHEALQCYAGTAPISFQSGQIHRVKFRRACNKHLRTAVHQWADRSRFQCTWAQVYYDQKRREGKSHACATRCLGQRWLKILWKMWQTKQPYDEQIHTRNQTKHGSWVLALNQQNDASAKSLKRTMRKDLQT

SEQ ID NO: 272350 - protein, 410 aa, unidentified
MEVMFDRVAGLDVGKDSVTVCVRTPGPRGGRRSVTRTFKTMSASLRVMRDWLVEAGVTIAAMESTSTYWKAPFYCLEEVMEVWLLNAAHMKAVPGRKSDVRDAEWIAQLLEHGLLAPSLVPPPDIRRLRMLTRYREQLMGDRTREIVRLELMLEDASIKLSSVVSSLKTVSARAMLTAMIDGEQDPLVLADLAKGKLRRKIPDLAQALTGHFDANHARLARSMLRRLELVEQALVELDAVIAEACRPWQHQIELLQTIPGVGPKVAQVIIAETGGDMVRFPTPAHLAAWAGLAPAMHESAGRQFPAGKRHGNKWLAAMLVEAAGSVGRMHGKNYLAARHARLLKRRGMGRAQVAVAHSILVAAYWMLKRDEPYHDLGADWHRRRNDQAHTRRLVAQLEHLGHTVIINPAA

SEQ ID NO: 272351 - protein, 451 aa, unidentified
MIPPAPWDTLPALSDTLREVVNDMEEKTLIVGCDVHQKTICFCLLDKATGQPVAAPFTLPNDRFGAEQAIQTLQRLLSHHRYTRLEVGMEATGFFWLPFYRAIERSDLLAPFHPRLVLFNPKLVAHFKKGLDLSPNKTDNRDARAVAERLRFGRLPVTHVPDDFWQGLRRLTRYRYHLAHDLAREKVRFVTYLFLKLSAWAQVQPTSDLLGATSAALLTEFTADDLVQMPLTALADFIARRGRHQFDDPEATAQKVQEALRRSYPVTPELDGAVTFSLSLMRDHIRHLEQLLKRLDREIARWIEGVPNPLETVVGLGPVVCAGILAEVGDIRRFPGHPQLAAYMGLVWKRRQSGSFRAEDTPRVSGGNPYLRYYITLGANNLRQHNLEYKAYYWRKYRETPHHKHKRALVLTGRKLTRLVYTLLAKNTAYAIPQTVLKNGEEVALLMAEVG

SEQ ID NO: 272352 - protein, 456 aa, unidentified
MAKSKKAKMIKSPDGNKLAIVNPDAAGIDIADKEMQVCVPEDRDGENNRCFGSFTCDLNIIVEWLRACRITTVAMEATGIYYLQLFLKLQDAGIEVLLCNPRDVKNLSGHKTDSADAEWLMLLHRYGLLKPCYQPGNAARQIRNLCRQRNNIIRSADKQIQYMQKAMEQMNLKLSTVITDITGMSGRDIINAILAGKRDPAELASLAQANCKTPREEIAKALEGTWDIDLLFMLQQSIDAYDFFTKQTEECDKQIETLLVAYQARLDSDVNALVRHKRKKSARSKNAPEIDIEKYAFAIWGVNVFDIPGLKDLAVMQLIGELGHDFVDKFENAEKFCRWCNLTPENKISGGKILSSRVQKRKNPVGQIFRKAAAPMAREKSEMGNYYRRIRAKGGALQANVATAHKIAKIFYTMVKTKEKYNPAKVGLDEMEITQKKILRLERALEKLNQKYKKTG

SEQ ID NO: 272353 - protein, 335 aa, unidentified
MEFNHYIGVDVSKNTLDFAVNANGQIISQFKCENHKKGITQLIKQMRKLPGFKITEAVFCMEFTGIYNNYLVDYLLGAKSSIWMETALRIKQSQGMTRGKSDVIDAVRIADYAYTFRDKIRLWTPTREELKKLRLLITMRDRLVNSITRFKVSAKENQEFSSKEFQKLESRLTKNSITAMKKDLASVDQQIKELVKKDPHLNELFQLMTTVTGVGPVVAVNILVTTDEFKKFETPAQFACYSGVAPFEHTSGKSIRGRSRVSHLANKKIKTLLNLAARAAITAKGELREYYLRKVAQGKNKMSVLNAIRNKIIQRIFCVIKRGTPYQKNYLNPLA

SEQ ID NO: 272354 - protein, 316 aa, unidentified
MVPSPLFVGIDVAKATLDIAVRPTAETWSASNDATGIDALVLRLGAWAPTLIVLEATGGYQGPLVAALVAAALPVVVVNPRHIRAFAQAVGILAKTDRIDARVIAHFAEAVKPAPRPLPDAETQELRALLVRRRQLVEMVSAERARLDTVPPSIQDAIQAHIAWLTTQIAGLDDALTRASQTHPVWQAKDDVLQSIPGVGPVLARTMLGQVPELGTLGPKPLAALIGVAPFNRDSGTLRGRRTVYGGRAEVRAVLYMGALVATRHNPVIKTFYERLLAAGKAKKVALTACMHKLLTIMNAMVRDLKPWQPQEVPSA

SEQ ID NO: 272355 - protein, 328 aa, unidentified
MCTLGIDVSKNKIDLCLLTAGPGGKKKHKVLTNEPAVARKVVDWLNAQKCVPESVTVVLEATGIYHENLAYGLHEAGVSVCMANPCRVREFAHGMDILNKNDAVDAFVLTCYGELKSPAVWVPPSPEVRKLRALLRQRDALREDVQRTVNRLEKANSTSTPQEVIRSLERTKSWLNEELARIEKLITDHTDNDPGLKADLDLLKSIKGVKDQVGREMLALLKDGTFKSASQVAAYLGLTPVEKTSGSSVRGRPHMSKTGPSGVRAKLYVAALTASRWNKQAKAIYERLVAKGKAKKAALGAVMRKLVHLCFGVLKTRLPWDENYVATA

SEQ ID NO: 272356 - protein, 416 aa, unidentified
MTDDARWFVGIDWASETHQVCLVDAGGKIVGERGFPHGGAGLAEMCIWLLVTTRAEPTVIAVAIEVPHGPIVETLLERGFLVYAINPKQLDRFRDRFTVAGAKDDRRDAHVLGDSLRTDRHCFRHLAAEDAVTVELREWSRMAEDLQQERNRLANRVREQLWRYYPQALKISDDLGADWFLELWAAVPTPAKAARVHESSIDRILKTHRIRRIAAAEAAQVLRQQPLTVAGGTVEAASAHIRAVAARLKLVNRQIKEAHRRLDALCGKLAAGEEKTASGQAPEQRDVTILRSLPGVGRIVLTTLLAEAAEPVRRRDYHALRTLSGVAPVTKRSGKRCIVIMRQACHMRLRGAVYHWARVAIQHDPLSRCRYAELRKRGHSHGRALRSVADRLLAVACAMLDQQTMFDPGRANKQAA

SEQ ID NO: 272357 - protein, 382 aa, unidentified
MDEIVIIGMDPHKASNTIAVLDSTENLLTRRRFENSDDGFVEMLAAVGEYRNRVWAVEGANGMGRSIAQRLVGFDERVYDVPAKLATRVRVYSTGHGTKTDNTDALAIARAALHSRHLRIVKPDDETVAIKLLSDRRKELVGLRTQAVCRLHRLLRELIPGGGPALITADKAFDLVNDLQLDDPAGQMRVEIALEHIEDIMRIDLKIDVVAKRIHAEIKASATTLTRVYGIGPINAALIIGEVGDVSRFPSRDHFASYTGTAPVAASSGDHQRHRLNRAGNRQLNHALYIAAITQIRNDTPGRDYYRSKLAAGKSTKEALRCLMRRISDAAWRQLQLDRAPEQTQDQAWPRWPSKRGNLQQYRSPDTLRMNGRPQPFKPAAV

SEQ ID NO: 272358 - protein, 424 aa, unidentified
MNCNQNFKISQVTEGTLVLGIDVGSNTHYARAFDWSGLELSKVFKFKNSFEGFQSFVLWVNDLCCKYNKSKVIAGLEPTGHYWFSLGELLKENNITIAIVNPYHVKQSKELDDNLQTKNDSKDPKIIAKLVIDSRYSFPYIPEGIYGELRVADKLKNDITQQIISIKNKIHRWLSIYFPEYENIYSSIDSKSGFLLLKETPLPKDIVELGSEGIVERWKQTKLRAVGLDKAKKLEEAAKKSIGCKNITSSARFEIKLLIEDYEYKQNQLNSITEELNKLCEKIPMIKEIAEIKGIGIATAISFVAEVGDIRRFKSAKQVQKYAGLALKENSSGKHKGLIRISKRGRKKLRTILFRATIPLIGFNKEFSSIYNYYIERKDNPLKKKQALTAICCKMIRIFFTILSKGIKYDETKMLHDIKRPVAA

SEQ ID NO: 272359 - protein, 314 aa, unidentified
MDCSSFVGIDVAKDQLDVALLPTGKKFPVPRNRQGYQQLLAQLPAPGTCLIVLEATGGYEREVVAELLSQGHHVSVVNPRQVRDYARALGILAKTDEIDARVLARFGEQVQPRCLLGSAPELAELQQLVDRRRQLIDLRTAETNRLEQSTSKTASKSIQQVLNVLKKQIEHFEAEIARLVESNDDWKRKAEVLLSVPGVGDTTAAALIADLPELGQLNRCQIAALVGLAPFNHDSGKLKGQRAIWGGRSAIRSSLYMAALSAMRCNPVLKSFSQRLTAKGKKFKVRITACMRKLLVILNTLVKNNAHWCPKTAS

SEQ ID NO: 272360 - protein, 424 aa, unidentified
MKNTAARKLKQVPEGYLIVGIDPHKKRHAAVAMTQDFATLAKFKFDNTREGLETMLDRAKVGMMKSGCRGVMFAIETGGHYWRNIAYYLEERGIPFRFINQFTLKRRREGKDLNRRKNDYRDSEVAAQLLCTGEFTESQIPQGIYAELRAAHNGYRRLVKERTRITNLLKGLLDGLFPEFVQVFKDPSGLTALSVLSTCCIPSVIVEMTEEEFVAIIEATHQGRRLMRRKLKELNQIAKSSIGIGAGSCSVASEISFLVEKLELIKRQIGIVGKTLIKLVDETEEGKYLLSIRGLNYIAVAGLLAELGSFKSYRNAKQMIKMAGSNPTESESAGKRGVHTPMSKQGRPVLRYCAWTSVIPMLRFNEDFRAWAKQMRERPVHANPLSGREVVGAALNRLLRLAFILVKKQSYYRLPLTKPAEVPI

SEQ ID NO: 272361 - protein, 344 aa, unidentified
MKKITTIVIDLAKQVFQVAVYNKHGVLKSNKAMNVKGMMRTVHQHPEAQIITEACGSAHHFARRFIQLGHDAYLIPPHICAKYRTGNKNDKNDTIAIYEAAKNQRTYFVSVRNLIQQDIALLHKLRKGHVDQRTKVANRIRGFAMEYGVSFPLGINKLRQQLPDALENADNELTDIARSSLRALLDMLLQFDVLEAKVKLQIEQLGKQLKPCKALVKIPGIGWLGATMIYARFGSGEAFKRGRDASASIGIVPSHSGSGGKNRLGSISKRGDTYLRWLIIHGARSVVNNIRDKQDGMSCWIRKQLITKHSNITTVAVANKLIRMAVAILKSGEAYRTPVAQRVS

SEQ ID NO: 272362 - protein, 350 aa, unidentified
MDHKCKVIIGIDTHKATHVAVALDTQGTRLAALSIPTNPKGYLELERWSQSLGEVHAFGIEGTGSFGAGLSRSLLAQGHNVVEVTRPNRQLRYSQGKTDTLDAEGAARSVLSGQATARPKTQTGLSEMIRHLKVARDTAVKSRSQAMVTLKTLIINAPADLRDVLDKIRGKVALIRHIAAFRPGEIDNTMASAKAAMRALARRWLWLHEEIITHDKELERLVTERAPDLMTSHGIATLTVAEMLILVGDDPTRIRSEAAFAKLCGVCPIPASSGKTHRFRLNRGGNRQANAALYRVAIVRMRGHEPTLAYVRKRTKDGKSKSEIIRCLKRYIVREIYSQLCLPKSAQIAA

SEQ ID NO: 272363 - protein, 401 aa, unidentified
MISVGIDVAKGKSTVCILKPCGEIVSRPFDISHVEKDLGELAAMLLRFDDEVKVVMEATGIYHLPVLTYLQEKGLFVAVINPYLMKVYRSGDLRKAKTDKIDSRIIANYGIEHWFTMAEFKASGDVYGELKMLGQQYRHYMKLHIMSLHELTHLLDYTMPGIKGMLASWNEGNRKDKLSDFVERFWHYDTITCLSETEFIKQYTFWAKEKKYHQSQDKAKAIYALAREGIPTLSSETPSVKMLVTEAVRVLKEVDATLSIILSRMQELAKSLPEYSVVRGMGGVGEVLAPKLIAEIGDVRRFHSGKALIAYAGIDTPPYESGQFVGSNRKITKRGSAALRKVGYETMRCIKTHPRPDDPVYQYIVKKESEGKSKKAAKIAGLNKFLRIYYARVKEVYTDIK

SEQ ID NO: 272364 - protein, 312 aa, unidentified
MNKTYIGVDVSKDTLEVFIPGRKSSQCVNDKAGISRLVKALQSLGGAIHVICEATGGYERDLANALWDTNMAVSIINPRQAHDFARSRGRLAKTDSIDARSLCEYGQANEPAATPKPELGQQELTELLDLRAHLIGMRIRLKHQIRHLRDQESINQSNELLKLIISQQKKLEDRIAEKINADSEMKRKTERMKEVSGVGDITAASMIAYMPELGKLSRRQASSLAGLAPMNHDSGKMRGKRFISGGRHKVRRALFMAAVGISQFDSVAKAAYQALRNKGKPWKVAITAMMRHLIILLNELLKNPKFKLQTAP

SEQ ID NO: 272365 - protein, 369 aa, unidentified
MENSTTETIGCDLGDKMSDVCVMDAAGRTRRARVASTRKGMTTFFSREPAHVVIEVGGHSRWVSELLEGLGHRVTIANARRVKLISASDNKTDEHDAELLARLGRADARLLAPMVHRSSALQADLAIAKARDTLVATRTKLVNHVRGTVKSFGERLPKCGASGFVRHTRALIPAALEAALAPVYETIAKLDEQICAQDKLIEDKAEANPDVAVLEQVDGVGALTGLVYLLTLEDKDRFASSRMAGAYLGLRPRKQKSGNDDPQLRITKAGDPFVRRLLVLSANYILGPFGKDSDLRRWGLKLAERGGKNAKKRAKVAVARKLAVLLHRLWVTGEVYEPLGYKARRLEDATPQAVTPAPTPSTAGANAAA

SEQ ID NO: 272366 - protein, 425 aa, unidentified
MNSNTNHKINQVSETTLVIGIDIAKQKHFACAMDDRGRVLEKSFPFFQSDAGFEQLVKRIKSLQSLHQKSEVIVGFEPTGHYWMNLAAYLVDQQIRFVLVNPMHGNRTKELDDNLQTKNDQKDARVIASLIRDGRFTYSRILTGVEAELRNGASLRSKLQEDITSIKNRMIRWTDLYFPEFQHIFKSFGKNACAVLEMTPLPIDFDGKSDKELIQLYKNVEGLQCLSFSKIQKLKMLATKSIGLTEGLEMGRFEIKTLLSQFKALSKQLEVLSSRLSELAQQLTDYEYILSIPGLGENTAVELLSEIGSLSHYEHPRQLIKLAGLTLRENSSGKHKGQKKISKRGSRKLRAILYRVILPLIQHNIAFKSLYQYYTTRTVNPLKKKEAMVVLCGKLLKILHALCVKRVHFNASLMIRDLHCLQEAA

SEQ ID NO: 272367 - protein, 360 aa, unidentified
MVESTPIVAFDQHAASVVAAVLLPDQRVPALQTLRPDLPAISRFVERLKRAGVRCCYEAGPCGFELQRHLRAHGIACDVIAPALIPRRAGNRVKTDRRDAAQLAVLYRAGALTPIHVPTEAEEAVRDLLRCREDIGTDLLRAKHRLSKFLLRHGRRCRDAKPWSQRFVAWLAMQRWPLAALEQTFISYRRAIDDLIARRRAIDEDLGAALTLEPLASRVARLRCFRGIDDLSALTIATELGDATRFAAARQVMAFTGLVPSEYSSGASQHRGGITKTGNAHLRRILVEAAWHYRHRPAIGPSLRRRQQTAPSQARRCAWMAQHRLHARYRRLIARGKSPQLAATAVARELSAFVWAALTQ

SEQ ID NO: 272368 - protein, 389 aa, unidentified
MKIYVGIDIAKLNHFAAAISSDGEIIIEPFKFTNDADGFQLLVSKLESFDKNSLIIGLESTAHYGDNLVRYLVAEFYQVCVLNPIKTCQMRKNNIRKTKTDKVDTFVIAKTLMMQDDLRFVSFYDLDMMDLKALGRFRQKTIKQRTRLKIQLTTYVDQVFPEMQYFFKSGLHQHAVYALLKEAPSPKEIASMHMTHLANLLKVNSHGHFTKEQAKELRVLAQKSVGANDSAISIQITQTIQQIELLDSQLEKIEAEMTDIMKFNDSVIMTIPGIGYINGGMILGEIGDIHRFSNPNKLLAFAGLDPSVYQSGNFQAKTTRMSKRGSRVLRYALVNAAWNVVRNNATFKAYYDAKRAEGRSHYNALGHCAGKLVRVIWKMLTDEVEFNLE

SEQ ID NO: 272369 - protein, 341 aa, unidentified
MKQFIRIGVDLAKNAFQVHALEREDGSAVTRKLSRAKMFEFFSRAAPCRVGMEACGSAHYWARELRAMGHAVVLIPPIYVKPYVKRGKNDAADAAAICEAMSRPEMRFVPIKSADQQAVLMLHKTRELLIKQRTMSVNALRGHLLEFGLVAVKGRGGVEGLIALAVEDGGLPQEARDAVRLLASHLEGLDAKIDAVEATIAKASAQNPICRLLDAVPGVGPLIASAIAASVPDPGVFRSGRDFAAFLGLTPSQDSTGGKTKLGPITKKGDRYLRKSLVIGCTATLRVAHKPKGRLAEWIARLRTKKSERDLSVALANKLARICWAIMSTGEAFRTEIYAKA

SEQ ID NO: 272370 - protein, 345 aa, unidentified
MINCNVIAIDLAKNLFQVCKTDKNGKVIFNKLLTRAKLKALLIKEKKSLVAMESCGGTHYWARMAKNAGHLVKSIHARTVKAFRQGQKTDANDALAISVAARQPHIKESRLLSAQEQCLQGIESMRNLLVKQKVSLSNQLRGLLLELGHTIAQGDVKLKRAIPEILEDAENELTHSFRLSIDIIYQRFINTIDEVKLLEDKLAKIVKQDKTCRRFQALEGVGPVCALLMKVALGNASHFKNGREASACIGLTPVQHSSAGKEKIGAISKVVGNKKLRSALYKGALAVVSQLEKREARSQKEVWLKGLTARRGKKVAAIALANKTVRTAFALLKHDQVYQPQLLVA

SEQ ID NO: 272371 - protein, 411 aa, unidentified
MDKIYDNCCGIDVHKKLIVACLRKGNRQEVREFGATTRELLELADWLKTSDCKMVAMESTASYWKPLYNILESSDLNAMVVNARHMKAVPGRKTDVKDAEWIADLLQHGLLQPSYIPDKDQRELRELVRYRKSLVGERTRELNRLQKMLEGANIKLSGTVSDINGKSARSILEYLLTGECIDGAKYDEMYEQKIIAHNLKATKEQIIDDLNGVMTPLQRRMMKELLSHLDELNTHIKNLDDGIDNFMKPEEKQASQAIQDVTGIGNTSAQAIISVIGTDMERFSTDRHISSWAGLCPGDNESAKKRKSGKTRKGNSLLRTTLITCAHAAVKNKKSYFYAQFMRISAHRGKKRAYVAVAHSMLIAIYHILKDGIIFKDLGADYYNQFNKERKINAYLKKLKALGWEAPVVAA

SEQ ID NO: 272372 - protein, 341 aa, unidentified
MDTISLIGIDLGKHCFHLHAQSASGRMVFRKKLTRSQMLTLLGNLPRCTVVMEACAGAHWVARRVEVLGHQAKLISPQFVKPFLLGNKNDFADAQAICEAASRPGMRFVSPRNETQQTLSAMHRVRESLIRDRTGTINQIHAFLLEFGISLPKGIAVIRRLPAILAAHDLPPRLIALLERLQAHFKYLDEQVSAVERELMQQLREDERSQRLLEIPGIGPVTASVLATELGDAGQFASARQFAASIGLVPRQYSTGGKPTLLGISKRGDKNLRRLLVQGARAVMQQIERRPDRLGCWVRSLLTRRHSNVVACALANKLARIAWAVLARGTRYLGEQAVTAA

SEQ ID NO: 272373 - protein, 345 aa, unidentified
MNKSKVKQNPSKGKSPSNDAYDHFVAVDWSLRVMAIAHMSRGSKQPTVFERPSDVRELKEYLDAMRGRKVVGIEETTTAQWLYLELVDHVDQIIVCDPYRNRLLTEGPKTDKIDAAKLCLLLRAGLLKAVFHSVSDLYELRHLISAYDDLVKAGVRAQNQQSALEQGHSDTGNSAPFILEHLTSSIELYRSSKHQYEQKFLELSRQNKHVRNLLDVTGIGIIGAVKIVATVVDAHRFPRSGHYLSYCGLVQHEQISGGRSYGRRQPRFNHTLKAVYKVAAMAAISGTTNPMRVYYDSLRARGVAEHNARHAVARYIARVTFGMLKTGKRYHAFQQRRHTTERQVA

SEQ ID NO: 272374 - protein, 312 aa, unidentified
MIPVRVPDVFIGCDVGKHQIAVFDSRTCKTTVIANNPAALAAFAATLDEDGLAICEATGRYEAALLDALTAAGRRVHRADARKVKAFIRSWGTLGKTDAIDAGALARYGQERHATLRRWQPEDPARQRLHALIMTRHSLVADHTAWSNRAKAPATAATDRFIQPVLACLKAQLAAIDAAIAALIAGEAPLDRSVARLRAIPGIGAQTAAALVALMPELGRLGRRQAAALAGLAPHPNQSGTRNGYRRTQGGRPEVKRLLFMAAMAAARHHPALRQFHHRLIAAGKKRIVALVAVMRKLVVICNASLRPVLAG

SEQ ID NO: 272375 - protein, 401 aa, unidentified
MRVVFGIDVSKATSTVAVVVNKNKVAGFEVQNNRSGFDKLLKSLANFQKPEIVFEATGLYSRRLRVFLDDYGYRYTQLNPLASKKQLDRLRPNKSDKNDAFNLAETQFQITRALTYVQPPVYQSLLDWSRFYDQVTVDAVKDKNRLHKALQCTFPEVENLLNAPTGHLYWHLLRQFPISSTVTKLSSTQLSKTIEKVPHVSHQRSIELANRLSQLASESYPCVGEKSAMVEEVCYLATELLRLDTQKTEIINKMAILAQNLPELDILESIPGISINTAVRLIGELGDVRRFKSANKLNAFEGIDLRHFESGEFVAVDHISKRGNPYARKILFRTILNIMTSSRTKPSHINDYIVRKKKQSPGKSSFKKIAIGAIHHLNRTMYHLITTNQKYDYPSAQPKLR

SEQ ID NO: 272376 - protein, 387 aa, unidentified
MPASGPRPGQVAIQISLAAIFVSLELSRSTWLITSLVPGGGDKMSKHSVSSGDIAGLLDHFTKLREKAHARAGASFPIIAIQEAGLDGFWVHRVLERAGIESHVVDAASILTSRRRRRAKTDRIDGEALLRTLLAYKRGEPRVCTVVRAPSPEEEDRRRLCRERKTLVAERVAHVNRIKGVLFAQGISGYEPLRNDRRSRLEALRTGDGRPLPPYLKAQIGRELDRLELLLEQLKAVEAERNALLEPANDAAPVAVQALAGLRGIGPEFTAMLWSECLFRSFRNRRQVAAYAGLAPTPWQSGSVQHEQGVSKSGNPRLRSTMVQLAWLWLRHQPTSELSLWFRERVKRNNGRSKKTTIVALARKLLVALWKFSSSGVVIEGAMMKTA

SEQ ID NO: 272377 - protein, 347 aa, unidentified
MVHVGLDLSRTRLDVHVMDESGAPLAVTTALPEAGGLAALAARIGAEFDGPVYAAIESMNGARFVHDQLELAGWQVEIADAQKVKGLAPLACKTDKIDSWVLAELSRRDLVPAIWLPTPAVRAERERARWRLHLVRHRTALKNRIHATLLAFGHPCPVSDLFGTGGRELLARLALPEPWAADTTAALQLIDTLDHEITECERALRRAGADHGYVPLLMTTPGIGWVLGYTIAAEIGDITRFPSPTKLAGYTGLCPRVYQSGGKDHRGPLAKNGPKYLRWALIEAATHACRHPVYAERYRRTKTRLGRQRGPKIAQVDLARRLAEAIWHMLTTNKPFAPAGAAQPLAS

SEQ ID NO: 272378 - protein, 321 aa, unidentified
METEKEQITFEQVFDRGCGIDIHKKVLVATIRGKGIKEETRTFSSFTESIEELRDWLKANQITHVAMESTGVYWKPVFNILEEDFEIILVNASHLKNIPGDKTDKKDSKRIAKLLLAGLLKGSFIPGKSVRELRDLTRYKRKVIGQIASEKNRIHKFLEDANIKLSSVVSDLSGVVATKIIDAMIGGQEDVRELVKLRHGKMKATVEELAAALTGKLTDHHRFLLRMVKRSIGDKESLIEELDKEIDRLLIENEMVLDAELLSTIPGVDKDSAASILAEIGNKMEQFPNEQHLASWAGLSPGNNESAGKKKVPESPMATIG

SEQ ID NO: 272379 - protein, 367 aa, unidentified
MKKVSTVKAKQGRNISQQKLTIGLDLGDRSSWYCVLDETGSVLLEQRVSTTPKAMKEGFGGMPRCRIALETGMHSPWVSRLLSELGHEVIVAHARNVRLIGESRKKDDRLDAQTLARLARIDPQLLSPVKHRSAKAQADLTVIRARAGLVRARTALVNTVRGLVKSYGERLRGCNVRNMNPEKAQELSPELQRALEPLLAGIESVSERIGEYNERIEQLGQQSYPQVARLKQVKGVGTLIALTFLLTLEDAQRFRKSRDVGSYLGLQPGRRNSGQSEPQMHISKEGDPYLRTLLVQGAHHILGPFGVDSDLRRWGLKLAERGGKSGKKRAVIATARKLAVLLHRLWVSGEAYEPLRNSNPRALPAAA

SEQ ID NO: 272380 - protein, 340 aa, unidentified
MSNISVIGMDLSKQVFHVIGLDERSKVVIKKMLKRSQLITWFSNQQPCQVSMEACASSHYWGRVLSNLGFKVSLLPAQHVKAFVQGNKNDYNDALAIAEATNRPGIHSVPLKTVKQQDQQAIQRMRKQAVHNRTALCNQTHGLVGEYGLVLPKGVNALRKAIPVVLEDAENGLTDLFRQLLRERFDQLIELDAHINYYTDLLVSQAEHCEEIKRLQSIPGFGPIVASAYYSYVGNGEVFSNGRGVSASLGLVPRQHSTGGKNVLLGISKRGDKELRSLLVHGARAFARVANKRSDRLSRWVCQLIEKRGMNKATVALANKLARVAWAVTTRKEAYIAYEH

SEQ ID NO: 272381 - protein, 385 aa, unidentified
MLVNNSNTLSLDLQASKHISLGIDQGDRQWVMTAFDRSSGKKSRHCFKGATKELDCYKKVSDLSRTGKPVSVCYEAGRSGFTPARVFSSLGCECRVLPYGKLQIISSGKKAKTDNIDSVFLSELNPLDKSIPSVWLPEVKQECLRVISREEQRLKRDISRNNNRIISILQRWPVQKVVIHLRAAEWRLKIKEWKNCGAVPELLPVSELKRIEMMTDELELLEKHLLEWGGYMDEQEKKERSIAEQTGEEFTIDVLREYRGIGEVIARTFSWDIGDFKRFRNGKHFSSYLGLTPTPYASGKMFREQGISKQGNPELRRLAIQLAWLWKHWQPDSKIALKWKEQLKNKGRQRKTAIVAMARQLMVAIYRRIVRGEEIEGAVKNRPMQ

SEQ ID NO: 272382 - protein, 338 aa, unidentified
MKLYGAIDLHSNNNVTVLIDEQDQVVYQKRLPNDLPLIAQQLSGYRDRLQGIVVESTYNWYWLVDGLMDQGHKVHLANTAAIQQYEGLKYTDDHSDARWLAHILRLGVLPQGYIYPKEERAVRDLLRKRGQMVRQRTTNLLSLQNLVTRNTGSSISSNRIKTLDAEQIDQLLPNPDLALAVKANLAMINCANGQIDILERTVIDRIKLRAGFSFLKTVPGIGQILALTIMLETGEIRRFPTVGDYASYCRCVGSQKLSNGKKKGSGNTKNGNKYLAWAFVEAANFAIRYNARIKSFYQRKKAKSHGVLAIKAVAHKLCRACYYIMKDQVPFDITKAFA

SEQ ID NO: 272383 - protein, 391 aa, unidentified
MEEKARPRAAFLAFDVGKAAHRACAVGAAGELLFNREVANRPADIDRALADAGPAARVVVDQKRNIGALVVARARVAGNPVSYLPGIAMKKARDMFPVTAKTDAIDAEVIARTAAGMPWTLREVAEETPAAAALRMLASQRDFAVRSRTKAANRLRAVLLEADPAFEAAVDPASPWQLAVLAELGGPFGIRSAGLRRFRSVAERAHGARRHASDRFWAAAAASASSGRPELAAESELVRSLAARVASDAAEAARLDALISDSLAGDEAYEALLTVPGVGPKTAAALVTLVDVSMFRSHDELAAYTGLAPCNRQSGTSLNSSSPSRGGNRTLKNLLIYSCTSLVGTGNRFGRYYDSCRARGMRHNKALKAVARKRLKVIYAVMRDRAPYREG

SEQ ID NO: 272384 - protein, 402 aa, unidentified
MNCVGIDVSKGKSMIAVMRPFGEVVISPFEVQHTASELSELAKLLKSLDGETRVVMESTGNYHTPVAWLLHDAGLYVSVVNAMLVHDYGNNSLRRAKTDKKDAVKLANYGLDHWLTLPRYVPEEDTRLLLKNCYRQYQQYSKVQTMLKNNLISLLDAVFPEVNRLFNSSPRADGSEKWVDFVSTFWHCQCVSTLSLKSFSARYLKWCRKHGYYFSQEKAFEIHSKAQSCISVMPRNETTKLLVQQAIAQLKATSAALAALKQEMQSLAAALPEYPVVMEMFGVGSTLGPQLMAEIGDVRRFHSKKALVAFAGIDAPPCQSGQMDIHSRSISKRGSAALRRTLFLVMGIYLQSAPLDEPVYQFMDKKRSEGKPYKVYMMASANKFLRIYYASVTAYLNTPAQI

SEQ ID NO: 272385 - protein, 332 aa, unidentified
MYLGIDLHKRYAQVAVIDQAGELVEEVRVKNANLDDLAQRYAGATAAIEATSNYYHVHDTLSEYLDVVVANPGKLKLIAHSDKKTDRVDAKQLARLVRLNSIPESYVPTDEVRKARALVRGRQKLVENRTSYANKVHGLLSEHGITEDVKPLSVEGREFLRELSLPAPWNSLLDSYVTIIETLTAEIESLELEIEERAGSLKETQLLMTIPGVSYYSALTIYAELGEIERFDGDKQVVSYVGLNPVIRESGDSRFEGGISKRGSGRVRWILVQCTYVAVHTCNDEYLRRFYDRLASRKSSKKAIVATARKLLVSIYHMLDREEVYDPPGVST

SEQ ID NO: 272386 - protein, 353 aa, unidentified
MEATQLFKDQCLYVGIDVHKKQWSVSIYSAELHHKTFSQPPNPHALKSYLDQHFPGARVRCAYESSKFGFWIYRALISFGYECLVVNPADIPTTNKESTGKTDPTDSRKIAKALRSGLLNSIHVPALVTEGDRQLFRYRKKLWGDLVKVKNRIRDKILFAGIDIPARMDNSNWTKVFLKWLEDVDIPSPTTRLTLNLLLDQYNTLYAHFLKVSTQVRRLQKLPRYKSKAKLLRTIPGIGPLTTVQLLTEIEDIHRFPSFRKFNSFVGFKPTSHSSGEHDWRGHMTYRQHKGLRSSLVECAWTTISADPVMMKRYEELKKRITAKRAIIIIARKLLSRIYYVLKNEKPYELGVA

SEQ ID NO: 272387 - protein, 344 aa, unidentified
MNYMGIDHHKQYSHLTLVDERGQEIKSGRVENLRREVEEFLKGVEGKIVAAIEAGCSSYTMVDLMKGLGVEVKVAHPKELRAIAAAKIKTDKRSAETLAHLLRADLIPEVYQRREENRQAQRVLRQRVFFVRSLTRVKNRIRALLAQQGEEVQSEVSQVRNIFSRAGQRLLRELPLAEPDKSLLQSLLKNYKHLEARIKESDRLVHRLYRQMRPARLIRTVPGFGKFFSVLVATEIADIKRFTKVGSLHCYAGLVPSTYSSGQRSYQGRIIKEGNQWLRWAVVEAVWPAIRADFDLRLYYEKLKKRKKSNVAKVATARRLLSIIYQLLKEDRPYLPYRREGHKR

SEQ ID NO: 272388 - protein, 402 aa, unidentified
MNAVGIDVSKGKSMVAILRPFGEIVYSPFEIKHTSHDINSLVDLIHSVDGESRVVMEHTGRYYEVLALQLSEADIFVSTINPKLIKDFDNDSLRKVKSDKADAVKIARYALDKWQNLKQYSLMDELRSQLKTMNRQFDFYMKHKTAMKNNLIGPTDQTYPGANAYFDSPAREDGSQKWVDFIDTYWHVDCVRKLSLTAFINHYQKWCSRKKYNFSKSKAEEIYGKAKELIPVLPKDSFTKHIIKQAVGQLNVSSQTVEQLRSLMNETASKLPEYPAVMAMKGVGPSLGPQLMAEIGDVTRFTHKGAITAFAGVDPGVNDSGDYSQKSVHASKHGSPALRKTLFQIMDVLIKTKPDDAVYLFMDKKRAQGKPYYVYMTAGANKFLRIYYGRVKEYLAALPTSN

SEQ ID NO: 272389 - protein, 346 aa, unidentified
MTIVEAARGVTGGVDTHLDVHVAAALDPLGGLLGTESFSTDPAGYRALVSWLASFGDVTKVGVEGTGSYGAGLARHLRRVGVAVIEVDRPNRQKRRSSGKSDPLDAVEAARAALGGRATGSPKSRDGAVEAIRVLVVAKRSARQARVKAVIQMRHLGFSAPEQLRCRLKGLSVPALVAEGAKLRPTRSPDPVTAATKASLSSLAHRIEALDRELAELDERIEALLVATVPDLLELFGVGPDTAAALVMAAGDNPGRLHSEAAWAHLCGVAPVPDGSGKTSGRVKAHDGGDRQANSALWRIVMVRIAHDPETRIYFERRVKEGKTKQEVIRILKRYVAREVYRHLPR

SEQ ID NO: 272390 - protein, 355 aa, unidentified
MTIISHLYAFVVGVDTHAKNHVYSVLTKSGEHIDTATFPTTKAGIKRALTWAGRRTGGDLETLWVIEGIGTYGAILADHVAEAGYTVAEAASMNARDRHATGKDDRIDARRIAGAVLSLDESRLRFPRQADGPRQGLRILVKARESMTREKTRTINALTALLRGHDLGVDARRKLSVVTIQTVAKWRIRDESVALTEARREAIRLAKRVVELDAEIKDYAARIEALVKDSPGAALLAEPGIGPITAAVFYLAWSHHGRVRSEAAFAKLAGVCPIPASSGNVVRFRLNRSGDRRLNSALYMVAVTRLSHHKKSQAYMARRLSEGKTKKETIRCMKRSLARSVYRILEATNPIGQAA

SEQ ID NO: 272391 - protein, 347 aa, unidentified
MNQISRIGMDTSKHIFQLHGVDAAEHPVLRRKLRRKEMVAFFAKLPPTVIGMEACGASHYWARELGQLGHTVKLIAPQHVKPYIKRNKNDGRDAEGLCEAMSRPTMQFVPAKTAEQQAALMLAGMRERLVTRRTQLSNAIRGYAAEFGLIAAKGLDKIEPLLAQIAQDESLPALARELFAMHGRNYVQLQAELKKVEARLMAWHRANADSRRLAQIPGIGPIVATALVMKAPDPRLFPSGRHFAAWIGLTPKDHSTAGKTRLGTITRAGDEMLRSVLVAGATAVIQQARRGRGHPSPWLLALLARKSSPKLAAIALANKIARIAWKLMTTGECYNSARMPDTSALAA

SEQ ID NO: 272392 - protein, 389 aa, unidentified
MKIYVGIDIAKLNHFAAAISSDGEILIEPFKFTNDYDGFYLLLSKLAPLDQNSIIIGLESTAHYGDNLVRYLVAEFYQVCVLNPIKTCQMRKNNIRKTKTDKVDTFVIAKTLMMQDDLRFVSFYDLDMMDLKALGRFRQKTIKQRTRLKIQLTTYVDQVFPEIQYFFKSGLHQHAVYALLKEAPSPKEIASMHMTHLANLLKVNSHGHFTKEQAKELRVLAQKSVGANDSSISIQITQTIQQIELLDSQLEKIEAEMTDIMRFNDSVIMTIPGIGYINGGMILGEIGDIHRFSNPNKLLAFAGLDPSVYQSGNFQAKTTRMSKRGSRVLRYALVNAAWNVVRNNATFKAYYDAKRAEGRSHYNALGHCAGKLVRVIWKMLTDEVEFNLE

SEQ ID NO: 272393 - protein, 340 aa, unidentified
MSKIVKQVAGIDVAQTELVVTLGHLLDDFSIELFAYKVFKNSDSGFKSLVDWANKLTDNQVDVHYVMEATGIYHQKFAYFLTDNNHKLSIVLPNKISNYMRTLELKTITDKSCSQAIAQFGLERKLDKWSKPRPTYKELQQLTRERDQIVQERSIIKNQIHAEITEAEPNQKSLERMQARIRFLNSQEKEIKEDIDCIVKENPDLRQIIDRITTIPGVGELTAVIVLAETNGFELIRNKSQLSSYAGLDVKEKQSGTSVKGKPRISKKGNRALRKSMHLPALTAVKWDDNFRDTYARLVSKHGIKMKALVAIQRKILQLIYVLFKNETIYDKDYTIKKIA

SEQ ID NO: 272394 - protein, 407 aa, unidentified
MEVVYRCCCGIDVHKKMIVACLDDGGKRELREFGTTTSAIKELANWLTVSGCEMIAMESTGVFWKPLYNLFELMDLDAIIVNAAHMKALPGRKTDVKDAEWIADLLRHGLLKASYIPSREQRELRELTRYRKSLIEERCRETNRLQKILEGANIKLDSVVKDINGKSSRKLLEKIIANEMPDSDEVSRMIHSRMRPKLDQLMEAIDGITTPLQRRLLAQIIDHIDDLNRRVGVLDEMVKGYMAEYEAAIAAIDEISGIARRSAEVILAEIGTDMSRFPSAAHLCSWAGVCPGNHQSAGKRKQGKTTKGSKTLKSILTQCAKSAKTSKSSYFSAQYQRISARRGKNRATIAVAHSMLIAIYHVLKNNVPFHDLGSNYYDTFNREHKIKSYLKRLQALGWQPDAWGLSA

SEQ ID NO: 272395 - protein, 349 aa, unidentified
MVVVGADVHKRSHTFVAVDQAGRQLGQITVAATTEGHRKAMRWAWKTFGVELRWAIEDCRHLSARLERDLLTAGQAVVRVPPKMMAEQRRTARTRGKSDPIDALAVARAAQREPDLPVASHDEQSRELKLLVDRRDDLVVFRTATINRLLWRVHELDPAMAPPARSLDTTKHQQTLADRLSGIEGLVAELAREELAEVVGLTGKINALAKRIEAAVTVAAPTLLALPGCGALSAAKILGEAAGVARFKSEAAFARHAGIAPIPVWSGNTRGRVRLTRSGNRQLNAAIHRIALTQIRLDGLGKTYYEKKKAEGMSNPEALRCLKRRLARIVFNHLTTDQEASATGLAPAA

SEQ ID NO: 272396 - protein, 369 aa, unidentified
MDKSTAFWVGIDLHQSALMLAAYRGWAKEPEVYETLDPRGPAVGRLIRRLHEDAPVKAVYEASGCGYWLARRMRRWGVDCEVVASSLIPRKPGDRVKTDKRDACKLATLHRGDQLTFVRVPTPEEERVRRIVRTREMIRRDVHRSRQRILKQLQSCGHHYKQGGNWTLGFWRWLRELKMHADENEALTFLRSELEIQEALLASADARILERSLEAPYVDAVGRLRCLRGIDTLSAMVLRTEVCDITRFASASAFVGWLGLGVREYTSVKRSQQGITKTGNSRCRRILVEAAWNNTRRPYVSKVLRARSAKEPADVIAHAYRAQRRLHDTWRRLEPRIGSRKAAVAMARELAGFVWALWWAKPELLTARN

SEQ ID NO: 272397 - protein, 275 aa, unidentified
MSSIAPTRQVTVTRIICGVDIASSSLAARVGQDGAEATFQNSTEGIAGLAAFCHNHDVELVAMEATGGYEQRAFAQLSESDLAVTIVNPRAVRQFAQSMGRLEKTDSIDAGMIAWYAETKKSQPLCLAPQTQLELRARVTRLRQLTELRTTQLNQQRLVTNRAVQAGFRKMLAFVAKQIQELEKSIAALIDADPLWRELDQAFRTIKGVADRTVARIMAEMPEIGTLSNKTISKLAGVAPLAQDSGKHQGQTRCPRRARRSTRNPVHRGQRCGPS

SEQ ID NO: 272398 - protein, 315 aa, unidentified
MTSLTDLREVVDVVIGVDTHVHTHSAAAVDTATGGVLDEITVEATPEGYAELVEFANDHATLRAWAIEGTGGHGAGLCRHLLESSEIVIELDRPKRAARRNGAKSDPLDAIRAAREAMARPRLGTPRTGGERQALSVLLAARRSAVNASTEAQLQVFSLVIAAPEPIRARFRGQKLAAMLNTAASLRVHSSWDIETTSTVVALRTLARRAHAMLKEARELQKALVAIIRGWRPDLLEEFGVGPIVAATALCAWSHPGRVHSEAAFAMLAGVAPIPANSGQVTTRYRLNRYGDRNLNNALHTVVQSRIQYQQATRD

SEQ ID NO: 272399 - protein, 393 aa, unidentified
MFYLGIDIAKNTHVASLMDEKGKTIFKGFSFSNTTEGAKSLLEIIKKYSEFTNVTVGMEATGHYWLSIYSFLYDYNFYAIHVINPIQTDGWRKGAEIRKRKNDTIDSVLIADLIRYGDFVENTLSNEDLYSLRNICRMRNYLIQSAGDLKRKVICVLDQVFPEYQTIFSNTFGTTSKQLLLDFSSPSDFEELSVETLTKTLEKLSRKKVGQSTAEKLINSAKNSFGITFSKESFTFQLKLLIEQIKFIDNQVKECETKIKELMEKINSPITTIPGIGPVLGAVIISEFGDISRFDKPSKLVAFAGIDATVSQSGEFEGTHNVMSKRGSPYLRKALFQAALVASNSDPVLKDYYQKKRAEGKHHKTCIGAVSRKMCNIIFAVLKNDKPYEVPKQ

SEQ ID NO: 272400 - protein, 421 aa, unidentified
MSNVTEFGKKANNQVHELMENVSWVVGIDIGKEKLSCALMDIKKALICRFDVEGSLAGYNELLNRVKKETKGSGKIIFALEPTGHYWMVLGQFFEDHNQSYVLIHPLVVARSREVHRLNKGKTDSLDARLIGELACDRSITRTQIPEDYWATIRFFAREYMDREKEIAREKNRIVSYLETTLPGFVEIFPKPLCMSGRACLRFLANFREASKGDMEHFEMQIRKHFPGKRLMTSRVRRLYDMLQRGDVLGLRAGRQAMFFRIIHSLNRLEMYEGQEEAAKQAMLDMYKKSEYKEYLDSIWGTTPSVNALVLGFMGDPALYDSPASLVKLAGCDPVPNESGKFKGRASISHRGRSLLRKAGDRVSFLLEKRNSVFRAFFNHLMSRQKNKFTKRQARVACINKYFRIVWVLCHYRVPFNPALA

SEQ ID NO: 272401 - protein, 383 aa, unidentified
MRIVCGLDVHKDSVFVCILNEKGEKFEAKYGVLTPELEELHQLLLTHEVKEVTMESTSIYWHPIWRILSDIECLKLVNPYFIKQLPGRKSDVRDAAWIAECTMKDLIRGSFVPDDIVQRMRQYNRRIFDLNKEKVYKLTKLDTLLQRCNIRISNYVSSTDSKSYKDVVKLLSEGIADAEKLTEAIHGRTLKRVGKEVIAAALTGVVNEVDIDLIRQYREEILMDDKHLKECQEKLTEICRKEFPKEFENLQTIPGVKERSATSILSELGADMKMFLTASALVSWCGLKPRNEESAGKIKSRKITHGNKYIRKTLIECAWGANRTQNCFYSNFSYIQTVVRRKNAMKVKVAIARKMLVAIWHVLNEGVAYHDYKKPEAIADGNS

SEQ ID NO: 272402 - protein, 338 aa, unidentified
MKTYAGIDLHSSNNFTGIINEQDQRVYRKRLPNRLDAILEALEPFKETLEGVVVESTFNWYWLVDGLMEHGYKLHLANPSAIKQYEGLKHTDDEWDSFWLAHMLHLNILPEGYIYPKEERPVRDLLRRRLLFVKHRTAHILSLQSMISRNLGANMSCSAIKRLDQEAAESLFESPHLLLAAKGNIAVIHFLKDRIKLIEKAVSSQSKLREEFKYLLTVPGIGYILALTIMLEVGDIARFPGVGDYSSYCRCVKAERFSNGKKKDENNRKNGNRYLSWAYVEAANFAIRFSPHAQAFYQRKTAKTKPVVAIKALSNKLARATYYIMRDQVAYDAKRLFS

SEQ ID NO: 272403 - protein, 354 aa, unidentified
MFQKLDSEIAVIGIDIGKNSFHLVGQDRRGSIVLRQKWSRGQVEARLANLQPCLIGMEACVGAHHLSRKLQALGHDARLMPAKYVRPYSKGEKNDYRDAEAIAEAVQRPTMKFVATKSADQLDLQALHRVRERLVGQRTSIINQIRAFLLERGIAVRQGLHFLRAELPTILAKRTDVLSPRMLRVIEDLAGDWRRLDERIDALSDEIMTLGRQDKGCERLMTVPGIGPIISSAIVAAIGTGDAFAKGRDFGAWLGLVPKQMSTGDRTILGSISRRGNRYLRKLFVQAAWVVLAKITPEGWERYGLKSWIEAAKQRLHRNVLAIALANKLARIAWAVLHKGRAFQCVKTNAPRAA

SEQ ID NO: 272404 - protein, 338 aa, unidentified
MTIVMGLDQHRAQITAEWLDTSTGEISRARVAPAHRAGVRRFVERFRGLELEVALEATTGWRFVVEELRRVGATVHLAEPAETAARRGHKKRAKNDRADARHLRELLMAGRLPESWIPPDHILDLRARVRLRHTLVDQRGEWQQRIQAVLYHHGCRQRRNLMTGEGRQWLAAQRLPVTAREQVTVALSVIDGLDRQLAPLDKELRAWARRQPGCRALMGQFGVGEVTAVTILAELGDARRFSSSREAVRYAGMDITVHQSDQRRAPGHLSRQGPPALRWALFEAAQSAARAGSPDRAYYRQAAERLGANRACLSIARKLLKRAYHTLRELGEEALQPA

SEQ ID NO: 272405 - protein, 358 aa, unidentified
MMIIGCDFHPSWQQVSWVDMETGETGEAKLVHATGEAERFYRGMPVPSLIGMEATGNAQWFMEQVEDLGHALWVGDAAQIRASYVRQQKTDKRDAGHIRRLLEEGRFPKLWMPDREQRDQRQLVLHRHKLVEIRSRVKNELQHLSLNKGMQKQNKLWSVTGQKALRELPLKPWASCRREDLLGLLVMLNQQIGKLDAAVAHAAEENAQARLLMTQPGVGPVTSLAFVLTLGDVSRFQRGKQVASYLGLIPREHSSGGRQKLGSISKQGNRLLRSLLVEAAQTAVRYDPGMKKEYLHRCHRKAKGIAKVAAARKLAVRLYWMLRTEKPYPEIVRIESSPRVALVGASQTVELVGRSRIP

SEQ ID NO: 272406 - protein, 365 aa, unidentified
MIVNEVAKNVEKIISIDTAKNSFQVLVVNQKTGKKKNTKVQRSKFVEYILKQGPCLIFMESCSASQHWARLFESFGFTVKLIAAQHVKAFLRNRRVKNDERDAEAIYKCGIQPDTKFVRIKTVEEQTVALLHTLRKAAVSQRVELSNRIRGILAEFGIVVARGSFNSEIEALFNECEKIHDVNLRVAISSLFEDYHRLEQREKELSEKIEALNKDNELVKIALTCPGVGSLTASAIVAEVGDASQFRNGREMAAWNGVVPSQHSTGGRSTLGGITKTGNRYLRTLLAQCACAVIQNASRHLEQGKDTHLDRFALRLKLNGKPVKKIMIAIANKIIRILWAMLTQRKTFENKANEISDTSAELQLA

SEQ ID NO: 272407 - protein, 428 aa, unidentified
MDEVNRNRLEEFRQLRQEVRHSEEYLIVGIDIAKDRHHAFFGTATGKTLLRRLVFSNDHEGFRKLLDQAEALRVRHGLKKVVYGMEPTANYHKPLGEYLITLGRTVVLVSGVTVKRNRESLDGRWDKHDVKDSANVADLISQGKCLYYEYPSAELRGLRGLLSLKRRLKKQEHGYKVRIRNHLIAQYYPEMDRDWERLGAAGLSIVRWCFPASQIAELDVDPFIQRVTSRRIRVETRRRLEGVWEKAGASIGCEGVPGVEHEAKVMVEGLRQIREMIKETEDKIQELCEQFPEYEYLLTIPGFGPDVSAKVLGAIGDPDRFQNGKQVLKLAGLDLSADRSGKDSDKAIPEISKRGKADLRYALYQAALIASTKNQDFMRYYTRKLEGREREKGIQTKMWVKLSAKMLMIAWTLMKKKEVFDPAYLNAE

SEQ ID NO: 272408 - protein, 388 aa, unidentified
MEPASIQPTAVRIDLGAIFVSLELSRSTWLITSLSPGSGEKMSKHVVAGGNVAELLERFEQLQQKARLRTGKLFPIVTIQEAGLDGFWIHRVLEAHGIESYVVDAASIATSRRRRRAKTDKIDGEALTRTLLAFKRGEPRVCAMVRAPDPSDEDRRRICRERKVLIAERVRHVNRVKGLLFTQGVSGYQPLRKDRRQRLEELQTGDGRELPKHLKAQINRELDRLELLLEQIAAVESERNSLLSMEDQPAVEATSPAAMLLSLKGVGAEFAAVLWTEALSRHFDNRRQIAAYAGLTPTPWMSGTIDHEQGVSKAGNPRLRTTMIQLSWLWLRNQPASALSRWFVDRVQSNGGRLKKAAIVALARKLLIALWKFVTAGVLIEGAVMKTA

SEQ ID NO: 272409 - protein, 369 aa, unidentified
MKQDSTFMAVDDSKRTLVIGILRPGSDEPELRSIPNEPRHLRRLVARLTREGPVRACYEAGPSGYDLYRQLTTLGVACQVMAPALTPRKPGDRIKTDRRDAGKLVRLFRAGELTAITVPDEAQEAVRDLLRCREDTQEDLLRWRHRLGKFLARHGRVYREGRHWTLRHWTWLRAQRFACPVLERTLAEYRGAVEQLLARVAELDHEIAALAATAPYGERVGWLRCFRGIDTLAAMTLLAEIGDFQRFARPRQLMAYLGLVPSEASSGDRMQRGSITKAGNTHVRRILVEVGWHYRHPPRLGAALARRSQGQPPSIRAQAWRAQLRLHRRYRQLVGHGKRPPIAVVACARELVGFLWAVLTVPAPVALAA

SEQ ID NO: 272410 - protein, 388 aa, unidentified
MDMIDAVSNAPIQTTISAIFFSMELSGSKWLITSLSPGGGERMSKHVMPAGDVGGLLEQLDAIRSKAEAKTGRVFPFVSIQEAGLDGFWIHRVLDREGIESHVVDPASIATSRRRRRAKTDRLDSETLLRTLLAFKRGDPRVCSMVVVPTPEEEDRRRNSRERKALVHERVSLVNRLKGLLFSQGVTGYESLKSDRWERFAELVTGDGRPIGEHLRAAVERILDRIELILAQLKTIERVRDSLVAQQPADDQSPACPAQLMTLRGVGPDFAEVLWSEGLYRHFDNRRQLASYAGLSPSPWQSGSINSEQGISKAGNPRLRSIMVQLSWFWLLHQPDSALSRWFHDRVKLDGGRRKKLTIVALARKLLIALWKFARHGVVIEGAVFKSA

SEQ ID NO: 272411 - protein, 372 aa, unidentified
MKNGRPWCIMFFSHQKQIHRKKGGRPMQKIAYLAIDLHAKSFMMGNMDDNGVFKGNLKYSTSEKNIIHAVKSVKAKQKYLTIEEGPLAYWAAQLANPYVEQVFACDPRENALIYKSPYKNDKVDTQRLCRLLRLGELKRVYHAEDDDRATFKAAVQHYIDLRNQLIRVKHKIKAMFRRWGVINVSTASVYSKDGRDKYLELIKHPPIRTQLKRLYYLMDQTDALRKAALKSMKQLGRNYPEIREFMKIPGIADIGAHVFDAFIQTPHRFTKKNQVWKYCRLSIIEHSSDGKPLGYQRLDKSGIGELKALSFRAYMSAMSGDNEVRRFYLKSLKRTHNQKHARLNTQRKIISVMYSIWKKGAVYRPELFSASA

SEQ ID NO: 272412 - protein, 355 aa, unidentified
MSQEKYIGMDVHQASISVAVMDARGKLIMECLLETKAATILEFIQGLRGTLALTFEEGTSAAWLHDLLKPHVSRLVVCDPRKNALLKDGNKSDRVDARKLAELLRTNQVKPVYHGKHGTRALKELGRSYLTITKDVTRVMNRIKAVYRSWAIPCAGTSVYTPRHRAEWLAKLVEPGVRIRAEHLYQQLDSLQPVRLEARRELLLESRKHAAVKLLCQIPSIGPIRAALLVALLQTPHRFRTKRQLWAYSGFAVEIHDSGEYRSVRGKLQRNRERITVRGLNDNHNKDVKSLFKSAAISASTRPGPLHDFYLARVESGMRPTMARLTLARKIAAITLTMWKKGANFDPKQLPSQAA

SEQ ID NO: 272413 - protein, 402 aa, unidentified
MRFFVGLDWASEAHAVCLIDGRGRVRWQTSVAHSAAGLATLVQRLRRWRQRGPLAIAIERPSGLVVDTLVQAGLDVVPIHPNVVKATRPRYSAAGGKSDPGDAFLLADLLRTDGHRFRPLQPPSDDTRALRTLVRGRDDLVAQRVALANQLRALLERVWPGAAQIFAAVDSSIALAFLTRYPTAHSAARLAEKRLSHFLVQHAYCGRRAPRELLARLHAAPPSRVADAEAEAAGDLVRSLVAVLTPLVAQIQQLGAAIAAALQHHPDAPVVQSLPRGGTINAAQILAELGDERRRFSSAEHLAAEAGVAPVTHASGKHHGVAFRWACNKRLRAALTTFANNSRHASAWAATVYQRAVGRGCDHPHAIRILARAWVRILWRCWQNRTPYDLSRHGAAAALAAA

SEQ ID NO: 272414 - protein, 424 aa, unidentified
MKNSAARKMKQVPEGYLIVGVDPHKKKHAAVAITQDFTLRDRFKFDNTRDGLESMINRARLKMADVGCRGIMFAIETGGHYWRNIAYFLDERGIPFRFINQYTLKRRREGKDLNRRKNDYRDSEVAAQLLCTGEYTESRIPQGVYAELRTAYNTYRRLVKERTRVTNLIKSLLDGLFPEFVKVCKDPCGLTAATVLSTCAIPGVIAAMSEEEFVAFIKATNRPQLKRNKLKAIHNVAKTSIGIKAGAKSLAFEISFLIEKIELIKRQVAVVERRLIRLVDEAEEGKYLLSIRGLNYISVGGLLAELGCFKAYRSAKQMIKMAGSNPTESESGGKKKSRTPMSKQGRPVLRYCAWTAVVPMMRFNDDFRTWAKRLRERPVHANPLGGREILGAALNRLLRLAFALVKNGAYYSLPVAVPVIRKEY

SEQ ID NO: 272415 - protein, 343 aa, unidentified
MKLSRVGIDLAKNVYQLHGVDRSGKTVWKRRLKRHQWLKVLLDKTEPGCVIGMEACASAHHWGRELQSRGYTVRLIPPQFVKPYVKSNKNDANDAEAICEAMSRPHMRFVTVKTVAQQDIQATHRVREELKVRRTAKANQIRGLVAEYGLVAPKHLSSLRAAIPDWLEDAENGLTHEFRSLLHGLWQDLLALDDRLCEMDKTIKRLAKDNEDCVRLQQLRGYGPMIATALVATVGDGRQYHKGRQMAAGIGITPRQHSSADKHRLLGISKRGDVYLRTLMIHGARSVVAAAKHKDDPLSRWINEIAKRRHPNVAAVALANKNARMAWAMLRHKTDYNPGFAIS

SEQ ID NO: 272416 - protein, 324 aa, unidentified
MGIDVSAASLTVSIQRGKRRYPIATFDNDPAGHHKLVRWATKGGRRARIGVEATGIYSLDLSLALHRHPQLEVMVINPRASRSFAQAMMKRAKTDPVDAEVILAFIQRMPFVCWQPPSDEILQLQAITRRIHQLKVELNREENRLHADQYRRSLGPIIAQDLAVHIEHIQHRITHLEEQGRHLIAQVPDLESKFQRLLSVTGIGETSALRILAEVLVLPDDLQPNQWVAQAGLDPRPRESGTSVHRPRFISKAGNKYLRAALYFPAMVACRYQENVEAFYQKLIAAGKKPRQAIVAVMRKLLRCLWAMLKYDRDFEGDKFYVLA

SEQ ID NO: 272417 - protein, 339 aa, unidentified
MELCCGMDLHSSNTVIGIVDEKRKHVIDQKLPNDPELIRNFLKPYKPELKGIVVESTYNWYWLADLLQEEGYRVHLSHPVANEQYKGLKHSNDKHEAFWLAELLSLGILKEGYIYPRQVRSLRDVLRKRAHLVRLRSALLVSLQHMISRNCAVKVKTGDIKRLREDLVSPLLSRDEALLLAGQSSKEVIDCLTRQIDKIERWALKRLCREGVFIRLVTLPGVGDILGMTILLETGSISRFREVGNYASYCRKVSSQWTSNDKIKGRGNIRNGNRYLAWAFSEAAEHARRTNEACRKFYDRKLRQTNTKVAHNALAHKLARAAYYIIKDHVSYQEEKMFS

SEQ ID NO: 272418 - protein, 453 aa, unidentified
MSKRAKHLEQIAMVHPHAAGLDIGSREIWACVPPDGDGETVKPFGTFTPDLHRLADWLESQDVDTVAMESTGVYWIPVFEILEARGLKVYLVNARHIKHVPGRKSDYLDCQWIQKLHALGLLRASFRPDSEMCTLRTYLRHRAQLIQHRSPHILHMQKALQQMNIQLPQVLTDITGETGMAIVRAMVAGERDAVKLAQLRDPKCKSSEETFAKALTGDWQTEHLFVLKQSLELYDFYTVQVAACDAQLQQQFSAMKPRWDTAPEVAPRTKPRRKKRNNDPAVEAQAEIIRLTGVDLAAVAGIGDSLALTILSEIGTDMSKWPTEKHFASWLGLAPHNDISGGRVLRSRTLPTNNRAGQAFRQAATSVSRSPSAFGAYYRRKRAQGGPRFAQVATAHKMARTVYHLLKYRVSYAEIGAEAFEQKQREREVAALRKKAAKLGFTLTSPQLIQTGT

SEQ ID NO: 272419 - protein, 343 aa, unidentified
MQTTEASALYAGADLHGNNVFLSLIDGSGQEVYRRRVKASLESVNEALEAYWSRIEAIGVESTFNWYWLVDGLQAQGRTVRLGNPAKMAAYDGIKRTNDHTDARWLAEQLRLGVFLASYIYPREIRCVRDALRRRQLFVRQRVQAMLSLGGLLARYGVEAPGSYALKKWTACEIEATGLEPFVQLQLRTLLGALQDSDQRVKEVETSVKAFVVPSENFQRIQQVPGIGIILGMTIVLESGDFARFSHAGHYASYCRTVQSRRESNGKKKGENNRRNGNPYLAWAFIEAETFAIRHEPKIQAWYERKKRQRNSIVARKALACKLAKAVWHVMKGKDFDRRMLFG

SEQ ID NO: 272420 - protein, 350 aa, unidentified
MTTMTEQAVAVTGGVDTHQDQHVAAALEQLGRVLGTQSFPTTGAGYRDLLRWLSSFGTLGPVGVEGTGSYGAALARHLAGQGVSVIEVARPNRQVRRRYGKTDVIDAIAAARAVQSGEATGKPKSHDGPVEALRVLKAVHRSANKARTQALNQIHQILVTAPEPLRAQLEGRKRPDLLATCAAFRIRADDDSLPAMTRLALRELAQRIVHLDAQLAVLTTRLARITNATAPHLVAIKGVGPDVASTLLITAGDNPQRLSHEAAFAALCGSNPIPASSGKTTRHRLNRGGDRHANSALWRIVIVRMSCDQRTRDYVERRTAEGKSKSEIMRCLKRYLAREIYQALPPAAPS

SEQ ID NO: 272421 - protein, 320 aa, unidentified
MKHKVGKDNTVARFIGIDVSKQWLDVATLPERETRRFSNDGAGQEQLGAWLIQLAPELIVMEATGGFETRVATALAAEGLALAVVNPRHVRDFARAFGILAKTDRIDASVLAAFAEKVHPPVRPLPDEDRRELIDLVDRRRQLVTMRAEEKTRLSQATASARQDIKEHIEWLDERLRRLDIDLTAKLRSSSLWKAKEELLISVPGVGRVTVFTLLARLPELGALNRRAIAALTGVAPFARDSGQHRGRRMIWGGRADVRSVLYMAAVTAARINPVIKSFYLRLKQAGKPAKVALTACMRKLLTILNTMLRTNQSWHAPTT

SEQ ID NO: 272422 - protein, 313 aa, unidentified
MTQSLPQTIGIDISKIHLDAHAYPCGDARQFANTAPGFAALLKWIGQWPVERIAYEATGVYHRAFEQALASLPLVRINPLRARRFAQATGTLAKTDRMDAGILARMAATLQPDVRPGKSPELAQLAELMNARDGLVRDRTALKNREKNLALPLLKRQARARLEQIARHIEAIDKQAQALINADAALLRKREIIVSIKGLGPITAAQLIATMPELGSLENKQAASLAGLAPLTRQSGQWAGKAHIHAGRANVRQSLYMPALVAARFNPDIKAKYTQLISAGKPAKVAITAVMRKLIVMANALLKADRLWQESMA

SEQ ID NO: 272423 - protein, 316 aa, unidentified
MTVYNNFIGIDIGKFNFVVSVYGSKSTTEYKNSSLGIAQFIEENKDILENSLCVLETTGGYELDVLYSLLEKGFKVHRADTRKVKNFIRSFGNAAKTDALDAKALANYAQERFETLDLFEAQSAKSIELFQLVRRRSDLKAMLVAEKNRLKSPSGHLIRESILTILSALKVQIDFITNKINGIIDNDSELKAKKEALKSIPGIGEIVAFELLILLPELGELSRKKIASLGGVAPRSNDSGKFSGYRSTGHGRGGIKPILFLASMAARNSNSEFRVFYEKLISKGKPKMVALTALMRKILVTANAKIRDLIASRATA

SEQ ID NO: 272424 - protein, 343 aa, unidentified
MKAKRYIGIDLHRNCFTACLRLENGREYLKTWKLEQLETFASKLRPTDEVAVEVTGNTRLFHDAVAPHVGRVVTVNPSQFKVITHSVKKTDPNDARNLALYLAKDLLPEVRMKDKTRAQIASLTQTRDSMVKLRTALKNKVNNICSAHGVNLTKESLASEKGLKAVLAMQFDPLVNLELRIIIDQIRSLNASIAELEETIGQEGRKLEGHQNLTSIKGIGGLSGSILLSIIGDISDFADEGKLAAYFGIVPRVANSNETEHSGRITKRGTKLGRTTLIQCSLIAQRYSPYLRTYYEKMKGRRGTGKAIVALARKFLGIIYRTLKNKWVFDDFPNFVLAEEATA

SEQ ID NO: 272425 - protein, 316 aa, unidentified
MCGSKVVTEEQVTNHQQAILKLINELKRDLNMTNGDFIICAEHTGQYTYPLICVCKSIDCKLWLENPTQIKYCSGLTRGKNDKVDAKRIAIYASRFCDQAVCYKRPSEELTRLNQLEAERTLYLVDLSKYKAQLTDQKDFMPKALYKDKSSRLKMLIKSLEQVLKAIEDEMNRIIESTKILSRQMDLLTSIDGIGRVVAMNMIIATEAFTRFDNPRQFCCYAGVAPFAYTSGSSQHSKNRVSQRACKYIKTLLHMSAVAITHRKSGELKAYYERKVDEGKNKMTIINALRAKLVARMFAVIKRDEFYSPILSENFC

SEQ ID NO: 272426 - protein, 361 aa, unidentified
MLYLAIDQHSKQLTVDVRDEAGDVLVRRQVSTKGNAVVEFLDDLARRSADEGGYLAILEVCGFNDWLVDLLPQHGCREVVLVCAPRQSRRKTDRRDADKLGELLWINRQRLQGGQHVHGLRRVVIPSPAERIDRRLTTIRRDVGRRRTRILNQIKHLLMSRNLLHQMPTKGIQTRAARRWLQQLPLEEFDRLELQQLLQQWDLCEQHVRELEVHIRGRHNEHPTSPIVASLPGCGAYTALAIASRIGAIERFASPRSLANYFGLVPGCRNSGEVTQRLGSITKEGSPLVRFLLGQLVLHLLRRDAWMRRWYKRIRQRRGSKIARVAVMRRMTTVLWHMLDKQQAYVPGGPPRRKLPATLPG

SEQ ID NO: 272427 - protein, 416 aa, unidentified
MKIIRFNCCGMDVHKNSVVATIGITNKDTQITRYIQETFSTLNTDLLRLKQWLIDHQCFDVCMESTGKYWIPIFNILEDTVKVHLTHPKYVKAIRGKKTDKKDSKWICDLFKHDLIRFSFIPPKEIRALREIARYRYKLVAMRSSERNRYQNCMTVSNIGIGSVFSDPFGKSAQAVMKEVLESKVIEDDRILKYIHGACKNRDKILDAIKHCYVESDQRFKMNESMRHLEELQIHINNCEIEMIKRASRMFDSFMHITQIPGINTLSAILIISEIGIDMTQFESDKQLVSWAGLAPANNESANKKKSVRISKAGQYLKPLLVQCALGAIKDKESYFGIKYARIKKRRGHKKAIIAIARMILVSIYHMILTGESFNPSDYQSFKAPNSKKVIELTKESAIEFLRKSGFDVSKLTKLE

SEQ ID NO: 272428 - protein, 416 aa, unidentified
MNAVGIDVSSRKSTVAVLRPLGEVVCLPFDVTHDIAGLASLAEKLKALDGETRVVMEHTGRYYEAVAKALHEAGLFVCAVNPLLIKEYGANSLRRVKTDKADAVKIARYALDNWADLRDFTPMDAIRYDLKTLNRQFQLASKQRTASANNLIALLEQSFPGIRKCFDSPVRSDGTQKWVDFAHSFWHVDCVRKQPFAAFCERYRKWCKRHAYFFKLRNAEEVYALAKRAVVLTPKSKVVKVLVQEAANQLISISRSVEVYRAEMDRLAAMLPEYPVVMAMYGVGKSYGPQLMAEIGDVRRFERKQALVAFAGIDPMPNQSGDKNVRSNKSSKRGSPYLRKTLFNVIRTYLQCAPQDEPVFQFLNRKRAEGKPFYVYMLAAANKFLRRYYAKLRDYFASLNPLQPVAPIPTILKATL

SEQ ID NO: 272429 - protein, 344 aa, unidentified
MKVARVGLDIAKQVFQVHGVNERGVAKVRKTLARAKVLEFFAQLQPCLIGIEACGSAHYWARELSKAGHTVKLMAAQYVAAYRKRGKNDANDAEAICEAVGRPNMRFVAIKSEEQQAVLMVHRARSLVMVHRVAQVNQIRGLLAEFGLVISTGVSRLRRELPGILEEAENGLPVLAREVLSRLLEQLREADLRIGAYDRQIRALAAASEPAQRLMQMEAIGPQTATALVATVGDPHVFKNGRGFAAWLGITPRQHSSGGKERLGPITRQGDSYLRMLLVHGARSYLRVVDRKSDAKSQWARRLKERRHVNIVSVALAAKHARIAWAILAHGTEYRPAVMQLAAA

SEQ ID NO: 272430 - protein, 392 aa, unidentified
MVVSVGIDVAKDKHDCFIHSSEGEVLADVFAISNNMDGFHTLLEKIQACTAPQDKIRVGLEATGHYSYNLLGFLLDNGLATCVLNPLRTNLYRKSLSLRKTKTDRVDARTIAAMLLSDAGLKPYTDTAYHNEELKSLTRYRFDKVKERAKLKTSVSRLVCILFPELEKLVPTLHMASVYALLEEFPGAKQVAGAHLTSLKSLLEKASKGRYKRDMALSIRDAARMSIGSRMPAKSLELQHTIRLIRELDAEIHEIEAEIETMMDEIRSPIMTIPGIGCRMGAMILAEAGDLSGFDSPDKLLAYAGMSPSTYQSGQLNNCYPHMEKRGSRYLRYALFNATKYVCLWDPAFAAYLAKKRAEGKHYNVAISHAAKRLVRLIFAMEKFRQPYCSAA

SEQ ID NO: 272431 - protein, 327 aa, unidentified
MTSSASTPVVSLDRVHVGIDVGKARLDLAASDGSVCQGFDNTPQGIASIVALCQELQAASIVVEASGPYDKSLVAACLEKHLPICRIQPAQARAFAHARGQKAKTDRIDAQLLALYAKTMNPALVVAKTASQQELDALVLRRRQLVETRSQESCRLESAPSHFVKKDIEASLRRLHDAIKKIDKKIARLIGDDQDLSGKHQILQSVPGVGATTSAVLLAEAPELGALTHKQISALAGVAPFNHDSGQMKGKRSISGGRSAMRSSLYMAALTARSHNPLIERFAKKLAGQGKPFKLIMVACMRKLLTILNAMVRDGTSFKHAQTPVAV

SEQ ID NO: 272432 - protein, 384 aa, unidentified
MKQTQETLRKEDTTKQKVLYIAFELGNTEWKLAFSDGSKIRYVSIDARKLYQVEREIERARKHFGLAEGIQIVSCYEAGRDGFWLHRYLVSRGIENLVVDSSSIEVNRRRRRAKTDRLDAGKLLGMLQRYVGGEQRAWRVVRVPTEQVEDERNIGRELDVLMAERTMHSNRIKGLLVQQGIVIKNVISKKFLNKLEVACRWDGQRAAGDFKARIVREHERLRMVYEQMRRLKKERAARVQRQATRSMKQVVQLQKLRGIGPESSWDLVMEFFGWRQFQNRRQVAALAGLTPTPYDSGGSVREQGISKEGNRRIRALSIESAWCWLRFQPESHLSQWFEQRFATGGKRMRRIGIVALARRLLIELWRYLNTGVIPQGAHLSRQET

SEQ ID NO: 272433 - protein, 437 aa, unidentified
MVITIQIFNRQIKMKGIVMTKKSKSSTLIQIVHPICCGLDVHKDKISACLITVDDNGKEQHEIREFSSFTQDLQKMKTWLIENKCPVVAMESTGVYWHPVYNTIEDTMEVVLVNARHIKNVPGRKTDICDSKWLAGLLRHGLVKGSFIPPEHVREWRELSRLRKTYTESQADFKRRVHKLFITANIKIDSVVSDLFGVTGLNLIDLLCKNDEVTLEKIQECTKGSLKKKIPELYLSLHGYFKDHHRFQLIGMMETIEMFQNQIEQINGRLELLTRDHEDLLERLDEIPGIDKKSAQSILGEVGVTLDEFKSMVAFIAWAGLCPGNNESAGKRKSGRNAVRNHPFKTILVQIAWAAIKTKGSYYKAKYYKLKARRGAKKAIVAIAHRIGKAIYNIIKNGERYKDLGEEYLSKPNKQRMLKNLAKKADELGMKLVPCEG

SEQ ID NO: 272434 - protein, 360 aa, unidentified
MRTISKSTLFKDQSFYIGIDYHKKSWKVTILGEQYEHKTMSQNPDPDLLAAYLKRNFPGGNYHAVYEAGFSGFSSCRRLSELGVECMVIHPADVPTTQKEKLQKTDKVDSRKLARCLRSKEFEGVDIPEVEMEADRALIRQRFRMVKDLGRTKNRVKSLLFQFGKKIPDRFTASQSRHWSKIYINWLKDLSLIDMSLRQVLDNYIRIGEIQRKELLLINRQVRALSEKNRHKTNFSLLVGVPGIGLITGMTFLAQIGDIKRFNRIDDLCNYVGLVPRMYGSGEMMKTGKMVKRGRKELKIMLIEAAWVAIRKDPALMLKFNELSQRMNKNKAIIRIARKILNRIRHVLTTQKQYVLGVIE

SEQ ID NO: 272435 - protein, 347 aa, unidentified
MKYYSSLDVSLNSTAICVVNHDGTFMSESDVPSEPAAIDQWLKATGLPIERVGLEAGGLSSWLCQELLAMGWPVICIETRHAKAAMKAQQVKTDRNDARGLAHIMRTGWYKEVHVKSPDSQELRMLLNNRRCLLEKRLDIDSQIRGSLRTFGLKLGKVTPVTYEPRIRELVGDNEKFQACIFPMLEVRRVLIEQCKKLEKLVLDYVKEDQVCQLFMTIPGVGPLTALVYKTFVDRPERFQKSRNVGAALGLTPRKYASGEVDYDGHITKCGDSFVRMHLFEAAKVLLSRVGKPSELKSWGLRLAKRSSKKKACVAVARRLAVIMHAMWRDGTVFQSTQVLAELAAAA

SEQ ID NO: 272436 - protein, 387 aa, unidentified
MVASENRSGAYLKYVLGWTAPDGIVMCQNEVVEDLKQGRPSVENLIRIGMDTSKSVFQLHGVNEAEQPVLRKKLRRNQVLAFFAGLSPLKIGMEACGAAHYWARELRTLGHHVLLLPAQHVKPYVQRSKSDAADAEAICEAMSRPRMRFVAAKSADQQAAQMLAKLRAQFIGRRTQLSNSIRGFAAEFGLTAPQGLSRLGDLLADIRTDATIPDIARDMFETLARDYAHISSEVAALDEKLLALHRRSEMSQRLAAIPAIGPVGATLLAIKVTDAHGFKSGRDFAAWLGLTPKNHSTAGKNRLGVITRAGDEMLRSVLVAGATALIQHMRRGSKRLWPWLASLIARKPAKLAAVALANKLARIAWKLMVSGEHYRPIGATGAEPVQS

SEQ ID NO: 272437 - protein, 474 aa, unidentified
MKKHKQAEAKTKSEAIKPIGEQEPDSAGIDLGANEIWVAVPADRDQKPVRQFGAFTRDLMAIVQWLVQLGVRSVAMESTGVYWIPLYQLLEEAGLKVCLVNARHVKNVPGRKSDVRDCQWLQYLHSVGLLLGSFRPAQAICASRSIYRYRQNLLSMAAQHVQHMQAALDQMNIKLHHVIDDLSGVTGQAIIAAILSGQRDPVQLAQLRDKRIKAPEATIAKALEGDWRKEHLFVLAKAWAQYQEVQKQIQDCDQELWNYTRELEACTQVIKPAKVMRLKSELMGVEPLSNPPTQKRFRRKTSKNQPEGPWQQELERFFGVDLTAIPGISVLTGLTLMTELGNDLRAFKTEHHFASWLCLCPDNETSAGKVLRRRTRRSQNRVRQALRMAASSLHHDKSYFGDKYRRLRARLGAPKAITAMAHQLARILWTLITRQLPFDPSVFAYHEKAHQQRRLKRLATSARQMGYHLTPLAA

SEQ ID NO: 272438 - protein, 412 aa, unidentified
MQVVHPVCCGIDVHAKMLVACLILANGEKKKRTFSTMTAELLQLRDWLVAVQCTHVAIESTGVYWKPVFNILEDALTVILINPEHAHALRGRKTDVKDAEWLADLLRHGLLQPSFIPPPVIRELRELTRYRESVVREQSSVANRIQKLLESGNLKLGQVASDALGVSGRMILKALAKGESDPRKLAALARGKLKQKSLSLEQALHGRLTVNQRFVLGELLSRWEQLEAADARVTSEIDKYVQANPKLARARELLDSIPGIGPRVAGVIMAEIGIEMASVFADAAHLASWAGICPGNKATGGKRLSGRTRKGNTYLRSALVQAAWGASLKKHCYLSSQFHRLVKRLGRKKALVAVGHSLLVIIFHVLQNDQTYTELGGDYFDRRHVEQQRDYYVRRLQMLGLKVTLEELPQAA

SEQ ID NO: 272439 - protein, 348 aa, unidentified
MDTTTTIGMDLGNKNHKAVGLGPDGKQRFREEVANTPESVRTFFVRHAGATIGMETGTHVRWIAALARECGCRPVVGNARKLRLIFASSRKNDWRDAEMIAELCRSNKALFHPVELRPAERHKLLQLLKIRDVLVASRTRLVHSVRGLCKANGILLPKCSADSFPNHADDIPVGDREMFDPLLAEIESLAGRIRQLDQMIRQYAGEHFKEDVELLQTIPGVGPVTSACFVAAIPSTDIFKDPRDAGAYFGLVPRQDQSGDMDRPRHITKEGNQMARRNLVTAANYILRDTSQETDLKRFGLRMRGAGNGQVAKRRAKTAVARKLAVVMAAMLKNRKPYNGIAGKGKSA

SEQ ID NO: 272440 - protein, 350 aa, unidentified
MIIIGCDYHPGFQQIAYVDTETGDYGEQRLAHSEGAEKFYRDLAAQGKKVRVGMEASGHARWFEGLLAELAFELWIGDATEIARKRERKQKTDRQDAQHILQLLMENRFPKIWVPSGENRDLRQLLWHRHRMVQARTRIMNQLQAVALNEGLRCKKKLWREKGRRQLEAFRLAPWASRRREDLLQLLDRLNPTISDLTQAIEQEVEKCPEARRLRTHPGVGALTALAFVLIIGRTERFQCGKQIAAYLGLVPLEDSSGNRRRLGHITKQGSSILRFLLVEAAQVTARSIPEWRNKYVHLTMRRGRKIAKVAMARRLAVALYWMWRKGWDYEQLRKFGSHAGQPGHRDGVK

SEQ ID NO: 272441 - protein, 480 aa, unidentified
MASDTMNRKQRKELARRLQSANPGLEVVHSRAAGIDIGNTAHYVAVRPDQDPEPVRRFECFTADLHRLADWLEACGVATIAMQSTGVYWIPLYEILEERGFEVYLVNARHTKNLPGRKSDVQESQWLLKLHTYGLLNNSFQPAAEIRVARTYWRQRGEHVHGASTCIQRMQKVLTQMNLQLANVISDVSGLTGQRIVRAILAGERNPKNLAELSDYRIRASREQVAKSLEGNWRPELLFVLKQEMEMYDTYQRRIAECDGELEAHLKSFAGKVGPKHTEEEPPSEPGPGKKAQTTRLTQSGKKAPGNRPQFDLRSELYRISGVDLTRIDSIHVLVAQTVISEVGLDMSRWNTEAHFASWLGLCPDNRISGDRVLSRGTRHVVNRAATALRVAATTLLKSRSYLGAQYRRLRTRLGAPKAITAMAHKLARLVYRMLKYGQEYVDKGMQYYEERHRHQQVEHLKKTAAKLGLQIVEVQTTGA

SEQ ID NO: 272442 - protein, 400 aa, unidentified
MRVVFGIDVSKASSEVAILVNGEKIHGYTIPNDAIGFNRLLGDLKTVHQPEIVFEATGVYSRRLQAFFEDNSYAYIRLNPLESKKQLDSLRVRKTDKIDAEKLATSQFILNRKPSYVQEALYQELRDLSRFYQNLTEDIVCSKNRLHKVLQVTFPELENILSAPTGEQYWNLVITFPCNSFVLESDDATLTAIIRQSTAKRISEKRVTYLVDKLTKLANQSYCAVKKTSPVIEEVKYYAGELLRLSEYRQSVLEEMITLAQPLPEYEILLSIPGIAETTATSIIGELGDIRRFHSANQINAFIGIDLKHYESGDFLAKEHITKRGNPYARKILFKCIHNIASASHTNPCHIADFYEKRKRQSQVTSTKPHTIASIHRLIRTMYYLITHNKLYDYTSTQNR

SEQ ID NO: 272443 - protein, 337 aa, unidentified
MDTHKDVHVAAVITTLGASLAQQEFPATAIGYRQLLTWARSFGVLRRAGVECTGSFGAALTKMLRGQSIDVIEVNQPDRATRRKRGKTDAIDADAAARAVLSGRATTVPKSADGPVEDMRVLRLAKESAVKARTQALNQLKAVLMSIDPDLRELLTRLSNPALVATCAALDADYRGEAVFTMRLLARRVQHLSDEVKELTRRTTRAVRACRPQMLDLVGVGPDSAAVLLIAAGDNPDRLVDEASFAALCGVSPVEQSSGKTQRRRLNRGGHRQANAALYRIVQTRIRWDERTQAYLRRRTAEGMSKREIIRCLKRYVARELYRHIQPRATNQVPSAA

SEQ ID NO: 272444 - protein, 366 aa, unidentified
MAPINHEVLHAMKYYTSTTEFNCGIDLHARQMYVCVMDRQGKKLVHTNIKNNDFAFFLKRVEPYQHDLTVCCECMFGWYWLADACQAAGLTFVLAHALYVKAIHGGKNKNDRIDSEKLTHLLRSNLIPPAYVYPAAKRPLRALLRQRLYYVWHRAELLARIHSHQLAHNRPPIRQTRRTRDPWEAQLLAAEDHPLRQIALQNDLAMIKHYDHQIFQLEAELQRQAKQSAAREYALLQTVPGIGENLGMTILCEIGDIARFPTVKDFLSYCRLVKGTVASAGKIKGLRGAKLGNPYLRWAFGEAAVIAKRDHAVIGPLAQRLEARMNGNKFKANTVVAIKLARAAYFMLKSKTVFDPDRLVAALSRN

SEQ ID NO: 272445 - protein, 316 aa, unidentified
MGPSPLLVGMDVAKATLDIAVRPTAETWSVSNDAPGLDALVLRLGAWAPTLIVLEAPGGSQGPLVAALVAAALPVVVVNPRHLRALAQAVGLLANTDRIDARVIAPCAEAVKPAPRPLPDAETQELRALLVRRRQLVEMVSAERARLDTVPPRIQDAIQAHIAWLTTQVAGLDDALTRASQTHPVWQAKDDVLQSIPGVGPVLARTMLGQGPELGTLGPKPLAALIGVAPVNRDSGTLRGRRPVYGGRAEVRAVWSMGALVATRHHPVIKTFDERLLAAGTAKQVALTACMHQLLTIMNAMVRDLKPWQPQEVPSA

SEQ ID NO: 272446 - protein, 402 aa, unidentified
MTDAPNRYIGLDIHKEYFVAVGVNEKLEATFGPQRVSNYLLDDWILRCLTPEDAVVLEMSTNTYQFYDALLPHVHSVMAVHSPNVAMVTNVRVKTDNKAALALAQLHAAGLLTGVWIPPYPVRDLRLLIARREKMVRLSTMAKNRLHSMLHRHHLVTPEKPFAPEQRTWWESLPLSANEQFLVRSDLDTLDFAQKQVGQIEECLKQESAEDGRIPLLIQLPGVAMLTAITILAAIGDITRFPTAKKLVGYAGLGTRVHHSGMTHSNGRITKAGRKDLRCAMVNAANHAVEHHVHWKKELERLTPHLGRSKAIVAIARKLLVAVWHVLSKQVADRFADPRDVASSFIRYAYRIGVRNLPNQQPALSFTRDQLDRLGVGRDLKEIPWGSIRFKLPPSILLLEKE

SEQ ID NO: 272447 - protein, 400 aa, unidentified
MPIAVGVDVAKDVHWAEIKIAETGKVLVSRRVDNTPDVIAELIDQIRDAETGHGPATVGIDILGGIASLLEAMLLDAGLAVVHVPGLAVNRARRGTTGGEHKSDPKDAKVIADQVRMRDDLRPVTAMREDDVELRLLVGRRTELVTDATRRANRLRELPASVHPGLERQVDVTGKTGLHLLTRYVTPAEIRTVGRARLLTHLRKLKHVKDAFLIALAEGAVDSARAQRVSTPGETVAADLVRDIAAEALAAKERLAELDKRITRALDRHPDAALIRSLPGMGATLTAEFLAVTGGIGRFATGDRLAAAAGLAPVLKQSGKVRYLQRAHAGDKALKRVFYQSAFIAVGCDPTSKTFYQRKRAEGKSHHQAVLALARRRVNVLHAILRNRMPYEPGYTAAAA

SEQ ID NO: 272448 - protein, 457 aa, unidentified
MESYYMGIDVSKGYADFVILDAKKNVVEPNFQLDDTFGSHCKLFEILKRFFDSHSESVLFAAVESTGGYENNWLHSLNGFQGALNIRSARLNPLGVRANSKASLRRVITDKISALDVAEYLIAHPEKVTYQQEDSLAGLRRQWGFVRLLVKQKTQILNQFESLLYTANPELISYCKSGVPAWLLKLLKQYPTAAKLAKAKSTSVARIPYVTTGRAKELIDQAKKSVASATDETTGSLITAMAEQIIRMEETIRIQTQQMAKRCAIPEVALLKTIPGISDASAIGLMLEIQSVKRFASVKKLAAHFGLHPAFKTSGDGTSGVRMSKQGRKEPRKILFMVAMVSLTANPHIRKIYEEHTEKGMKKMAAIGLCMHKILRIIYGMLKNNQAFDSQVDQKNRENRTARKSVHNTKNANRRYEMFDQQAPISRRQSNKRKEWKQSQGDNITQCGIGVPIPSAA

SEQ ID NO: 272449 - protein, 419 aa, unidentified
MQIVYKRCCGLDVHKESVAACLLIIDEDGEYHVEKRRFRTMTRNLRELGTWLHQQGVERIAMEATGVYWRPIWNVLEPLGIEMLLVNPHHIKNVPGRKTDQIDSEWIAELLQHGLLRGSFVPPAEIRQLRDLTRYRVHLKQDRNRIHNRIHKVLEDANIKLDCVATDILGVSGRRMIEGLIEGWRGPEWLADYARSHLRKKIPELRRALKGRVTEHHRRMLKELLGDLDSVDAKIIRLEQQIVEEIRPFDDLIERLCTIPGINVVTAWTIIAEIGADMSAFPDADHLVSWGGLCPGLNQSGGKRNSARTRHGNRYLRRALCQSAWAVSHTKDNYLAALFYRIAARHGLKKANVAVAHQILRIVYHIIRDSGIYREIGGDFFDRLHPERTKNRLIRRLEKLGHRVVLDPPQQGFPRNQPL

SEQ ID NO: 272450 - protein, 373 aa, unidentified
MIVIGTDTHKRTHTCGAVDAFTAAARGELTAAARTGSFGKLLRWARALDPERVWAIEDCRHVSGGFERFLIARGERIVRVAPKHMAGARRSSRERGKSDSIDAFSVARAALKEGIENLPGAQLDGAALDIRLLVDHREDLIAARTADQQRLRWHLHDLWPELEIPAGALDTNKWLGKISRRLARAPQATRVRVARELVRQITARTTRARELEAELAALVESYAPQLLAERGCRPLTAAKLIGEIAGADRFATDAKLARTGGAAPIPASSGNTNRHRLDRGGNRQLNCALHRLAVNKANWDPDTAAFLARKQAQGQSRKEALRSLKRHLARRVWRLLRSTTAPNATLPPTDIPDSPKARETIPGTAPHPMTCIS

SEQ ID NO: 272451 - protein, 431 aa, unidentified
MLKINPLSTLYVGIDVSSKSNYVCALDFYKNKYINSSFANNQPGAEELALKILECLKEHPDITTIVAALESTSVYSIHIANYLSSCEELMRFKPYVFVLNPKCTANYKKSYIGLGKSDPIDAFVIADYARAGNIESEPWRGSQFLALKRLTRHRLHLVECMTREKTYLVSNLYLKFSELQMLEGDDQPFCDIYGATSSSVLMEYFSPEEILDSSEEDLIAFLAKKSRNRIKDISKTVDLLKKAARDSYRLDKALYEPLNVSIASSFNCIETFKREIKVIDNAIEKEIKGLNPNAFIILQSIDGIGPVFAGGIIAEIGDITAFHSSDALAKYAGLTWKSNQSGDFDGEDTPMIKAGNRYLRYYLGEAANSMRKHNVEYGTYYRKKYNEVPKHQHKRALALTSRKFVRLVYGLLARNQLYSGVSLDTSIKDSN

SEQ ID NO: 272452 - protein, 351 aa, unidentified
MPSKKDVAVVHAIGIDTGKNTLHMIGLDEKGTIVLREKISRNRIAARLVNVPPCLIGIEAGMATHYMSRELLALGHQVKQVPPAYAKPFRQGHKNDFRDAHAVAEAVQRPSTRCVPIKTDDQLDLQALHRVRSRLIGDRTAVINQLRGFLLEHGIPVRQGPRFLRQQLPQILATRSDVLSPRMVRIIGDIVDDWNYLDERIERVTDEIEGLARADVSCGQLMTVPGIGPIIASAMVAAIGNGTAFAKGRDFAAWLGLVPKQMSTGDRTILGRISKRGNRYLRMLFVQGARAILLRPASWAKHSFGPWLTAAARRLHRNVLVIALANKLARIALTVLVQGRSYETRIESAAA

SEQ ID NO: 272453 - protein, 411 aa, unidentified
MEQYYLGLDWGSESHAVWVVSETGEKIWAAEVEETAEGLAGFGRRLYEWHGGGIVVWAAIEKPEGRIVDFLLDHSVVVYPINPKAIDRARDRFRASGSKSDPFDAHVLAEFLRTDHRHLRPLVPNSPEAQELKLLTTDYRRVERQQTRLFNQLRATLKECYPRPLEMFPNLNTSTALDFLAQYPTPAALSELTPQAWREFVREHRLHKDRSAELWELAKARQVPIPAHVVRAKARLIRVLAAQLETVRAGVEEYQSEIAHFFASMPAAKTARSLPGGKTGVIVPTIWAEIGDAAGRWESFRHLQAQAGSVPVTKRSGKSKLVQFRYACNKRLRHALDLFAFTTLRRSTWASAYYQQQRARGRHHHEALRALAAKWLKIIFVIWSRQVPYIEEHHLANINRQTTDPVPFLTT

SEQ ID NO: 272454 - protein, 311 aa, unidentified
MKIVCGVDISKAGLDVCVWPGGAFQRFDRTVSGVDALAGFCRQHGVDLVVMEATGGLERLVVGVLNTAGFGSSVVNPGRVRDYARAMGITEKTDRIDAAVIARFALAANLRATPAQMENQRRLNALVVRLRQLTADLIVQKQRLSAVEDAESIGSLRAVIAFLKQHSRMIEGEIASLIDDDPVWAKLAETFGAIKGIAGRTIARLMAELPEIGLYSNKAIAKLAGLAPIANDSGARHGKRSIRGGRCNVRSILFLVAGIVAKYDERLKDFHQRLSKAGKPKMVIRIALAHKLLVWLNAKAREARAEMTTAT

SEQ ID NO: 272455 - protein, 340 aa, unidentified
MRQLYVASDLHSNNNLVGIIDGEGKRIFKKKLPNDPLLISDVLKPFKEEIIGIVVESTFNWYWLVDALMEEGYKVHLANPAAIQQYSGLKHADDQHDAFWLAEMLRLGILPEGYIYPREERPVRDLLRKRGHLVRLRTSLIISLGNIISRNFGSKLHVNQVKGLRKDRVSPLFEGNEDLALAGKVSKETIDFLTHQIRQIEGVVENRITLKEPYRYLLTIHGVGKILGLTIMLETGPIGRFETVGDYVSYCRKVPSQWTSNGKRKGSGNKKNGNKYLAWAYAEASDFARRYHPEPRAYYNRKMQKSNPAVAHSALSHKLARAAYYIMRDQVAFRPETLFG

SEQ ID NO: 272456 - protein, 396 aa, unidentified
MLAVVIADVAVEGQWRFCRRKFGATENELRQLMNWLEEQGVREVIMESTAQYWKPVWHQLEGHFELYLAQAQSNRAPRGRKRDFTDAERLLRRHVARELILSFVPNPEQRMWRTLTHTKYQLSRDRVRLQNQLESLLEDARIKLSGCVTDLLGVSSRRMLRALAAGETDAAHLADMAHAGLHATAEELRDALQAAATMNSLHRQILGLFLSRLELIENHMDALDTAIAAALRAHNDAVLRLADVPGFGIDSAQQVIAEVGPTAATFPSPEQLSSWVGACPGREESAEVSSSNRSPKGNRAMRRVLNQVANAAVKSKGSVFQIRYLKLRARLGHNKAIWAIVHRLCRLTWKILHQGVAYIEYGKRLNPNAAKRRISKLVRELRRLGYHAQLTPLPTA

SEQ ID NO: 272457 - protein, 360 aa, unidentified
MTLRRMLEVLTSTTKEALMEAYVGQQFVGIDLHRRRSVIVRTTAAGELLESVRIVNDADRLIEVIGRAGQSPEVVLEATYGWYWAVDALQAAGASVHLAHPLGVKAFEYRRVKNDVRDAVDLADLLRMGRLARAWIAPPAVRELRELVRHRAKLVALRSHSKAEVHAVLAKCGIQVLMSDLFGVAGTALLDGLELPAPYAARIGSLRRVMDLLDFEIDVFSRLVRGRLARDPAYTAVQTIPGIGPILGAVFLAEIGDITRFATAPQLTCWAGLTPKHHESDTHVHCGRITKQGSRLVRWAAVESVQILPKTSLVGQIRDHVGARRGRNIGVVAAARRQLEYVYYALRDHHVRALHTRTAA

SEQ ID NO: 272458 - protein, 333 aa, unidentified
MNNAGIDVSHKELVIVVSVKGKVRKAKTFENTPSGHHAIIQLLSKLKGESRVCLEATGIYHFDLAVALSRAEGIEVMVINPKASHNFAKVLMKRSKTDAVDAEILAIYCERMPFEAWQRPADENIALKAISRRIATLTKLKTQTKNQLHALKATAETPVLVIEHIEELVTVLDKQIQVHRESAIELIHQHDTLAEAYTLITGIKGIAQASAVQMLGELMILPQDMSAKQWVAYAGLDPRQFESGSSVAKKSRISKAGNKFVRQALYMPALVATQHEPHVKGYYAHLINDNGLKKIQAVCAVMRKLLHAIHGMLKTKKEFDGTRFYTFPVEASS

SEQ ID NO: 272459 - protein, 375 aa, unidentified
MNLKVRFLGLDVHAETIAVAIAEPDGEVRSLGTIANRADAIRKMVKKLGAVEQLKACYEAGPTGYVLYWQLAELGVACEVIAPTLVPMKAGDRVKTDRRDAERLARSYRSGDLTAVWVPDEGSEALRDLVRAREAAKQDQLRARHRLSKFLLRSGQRPAAGVKAWTQLYMAWVRQLRFPQVAQESTRLDYLHEVEHMGERVGRLEQAITEAVQLASPAIQEVVKGLQALRGIAQISAVTIAAELGNITRFESARQLMGYSGMVPSENSSGGRTQRGSITKTGNAHLRRIAGEAAWSYRLRPGVGPALRKRQEGVPEEIKEIAWKAQIRLSKRYARLAAAGKDQRKIITAVGRELLGFIWAIGIKAEAATKLKMAA

SEQ ID NO: 272460 - protein, 366 aa, unidentified
MKKNSTIAVGRKQIFKQARLTIGLDLGDRSSHYCMLDEAGNVILERSLPTTSNGIRQAFGRIPRCRIALETGTHSPWVSRQLSQMGHEVIVAHARNVRLIGESSRKDDRIDARTLARLARIDPGLLGPVRHRSAQAQIHLTVIRARAALVSTRTALVNAARGLTKSYGQRLNKCGTEQMTRDRAKGLSQELREALDPLLREIESLNERIAEYNRRIEQIAKEVHPEVARLKQVKGVGTLIALTYVLTLDDPQRFRRSRDAGCFLGLRPGRRNSGQSEPQLHISKEGDRYLRTLMVQGAHYILGPFGQDSDLRRWGLKLAERGGKNAKKRAVVAVARKLAVLLHKLWVSGEVYEPLRNNHEVESAVA

SEQ ID NO: 272461 - protein, 389 aa, unidentified
MSQSFDASKSLTAFEQDSTLVAVIEMSQSKWLVAAVVPGIARQPLKKLDADAGALLKLLQRWREEARKAGREVKRIVCAYEAGRDGFWLARWLQARTIEAYVIHAASIAVSREHRRAKTDRIDTELLMRSFLGWLRGEKRHCNMVAIPTMTEEDARRPSRERESLVAEQTRTVNRVKAALALLGIGGFNPRLRKAAQKLETRRTVEGTPLPENVHAELRRDLQRLRLVHDQISTIESERLRRLAQAPAAATGPHAMVRLIARVLGVGIETADMLVNEVLARNLRDRRAVARYAGLTGAPDESGKRRREKGLARAGNGRVRRGMIQLAWRLIFQKQSRLVRWFRARTADGRSTTRKTMIVALARKLLIALWRLVTTGEMTEGLKLRPAGT

SEQ ID NO: 272462 - protein, 348 aa, unidentified
MAYFVGLDVSVKEASVCVVDDSSKVISEQKVLTEPDNIITLLTSIGETYARIGIEAGPLSQWLVNALIAADLPVICVETRHMKALLTAQQINKTDRNDARGIAQMMRVGLFKPVHVKTLVAQEQRMLLTSRKLLQRKLLDVESDLRGTLRNFGLKVGAVSGGRYDARVRELVEGFPGLAAIVEPLLTVRRVMRQQFAVLHKMLLDTVRDDPVCRRLMTAPGVGAVVALTYRATIDQPQRFVHSRAVGAHVGLTPKRYQSGEIDYDGGVSKCGDALLRTMLYEAAQTMLTRAKKWSWLKAWGMRVAQRRGIRRAIVAVARRLAVVLHRMWVDGTEFRWSKDSATVLNAA

SEQ ID NO: 272463 - protein, 370 aa, unidentified
MKKSIVYVGIDVDDLAFHGAGYDVETGEYYEFKCKPTVGSLLNRIEQLKEKGFEIRICYEATYIGYGLHRNLESKGIHCDIIAPSSIPERRSKRVKTDRIDSRKLAEYYSKGLLTAIKIPDKTDEQIRQLIRSRSFVVGERRRLKQHILSSCRFNGIDYRVQTNTQGHHWTQKHLRWLNSQISRQPEITRKMFERLLSQLIVLDEEVKNFDTLIEEFSCMEKYQKRSQALACIKGIDTLSAMTLVTEIGDIKRFPHPKNLVSYSGMDIVEYSSGGKEKKFGITKMGNRKIRTTLVEACQSISLGTSVGKLLRSRRKGVPIEYVKIAERCQNRLWKKKHRMSLGSKPSNKIKVACARELAGFVWEMLVTAG

SEQ ID NO: 272464 - protein, 345 aa, unidentified
MCQAAVLDDEGELLDQIRFLNRKEDIKEFALKLTTFRDDVKAVVESTGNLWIQIHDILEKYGIEVSLSNPGKTRLIAEAKNKTDKVDAKMLARLLRADMLFTCYVPGEEIRNRREFLRHRLNLVKMRTMVKNRIHSLLDKYTLRSPYNSWTKKWVAWLREQDLGFMDNAIIKGQLAILETFNEQILVMEDKIAAIAVDDPQVKLLMTMPGIGYFTASLLVAEIGDINRFSNDKKISSWAGLAPRISQSGETTHIGRVGRGNKRVAALMVQSAHNARRYDTRFNRAYKQVSRRGGKGKAIVAVAHEMIRIVYFMLRDNAPYRGQNVELTTRKLKNMEGRASIGLRI

SEQ ID NO: 272465 - protein, 349 aa, unidentified
MEQFVGLDVSQKLTHICVVDREGKALWRGSSSTTPEDIAAAVRAHAPGAVRIGFETGALSTWLWHGLKKIGLPIVCLDARHAKAALSMQVNKSDRNDAFGLAQIVRTGWYREVGVKSIESHQIRAVLGARAQLVGMRTDLRNQIRGLLKVFGVVLERHSDKSFEDRVKEVARAAPDILATSLRSLLAILQPVCTQIALLDRLTMTQAKETAMARHLMSVPGVGPVTAMAFVTAIEDPARFRKSRSVGAYFGLTPRRYQSGEVDASGRISKWGDPLVRAYLFEAATALLTTCKKWSALKAWGLRIAKRSGMNKARIAVARKLAVILHQMWTTGEDFRWSNKGNETEVAAA

SEQ ID NO: 272466 - protein, 432 aa, unidentified
MNPFSVSPEASPVAAWVGLDWADQQHVICLYEVATGQSTVSRLEQKPESLQDWLSQLRQRFDGAPVAIVLEQARGAVIYALLSADFVRLYPVNPQSLASYRKAYAPSGAKSDPADAVLLMEMVRKSPERFRVWKPDDADTRSLQLLTQNRRQLVNQKTALTNQLTSLLKTYYPQALELAGALDSPQACDLLKQWPTLEALQQARPGQIRQLYREHGHPSPEQLDRRLEQIRQARPLTTDPAALLSGAMMVEALVEQLRPLLGAIERFDRQIAALFRKHPDRPLFDHLPGAGAVLAPRLVAAFGTDRDRFQSAQQAQQLFGIAPVTEQSGKQRWVHWRWACPKFLRQTFHEFAGHSRHWCGWAKALYQRLRRCGKGHHAALRVLAFKWIRILFHCWKTRTGYDESIYLKSLQKRNPTLWVEIQLLPPRKKKVA

SEQ ID NO: 272467 - protein, 405 aa, unidentified
MSQLSEIRVCLDIGCHNHRVAIGLDDGTILNEFDIAHTTEGIKKFFSCVEQEKNEYGLPIVVAMESFNGHARPLDKYVLEHGYRLFSVNNHKLARFKEIFPGPAKTDEIDTLKIFELMTLKDTLPLAKDVLQEVREVPVENQKLKRLSRRRKILVAEKVQVTNRLQSDLNSVSPGLTSITKSVDNKWFLSYLTAKNDFKKIITMRKSGLSKLPDLGKKYIQIILEWEKTVKLSSDVDWVGDMIIRDAKRVQELKKEILQLEKQMSELSEESEIAKKLNSIPGFGTVSISTLAGEIGNIERFKKESSLALYLGMAPLDNSSGTYKSGKSSKHVNRNAKMALMIAICRHIELVPEIKEYYLKKRQEGKKHNQAIRSCGRHLVRIMYSMLTKNRDYQLPKEFKKNITN

SEQ ID NO: 272468 - protein, 398 aa, unidentified
MTESSDYESVQVFIGVDVGKDTHHAVAVNRSGNRLFDKALPNDENKLRSLISDLKQHGQILLVVDQPATIGALPVAVARSEGILVGYLPGLAMRRIADLHAGEAKTDARDAAIIAEAARTLPHALRTLKLADEQIAELSMLCGFDDDLAAQTTQASNRIRGLLTQIHPALERVLGPRLDHPAVLDLLQQYPSPEKLASLGEKKLATQLCKLAPRLGKRLAADITQALTEQTVVVPGTNAAVVVLPRLALQLITLRKQRDEVALEVEQRVLAHPLYPVLTSMPGVGVRTAARLLTEVACRAFASAAHLAAYAGLAPVTRRSGSSIRGEHPSRRGNKTLKRALFLSAFAALRDPISRAYYTRKMSQGKRHNQALIALARRRCDVLFAMMRDGTFYIPTAS

SEQ ID NO: 272469 - protein, 414 aa, unidentified
MEHTTIAVDLAKSVFQVAVSHKAGRVDTERRLSRDRFLEYVTQHSPATVLLEACGSAHYWGRRLQQCGHTVRLLPAHDVHRDVRRNKTDRTDTKALLDAGRNEDIHAVPVKTVEHQAIASLHRLRSTWLATRTARLNTIRGRLREFGLVIPVGAHQVVPRVRELLAESLAVPDLMRPSLASACDEIEILETSMRAVERQLTTLARDRADITLLRPVPGVGLLTATALVALVGAMRRFHSSRQFASFLGLTPKEDSSALRRRLGAISKQGDVYVRMLLIHGARSVLLRAKGAVSPTAFQTWARMTHQRRGHNVAAGAVANKLARIVWAVWTRQQPFATDYRHPSTTMASISSSHPEDCTELNGHDGAPVGPARGHADNSPGQARPCKRLAPRARMSLMARSRNGATDEAEDTSAV

SEQ ID NO: 272470 - protein, 375 aa, unidentified
MKEKVRFLGLDVHAETIAVAIAEPDGEVRSLGTIANRAESIRKMIKKLGSVEQLKACYEAGPTGYVLYWQLAELGVACEVIAPTLAPMKAGDRVKTDRRDAERLARSFRSGDLTAVWVPDEGSESLRDLVRAREAAKQDQLRARHRLGKFLLRTGQRPALGVKAWTQSYLAWVKQIHFTQAARESTLLDYLHEVEHMAERVIRLEQAITEAVKQASPQMQQVVRGLQAMRGIAQISAVTIVAELGELSRFESARQLMGYSGAVPSEESSGKRTRRGSITKTGNAHLRRIAVEAAWNYRLRPSVGPALRKRQEGVSEEIKEIAWKAQHRLHKRYMKLSAAGKDQRKIITAVGRELLGFIWAIGIKAEAASKRQMAA

SEQ ID NO: 272471 - protein, 456 aa, unidentified
MSGKNAKPMPTGLPIIHERAAGIDIGSRFHVAAVSPDLSDEPVRTFQAFTSDLHRMADWLIDVGIKTVAMESTGVYWVAAYEVLESRGLDVILANAHDAQAVPGRKSDVNDAQWLQRLHACGLLRASFRPGRDIAALRVYVRSRERHLDYAAAHIQHMQKALTFMNVQLHHVISDLTGATGMKMIRAIVAGERDPDILAAMRDTRCKAGVETVRAALVGNYQPEHVFTLTQALALYDFYQRCVEECDRQIEQAVAALNAARPQPEAPLPKPRHRTKQPNEVHFDVRAALYQLAGTDLTQIHGIGPFLALRLVAECGTDLSRWRTAKHFTSWLTLSPGCNISGGKVLSAYTRKTRNRVTAALRLAAVTVGRTHTALGAFYRRLAARIGNANAVTATARKIAVLFYNAMRFGMEYKDPGADHYEQRYRDRVLKQLHRRAAQFGFTLQPGSVSVAEHVS

SEQ ID NO: 272472 - protein, 358 aa, unidentified
MAGKVTEAAVVGGVDTHKDLHVAAVVDQNNKVLGPQFFSTTRQGYRQMLAWMTSFGALKRIGVECTGTYGSGLLRYLQNAGLEVLEVTAPDRMERRKRGKSDTIDAECAAHAAFSGIRTVTPKTRNGMIESLRVLKTCRKTAISARRVALQIIHSNIISAPDELREQLRNMTRMQLIRTLGSWRPDASEYRNVTNVYRISLKSLARRYLELHDEIADLDVMIAAIVDELAPELIKRNAIGYESASQLLITAGDNPQRLRSESGFAALCGVSPVPVSSGKTNRYRLNRGGDRAANSALHIIAIGRLRTDDKTKEYVARRVAEGHTKMEAIRCLKRYISREVYTLLRNQNRQINIIPITA

SEQ ID NO: 272473 - protein, 407 aa, unidentified
MIFVGVDWAEAHHDVHLADEDGVRLVKARLPEGVEGIARFHELVGAHVEDPSDVVIGIETDRGLFVAALVAAGYGVYAVNPMSTSRYRDRHSSSGAKSDAGDAQVLSDMVRTDRHNHRLMAGDSEEVEAIKILARAHQSMVWSRGRQTNLLRSTLREFYPAALVAFDNLASGDALEVLRIAPTPTLGRGLSRSKIASALRRGGRQRRIDERAAEIQSALRSEQLEASPAVADAMGASVSASVAVIAEMVAQSTALAEELSSDFEQHPDAEVVRSLPGLGTILGARVLGEFGDEPNRYATTKCRKNYAGTSPITRASGTKKAVLARHVRNRRLADAIYLWAFASLSASPGARAYYDARRAAGEGHHQALRALGNRLVGVLHGCLTHQVAYDEMIAWAHRPENELALAA

SEQ ID NO: 272474 - protein, 421 aa, unidentified
MTPPSHDTFAAFIGIDWADAKHEGCLQAAGTAKRECFQLEHTPEAIDAWITTLRTRFNGQPVAVCLELAKGPLVSALRKYDFLVLFPINPLTLARYREAFTPSRAKDDPTDAELQLEVLLTHRDKLQPLNPQSPAMRALAQLVEHRRRVVGDKVRMTNRLTSTLKNYFPHVLHWFPDKDTPIFCDFLSRWPTLKAVQLARRATLESFFRDHHVRSPEVIARRIQAIRAALPLTTDEGVIAPNALLVQALVAQLRVTLQAITAFDTAIAQRAQSHPDFALFQALPGAGPVFASRLLVAFGEQRERYPSATALQKYAGIAPVTERSGKKSWVHWRLQCPKFLRQSFVEWAAESIRHSFWAQVYYQQQRDKGKAHQAAVRALAFKWIRILYRCWQDRTLYNESVYLQALNSRGSSLIQNLAKET

SEQ ID NO: 272475 - protein, 373 aa, unidentified
MSNYSHYKVGCDAHKHYSLFSVLDHHGQLIQRTRVNHEPGAIRAFLSQFPPGTPVALETVGNWYWIVDEIEQAHCLPLLAHAVRAKSMMGHVHKTDKLDAGGLATLLHLGTLPAVWIPPADLRDERELPRTRMAFSKVRTMLKNRIHSTLAKYALSLGTASDIFTPKWRPQLQQLLQHLPAETRRCVEQELELLDLLQTHIQRLEERILQRVEITPTIQRIMSIPGPAEILSIVIDRELGSIQRFPSPKHLASYSGLVPRVSASGGKVHYGRMVRQSNHYLKWAFIEAANVIVRQRRHPNWRGMHVVRLFERTRQRKGHAVAVGATARYLAEAAFWVLKKGEPYREPVPRHPAGRIDHRLRPSRARPLPNMGP

SEQ ID NO: 272476 - protein, 350 aa, unidentified
MNVNHYIGFDVHKKSINYCVKMADGQIVEEGRLRATHDALRRWAGRRQEPWRGAMEATLFSGWIYDTLKPFAAELQMGHPAMMKAIGASKKKNDKIDSRKIADLVRCNLLPACYVAPAEMRELRRLLRYRNVVVAQGVRMKNKMSGLLMEVGAEYNKQQLHGKKYFTELLGKLEEVPESVKDLLRLSRGALEMFEATQRQLLDRLRKEPRLVERVAVLESIRGVGEVTALTWALEICDPQRFRSIADAESYCGLTSALDCSADKQHRRPISKQRNGHLQTVLIEAAKLAPRWNPQLAQVHERELQRGNRNRATLAVARKLVAYLLAVDKSGQPFRIRNQPAPTTEVATAA

SEQ ID NO: 272477 - protein, 403 aa, unidentified
MGVDWGDRVHQVYVSDEEAAKVREMKVQETPDGLAEMGRWLDERRIEEIELWAAIEKPAGRVVDFLLDHGVTVYPVNPKAVDRVRDRFRMSQSKSDGFDAYVLAEFVRTDHAHLRPLRPNSAQGEELKLLTRDQQRLVHQNTRLLHQLKVTLKEYYPRPLEVFSDLDTQIALDFLKAYPTPAALSELKRKQWNRFAKQKHHLSKPRYEELWEKLKQPQLVVPEHVVRVKAQLIAVLIDQLEVSLKAVKSYSERVKSFFASMPAAKLVKTLPGAKTGTIIATLWAELGDAQSRWESFRHLQAEAGVVPATKSSGKSRVVQFRFACNKILRHAAYWLAFGSLNRSEWANHYYRDQRAKGHSHHQALRALGAKWLKIIFVMWRDHKPYDENYHLANIARQKMRQAA

SEQ ID NO: 272478 - protein, 405 aa, unidentified
MAVMIGVDPHKASHTAAAIGPAEEPLGQVRIQACASQVQQLVAWAAAWPERTWAVEGATGLGGLLARQLVAAGERVLDVQPKLAARVRLLEAGNTNKNDANDARSVAVAALRSAARREVVADGHAAVLKVWSKRYRDLGRARTQAACRLHALLADLVPGGYAGEITAGQAAGLLARITPADPAARARCELAAEFLADLRYLDTQIRGTRDRITAAVRASSTTLTEIFGVGPVIAAAIVGAVGEVSRFADRNRFAAYNGTAPVEVSSGGRKIHRLSLRGNRRLNHAIHMAAITQIRYQHSPGRAYFDRKIAEGKTGKEALRALKRQLSDAIYARLVADAARRGATTQAEGPGGQSGNGSVSSAAGSHPGRRLFGQATPGPQPSLRPTAPGRPRTPATASANSLRTT

SEQ ID NO: 272479 - protein, 419 aa, unidentified
MTRKDDSKVIRIVHPICCGLDVHKESVSACVIFPDSTGEEQYEIKVFGTFTDDLTRLRAWLLDHDCPVVAMESTGVYWRPVHNVLEETVQVILVNARDMRNVSGRKTDIGDSRWIAGLLRHGLLRGSFIPPQTVRQWRDLTRLRKKYVQSAGDYRKRTHKLFESANIKIDSVVSDLFGVTGRNLMQLLVTDRKLTLSDIQTCVRGKLKGKEAELFRSIQGFFTDHHRFVLKTILETINMLEAQIGALDHEIRRVMKEHEPLLDRMKEAPGISDVSSCDILAEIGPTLDSFPTDTALVSWSGLCPGNNESAGKRKSGKSPVRKHHLKTIMLEVAWAAVKKKGSYFKDKYYRLKARRGAKKAIVAIAHRILLGIYHVIKDGVVFRDLGKDYLTLRNKSQRVFHLRKQALALGFDLIPQTAQ

SEQ ID NO: 272480 - protein, 319 aa, unidentified
MNKVSHEQIIGIDVSRDWLDVHCLPETRRLRLPNSDEGHAQLVCLAQSTHALVCFEATGGQEWRLWTALDAAGIATRQLPPAQIKAFAASRGTRAKTDRIDAELIARFMAFRPDAGRELPHGKLRLLRALASKRAQLVETRKRLLAQIRAHEKLGTDGIFTEVDAELRELLDRQIGTLEDQIAQTIAADQGLAKTADILRSVPGIGPVASTILIAEMPELGQLSGEQAAALTGLAPIAHDSDAMRGKRAIGGGRRQVRHVMFQAALVASHHNPHLKIFADRLRDAGKPHKVIITAVARKLVTIANALLKSRQNWSAQTA

SEQ ID NO: 272481 - protein, 426 aa, unidentified
MRVLYDRVAAIDVHKDMVKVAIRVPGAKRGTRKTDVLEFRTFYGVLQAMARELRGRGVTHVVMEASGVYTDPVYYALRELDFTEVMVINPAHAKALKGHKTDAKDAIRLLDLYECGLLSGSCLPSEDLREVRDLARYRMKTVQARTSEIQRLQKTLETAGIKLSSVVSDVTGGSATAMIEALISGERRGAVMAGLAQTRLRSAGKMADLSMALTGRFTDHHALMCRLHRDRITIFDDAVKDLDAKIAPLVARYAREAELLKTLPGFGDVIVAGWLGAIGPAPHQHFATASRLASWATLCPGNYMSARKSKGGRTGDGGAYIKPLLIQAAWAAVRVPGRLQARFGRLVRKFGGPRNKGAQKRAITAIAHTLLKIAYSVLKTGKPYADLGTDFYTSRESPDARQDYLMRQLRKLNPGCVITITPAETA

SEQ ID NO: 272482 - protein, 358 aa, unidentified
MPQPIHHDQDDTAEVILGVDTHKDLHAAAVISPVGVLLSSETFPATAAGYRALLAWASRFGTVRRAGVECTGSYGAALARHLRAAGVEVIEVNQPDKATRRRRGKTDTIDAESAARAVLSGRASSSAKAGDGPVEMLRMFKLAKASALKARTQTINQLKAVLVAADPALREALSGLSNTLLIRRCTQLELDTPCDTTSAAAYTLRLLARRILALTSEIRDLEHQITAAVTNHTPTLLTRRGIGPDNAAALLIAAGDNPDRLRSETSFAALCGVSPLEASSGRTSRRRLNRGGDRQANAALYRIALSRLRWDTRTRDYLNRRITEGKTRREAIRCLKRYIAREIYQIITAPPEAEPSAA

SEQ ID NO: 272483 - protein, 411 aa, unidentified
MELLVTRCAGLDVAKDEVVACVRVPDGQGGRGQEVRTFPTFTSGLEALAGWLAAEGVTQVVMEATGQYWKPVWQVLEERGFQLLLVNARQVKILPGRKTDVADAAWLAELLEHGLLRGSFVPPAAIRELRDLTRYRKRLIQAHSAEVQRIQKTLEDAGIKLDSVAADVVGVSGRAMLAALVAGERDPQVLAELAKGRLRNKLPQLRQALRGRFGDHHALLVRLALGHLEHLEGTIAALDRRVDEVMAPFARARDRLDTITGVGKRAAETIIAEIGTDMTVFPTAGHLASWAGRCPGNNLTGGKRRSGKSTKGNRWLGEVLTECAWAAARSRDSYLSAQFWRLARRIGKKKAAMAVGHSILVIAWHLLTDDCDYADLGGDFFVRRDSDRARHRAVAQLQALGYQVTLQPTAA

SEQ ID NO: 272484 - protein, 356 aa, unidentified
MANIETTNRAAIVIVGVDTHKSTHVAVAINDQGARLAAVSIPANPKGYRELEVWSRSLGHVQAFGIEGTGSYGAGLSRSLLAQGHKVIEVTRPNRQVRYRHGKSDSLDAEGAARSVLSGQAIAEPKTQTGSVEMIRHLKIVRDTAVKSRSQAMVTLKTLIINAPAELRDGLNPIKGKIALIRHIAAFRPGPINSTTASAKTAMRALARRWFTLNKEIIEFDKDLKILIEAKAPSLLKAHGIATMTIAEMLILIGDNPKRIRSEAALAKLCGVCPIPASSGKTNRYRLNRGGNRQANAALYRVAIVRMRNHEPTLAYVHKRTKDGKSKSEIIRCLKRYIVREIYNHICRPEKPPITC

SEQ ID NO: 272485 - protein, 391 aa, unidentified
MPEDAPRLTRAAIRTDLGAIFVSLELSRRAWLITSLSPGGGEKMSKHSVPGSDVSGLLRRFAELRRKAAARTGQDFPIIVIQETGLDGFWIHRVLQSEGIESHVVDAASILTSRRRRRAKTDRIDGETLVRTLMAFKRGEPRVCSMARAPTPQEEDRRRVCRERRTLVGERVRHVNRLKGLLFAQGVFGYEPLRKGRRERLEDLRTGDGRPLPMHLKAQIIRELDRLEIVLEQLKTVEAERDALLKPTTGEAASPAAMLAQLKGIGPETAAVLWSEGLFRQFDNRRQLAAYAGLAPTPWQSGSIAHEQGVSKAGNPRLRATMVELAWLWLRNQPTSALSLWFHERVRRLGGRMRKTTVVALARKLLIALWRYTIAGVVIEGAVMKPATTTI

SEQ ID NO: 272486 - protein, 412 aa, unidentified
MQDILTCAMGLDVHRDIIVACLVKGAVDAEPEAETHTFSTLIPEMQKLRDWVIESECRNIAMESTGIYWQPIYEMLESCFDGEISILVVNARHMKNVPGRKTDMKDAQWIATLLRAGLLKGSFIPDKAFRELRHLTRYRKSVVHDITAQKNRIDKFLQSSGFRFTAFLSDTFGASGRNIIRHLIEHGSIDREALDKCLKTKTRNRIDEILVALNGSLSEHQRRFLNMVFRHLEDLEAHKHTVEDEITEEVLKHTDALNLLCSIPGIDVTAAAAIIAEIGTDMSSFPDSQHICSWAGLSPGNNESAGKRKSVHINKGNPYLKSMLCEVAWIMASHRKLYLSGWYWKVKQRKGAKRATIALARKILSIIYTMLKTGTPYNEECFEQRRLRCERKRANRLVNELQKLGYVVVAPD

SEQ ID NO: 272487 - protein, 348 aa, unidentified
MTLVGCARHSRTQQVAVLDTRTGELVEQELAHEGDAVERFYRALPPPVTIGIETTGDTQWFHALMHQLGHTVLVGEAAKIRAMVVRKTKTDRRDARHRLDLLQHDRFPTVWIPDPGTRDRRALIAHRVRLVRMRTMVKNGLQAIALNQRLALRAALWTQRGLTQLKALALPPHTTRRRDDRLALLAWLTTRIDQLDAHIAAVASADPRVQLLLTHPGVGPLTALTTVLVLGPLARFPDSKHVVSYVGLAPAVHASADKQRLGKLTKQGNALLRWVLGQAAPLAARQDDDLRRRYFSVMHRRGRPKAKVALARKLLVRLYIMLRDQIDYEEFRRRGRAPRPPPRPVAVM

SEQ ID NO: 272488 - protein, 401 aa, unidentified
MHYVIGIDVSKATSQVAVAVDGKVTQHFKITHDVLGFNQLNTIIMQFNEFPDIVFEATGIYSRRLKSFLDWHNYPYTYLNPLAAKKQLDQLRPNKNDLNDAKNLAETQFILARAKSYVQNPIYIELQDMSRFYQQINHDIVSTKNRLHRILQLTFPEIEGLFSATDSPHYWELLTIVPHAIITRRSRQALMDTIQGGISWHIGHERLRKLVDQLMSMGQISAPAVAANSYNVAQVIYYAKRLIELHGTKGDILTAMVDKAKDLPEYSIYQSIPGFSDKTVVSLIAELGDLHRFRTANKLNAFVGIDLRFNDSGDYKSKGFITKRGNSTARKVLFRAISNIASTASYGHPSHINDWYQKKKHSSLSKRTKKIAIGAMSRLLRTMHYLVINHQLYDYKAASKQ

SEQ ID NO: 272489 - protein, 315 aa, unidentified
MEAILENCCGLDVHRDTVVACLLTGHLEDRPKKEIRTFSTMSKGLHELGAWLQSASCTHVAMESTGVYWKPVYHVLEESCEIKLANAQRIKNVPGRKTDIADSEWIAKLLRCGLIEGSFVPPEDIRQLRDLTRYRKKMVHQASAEKNRIQKVLESAGIKLASVISDVFGVTGRSILNQLMDKGKLDEDTVRSLVKGQIKNKVPQLMDALQATLSPHHRFLISQSWKHLVQLEESVEQIDAAIDEHLQPYRVEMELLQTIPGVDITAASAILAEIGADMLQFHSERHLASWAGLSPGNYESAGKKSPHASNLAIPT

SEQ ID NO: 272490 - protein, 414 aa, unidentified
MEVIHPRCAGLDVSKRDAKVCVRIASAGRTKAKSTVTTWGAVTNQVLALRDHLIAEQVTLVVMEATSDYWKPFYYLLEDGPFEVMLVNARHVKNLPGRKTDVSDAAWLAQLGAHGLVRGSFVPPEPIRQLRDLTRTRTTLVRARAKEIQRLEKLLEDAGIKLSSVASDISGVSGRAMLEALIEGQRDPVVLADLAKRRLRSKIPELTEALTGRFSEHHGFLARVHLDLIDNHTRAIEELTGRIEVVIEPFRHVRDLLVTMPGFSTLVADVIIAETGADMSRFPTPGHLASWAGTCPGSNESAGRIKSTHTRPGNPYLKGALGVAALSAARSHDTYLAAKYRRIASRRGPVKAIVALEHAMLIAIWNMINTGTIYRDPGGDFYARLNPDKARHRALDQLHKMGYSVTLTPLAEAG

SEQ ID NO: 272491 - protein, 343 aa, unidentified
MYYIGLDVHKKTISFCVKDAAGRVHQEGKIGSSRRELDGWIRTLPQPRTMAMEATIFTGWIYDYLLPHAEKVKVAHPLMLRAIAAAKKKNDRIDASKIADCLRCDFLPECHMASTEIRDRRRTLRYRNLVMRQMVQMKNRVSGLLMESGVSYDKQRLHKMGYFTELFTTNEEISDSIRPLLRLGREHILRGQRLDRVLISSLERDPLLSERLRRLRTIPGVGPITALTWALEIGDYTRFRSVKEAISYCGLCSAEKSSADKVMRTPISKQRNKHIQHVLVEAAKMAPRYSHELALRREKEMQRGNKNRATLAVARKMVTYMLAVERRQQDFVPAEELADKAVA

SEQ ID NO: 272492 - protein, 341 aa, unidentified
MSYKIAGIDVHKKVLMVVVMDASTPDLKPERRRFATMPSDLRQLSTWLRERGVEEAVMESTAQYWRSVWLELEPYMRLELAQAFSNRAPRGRKHDFKDAERLVRRLIANELILSFVPDGEQRTWRNLTRMKLQLTRDRVRLQSQMECLLEEMRIKLSHVVSDLLGSSGLRILRALAQGETEPKRLALLGDDRLKCSEEQLVDALTGRPQPMHRQMLGLQLERLQLLDGQIAKLNGLIAQAMKPHQDAVIRLAEVPGLGVDSAQQVIAEVGVKAGTFPSAAEFTSWVGTCPGKDESAEENHSTRSAKGNKYLRRVLNQAAHAAVKKNGSHFQAVFRRLLPRL

SEQ ID NO: 272493 - protein, 312 aa, unidentified
MAEPLFVGIDVSKGRLDVAFTLGDRFFSIEPTEEAMSALVQQLITASPKLIVLEASGGLERPLVAYLAGASLPVVVVNPRQARDFAKATGKLAKTDKIDARSLARFAEAIKPAQREIKDAERQQLADHVSRRRQIVGMISQEKNRRARASGRVRTDIEHHIAYLKERLEQSNNDIDNLIKATSLYLETAELLRTVPGVGPVTSASFIAFCPELGNLDRRQIAALVGTAPLNRDSGKRSGTRCVWGGRKTVRNQLYMAAVSAIRCNYKIKEFYLRLTAAGKKPKVAITACMRKLVVILNAMVKQHQPWQPGAV

SEQ ID NO: 272494 - protein, 411 aa, unidentified
MTIATLGIDLGKSVFHLVGQDAQGRILLRRRMTRQRLITLTATLPACRIGMEACCGAHYLGRILAGQGHDVRLMPAQYVRPFVKSHKNDYVDAEAIAEAVQRPSMHFVPLKSEAQLDQQALHRVRDRLVRRRTAVINQIRAFLLERGVIVAQRRRNLELALPRILADEVLQLSPRLRLLLAELREEWRDLDGRVEALTQEIEKAAKTDPACRRLQTIPGVGPMIASALVAAIGDGSAFKRGRDLAAWLGIVPHQYSTGGKIRLLGISKRGNSYLRRSIIHGARAVIGSLATKPTALGRWVGALLTRMHGNVAVVALANKLTRIAWAVLRGTKPFETIHLWRRRRKSRPVAPTEGGFPNVCEPIILMARRSSAASQAWFKKRLFEAESFSRTDACGYPSWPGASAPPKGRIH

SEQ ID NO: 272495 - protein, 415 aa, unidentified
MSRAAIDFSGHLLVAIDVAKFSHEVLLRWPAGKTQRMRIPATYAGISGLIEILQSSQLPVLAALEPTGDYHRLIAFHLIQAGVSVQQVSSLAAARLREAMHNSWDKNDKKDARVILEMMVRGMTQIYHDPLVHDNFDVQELSNTYLQITLARTRAMHSLLGHYLPLYFPEMERFFNASRSEWFFKFLLAFPVPSAIASMSLPAFTAAAWDVIGRKVAKERFLAELHETALTSIGLPVAVDSVAVQSYRLQLSRLLDLTIQRSALEVQAEALLTDNAQYRLLRTLPGVGPIIALIIISESGDLRRFSHHRQYLHFCGFNLASSQSGNSQSGHRISKRGNKRLRYAYWLAATVAVRQRENTFRRKFEAYLRTQSDTPDTRRKGVIAVAAKLARVAHALIKQGQNYRGYHEATILTTG

SEQ ID NO: 272496 - protein, 313 aa, unidentified
MITLGLDPHPGSHTVVALDNNGASLAHLAVPNTPEGLEQLHEFGSRFSPRRWAVEGAGNHFIAAFVAELLANSESVFSIPPSLTSQYRARRGRKKSDVVDAENVARALLANAQLPPLHAVEHQRELQELTRTQRRLSEQLKASRGALKELAAGSSVREVLQPVIEILVDQLKILRQQIRLRVMDIMPALLDVQGVGPIVAGILLAEVGNPKRFASANHFASYCGAAPVERGSGQNCRMQVNPGGNRRLNWALHIVAMVRLGNDGGRSKTFIDKSRLRGKSQRSALRVLKTYIARELFSVMHHNIRANIEGLST

SEQ ID NO: 272497 - protein, 369 aa, unidentified
MSQEKMLLFGLELSNKKWVVCFGEGSGTRRVEVAAGDQAGLLREVEKAKKKFGLPEDCRVASGYEAGRDGFWIHRFLWRNGICNRVMDPASIPVERRGRRKKTDKIDARKLLGLVVRRELHGEKRAFSEVRVPDEAAEEQLRLGRERDRLKKESTMHRNRLKSLLVLHGVKSAKVEYCDFTALKDWQGRALPGELVRELNREQERLTVVRRQLKEIEKVQGERLKQPKTAAEKKGATMATLRGLGKQSSWMVAHEYFGWRTFANGKEVGGASGLVGTPYDSGESRKEQGISKAGNRRIRRVMVELAWLWLRHQPNSALSRWFRERFEGQGQRLKRIGIVALARKLLVALWRFVEFGQAPEGAVLGGAIR

SEQ ID NO: 272498 - protein, 404 aa, unidentified
MYNAVGIDVSKGKSTVAVLQPGGTVIRKPFDVSHTSQNLNELADYLSSLDGTTKIVMECTGRYHEPMIKALSEAGLFISIVNPHLIKNFGNNSLRKVKSDPADARKIARYTLDNWTELRQYSGMDNTRTQLKTLNSQFSFFMKQKVAAKANLIALLDNTYPGVNKLFDSPTREDGSEKWVDYAYSFWHADCVRKIGLKAFTERYMSFCKKHHYIFQQDKPEKLFNASKELVAVFPKEKTYKLLIQQSIQQLNLASEHVERLRREMNELASTLPEYSTVMGIYGVGKTYGPQLIAEIGDVSRFTHREALTAFAGVDPGVDESGQHKSKSNRASKVGSARLRKTLFQVMATLLQNAPENDPVYRFLDKKRAQGKPYYVYMTAGANKFLRIYYGKVKECLRNLEQAE

SEQ ID NO: 272499 - protein, 354 aa, unidentified
MNYVGVDIHKRYSVLVAVDERGRELARGRISGNSVHAFAQFFEALQGPGKVVLEACWNWGRIYDVLSEIEQVEEVVLAHPLKTRLIAEAQIKTDSLDALALATLLRGNLIARAHVPSKATRARKELLRQRLDWARLRTRVRNRVHAVLDRQRELEMPQCSDLFGRKGLNALSKLRLAEPDAILLGEELDLLKLIDSQIKAQEGRIVAFNANEQATQYLQSLPGMGKILAAVAAAEIDAIERFDGAAKLCAYAGLVPTTYGSGGKVHQGHLLKSRNKWLQWAFIEAAWVAVGCSSYFGGIYCYHRARGKKANIAITIVARRMCRIAFTLLKERRNFQEQHRTFPGRSAVRLTAAA

SEQ ID NO: 272500 - protein, 346 aa, unidentified
MTQQNYPNQNYPIIGIDVSKKQLDVCVLQADEQRMSLKVNNTPAGFEKLMQWLKKKNVGPVAAGLESTGVYSMGIAVFLHEQGMVVYLANPSQVHSYMRAEMRRAKTDKADAEAIANFIAAMSKKLHPWQPIPQHYQELRDLVRYLHQITRSRATIKNRMDKISYTTSAAKERVRKLINADLAHYDKQISSIKKDIRKCISKHPDLKCRYERITTAPAIGEITAVTYMSEVPNVKVFSCAKKLVAFTGISPRISHSGIRHPESQPISKMGDAILRQAVYMAALTAKKHNPNMTGFAARLRDDGKKKPKVVTVAVARKLLHLLYAMDKNETSFDPNYQKQHQIKGTI

SEQ ID NO: 272501 - protein, 376 aa, unidentified
MSIVTQPNPTDNLVAAGVDTHADFHVAAVIDHVGRELGHQSFPTTSDGYVELHTWLAGHGTVTVVGVEGTGVYGAGLARALTTGGVHVVEVDRPDRKARRFDGKSDPLDAYAAARAALSGRASGTPKSRDGNVELVRVLRVARSSAVKGRAVAITQLKAVIKTAPDDLRDQLRDLDGATLITRCAGLRPARGPAPTPSPHAKRKPRPGRLDGIAAATKCTLATLARRIHRFTEEITDLEDDLDALVAETAPTLVAMFGVGTDVAGQLLATVGDNPDRIASSAAFAHLCGAAPIPATSGRTQNRHRLNQGGDRQANAALYRIAMSRLRHDLRTQTRRDELRALGKTNKDIMRILKRAIAREVYQAIKTDLIITKIET

SEQ ID NO: 272502 - protein, 352 aa, unidentified
MNQITTVGVELAKDVIVVCAADPAGRTVFFKQFGFQGFASWAANLPPCTIAMEACSSAHYWARTLSSLGHHAKLLAPDLVKPFRKSQAAKNDRNDAQAILITALQPDMRFVSVKSVEQQSILACHRMREGWKIERTALINRVRGLLAEFGIWLGRSPQNLARSLPRLIQDEQLPARVQGLLVQAQGHLQQLEALMEQGERDICEHARHSEAAQRLCALNGIGPITASALVVSVGDARDFRNGRQMAAWTGLVPKQSSSGGKDRLGKITKRGDTYLRGLLTQGARSALNAALTRAPDKRSRLEHWIVALRHRVGYHKSLVAIANKHARICWAMLARHESYAPQAGRHHTATAA

SEQ ID NO: 272503 - protein, 431 aa, unidentified
MLKINPLSTLYVGIDVSSKSNYVCALDFFKNKYINSSFANNQPGAEELALKILECLNQHPDLTMVVAALESTSVYSIHIANYLSSCEELMRFKPYVFVLNPKCTANYKKSYIGLGKSDPIDAFVIADYARAGNIESEPWRGSQFLALKRLTRHRLHLVECMTREKTYLISNLYLKFSELQMLEGDDQPFCDIYGATSSSVLMEYFSPEEILDSSEEDLIAFLAKKSRNRIKDISKTADLLKKAARDSYRLDKALYEPLNVSIASSFNCIETFKREIKVIDNAIEKEIKGLNPNAFIILQSIDGIGPVFAGGIIAEIGDITAFHSSDALAKYAGLTWKSNQSGDFDGEDTPMIKAGNRYLRYYLGEAANSMRKHNVEYGTYYRKKYNEVPKHQHKRALALTSRKFVRLVYGLLARNQLYSGVSLDTSIKDSN

SEQ ID NO: 272504 - protein, 416 aa, unidentified
MSYTVAGIDIHKKVLMVVAATGGDEVADPAGEALTFECRRFGAGAAERKHIVAWLRERNVREVVMESTAQYWKPVWLDLEPHFEKLHLAQAHSNRAPKGRKHDFRDAKRLTRRLLADELMLSFVPDSEQRGWRTITRGKQQLIRDRVRLQNQLEALLEEGRIKLSSVISDLFGVSGRRILQAMADGESDPHRLAALGDDRLQCSAAVLADALDGSLDPIQRALLKLYLERLHLLDQQIGQLDQMIATALRQHQDAVIRVAEIPGFGVDSAQQLIAEMGVDAEAFSTAGQFASWSGVCPGTEESAEQNHSSRSAKGNRMVRRILTQAAQAAVKKKGSHFQALFRRFLPRLHYNGAIWAIAHRLGRLVWKILHDQVRYIEQGQETNPAAKKRRARKMVQALRKLGYAVALTPIAEPGR

SEQ ID NO: 272505 - protein, 347 aa, unidentified
MKFYTKQHPYYCGIDLHARSLYVCILDQGGDTCVHKEISASPDKLQALLEPYLGHIVVGVECMHCWYWVADFCDALGVEFILGHALYMRAIHGGKAKNDRIDSYKIANLIRGGNFPLAYVYPKALRATRDLLRRRTKLVRHGADLKAHVANTTSQYNLPPNKVNLKNVGARAQLKTAFPDPVVQKNMDLNMAVLDCYAKELSKIEWFIEQQAKQHNPIHLHLLKTISGIGRILALTIIYEIGDIQRFASVQTFASYARLVKCKAESAGKSYGTQGNKIGNAHLKWAFSEAAVLYLRGNKKAQKYLQQLQQRMSKAKALSALAHKLGRCVYFMLKNETVFDETRFLKG

SEQ ID NO: 272506 - protein, 354 aa, unidentified
MSQKRSSEVAVIGIDIGKNSFHLVGQDRRGALVLRQKWSRGQVEARLANLPPCLIGMEACVGAHHLSRKLRGLGHDARLMPAKYVRPYCKGEKNDYRDAEAISEAVQRPTMKFVATKTAEQLDLQALHRVRERLVSQRTGIINQIRAFLLERGIAVRQGLHFLRAELPGILAKRTDVLSPRMLRVIEDLAGDWRRLDERIESLSAEITRLVEQDPACQRLMTVPGIGPLTSSAMVAAIGTGDVFSKGRDFGAWLGLVPKQMSTGDRTILGSISRRGNRYLRKLFVQAAWVVLVKVKPQQWERYGLKSWIEAAKKRLHRNVLAIALANKLARIAWAVLHNGRAFECVKTNAPRPA

SEQ ID NO: 272507 - protein, 465 aa, unidentified
MSKLRKRNRARSSQGATRPFEGMRQVHPHAAGVDIGAHEIVACVPDGDDQQIVRTFGTDTVDLQTLADWFVDRGIQTVAMASTGVSWIPLCEEREARGLPCCLISAQSIKRVLGRKSDVLDCQWIQTLHSYGLRAASCRPAADLVALRTLLRHRAQLLEHRAPHVLHMQQALLQMHSPLSHALRDITGATGQRLIRAMVAGARAPQHWAALRNDRCKKDAHEIAMALTGTWREEHLFVLTQALALFDFSTTQLSACDAQVEHAFAVITPHVESTAAASVPARAAVPPRRKPHSHSKNAPEGNTRAHILRITGVDLVAVHGMSDSLAPTIVAEIGTDMSQWPDDTHFCSWLGLAPNNDISGGKVLKSRTMKHRNRAAQAFRMAAQSVIRSHCAFGAFYRRLTGRLGPAQALVATAHKIARTVYHMLKHRVPYYDIGAAEYNKRFREREMHSLQKQAAKLGYKLSPG

SEQ ID NO: 272508 - protein, 438 aa, unidentified
MSNLDQAAVKREFAAHIGIDWADQKHFWTMRTADGKTQRGELDNTPEAVQVWAAELEQRFGGRPVAVALEQARGAVIAMLCKYAHLVLFPIHPNTLANYRKAFRPSGAKSDPRDADLALELLVSHADKLRRLEPDTVETRKLQFLTEERRRLVNQQTSETQRLIGWLKQVFPQILPWFEDPACAMVGELLLRWPTLPALQKATPKTLRTFFHRQNCRSAERIEERIAQIRQAVAATHDAALLETGILCIQNSVHVLAQMREGIARFDHQIAETYRQHPDRAIMESFPGAGPALEPRLIAAVGSRRERFESAQSVACFVGIAPVKEASGQQRWVHWRWACPKFFRQTFHEWAGCSIRTCQWAREHYDQQRDKGKGHHAAIRSVAFKWIRIFYRCWRDRVPYSEQTYLKAKAARAPKPHPAVSMQWESCGGFAKLSELPS

SEQ ID NO: 272509 - protein, 419 aa, unidentified
MVTEDVEWFAGIDWASQTHQVCLVDAGGKIVGERGFAHGGAGLAELCSWLLTMTRAAPTAIAVAIEVPHGPIVEVLLERGFQVYAINPKQLDRFRDRFTVAGAKDDRRDAHVLGDSLRTDRHCFRRLSAENANVIELREWSRMSEDLQQERNRLANRVREQLWRYYPQALAISDDLAADWFLQLWAAAPTPATARRLRESTVGGILKRHRIRRITAAEVLASLRQKPLTVAPGTAEAASAHIRTVAQRLTLVNRQIKQAHHRLDALSDRITENEGDSDAMGQKSEQRDVTILRSLPGVGRIVLATLLAEASEPLRRRDYRTLRTLSGVAPVTRRSGKYCIVVRRQACHMRLRSAVYHWARVATQHDQHSRHRYAELRKRGHSHGRALRSVGDRLLAVACAMLTRQTPFDPDQPLKQMAA

SEQ ID NO: 272510 - protein, 354 aa, unidentified
MQIVSALDVHRRQITYKTVDLESGQVWRGRISPGARGAVREWLARFDGRADVHVALEGTTGWRFVVAEIERAGHRAHLADPAETAAKRGRKRRAKTDHADCDLQLKLLLSGELPESWIPPAHLLEPRTRVRMRKTLVDQRTAWQQRLQAQLFHQGVPAGLRPRTRVGREALARVELSPAGRALVLLALRMVDTIDRELAPLDRELRAYARRQPGCRALMARLYGVGPVSATAILAELGDPRRFARSDDAVRHSGLDVTVYQSDSKRAPGHLSHEGPEPLRWALFEAAQQAARAGSPVHGYYRQVAGRIDHNRACLSVARKLCRRAYHILRELGEEALAPVEGDPYAEEAVAAAA

SEQ ID NO: 272511 - protein, 419 aa, unidentified
MAIERRKVCGIDVHKSFLIATILDREGKYETKKIHQDLDSLLGLREWIISQACDSVAFESTADYWRPLYMVLQDKVPVTVANANHIKHVPGRKTDITDSRWIAQLELNNLITPSRIFSGESYDLRSLTRSRELLVQNRTELKNKIHHLLDSASIRLSSVLSDLFGKSGSIILKGIVENKPFDEIVNSLPKRMRGGADSISATLPLSIPPVCLVLLQSYLNLVEHHDDEIKLLEGRIREALQNKSREQQILTSIPGIGFIGASTLIAEIGDIHDFEDADKLAKWAGLTPSVYQSANVTRTGSITKQGSRHIRWILVELAHVAIRSPGRIRTFFERLMPKTGYKKAIVAVARKMLRIVWHLLVNDEEYIDEIPRSKQVKLPKLPSKIQKIGINRFIELLSKASEVIIKDNDQEILRLGLSD

SEQ ID NO: 272512 - protein, 346 aa, unidentified
MLYVGLDLSRKRLDWQALSAAGERLGIGEVPPDADGLAGLVRRLGDAGEGVLAVIESMSGARFVHDRLELAGWDVRIADALKVRGIAPLACKTDRIDCWVLAELARLGLVPEIWLPSPRVRAERERARFRLHLVKHRRALKNRIHSILFQYGVPNPTSDLFGLGGRRLLARLALPEPWSSTLAASLALIDTLDEQIERCEGELRALGAEHPYVPLLLTCPGIGWVLAFTIASEIGDISRFASARKLVGYTGLCPRVDQSGERDRRGPLRKNGPNHLRWALVEAAHSAARHPHYRPIRERMRARHGQKRGTKLAAIEIGRRLAEAIWHMLTRTESFAPAGASASLAA

SEQ ID NO: 272513 - protein, 308 aa, unidentified
MPTIYAGLDIAKLNLQLHLAGRFHDRPNTAVGRRQLLKLLAARPGVHVVCEATGGYERDLVAELHRAAITVSVLNPSRVRHFARAQGQRAKTDRIDAAVLSDYGQAFQPKATPARSEVEQQLTELVRRRLQLLEMLVAQRQQAERLCLPSLRRQAKSLVRRLESDVDQIEAQLQELRRQATSLDARVQKLEAITGVGTITALGVLAELPELGTLNRPQAAALAGLAPHPRQSGQWQGRRMIGGGRALVRRALYMAALVAARSNPILKAFYQRLRLAGKPAKVALTAVMRKLVVLMNHILKNPSFVLQN

SEQ ID NO: 272514 - protein, 371 aa, unidentified
MNSIVYVGMDVHKEQYTICCYSYETDKVEYKQTIPSDYKLVLKYMEQVRSRYDGEVTFVCGYEAGCLGYSLYQQLKDHAVDCKILAPSTMAVTNTHHVKTDKRDAANIARCLAFHTYSEVYVPDNDDNDVKEYIRMRDDQKLYLKKVKQQILAFVLRQGKRFEGGKTYWTIAYLKWLKTLELSDLQRETLNEYLMTYEYLTEKISRFDERIEELASVERYEEKVKHMSCLLGIKTHTALSMIVEVGDFERFEKAPKFASFLGLVPSEDSSDTRVNRYSITKAGNSHLRRLLVEAAQSYTRGNVGHKSVALKQRQKGNPPEVIAYADKANERLRRRFYKMTLNKGVNRNVAATAIARELACFIWGMMTEHVS

SEQ ID NO: 272515 - protein, 343 aa, unidentified
MTIMIGIDPHKASHTAVAIDNTECVLDELRIRACSKQTDRLQSWASPFPDRVWAIESARGLGYLLAQQLVAAGETVLDVPAVMSTRTRLLGSGKAQKNDPNDARSVAIAALRNDQLCKVGLDDHARVLKLLVKRHRDLGRLKSKAACRLHALLMELEPGGMAKEMTVTRANDIVDRIEPASQMVEHRLAVARETLADIEHYETQMKASMKRLRTAVAASGTSLVEIRGVGVVVAAMIIGQTGDISRFASAGHFASYNGTAPIEASSGEKKRHRLNQRGNRQLNWAIHVVAVSQLRYPCEGRDYYDRKRAEGKNSKEAIRALKRQLSNVIYRALVADTRRSTGE

SEQ ID NO: 272516 - protein, 357 aa, unidentified
MATCIMVGCDLHDKSMLLRIAVDRGQPVTRSWATNAGARKAMMADLWKRAGEGGAPRITFVYEACGFGFRFHDELTAAGIESYVVAPSRLARSAKHRKGKTDEKDAQALLEVLRAYVLAGSALPAVWVPDVQTRDDRELVRRRLAIAEDQTKVKARVRWLLKRSGIEGSPTEGWTQAYWVWLQRLAGGGLPGGAAASLASHARHLEWLWQETERLDEQIEALSRGARYAGPVEALCRHKGVGLLTAMVYLTEMGDLSRFANRRQVGSFLGLVPCSYETGQGADRKGHITHQGPARVRKVLCQAIWSRVRWDEAERVAYERLVARNPKHKKIAVVARMRALAIRLWHDGLAAQKALAA

SEQ ID NO: 272517 - protein, 338 aa, unidentified
MAIVTLGIDLAKNVFALHGVDEAGAPRLKQPKVARGKLNALVAAMPPCRIGIEACSGAHYWARQFQAHGHTVKLMAPKLVTPYRMTGKRGKNDAADAAAICEAVQRANMRFVPVKSEEQQSRLMVHRARQGFVAARTACINRIRGLLSEFGIVLPLKAEVVRREARNHLEELPGYANTVIGDLLSEVSHLDERVKQYDTHIRAMARDCTAAQQLMQLMGVGEITATALVAMVGNAREFHSGRQLSAWLGLVPGQYSSGGKARLGSITKAGDAYLRSLLVLGARAVLNAAKGKTDSLSRWALAVAERRGYWKAVVAIAAKNARMAWAVLTKGEAFKLPV

SEQ ID NO: 272518 - protein, 316 aa, unidentified
MAQSEMYVGIDVSKDRLDVAVHGQDKVWSFTNDEGGIEQAVKMIKELSPVLVVLEATGGIELPVVASLGASGVPVAVVNPRQARDFGKATGKLAKTDVLDAKMLAHFAAAVHPEPKALPDATAQGFAAILARRRQLVEMLVAEKNRSRTAIKPVRERIRKHISWLKQELDSTDKDLDQAVRGSPLWREKDDLLKSVPGVGPVLSSTLLGQLPELGTLNRKQIAALVGVAPLNRDSGKFRGKRSIWGGRASVRSVLYMSTLVATRHNPVIKAFYKKLCAAGKLKKVALTACMRKLLTILNAMIRNRTRWSPICTANS

SEQ ID NO: 272519 - protein, 335 aa, unidentified
MDFKVFIGIDVSKETLDFIPTSEGKRLFHEHVSNDNKGIVRLYKRLAKTVDSSPEQWLFCMEHTGVYCNPMLEFAAEKDLAIWLESAAKIKAHHALERGKNDALDALRIAEYAFAKKDKIKLWEAPREVIIRLKSLIKLRERLITSKKRLLDPLREEKQFCNKEWVREHEKLLKPVIAKIEKQTKEVEQEIQQLINEDDDLKRLYGLITSVRGVGQIVAINTLVVTNEFKQITNPKEMACNCGVVPFKYDSGKTIRSRAKVSHRANKTMKVLFHLAAMSAISTKGELRDYYLRKVEEGKNKMAVINAVRNKIIHRIFACVRDQRKYEENYIHSLA

SEQ ID NO: 272520 - protein, 342 aa, unidentified
MQIATIGLDIAKNVFQVHGIDAAERVVVRKQLRRRQVLEFFKALAPCLIGMEACATAHYWARELMKLGHLVRLMPAKDVKAYVKRNKNDAADAEAICEAVRRPTMRFVQIKSAEQQGRLMLHRARDLLMRQRTQVINALRAHLAEFGIVAPQGRQGVKELLLIIAGGEDERLPVDAHASLVVLAAEFTAMQTMIGSIEKRILALHRSNEASRRLETIPGIGIAGATAIAATVPDPTIFRSGRDFAAWIGLVPREDSTGGKQRLGPISKRGDRYLRRILVVGAVAVLRYARQNPEKYPWLAQLLARKPFKVAAVALANRMARTAWALLAKGGTYRAPTLVAAA

SEQ ID NO: 272521 - protein, 370 aa, unidentified
MSVRRILAKTIDTDLEYEAIGIDLAKNCVSAALLTTDGEVVCIDRLDYSELEKSAQALSSTTFAMEPCTEMNYLVQKLEAWGHRCLVIGGKNVQNYIENHFSGQKTDLNDAQALAFLAQDTQLRTIKAKDVEQQKYASLTTLREQYIKQYRQTIVSLKGICQAWGLNISKGISGKARLKDLIENHAAFPEELKESLVDMVTHAQTAQKALNKITKTLEELAKSDKVCQLIQTIPGLGSICSCRLRATVGDIKRFKSPKDFPAYYGLVPRSIATGHNERKGKITHRGDRTMRSLMVQAAGSLVNMATKGKLKSKQLTKWILKKQKEKMPWGKLVCAVAAKLLRIVRAVLISNKPYNSKIAGVAKCSLPKGS

SEQ ID NO: 272522 - protein, 347 aa, unidentified
MDYFAGLDVSLETVSICIVDAAGDILLEKKSEAEPAAIVAVLKHFGRPLKRIGLEAGPTSSWLYSELRCIGYPAICLECRHVKAGLSAMRNKTDRNDARGIAQLVRLGWFRQVHVKSEEAQRIRMLLVNRQQLLTKALDIENSVRGSLKVFGLRIGTVTRRTFEARVLELVRTDRSLIAITEPMLRVRRALLGEFERLDRLCRQVARRDPVCHRLMTVPGVGTVVALTYRTGIDAPERFSRSRDVGAHFGLTPRRYSSGQTDYDGHISRCGDAMVRTALYQAANVLLHHGRWSSLKSWAMRIAKRGSVKAAKVALARRLAVVMHRMWVDGTDFRWSAAKASAPMALA

SEQ ID NO: 272523 - protein, 347 aa, unidentified
MEYFAGLDVSLEETAICIVDDTGLIVREARIASEPEALVAFFRASGMAMKRVGLEACSLTAWLHQALTEAGIAAICIETRQAKAAMGAMPNKTDRNDARGIAQIMRTGWYRAVHVKDPCCRSWRALLAARRMVLNKRRDVENGIRALLREAGLKVGTPSRRNFAARVIELVADDPVLAALSRSLLSVISVMTEEIDRLTKRVLDEVRIEPTCRRLMTVQGVGPFTALAFRATIDRPDRFQRSRDVGAHLGLTPRRYQSGETDVQGGISRCGDELARTALYEAAHSLLIRSTKWSALRAWGMNVAKRRGMARARVAVARKLAVILHRIWADGTEFRWTKQAAASVTAA

SEQ ID NO: 272524 - protein, 409 aa, unidentified
MRIIGLDIHRAFAEAVVWDDGKLKRMGRVDMRRPLLEAFAKKLSKEDVVVVEATGNASSVAAVIAPHVKKVVIANPKQVRIIAHAKIKTDTIDASVLAQLYASGFLPEVWIPDEPPQALRRQVTRRNQIVRQRSRLKNIIQSILHSHLIPSCPHADLCGASGRAWLFHQILPEDERLAVERHLREFDRLGEDLKVIERDLARSALGDEGVKRLMTIPGVDMVVGLAIVAAIGDAGRFEQSQKLVSYLGLNPSVRQSGPGPAYHGRITKQGRGHARGMLVEAAWAAARAPGPLRAFFLRVRARRGQHVAAVATARKLAVVIWHLLRKGESYAWARPALHARKLRDLELKAGYKAERGQRGAAHAYNIKSHRDEERRWVEQAETAYARFVAGWNPRGPKRARTGAANEGRQ

SEQ ID NO: 272525 - protein, 365 aa, unidentified
MQFIGVDLHTNRFTCCYRDEGKEKKETITFELSEYGLAQFFGTLTEESYVLVEATNPTFTFTRLMQPMVKEAIVANTYELKQISLARKNTDKIDADILCRILKMQVLSGEQAISPVTVPPVEIQELRGYFTTYRLLRKQTTQIKNRIHSLLKEKLYGFTQEEIFGKKDRKMIRALESETAMSFQVNQLCDMLEYAESQAQALEEQIMRHAEPYMREIEILTSMKGVGVFTAIAIIADIIKVDRFKNSKAFTSYLRSAPKVSNSNTSKPTLGTNKKGRKLAATLITQSLNHVLSSSQKLLQWYMEKTKQKKPGLVRTGLRRRVFAEIYQMLKKGEYHYGRNAALHEAKIRQYKRFLEKSKNLLKKA

SEQ ID NO: 272526 - protein, 386 aa, unidentified
MIYVGVDVAKNTHYACVTDDKQKLLTKSFAFTNDEAGFAKFRGSFQKYPKDKVIVGLESTSFYGENLIAFLAGLGYRVALINPIEIADSRKNRIRNAKTDQIDAKLICKYLATEEYRLLQPKEMQMLSLRALCRFRQTMKKSKTRLKTQLVSYLDLCFPEYATAFSNVHGKGAYAALLEYPTAGAMAKANVIKLSGILHSASHGRLGRERADALKLLAKHSVAAKSSDLSVQIRHTIPQIQLIESQLSEMEQRIEKTFDELDSVIRTVPGIGAINGSMILSEIGDIRRFSHPGQLIAFAGLDPVVRQSGKFRAKTTRMSKRGSSTLRYALMNAAWNVSMNNQTFGNYFSEKLAQKNRHYAALGHVAGKLVRVIFKMLKDNVAFDLP

SEQ ID NO: 272527 - protein, 400 aa, unidentified
MISVGIDVSKGKSTVCILKPYGEIVSKPFNITHTHKDLSELSSMLFRLNDEVKIVMEATGIYHLPVLTYLQEKGFFVSVINPYLMKSYRNESLRKAKTDKIDSRIIANYGIDHWFKMKEFQISGVIYEELKLLGQQYRHYMKLHLLSLAELTHLLDLTMPGIKNLLASWNETNRKDKRSDFVERFWHYDIITSMSEQEFTEKYILWAKEKKYVPSQEKAKVIYTLAQESIPTLPSETSSVKMLVTEAVRVLKEVDATLGLILSRMQEIAKTLPEYSVVREMGGVGNTLAPKLIAEIGDVRRFRNGKALVAFAGIDPPPYESGQFVGCNRKISKRGSASLRKVGYETMRSLKMRSRPEDPVYRYVVKKESEGKSKKSAKIAGLNKFLRIYYARVTELYKNI

SEQ ID NO: 272528 - protein, 370 aa, unidentified
MSVRRILAKTINTDLEYEAIGIDLAKNCVSVALLTTDGEVVGIDRLDYSELEKSAQALSSTTFAMEPCTEMNYLVQKLEAWGHRCLVIGGKNVQNYVENHYSGQKTDLNDAQALAFLAQDTQLRTIKAKDVEQQKYASLTTLREQYIKQYRQTIVSLKGICQAWGLNISKGISGKARLKDLIENHAAFPEELKESLVDMVTHAQTAQKALNKITKTLEELAKSDKVCQLIQTIPGLGSICSCRLRATVGDIKRFKSPKDFPAYYGLVPRSIATGHNERKGKITHRGDRTMRSLMVQAAGSLVNMATKGKLKSKQLTKWILKKQKEKMPWGKLVCAVAAKLLRIVRAVLISNKPYNSKIAGVAKCSLPKGS

SEQ ID NO: 272529 - protein, 358 aa, unidentified
MQRNKISFKGQRIFIGIDVHKKNWDVAIAPEVGNVKRHTQKASAKALFDFLKKHYPDGDYLAVYESGFSGFSTYYALKEVGIDCIVIHAADVPTTQYEEVMKTDRVDSVKLVRSLKAGLLNGIYIREKENIDDRSVVRIRKTIQKQLSGYKARVKHMLHCNGVLLPERFEKPGSHWSKAFIRWLKEDVTLLSSTRNSLDLLIRQVETIRMTLLEATKMMRFLSQTERYKHKFDLLMTVPGIGVAVSMCILTEVYDVKRFHNEKEFAAYLGLIPTSHSSGDKIAHGEMTFRGNKQLGPMIIEAAWITICKDAGLGSLYLRYKERMKPQKAIVRVARKLSNIIFAILKNEKEYVPYHTGK

SEQ ID NO: 272530 - protein, 370 aa, unidentified
MDEIIKFFVGLDVHKESIAVAVAEAGRAPARLVGSIAHDVGKLIKLLARYGEPGAVQVVYEAGPTGYGLQRALARRGYLCQVIAPSLIPKRAGDRVKTDRRDSLRLAELSRASELRAIWIPDPADEAIRDLARAREDAVNARTQVRQQLKGFLLRHDVRYAGKTSWSKTYYRWLATLNFGLSAAQTAFTEYWQAVTAADERVARLTEAAANSIEGWRFEPVVRALQALRGIDQISAIGLVAEIGDIGRFAHPRQLMGYLGLVPSESSSGEQVARGSITKTGNAHARRRLTEAAWNYRFQARIGHRAQRRAEDLPQAIRDVAWKAQLRLTGRFARLRARGVQINKVCVAVARELAGFVWAIASTQAKLAQS

SEQ ID NO: 272531 - protein, 356 aa, unidentified
MLNKFNKIPDFTGHDVFVGLDVHKGSWAVNIIVDDMKHRSFTQPPDPVALSNYLTGNFPGATYFSAYESGFCGYHHHRKLLELGIQNIVINPADLPVTDKEKNNKRDPLDSKRISSYLQKDLLSAIHVFDPAHEQFRSLCRMRWTAAKENRRTKNRIRAFLNYYGMNPPAHLKPQYWSNKLVHWIEELVLPYDSGNLALKYLIASYHKNRELLLEVTKNLRRQVKLLYPDIYTLLLSVPGVGPLTAMHLIAEIGDTSRFRSYKQLASFVGLVPRSHQSGEKDFPGQLTYRSNKYLRALLVESAWTAVRHDPALMLYFKERLPGHKSQHIIVKVAHKLLNRIRNVWISHNMYAKGLS

SEQ ID NO: 272532 - protein, 415 aa, unidentified
MADQRQWYAGVDWASESHHVFVTDGDGRKIGERVFKHSGEGLAEMAAWLMAASGAADPSQILAAIEVPHGPVVETLLERGFKVHAINPKQMDRFRDRFTMAGAKDDSRDAEVMSSALRTDARCFRLLAVADPMVCELREWSRIAEELGVERNRLTNRMREQLWRYFPAFLEFDSDLSAGWLLDLWQAVPTPDKAASVRETTIAKLLKRRRIRRFDAAHVLSVLRKPPVQVAAGTIEAASAHITTLIARIRLVNRQIEQAHQRLDSLIARLSPPEEAAPGQNKQHDAEILASLPGVGRIVLATLLAEAHDALQRRDYAALRSLTGAAPVTKRSGKSCTVIRRHACHARLAGAIYHWARVATQHDPTSRAKYAALRSRGHSHGRALRSVADRLLNVACAMLRAGTTFNPDLAVQKTS

SEQ ID NO: 272533 - protein, 414 aa, unidentified
MNERGTVAAGIDTHKDTHALCVIDLVGRAVATGAYAAEGRDRIAAAIGDPRDCVVVGVEGTGSYGAGISRRLAELGYDVVEVVRPKREKRMAGRDKNDPADAERAARDALAGKASGAPKAGGGWVEALRFRMVARDAAVSESTRAANSAHALIVTAPAPIRGELGGMKTPALMKALSRRRRARDVVESSLWESLRSLSLSWIGAKKAAAAHEEAMREILLANAPALLDIHCCGTISAARLAVTAGDNPERVSGESAFASLCGASPVEASSGKVKRHRLNRGGDRQANRALHAIARQRMKRDSRTKLYVDKRTKEGKSRREIERILVRYIAREVYGALMRPMDAACEPYRASARAAKSERLRAGAAQAQASRALGVASARISEMERGRLVDAPLLQRYRSWLESLSAGERRESPE

SEQ ID NO: 272534 - protein, 413 aa, unidentified
MDVIVERCAGLDVHKATVTACVRYPGPGRERAQALHTFGTTTPDLLALRDWLAAHRVTHVAMESTGVYWKPVYYTLEDGFPEVLLVNATHVAKVPGRKTDVADCVWIAPRLECGLLRGSFVPPPAIRELRDLTRYRKTLIQDRTREVNRLHKVLEDAGLKLASVATDVLGASGRAMLTALVAGTTDPGVLADLARGRLRAKLPALRQALTGRCRGHHAFLLTQLLAHLDYLDEALATLSQAIEGHLAPFAEAAARLQTLPGVQARTLEAIIAEIGVDMRRFPTAGHLASWAGLCPGNNETGGKRRRGRVRKGNRWLKAALVEASLAAIRTKGSDFGAVDRRICRHAGHNVAIVAVAHAILEIAWHLLTHGTTYHELGADYLHRRNTEQTARRHVRFLETLGYRVTLEPVPAAA

SEQ ID NO: 272535 - protein, 365 aa, unidentified
MTSRQHSSSSSTDPPVRREVVLGVDTHGEVHVAAVVSPLGKILATESFPATAAGYRQLLVWARKRGTVRRAGVEGTGTFGAGLSRYLLAQQIQVYEVNRPDRSARRLLGKSDPLDAQAAARAVLSGRARARAKSGDGPVHSARMFKLAKDSAVKARTQAINQLKAVLVIADPALREQLSSLGNAELFRTCARLAPPDGEGDEDTVTQATHLTLRMLAERIEQLTGQIDELNQRLTRLVERHAPQLLEPVGIGPDSAVTLLITMGDNSERLNTEASFAALCGVSPIEYSSGRRSTRRLNHGGDRQANAALHRIVFTRLRHDPRTQAYYERRTQEGKTRREIIRCLKRYAAREVFSLVRPVARTPVL

SEQ ID NO: 272536 - protein, 346 aa, unidentified
MAEVQFVGLDIAKNVFQVHGADGAGRPQVRRQIRRAELLRFFANLPPCVIGLEACATAHHWARELGKLGHACKLIPARYVKAYLKTNKNDLRDAEAICEAVQRPTMHFVPIKSVDQQALLTLHRSRELLIAQRTQLGNSIRAQLAEFGVYMRVGSWTLTRQVAELVRGPERVPAIVRDLVEQLIEQWTQIQKHVSHLEREIERWHRASEQSKRLADIPGIGPITASAVLASVGDIRAFRSARHFAAWLGLVPRQYSTGGKPLLGSISKRGDGYLRRLLVHGAQAVMRWHRAHARQKRPWLDDLLRRRPVNVAAVAVANKNARTIWALLTRGERFAGYRSGPVALAS

SEQ ID NO: 272537 - protein, 370 aa, unidentified
MSVRRILAKTIDTDLEYEAIGIDLAKNCVSAALLTTDGEVVCIDRLDYSELEKSAQALSPTTFAMEPCTEMNYLVQKLEAWGHRCLVIGGKNVQNYVENHYSGQKTDLNDAQALAFLAQDTQLRTIKAKDIEQQKYASLTTLREQYIKQYRQTIVSLKGICQAWGLNISKGISGKARLKDLIENHAAFPEELKESLVDMVTHAQTAQKALNKITKTLEELAKSDKVCQLIQTIPGLGSICSCRLRATVGDIKRFKSPKDFPAYYGLVPRSIATGHNERKGKITHRGDRTMRSLMVQAAGSLVNMATKGKLKSKQLTKWILKKQKEKMPWGKLVCAVAAKLLRIVRAVLISNKPYNSKIAGVAKCSLPKGS

SEQ ID NO: 272538 - protein, 387 aa, unidentified
MLSLSANVFSTPNTETLTMSETSVAFQSFVGVDLHKCTVSLVAVDPAGNEIAKLKVPTKCVGKITSWLRSLPDPVWMAVEACPFVEWFIDRFQWCVYRMDIADATELSNRRGKRRKNDINDAEDIALRLARGECPLGFIADDQLMQLRKRGRHWRQLSHLLSRTKHSMKSMLNAANIPGPKFDAAGAHRWFLAHGHLLKPVQQVCFADFLDTLMLLERQRERLRREIILANRSDEFTEITTLLKSVPGIDEIWACIIAAEIGPFDRFPNADALEFWAGMTADLKESAGRTQSGHITKAGSRTLRWALCKAAVTLCRSDAKQEATRQRTIRQVGGVKAKANVAMGRRLLGILYAMVRDGKPYEIGEPTNHNRAANRARAARKQRKEAA

SEQ ID NO: 272539 - protein, 392 aa, unidentified
MSMYFIGIDISKYKHDCCIISAADQKVVSKVTVKNNKAGFNELLTIIHSLANPADIRIGFESTAHYALNLELFLESSLLTFMEVNPVLISEYKKSKTLRRTKTDSVDCESIARWLMTVEYKPHSKGFYHAYSLKSLTRLRDRLIRQRSFYLVKITNVLDHTFPEFKPFFFNERFSKTALYLLENYGSAEKMARMNSVSYEKLRSISRGKFSPQQFIALKELASNTVGVNNSIFDVELNSLLILYKTLVTEINTLEKEINLLIEEVHPHYLSVPGIGSISAAIIYSEYGDISNFDNPGQMLAFAGIEPGINESGTESHGGRMVKRGSSQLRYALINCCLPLIRFDMTFATYYAKKRAEGKPHRVAITHVAKKLIRVIYALERQNTDFCVQKLR

SEQ ID NO: 272540 - protein, 416 aa, unidentified
MKKGQNTRGYQRYMALDIHRDYIMVGAQNEKQDWVLTPRRVSLEKFPEWAKKNIRPGDIVVLETTTNVWTTYDIVAPLASRVLVANAAEVGEIANARVKTDKEDIKRLLKLLIGGIVPEVWVPPLAVRELRAFISYRSRLVTTSAAICNRLQSLLHKHNLLLSEAGLLDQAWWEAQKNISALEKMQIRQELALLQEIEKLKAAVDEELQRQSTRSIWGKQVLQLMQLPGVGFVVAMTVLSAIGDISRFEHAKQLVGYAGLGAGVHDSGKTHKDKKITKKGRRELRWAMVEAAWRAVRMSPFWKAEYEKHLHRMRKPNQVIVVVARKLLIAIWHVLSKEETDIHASEEELAYKMLLLSWSLNEDVRMGLTYKQFAKYALMKLGVETDITRFVRKDVPRRLAAREEVLARMTELGLTA

SEQ ID NO: 272541 - protein, 412 aa, unidentified
MQTLIERGCGLDVHQATVVACLLMVRRDGKVQKQMRTFGTTTRELVGLREWLLSEGCTHVAMESTGVYWKPIYAILEGALEIVVANAQHIKKVPGRKTDVKDAEWIADLLCHGLLRSSFVPPKSIRELRDLMRYRRKLVESQAAERNRLLKVLETANIKLANVATDVFGMSGRLMLRALIAGKATPQEMAELAKGLLRKKIPELELALEGKLEQHHRFLLELQLQRLEAAEKDLAALEQRIRQKLEPYAAQLALLDEIPGVDWTLAAVIIAELGVDMSVFGSVSQLASWAGVCPGNNESAGKRKSSRIPSGNVYLKSGLVEAANAAARAKGTYLRDKFFRLKARRGYKRAVVAIAHKILVAIYHMLSQQVSYNDLGDLYLDKLNKNHLTRNLVHRLERLGYAVTLTLQQKAA

SEQ ID NO: 272542 - protein, 284 aa, unidentified
MDQPQENSSTVVGGVDTHKDLHVAAVVDHHDRLLGTASFPTTRHGYKTLLSWVRSFGTVSRVGVECTGTYGAGLLRYLQQSDIPTLEVTAPDKTVRRKRGKDDTIDAENAAHLSRYRNVTTAYRIAFKSLARRYVELHDEIADLDVMIKAIVDELAPELVSRLGVGYESASQLLITAGDNPERVHSEAGFAALCGDSPVPASSGKTQRHRLNRGGDRAANSALHIIAIGRLRLDPRTQNYVAKRTEQGLSKLEAIRCLKRYIARELFYVLQRRNHTISQTQIAA

SEQ ID NO: 272543 - protein, 326 aa, unidentified
MTKLTSFTGIDVSKDVFDVCVLNGQEGRTQSKQFSNNEAGFAALSQWLPSEAHCVMEATGPYYLRLAFYLHEKGVWVSVVNPLVIKHFSKMKMCRAKTDRKDAALLALFAKEQAPLRWTPPKSYVVTLQQLGSVLVQLTKQHTALTNQLKAFECSGMLEKDTKTLLQRLLRQVEKQSCEVEKKMERLISCYHQELLKRLTTIPGLGQKTALVLIVVSGGFTRFSTYKQLCSYLGLSPRIHDSGKLKGKTPICKMGMSRLRALLYMCSWSALKYNQACKALYERLIEKGKAGKVALIAVCCKLIKQAFAIVKHNSSYQADYQKNICF

SEQ ID NO: 272544 - protein, 396 aa, unidentified
MERISTLGIDLAKSSFVVCGLDKAGKQVLRREFSRHKFAEFIAKTEACDVFMEACGSAHFWGRRLREAGHSVNLIAAQKVVGFRKCNKNDRNDAHAIAIAGKCPGMEFVPVKSVEQQDVQSLVRIRARLIYRQTSLVNEMRGLLAEYGITIGEGITPFRSKMSEMANGSIGDFPGITPTIFHSVISANEELLDITNRVERHEALIHELTKKDDRCRRIQEIPGVGPLSAATVIASVTNPDAYGNGRQFAASIGLTPKHVQTGGKDSKPVQLGISKRGDPVLRSLLVQGGMTVAKACKMRMDKAAKEKSLEKNAENQTSPSSSLGQHPCRERAKKKAKKKIITPGREEWMRRMISEKGMQKTAVAIANRNARIILSLLKSGDHYLPLGQQWPSGAVC

SEQ ID NO: 272545 - protein, 387 aa, unidentified
MYYVGIDISKHKHTFVIASHLGEVIQKPMDFDNSHLGFAQFLDKIKPFDSNQLKIGFESTGHYSANLKQFLHDQGYSFYQLNAHLVKKFSLSLSSRKAKTDKIDCLAIAKFLMTVDSKSHTSLSYHISFLKSLSRHYYRLNKYIGKTKVELVNYLDKAFPEFTRYFSSIYTKTPLTILLKANSLNSIANMTQSRFDSLNKLSRGNFNYSKYIKLKQAAKFSVGVKDKFYWSLLHLTIKRIQTLENEKEKVEDHINLIMKEIKSPITSIPGMGTTSAAIILSEIGDIFKFSNSRALIAYAGLDNSVHQSGIESSYGKVSKRGSKYLRTALYNVSFPIVNNSKLFYDYYFDKKSRGKSHTLSLIWVSRKLLRIIYFLLKNNQEFSDQVI

SEQ ID NO: 272546 - protein, 338 aa, unidentified
MTQHKIIGIDLAKSIFFLFEINHKGKNLGRKKLQRSKLLNYVANQSPSIIAMEACSGAHYWAREFEKFGHEVLLYPPQHVKSQRRKQKNDYNDAEAISELALYQRHPPVPHKSIEQQDIQSLIRMRRLCVTERTRLINQVRGLIAEYGIVLPKGKASFRQAIPEVLEDAKNQLSPILRELLSRQYERYLYIDEQISWFEDKLNQTAKQFDNAKRLMSIPGFGPLTSQAVAVWLGSGKQFKTGRDASAAMGLVPRQDTTGGNVMLLGITKRGNTYIRSLLVHGARAALRRAKFKSDKLSKWMLELQERRGPNRAAVALANKLMRIAWAVIAKNEEYQPA

SEQ ID NO: 272547 - protein, 338 aa, unidentified
MLYSGIDLHKRSVVIATVDERGQVVQEESVAASRTAVARYFRCLPEPTVATVEATSSWYWLRDLLEHENVPLTLAHAKFVKAIAYAKVKTDAVDALTLAQLHRADLIPRAHMVSPELRPLRDLLRTRLHLVQKRTSAKNSVERLLEKFNVPEPDQLPDEATLQASLYAEQIELLTDQIGRIEKQLQPRLIPNPDIQRLLWIPGIGKLVAFTLYLEIDGIERFDSVKNFFSYCRVVPGAANSAGKRRHAHRKDGNRHLKLALSHAAVRAIQHFPDIKRFYQRKARQKNPAIARTLVQKELARAVYIVLHDQVDFNHTFKGQPLSKRKAEQWPRKASPHA

SEQ ID NO: 272548 - protein, 357 aa, unidentified
MIMGCDWHPRYEIVAWVDEETGEVRKQRLEHGNGETERFYRSLPPGAIVGIEATFPSHWFERLQAECGHQLWVGDSAKIRASEVRRQKTDTRDAEHILDLLLAGRFPRIWVPSIQERDLRQLLVHRMKMVRTRTAVKNQLHYLAMSQGVCRKRKLWSARGRTELESLPLLPWASRRRQELLGWLDQLDRVVEELDRAVEELDRAVEEAGRGRAEVARLRTHPGVGPVTSLAFVLTIGPVSRFPNSRKLVSYLGLNSSEHSSGGRQRLGAISKQGNRMLRWLLVEAAQTAVRGDAELHRTYQRLKFRRPSGVAKVAIARRLAVRLYWMLRAQKDYAQLVRMSGSPGSAVVPTQSGSTV

SEQ ID NO: 272549 - protein, 359 aa, unidentified
MSLRSWLVAGMIPGIDREPLKKIAADPEVLLRLLYRWRDEAIKAGKEITRIAVAYETGRDGFWLARWLRDRGIDAHVIHATSVAISREHRRAKTDRIDTAMLRRGFLGWLRGERGHCSMAVVPTIAEEDAKRPHRERESLVKERTRTINQMKAILTQFGVRNFKTASRKAAEKIDDVRTPEGVPLPPNAGAALRRQIEHFRLINGQIKTIEKTRLQRLRQQPTDKFNAMVFLLVRIIGLGIETAEQLVHEILSRKLRDRKAVARYSGLTGSPDESGARRREKGLSRSGNGRVRKILIQLSWRMLQFQPDSSLVRWFKDRTANSQRSRKPMIVAFARKLIIALWRYVNTGVTPEGFKLAK

SEQ ID NO: 272550 - protein, 353 aa, unidentified
MRTYYVGMDVHRATIAIVVVNGAGKVVEQLAVETSATRVRRYLKQLQGRVYVTFEEGTQAQWLYDIVQPLVTEVIVCDPRHNKLLKAGNKSDRIDAQKLAELLRNGALKAVDHREHGVRALKELVRNYDCLVSDTTRVMNRLKAMFRRQAIGCGGHEVYRQDRREVWLAKLTERGAKERARSLYRQLAALKALRHEAKLAMVREARRQAAYVWLMSVPRLGAVSVAQLLAVVGTPHRFRTKRQFWSYVGLAVVTSSTADMEVVDGVLRRSRRPVATRGLNRNHNHLLKRVFKNAATSACQSGPFKQHYELRLQRGMDAALARLTVARQLAAITLSLWKRGEKFQAERMNRQAA

SEQ ID NO: 272551 - protein, 342 aa, unidentified
MEKRHMGIDLHRNRFTCCVRLENGRNYLSTWQLEALPRFVKKLRRSDEVAVEVTGNTRFFYNAVAPHVARVLAVDPNQFRVISHSVKKTDPNDARNLALYLAKGLLPEVRMKEKTQAQIASLTQTRDTLVKLRTALKNKVNNILSAHGINLEKEALSSEKKLSEVLAMRFDPMIRIELKVIVEQIRSLNESIAELEKTITEEGQKLPGHKNLTSIKGIGPLTGSILLSVIGDIHDFPEEGKLAAYFGIVPRVSNSNETERSGRITKRGSKLGRTALVQSALIAQRYSPYLKRFYEKTKARRGTGKAIIALARKLLGIVYRTLKNNWVFEDFPNFVLAGEAAA

SEQ ID NO: 272552 - protein, 427 aa, unidentified
MQSESERLAAYRQLRTNIRGSNNHLIVGIDIAKEKHYAFIGSANGATLCKQLIFQNNQEGFDLLTSRVEVLRLKHHCEHVVFGVEPTANYHKPLAEYLIRQGLHLVQVSGNAVKQNRELLDNRWDKHDRKDAANVADLIAQGKCQFYDFPPESIRDLRELLSLKKKLKKEEHGLKTRIRNNLLALYFPEMDQYINSCQTVSLSVIGNCCDPVMISGMEYDTFYNTVVFTRKNKKQDELLYQIWQSAKKSIGCNAGVAAVYEGNVLNKQLQGITIAIQELDKVIQTLCSRIEEYPYLLSIPGIGPDTASKILAYVSDPYRFDHAKQVIKLAGFDLSASRSGKPSAKATPVISKKGQADLRFALCQAALVASHRNNLFSNWFARKLQGREREKGIYAVILVKLAAKMLVIAWTLMKKKEMFAYEQLNNS

SEQ ID NO: 272553 - protein, 387 aa, unidentified
MYFVGIDISKFKHDCAIIDELCDTVMPSWSFSNDREGFSHFKALLDSLEGEKKIGLESTGHYGQNLKQFLESNGFAFMEFNPLLVSRFVRSKSLRNTKTDSIDALSIAQYVMTVEYKPYPSSFYHLDKLKSLTRFRNSLVRQRSKQLVELTNVLDKLFPEFKPFFKDKFSVTALYILAHYQTPERIANMNARSYEALRKLSRGRFTLSNFTQLKALAKNTVGTQSDYLLDQMNILLELYSQLDSKVDELDAQIKECVRGIDPPCLSIPGVGELSAAMILSEFGDFSKFQNPSKMLAFAGLEPGYFQSGQSEYTGHMVKHGSSRLRYALMNCCLPLISNEPVFAAYYAKKRSEGKPHRVALTHVAKKLLRVIYTLQTKNIRYDPTMIH

SEQ ID NO: 272554 - protein, 358 aa, unidentified
MSEITRVGVDLAKAVIQVNAVDAAGRLVVNRQLSREKFLSWCAQLPAGCMVAMEACAGAHHWARKLIAFGLNAKIIAAHLVVPYRLQGKGGKNDANDAAAVCEAASRPNMRFVPEKTTTQQGLLCVHRLREGLKQERTACVNRIRGILTEFGLVVSKSPEKLSEKLPDMLEDASNDLSGLARLAIEEAYGHWKEIDQRIKWCDERINAHVKEDAQAKAAKELIGIGPVTASALIAAVGDFKQFKNGAQLGAWLGLTPRQNSSGGKNSLGRITKRGDMYLRMLLIQGAKSAVMTAHKRDDPISIWLYQLREKSGWQKAAVAMANKNARILWAMMTKGCSFDPRHVSVKPGVVCAVPATP

SEQ ID NO: 272555 - protein, 335 aa, unidentified
MKNYKMIVGIDVSKLTLDAQLMFEPKDGRNSHLKVSNNDKGIKEIIKTIKNLRIDIQDCLFCFENTGIYSMPLSYSLSKKDVDYWVVNALEINRSKGISRGKNDKNDAKEIAFYAFTHLHKLTLTKIPEREIAELKILFTEREKLIKAIKVMDTTKEVQGFIPKEIIKNVMKLNAKTLLLLKKQLNEVEKQMNDIVIKNENILTQQNLITSIPGVGKQTALYLIITTKCFDRFENWRQLACYAGVAPFEFSSGSSVRGRTKVNHLADKKMKSLLNMCALSIKKYDKEIAEYYKKKVSEGKNPMLVMNNIRCKILSRVFATINRGTPYVNTHKFAA

SEQ ID NO: 272556 - protein, 341 aa, unidentified
MKDIKVLGIDLAKNVFQLHGTDGKGKQVFSKRLSREKLADFIVNLPPCLIGIEACGGSNYWGRLFKQMGHQVKIMSPQFVKPYVMSNKNDQNDARGIAEAVTRPHMKFVTIKTIEQQDILLLHRARELLVKQKTAQSNQIRGLLAEYGIVIPKGLTPIKKLPLILDNNADKLTVRSQEIFTRLYEQFNAIDNQLTVYNKELDLMVKQDSQCQEILKIEGIGPITASAIIATIGDAKLFKNGREVSAWLGLTPKQYSSGENIRLTCISKRGDRYVRTLLIHGARSVLKNCDKKTDKRSQWIADKKHRCGYNKAAVALANKNARIIWALLATGECYRRQLSVN

SEQ ID NO: 272557 - protein, 350 aa, unidentified
MDQYIGLDVSLKDTAISIRQDGKRIWRGKCPSDPKLLAEMIRKHAPHAKRVVFETGPLSTWFYHALTAEGVPAICIEARHAQKVLNETLNKTDANDADGLAQLAEAGFYKAVRVKAFDSMLTRTLVGARNQLLNISTQLSNQIRGLMKTFGLIIPKGKGRVFDGNVREFLDGNDGLARIILPLLEAWRDIRKRAADLDHQLLAAARESKETKLLMTIPGIGAVTAVSYVAAIEDPENFKTSRSVGAWLGLTTRRYQSGEVDYDGHISRRGDNHLRGLLYEAATVILTRTSASTESSLKIWGLKLSERLGFKRAAVAVARKLAVIMHSMLKTGEVFNALAGATTQAKVPAF

SEQ ID NO: 272558 - protein, 416 aa, unidentified
MQVVYARCCGLDVHKKLITACVLIRDTAGPVRQEIRRFGTMTRELLALADWLQEEQVTHVAMESTGVYWKPVWNILEGQVTVVLVNAQHIKAVPGRKTDTKDCQWIAELLQHGLLRSSFVPPTPIRQLRDLTRLRTSLRQDHTAVANRMQKILEDANIKLASVASDWLGVSGRAILTQLLAGEEDAAKLAALSRGRLRSKLPAMELALEGRMTEHHRWLLRLLLEQLKFLEAQMTELDTKIQAQLEAYQAAIALCTTIPGIEEVAAANLLAEIGVNMEQFPSARHLASWAGICPGNQESAGKRLSGKPRKGSAWLRRSLCQAAWAASHTKETFLAARFRRLAARKGKKRAIVAVGHTILVILYHVLKTKQPYRELGADYWDRTRAHHLKRYFVQRLERLGLQVTIHSKEEIAALPT

SEQ ID NO: 272559 - protein, 399 aa, unidentified
MNAVGIDVSKGKSMVAALRPMGEVALLPQEFLHTEVGLEQMAYAIIALGEDTRVIMEATGRYHEPVAAALHEYGIYVCVLNPLFIKQSGGGSIRKVKTDKADAMKIAKYGLDNWVDLREYTPMDTVRQQLKLCSRQYNLYMKTVVSLQNNLISLTDKTFPGVNELFSSPERADGHQKWVDFVMTFWHCDCICRVSEKAFTDRYQKWCKRKGYHFSTEKALDLYAGSCGHFTTLPKNDNTKLLITTAAQQLLAGKTTLAALRTEMTRLAKQLPEYDTVRAMYGVGETTAAQLMAEIGDVRRFPRRSSIVGFAGVDPAVDQSGKHSAKSVPTTKRGSPHLRKTLYQIVCTYLKRSPADEPVYQFLDKKRAEGKPYFVYMTAAQNKFLRIYYARVKECLAAA

SEQ ID NO: 272560 - protein, 460 aa, unidentified
MKKPNNSSPKQDRSGQLPAIQPNVAGIDVGSREMYVCGPSQPDGERGIRAFATTTVQIQACVAWLKQQKVQSVAIESTGVYWIPVLEILESNGLETLLVDTRPLSRVPGRKTDVEDCQWIQTLHSHGLLQSSYRPSEAISQLRSIVRQKAVLVREQADWVRRMHKCLDQMNVRVHHAVSDLQGSTGMAILRAIVGGERDARKLAQLRDPGCRHTEEEIAEYLTGHWRSDHLFNLQQSLLMYDSIGERIAAHEQEIRQRMEALIPQDRGDAQAPPLANREKRKAMKRRDQEGRRQALYRMVGVDLTTIDGVGVETAEVVVSEYGMDLRKFATEREFVSHLKLAPHRPVSGGKVLKKRRPQTHGTRSGEILRNAAVALKKSGSAIGAYYRRIARRKDASIAVFATARKLATLIYRMLRWGQNYVDIGQEAYEQQYQAVRLRTLNSTADQLGYLLVPKTTATT

SEQ ID NO: 272561 - protein, 354 aa, unidentified
MTDIKYVAFDVHQATISAAVLNLDGKLLTQAVMQTDATAIRDFLRGLSGVVHLTFEEGTQAQWLFDLTRPLVAELIVCNPRLNHSKKRDNKSDRLDAFNLVTDLRAGLLKAVYHGAPQTEALKQLVHNYETLTQDTTRCMNRLKAVFRSQAVKCGGRDVYYSRNRRAWLAKLDEEGLRLRAEFLYNQLDHLRELRREARKALLKEARQQAAFKQLCAVPGLGPIRVAQFISVIGSPFRFRTKRQLWTYCGFAVVTRSSADYKVVGNKLERRPKSSRTRGLNPNHSRRLKLVFKSAAIEALKEEAFKKMYERLQGSGMRAEMARLTIARKLSAVALAIWKSGEGYDETKLSKLTA

SEQ ID NO: 272562 - protein, 339 aa, unidentified
MEHLAIDLGGKKSQICLRSSEGQILTEAKVVNEEIQSWLEGSEPRRVIVETCTEAFAIADLAVSRGHDVRVVPSGLVRMLGVGARGKKTDLLDARALSEASCRIDLPSVHLPSAWSRRVKSMCGMRDVLVQSRTMMVNSVRAWSRTQLKAVRRGTLKTLPLRMREQAASCGEKLPDFVERLLVSIEQLTEQIKAATKELSALAGENEVCRRLMTVPGVGAITALRFVAAIDEIGRFSHAHQLESYLGLTPGEDSSSERRRITSITKAGPSQVRWTLVQASWAALRCAPNDPMCRWAKQVMLRRGKRIAIVALARKLAGILYAIWRDGSAYDPARNGSAR

SEQ ID NO: 272563 - protein, 348 aa, unidentified
MRKHSEIRAVKIMGIDLAKKSLHVYGENADGRKAISKKFGRQKLKEYLANLPPCTIAMEACGSAHYWARLLLSYGHEVKLIAPQFVKPYVKSNKNDAADAEAICEAAQRPNMRFVAVKEIVQQDVQAIHRMRSLAVERRTAQINQIRGLVLEYGIEVPKGRSNLFKRLPEILEDAENGLTDLFREELFGLSGELRHLDERIAHYDAKIEQIAQADERAQLLMTIPGIGPKIATALLAAIGDIHAFKNGRELAAWLGLVPRQHSTGGKSTLLGISKRGDVYLRQLIIHGARSILRWVDRRTDRISRWAAALKVRRHTNIAVVAMANKMVRIAFALLKKGEAYRAEPAAA

SEQ ID NO: 272564 - protein, 405 aa, unidentified
MIEPIVKRIAGLDVHKMVVVGTVLIEEEDGSIKQETREFGTFKRDRRQMCQWLKGHEVELVAMESTGIYWKSIYATLERAEILAYVVNARHVKNVPGRKTDVSDSQWLASLARVGLLRPSFIPTKDLRELRIISRQRMKINQTLSAEKNRMNKVLDDAGIRLGGVASDIDGVSAQKIIEGIIDGKPVEELIACARGRLKAKTDDLRACLDEELSERHIFLLKTLQEHIQFLKSKLEAIDAYLFAAMSPYQKQWEILQTLPGVDKVAAMVLIIEIGIEMERFGSADQLSSWAGMCPGNNESAGKRKSGKTRKGNHAIRSILCEIANAARRTKSQFKGKYESLVIRRGHKRTIIAIGHKILRVIFVMLKNVRPYFDPGIDYEELMVDRNAPRWLQVLKKFGYLPQTA

SEQ ID NO: 272565 - protein, 340 aa, unidentified
MAMTIVEAPPGITGGVDTHLDAHVAAALDPLGRLVGTESFPADAAGFKSLLTWLEQFGQVTKVGVEGTGSYGVGLARFLRRKGVEVVEVNRPNRQARRNHGKSDPLDAVEAARAVISGRASGAGKTKDGPVEAIRVLVVAKRSARQARVKAIVQMRHLGITAPDQLHSRLKGLTVTALVAEGAKMRATKSADPVTATTKASLSSLAHRVQSLDQEIAELNEKIESLLLATVPDLLARFGVGPDTAASLLVAAGDNPERLHSEAAWAHLCGVSPVPADSGKNAGHLRRHSGGDRQANTALWRIAMVRIAHDPETTHYFDRRVKEGRTKRDVIRILQRYIAR

SEQ ID NO: 272566 - protein, 347 aa, unidentified
MGHYAGIDVSLEYSSVCVVDASGKIVREGKVASEPVTLITWLGSLGVNLERIGLEAGPLSQWLYGALRETGLAVELLETRHVKTALSTMPVKTDRNDARGIAQLMRLGWFRPVHCKSMAAQEVRALLTARKLVQSKLYDIEMSLRGILRGFGLKVGPTTSQSFAARINHLVDGQTSLEAVAAALLSLHAVALREFKSLEKSVRQISRADARVRLLMSTPGVGPLVALTYVAAIDDPARFTSSKSVGAYFGLTPKKYQSGETDVSGRISKMGDGSVRTALYEAAHVILTRPIKGGALKSWAMKLARRAGMMKAKVALARKLAVVMHRMWIDAIKFDTGKASGCLRVAA

SEQ ID NO: 272567 - protein, 342 aa, unidentified
MKIIGCDFHPSFQQIAMVDLQTGEYTERKLTPDEARQFYAELKGPVLVGMEACGNTLWFERLLASLGIELWLGDAAKIRAMEVRKQKTDRRDAQLLLQLLLENRFPQVWVPTVEQRDTRQLLLHRHKLVGMRRQVKNELQHLALNQGVQQKRKLWSAAGRQRLQELPLTGWTKQRREDSLQLLDELDGRIAKLDIAVQQEADRDAVARLLQTHPGVGPITALAFSLTLGTIERFGRSRQVVSYLGLNPAEHSSGGRQHLGGISKQGNPMLRSLLVEAGQSAARCVPELKRAYQRLKHRKHSGVGKVMVARKLAVRLFWIWKTQQPYAAARTQGSPSHSVVAG

SEQ ID NO: 272568 - protein, 313 aa, unidentified
MMASPDVFVGIDVSKDRLDVYVRPLGIGFSVSNGAAGYAELIARLRPLRTKRIVLEATGGYERALWLALSEAGLVAAVVNPRQVREFARAAGRLAKTDRLDAEVIAHFAETFAPRLGKPDPLADRLGEHVLYRRGLQDELVALEHQRRRLETPALRERAERRLVALRAEVKQIEREMRAIVDSDPAKKALFACLTAVKGVGPVLACTLLANMRELGSLSRHQAAALIGVAPLNHDSGTRRGYRAIGGGRRRVRNVLYMATLSAVRSNPAIREFHRRLSAGGKPAKVALVACMRKMVVMLNGRVRDHLAVIATP

SEQ ID NO: 272569 - protein, 325 aa, unidentified
MQGKDRSEQETKTKSTVGIDVCKLWLDIHILPSEEAFRVPNTKAGSNEIIRRLVHHDVQLIAIEATGKWHRDLHRHLADRGYPVRVVNPLRARLFAEAMGLLAKTDRLDARMLAIFAGSLTETRPPAPEIIEALKELVQARTTAVEEQTSLTNQFKSATTVFLRRQLKLRLTQIAKHIKALEKESLKRIKGEPGLARRYDILVSIPSFGDVVAMTLLARLSELGSCNDKQIATLCGLAPWPDESSDRVGARHIRGGRQLIRNILYLAAITAKSFNPPMKAFFTRLTANGKAKKQALVAVARKLIILANTLVRADRLWHSEAPKCA

SEQ ID NO: 272570 - protein, 410 aa, unidentified
MKIAGIDVHKKVLMVVVIDASTPQEKPWRRRFTTMPSELHRLLIWLREQGVEEAVMESTAQYWRSVWLELEPHMRLHLAQAFSNRAPRGRKHDFKDAERLVRRLIADELILSFVPNGEQRIWRSMTRMKVQLTRDRVRLQNQMECLLEEMRIKLSIVVSNLVGASGLRILQALARGETDPKMLAQLGDERLQCTEEQLVDALTGRVQPMHRTMLALQLQRLQLIDQQIAQLNGLIAQAMKPHQEAVMRLAEVPGLGVDSAQQIIAEVGVQASTFPSAAELTSWVGTCPGKEESAEQNHSSRSAKGNKYLRRVLNQAAHAAVTKKGSHFQVVFRRLLPRLGYQSAIWAVAHRLCRVVWKILHEGVRFIEQGREPDPQAKKKRAQMLARALRKLGYEVVLTPINQVAAPNAT

SEQ ID NO: 272571 - protein, 335 aa, unidentified
MKTVYFLGIDIAKKKFDGALTVDGKNFHPIEAENASKPIQALFSDLKKKFSISYDQLVVCMEHTGIYCRPLLEFLIGNQIQVCVESAFQIKQSQGLVRGKTDKIDAQRIALYAYKNRESLKFWTPQRLIIQKLKALLVTRERLVKVKTELQGPIKECEEFIEESLYKAIAKSCQSSIKSLKNDIQKIEKTIDALVKSDTEIDRQYQLVTSVTGLGKITGLNIIVSTAEFTRIKDAKKFACYSGVAPFEHSSGSSVRGKTRVSKMANMTLKKLLHMAAMTAMVHDDDLKTYYHRKVLEGKNKMSVINAVRNKLISRVFACVNNNRLYQKNYQNALA

SEQ ID NO: 272572 - protein, 429 aa, unidentified
MRDESTPGARGPVFCGVDTHADSHWLCVLDWRGRKVLSRRFPADAAGYEALAGAIAAAGEPACVAMEGTSSYGAGLTRHLASLGMPVREALSPARTQRRRPGQGECDEADAERAARAAMSGSKLGTPKSQDGWVDGVRCMLAARSGAVKARTSAINTARSLLTTAPEGLRSRFRGMGGPRLMEELPSVRAESALGAALGALADLWAAARDAALDMELAIEASLEENCPALLAMYGCGPVSAAKLAVAAGDNPGRLRSEASFAAICGACPIPASSGKTVRHRLNRGGDRQANSALHEIARQRVMRDPETAEYAERARARGKSDREVMRCLKRYVAREAYRALMRPHEIRRPEDASELVAARRAARVSQARAASILGTSEKYISMLERGQRELKPIRRAYEAWVEAGLPLDWDRQAFEAERKMDSKKHLAK

SEQ ID NO: 272573 - protein, 347 aa, unidentified
MLHVGLDLSRTRLDVHVMDEAGAPLAVTTAAPDGGGLASLAHRVDEFGGPVAAAIESMNGARFVHDQLELHGWRVEIADAVKVKGFAPLACKTDRIDAWVLAELSRRDLVPSIWLPTPGIRAERERARWRLHLVRHRTALKNRIHATLLTFGHPCPVSDLFGAAGRRLLDSLALPEPWAADVVAALRLIDLLDGEIDDCEAALRRLGAEHAYVPLLMTAPGIGWVLGYTIAAEIGDIGRFATPKKLVGYTGLCPSVDQSGGHDWRGELAKNGPKYLRWALIEAATHAARHPVYAERYQRTKTRLGKQRGAKVARVDIARKLAEAIWWMLNTTKPFAPAGAPQRALAA

SEQ ID NO: 272574 - protein, 416 aa, unidentified
MSGKREIACGVDVHNKFIVATILSSDGLKLQDRFDTSLKELLRFKDWLKENGCHKVALESTGNYWLPIYHVLEGSVNFILANAYQIKHVPGRKTDTLDSEWIAEICLKNLISPSRIFCRDHRELRSLTRTRESLMKVRTKIKNRVTHELEAACIKLSSVLSDVFGKSGRHIVDGLLNGMDLEEILETIPSRKIKANKEEIRGTIQANLSSLQIFLVRSHLDMIDAITKQVAEIDAMISDHISSRNEDMRIALSMPGMGFVSASTILAEIGDFRDFSSPDKLAAYCGLVPSVYQSAGKLINGHITKHGSPHIRSMIIEVAHAIIRTRRDTRLKKFFLRIKARRGTKIGVVALARKVLCILYHLLIHQETYHDDLLGKTRTIKHPCAHSVISMNLDEMIKTIIKAGYEVRKNEYMDGG

SEQ ID NO: 272575 - protein, 386 aa, unidentified
MAEATIIGIDLAKRTFQAHGAAADGSVTFRKKLSRDRLLLFLASQRRCIVAMEACATAHGWGREIEKLGHTVRLIPPIYVKPFVKRHKNDAADAEAIAEAASRPTMRFVAVKTEAQQARAMLFRTRDLLVRQRTQMINALRGHLAEHGVVAAQGPAHLKRLADAVADDGSGLSTIVRELGQLFLEQIALLDEKTAALDKRLRIAARDAETTKRLQTMPGVGPITAVAVETFAPALETFRRGRDFAAWLGLVPLQRSTGGNQRLGQISKMGQRDIRRLLITGAMAVVRAAVRSRPPEASWLARMLARKPRMLVAIALANKMARGIWAMLTKQEDFRDRWRQQSDRQSRGRRPGTSGVRGDQRTVRANDRSITGGQIRAWARASSSLF

SEQ ID NO: 272576 - protein, 384 aa, unidentified
MQKPNDLNQSRIVLKQDSTLIAVIEMSLSSWLVAGIVPGVERQPLKKLAVDESALLKLLNRWREEAERAGRRIERITVAFEAGRDGFWLARWLRARGIEAHVIHASSVAVSREHRRAKTDRLDTELLKRAFLGWLRGERDHCKMVAIPTTKDEDAKRPNRERQSLVGEQTRIVNRMKAALIRLGIRGFNPKLKKAAGRLEDLRTPEGEPIPPNTLAELHRDMERRRLVSDQIRQIEKARLERMEQAPGDGPHAMVRLIARVIGVGIETADMLVHEVLSRKLRDRRAVARYAGLTGAPDESGSKRREKGLAKAGNARVRGGMIQLAWRFLLFQKDSALAQWYRTRTEGGRNRKTIIVALARKLLIALWRLVTTGEVPAGVVLRAA

SEQ ID NO: 272577 - protein, 337 aa, unidentified
MIHVGVDLHRRFCYMTALRASGEMVGQQRVENDARSLGPYFRQWGEPVEVAVEACSFWPAFVEAVEPLVARVVLVHPQRVKAIASAKLKNDRVDSATLAHLLRAQLLPEAWKAEAPTRELRQQVRLRVALGQQRARLKNQVHAVLHQQGQRAPVRDLWGRRGQQWLAAVELPPAARQAVNTYGALIGQFDGQIEAQEKVLQDYARQDERVRWLETIPGIGPYAALVVLAEIGSIERFRSKRQLYSYAGLVPRVRESAERRWRGGITRCGSPRLRWILVEAAHSAIRSSPAARAYFERLGRRKHRQVARVALARKLLGAIWALLHHGVCFEEEVFAAV

SEQ ID NO: 272578 - protein, 467 aa, unidentified
MSTTNKCIYVGIDCSKGYADLFSLQSNKDIAEPPFRLYDTAEGHQRFQVLITGWLHQGFVHIYCGVESTGGYENNWVNALQQMGRSQAVYIARLNPKGVKSLGEARLTRTITDSVSAENIALYLMDHPDKVHYLNPSQTSKAYSDGRKHNSFIRMLKKQRNQLGNQLEKLVYEQLSPLLCYCRHGQPTWLLLMLEKYATAASIKKAGISKLSKIKGISAEKAKSVVAKLAELNDQSSDHLGSVIKSTVVQILHLEQSIKKEKSNLFSRFKQTEEAVLLSSITGIGEQSAVEIIVEIEDINRFEAAKKLDAYFGTHPMWKQSGDGTWGNHMSKKGRSEIRGVLYMCGMSAVRHDEMFKAIYARARAKGKNHFSAMGVVMNKMLRIIYGVLKNKTKYNRETDLKNQQNAQSKQRAKEEKQLEINEEKQTKLERYNSGEVKEMPVSKRYAKKKRQSPKLQLEECTGSSAS

SEQ ID NO: 272579 - protein, 392 aa, unidentified
MRISVGIDIAKDIHWVCVLDAEGHVLINRRLDNSPTAISALVDELHALKGEVRIGLDVIGGIAGLATAMLADTGFPLVHVSGLAVNRARQGTAGGEQKSDPRDARVIAEQVRMRPDLRLIDEASEVGVDIRLLVGRRRDLVAAQTQRINRLRDLLVGIFPGLERGFDFATKGFLHLLTKFVTPGELRDAGRKRLLRHMQGAKGVPNLEALVDKALAAAAEQTISVRGERMTARLIRELAAEALAARARIAELDRELEETLARHPDAALVLSLPGMGAVLTAELIAEAGTLSRFRSADALAAAAGVAPVLRQSGKMRFLRRPNGGSRGLKRVFYQSAFCSLGHPDSKAFYERKRREGKHHHQAVIALARRRINVLWAVLQTRQPFQTGFKTAA

SEQ ID NO: 272580 - protein, 443 aa, unidentified
MSKKRSAHLRGARGQAFADRVRGVPPERLLCVSLDISKYFHVAMIHNGLGEIVTPTFEVDIYQNGFDQVCQAIEQAQAGTQAHVVLVGMEPTSHYFENLARQLLKRDQPVTLINSFAVKQNREQQLMRREKTDQIDVAAIGDLLRRGEGTLYKPPTGVYLSLQQLDRVHLSKVKVERMLKNQVIGHLDRIFPGLVLLDDAAKARYTPLFDTDVWHCQTLQDLIRVCPNPHELVRLSPPQLVQAFHAQHCRLGPATAAKIIAQAHKTLLPDPDLAAIRCELLHHDLALLDTLQTHLTALEHRLAELVAQTPYQVWIKLKGLSIVQVASLAAAIGDPANYTEAAQVFRRSGLEIGRNDSGSRQRKGKGNHVLKAGDVYLRRALMSAVTTLILHQPALRRYDQKLQTTKPAPVARVATARKAIGILWAILRDQSSNTLIYCKGAEM

SEQ ID NO: 272581 - protein, 370 aa, unidentified
MAQSSTLYVGMDVHKESIAVAYVAQEFGAAVVSLGTVGTRQCAIDKLIRQLQSKSKQLVFVYEAGPCGYWLYRSLTTKGHGCWVVAPSLLPKKTGDRVKTDRRDAIQLARLMRSGDLTPVYVPAVQDEAIRDLSRAREDTLHDLKTAKFRLKAFLLRHDIRYTGRATWGPAHLRWLSEVVCPTPAQQIVFQEYVRAVTEQTDRLQRLEQELHEQVTAWRLCPVVDALPALRGVQCTVAVTPVADRGDLTRCDTPRHLMHYLGLTPAEYASGARRRQGGLTQTGHSPARRALVEGAWAYRYPAQGRRHRHLRLEKRPKPIQDVRWQAQVRLCTRYRQLRARGKTPPQVVVALARELSALMGAIAQQVPVTA

SEQ ID NO: 272582 - protein, 445 aa, unidentified
MMDPTSKPNQGAAPAAPAPTPAPITLWIGLDWADQKHFLVGRPTEGSAKFTKELSQKPEQIDEFFLQLRQQYPHGRIGLCVEQSRGPILSALMKFDFIVIYPVNPRSLAQFRRAFKVSGAKSDPSDGDLLADLGFLHHDRLRALQPQDALTRQLGLLNEHRRDLVQDRNGWLNRLGSTLKCYYPLALELVGENLDSPLALDFLRRWPNLTALQKAKAPTLRSFFYAHNSRSPELIDARLAALAAAKPLTEDPGLIEPLQRRALAMVRQIAALQKSIAEYDPTIAEVFAQHAKAALFDALPGAGAALAPRLAAAFGTLPDNWKSAQDLLNLSGVAPVTRQSGKQRTVHFRWVRPKFLHQTFVEFAKCSIGQCGWAGLLYQHLLTEGKSPWMAIRIIAFKWIRILWRCWRDHTAYDEARYLRSLQKRGVKLYESLYEKLPAASQPTL

SEQ ID NO: 272583 - protein, 385 aa, unidentified
MVTGITAYKRRSQMNNTTVYVGMDVHKESFTLCAYTLEKEKGSYSRRTPADYKEVLKYLEFLRTVYGNDTIFVCGYEAGCLGYTLYHQLTDRHVDCVILAPTTMLEQRGKKRIKTDKRDAEIIGRCLAQHNYSPVHVPTASDEEVKEFLRMRDDHKLALKKVKQQILAFCLRHNYRFDGNSHWTAAHINWLKSLTPEALYKEILDEYLLTYTTLSDKLERLDKRIEELAAKDEYKEAVRKLCCFIGVKTHTALSVIVEVGDFRRFASAEKFASYIGLVPGEESSGDDQTRLGITKAGNRHVRMLLTEASQCYSRGQIGYKSKALKARQDGNTPQVIAYADKANERLRRRYYKMVLSKCKKHNVAKTAIARELACFMWGMMTDNIA

SEQ ID NO: 272584 - protein, 419 aa, unidentified
MQNGQPCVAGIDVHKKMLAVVVRWEREGQTGYDKRQFGTTQNEIVHLVAWLQHLQVAEVVMESTAQYWRPVWYGLESHFRLHLVHPLKVRAPRGRKRDYRDAQRIADRWRSGDLEESFIPGAEQRQWRWLTRSRVQLKRMIGTIRNHIEGLLEEGGIKLTAVATDPLGVSGWAMLQLLAKGETDVKVLAAEARAGMRKKRAQLEEALAGKLSAGYRFLLKQRLEQVELLRRQIGEVNEELARVMKDHVPVLHRLSQMPGVDLHAAQELLAEVGPGATAFASAGKFASWIGVCPGSQESAGVCYSHRSAKGNRYLRRLLCQIAWAAIHAKESFFAGLFGRLQARIEGKGAAWAVAHRIAKLIWLIMHQGVEYQEKGSAPLHPKVLQRKLGRLLKEFAKAGIDAQAAMGQALASQTQQLQA

SEQ ID NO: 272585 - protein, 390 aa, unidentified
MILVGIDVAKDKHDCCIINSDGEFPEEVFSILNNREGYETLYKRICSLAVDLAKVKVGLESTGHYSSNLLAFLLDKHLTAYVINPLRVNLFRKGQSLRRTKTDKIDSRNIAHLLMTDSSLKPYSLSSYHMEELKSLTRYRASMVRERTKLKTSIARLVTILFPELEQLVSSIHIHSIYAMLEKFPGAAYIAAAHLTRLAALLLKASRGRFGRETAIRIRDTARRSIGAVSPAKSMELQHTIAHLRVYDQEIGEIESEIEKIMDDVNSPITSVPGIGMQMGAVILAEIGSFRRFDSPDKILAYAGMSPSTYQSGKLTGSYSRMEKRGSRYLRYALFNVTRYVCHYDPGFTAYLLKKRKEGKHYYVAISHAVKRLVRVLYAMEISGNRYQTA

SEQ ID NO: 272586 - protein, 427 aa, unidentified
MSYRIAGIDVHKRMIVVVVADVDVAGDYEFERRQYGSTPAQLRLLAAWLVEQGVEEVVMESTAQYWKPVWASLERYWKPICEKWEGTSPMSGSLHLAQAQSNRGARGRKNDFADAERLVRRLVAEELTLSFVPDAEQRLWRTVMRTRYQLRCNQVQLQNRLEALLEEAHLKLSSLVSDLLGLSGRRMLQAMAEGETDPAVVAARADCRLRATQEQLCDALGACRELHPVYRRLLKAALEEWERIEAQIAQLGQEMASLIGPQQEQVQRLAEVPGLGVDSGQQILAEVGASAATFPSDRALASWVGACPGEEQTAGVNRNRRSPKGNRHLRRILNQAAHAAVKLKGSIFALLYRRYVVRFGHNQTIAVIAHRLCRLIWKILHEGVRYDERGPAVSQRAQQRRTARMIRQLRSLGYSVELLHAAAGVPA

SEQ ID NO: 272587 - protein, 452 aa, unidentified
MEENAIPMEIVNPHAAGIDIGSRSHWVAVGQQSQDVREFGVFNVDLFALADWLSGHQIKTVAMESTGTYWQNLYAVLIARGFHVILCNGKFTKNIKGKKTDIKDCQWIQKLHSLGLLSGSFLPDGKTEQLRTYCRHRANLINNTASTSKKMQKYLRLLNLRLDVVVNDICGLTGLTIIRAICAGETHPDKLAALRHGNCRKSKEEIAKALHSNGRKDYLFALQQELDTYDHLQIKIAQCDQKIEEMLNEIIDNDDNKKQHHIDPKSYKRVTKNTPKDIDLNLKSYQMFEGIDLLAIEGVSFNTVLTIMSEVGIEGIKKFPTAKHFASWLRIAPNNKVSGGKVLSSKVPKGSNRLKIALRNAANAIGNLKDSTPLRDFFQRISFRKGRVSAVSATARKLAVIIWNMVVKNTPYVNPEGYLFLDQKRKLGMVKRIQKQLDKFALTKEEFNFSTT

SEQ ID NO: 272588 - protein, 523 aa, unidentified
MSTTRTRKPSRSRPRQVLQKPAGVIHPRVQKVGPEHFGIVSVDCAKARSKWMLCDFYGNVLVPPTVVEHNRTALEAAIAQIRQALQQHALDDFLVAVERTGRYHRPVQRACAAAGFEVRIVHPFATKQFRQPSDPGYKTDDTDLAAIHRAAVNGFALIEAALDETWKTLQLLIRHRRDLVFKNTAVCCQIREHLDAAFPGFAACFDQLWDSATAWHLVGHFAAPQDLAAAGLAGLCRSLDDAGVRYQRRTLRRILEWAAVAAAPDLAAAQYRRIALALNDDRTRKTQEIHALEREIAAYLARTPYVLLLSFPGINVVSAADFAGEMGPISNYANSRAITGRAGLRPCRYQSDQVDKANGPLVHNCNRKLRAAILGIADNLVCCNHHFNVLAHHWKVAGKDPRDIHIRVALRFCRIAYLMVAGRQVFHHPCLPGRHYILDKLTAFHRQHDTPVPDLLRDLQAAIEHLPRPEYQAEALPLHQELEKIQAGRRRGPQLLGDILPIVLARLGVGAVQSTASGEEHPH

SEQ ID NO: 272589 - protein, 366 aa, unidentified
MKKINTMAKRGNQIFKEPKLTIGLDLGDRTSHYCILDEAGNVILEHSLPMTPKGIHQMFSRTPRSRIALETGTHSPWVSRQLTQLGHEVIVAHARNVRLIGESSRKDDQLDARTLARLARIDPGLLGPVRHRSAKAQIHLTVIRARAGLVSTRTALVNAARGLTKSYGERLRKCGTGQMNREIAKGLSQELRDALEPLLQEIESLNERIAEYDRRIEQIAKEAHPEVALLQQVKGVGTLIALTYVLTLDDPHRFRRSRDAGCFLGLRPGRRNSGMSEPQLHISKEGDRYLRTLMVQGAHYILGPFGEDSDLRRWGLQLAERGGRNAKKRAVVAVARKLAVLLHKLWVSGEVYEPLRNNHKMVSAVA

SEQ ID NO: 272590 - protein, 351 aa, unidentified
MMIIGVDYHPSFQTIAFLMEETGECGEQELNHSDGQAEKFYRDLKQRGICVRVGMEATGYSRWFERLLAELGFEVWMGDPAEIKAKRVKKQKFDREDARLLRRLMLENNFPQIWVPSPENRDLRQLLWHRHRLVQMRTRMMNQLQALAMNEGYRWKKKLFSEQGRAQLEKLALAPWASRRRQELLELLDRMNPTIEELTAAVEREAKKRPEVLRLMTHPGVGPLTALAFVLIIGTPARFQRGKQIGTYVGMIPSEDSSAGKQRLGHISKQGNSLLRFLLVEAAQAAARIHPDWRRRYIHLAMRRHKSIAKVAMGRRLAIRLYWMWRNGCGYSQSLEFGSYAGQLGTGHGVK

SEQ ID NO: 272591 - protein, 453 aa, unidentified
MPKTSSSMSQNLTRMSPGAAAIDIGSTMHMAAVNPDCADTPIRSFGTFTHDLHDLAAWFRSCGVTSVAMESTGVYWIPAFEILEQHGFEVILVNARYAKNVPGRKTDVSDAAWLRQLHSYGLLRGSFRPNAQVATLRAYLRQRERLVEYAAAHIQHMQKALMEMNLQLHHVVSDITGVTGMKIIRAIVSGERDPNVLASLRDVRCHSSVETIRASLIGNDRDEHVFALSQSLELYDFYQAKMLECDRKLEASIASMTVDPEAPLPPLPKVRTKTKQTNAPSFDVRAALYGLTRTDLTQIHGLGSSLTLKLIGECGTDLRAWPSAKHFTSWLCLAPGNKISGGKLLSSRTRRSSSRAAALLRLAATTIGRSDTALGAFYRRLAGRIGKQKAVTATARKIAVLFYNALRFGMVYQDPGAAAYDERHRGRVIANLERRARSMGYELAPITAGDCVS

SEQ ID NO: 272592 - protein, 346 aa, unidentified
MLKADTRTVIGGVDTHQDLHAAAVVDDNGTVLGSDSFSTTRAGYRAMLRWFRSYGDVIRVGVESTGSYGAGLTRHLALAGIPVLEVTGPDRSMRRAKGKDDEVDAIAAAQAARTGQRVQVAKDRSGAVEALRVLRTTRKTAIKCRRATLQQLHNTIVASPDELRDQVRNLTRMQLLRTCASWRPDTLGYRDPVVATRIALKSLAHRILDLNDEVADLDRLIDPLVEELGAKLTQLEGVGTHSAGEFIVTAGDNPDRLRSESSFAKLCGACPIPASSGKIQRHRLNRGGNRQANSALHIIVLSRMRIDPRTKKYVERRLKEGRTKREIMRCLKRYVAREIYHVLVAT

SEQ ID NO: 272593 - protein, 404 aa, unidentified
MEVLYERCSGLDVHKRTVVACVRTAAGQQTRTFGTTTEALLALGDWLVAQGVSHVVMESTGVYWQPVYNLLESLDLQVWVVNAQHVKAVPGRKTDIKDAEWLADLLRHGLIRGSAIPDRPRRELRELVRYRVGLVRQRAQVVHRIHKLLEGANIKLASVVTDITGVTGRAILDALANGRTDPLELANLARGSLRTKREQLATTLRGSFGAHQRLVLASQLRHLDFLTAELDRLNTEVAERLRPHEGVIERLDAIPGVGRRVAEQGLAEVGPDVARFPTAAHLASWAGLCPGNHESAGKRLSGRTRKGNGWLRAALVEAAWGAAHTRQSYLAAQYRRLAARRGNKRALIAVAHSLVVIIYHLLREGTIYQDLGPNYYDERHREATVHRSVRRLERLGYRVTIEVA

SEQ ID NO: 272594 - protein, 387 aa, unidentified
MRFGLLGLGAAAAYALTAHGIVLIYRGSGVVNFASGAIAFWGAWIAVQLRLDAGFPWVLAAITATAAAFVFGVESFDTTAAGCQQLIGWLRAHGDVGLVGVEGTGSYGAGLTRDLERAGIAVVEVDRPNRQVRRREGKSDPVDAVIAARAALSGQALGQPKRGDGDVEAIRVLSVARRSAASERIGALSQLRHLCFTADHQVRQRFEHLSVARLTAEAAALRPRPTDDVRYSTLLAIRTLARRVAYLDGELDNLAVVVRPLVERTAPGLLAMHGVGYDVAAKLLVASGDNPQRLRSEAAFAHLCGVAPLEASSGKTRRHRLNRGGDRQANNALYRVVITRMASHPPTKIYVARRRAEGKSTGEIVRILKRYVAREAFKHLRPAAATD

SEQ ID NO: 272595 - protein, 411 aa, unidentified
MDVVHDRAAGIDVSKRDAKVCVRVPEGRPGRFTTTVTTWGSTTNQILELRAYLMRHQVTTVILEATSDYWKPFYYLLEETLPLMLVNAKAARNMPGRKTDVADAVWLAELAAHGLLRASFVPPEPIRELRDLTRARATVVRDRTREIHRLEKFLESTGIKLSSVVTDLTGVSARAMLEALIAGEHDPDVLAELAQGRMRSKKPELVEALVGRFGEHHAFMTRSHLGQIDVFTDRITELDARIEASMAPFRPLRDALTTIPGVSTIVADMIIAETGGDMNVFPTAEQLASWAGVCPGSNQSAGRIKSTHILPGNKYLKAALGTAAIAAARSRNTYLAAQYRRITARRGRPKAIVALEHTILTATWNMLTTGECYTDPGADFYARLAPERTKNRALNQLRTLGYDVTLTPAAA

SEQ ID NO: 272596 - protein, 410 aa, unidentified
MSSVEDRVVIGMDPHKRSVTIEVMAGDETILGGGRFATDRQGFQQMLACAKAWPNRVWAIEGCSGIGHHVAVRLVGFGDEVVDVPPKLSARTRVFATGQGRKTDATDAHSVALVGTRMAGLRPVVDDEQLAVLRILVDRRRSLGDEHTRMVSQLHRLLLELIPGGAKRDLSAAQAKALLAKVRPRDIAGKTRRRVAAELVSDLERIYQRKKAANKELKELVAETGTTLMDLHGLGPSGAARLLVEVGDITRFPDRAHFASWNGTAPIDASSGDQVRHRLSRAGNRQINRVLHIMATVQLRNPTQGRGYYDRRKSDGKTSMEAMRCVKRRLSDIVYRHMVADAITHMVTGPGGQRGTATDSSVAGSHPNTGTSEKPLPGPATSQGTPPATCGPDPELTHLKPPRNWIRCLI

SEQ ID NO: 272597 - protein, 345 aa, unidentified
MSIVGGLDIHREQLTFDYLDTVTGQVLRGQVTPADREQLRGWLGRFAGRAGVAFAVEGCTGWRYVAGELAAAGITAHVGEPADTAAACGRGRHAKTGKTDSRHLRQLLAGGRLPECWIPPRRVLECRALLETYQALRREHTAWVQRIHAVFFRQGAARLGEGALRAAQGLAAVRAASAAHLSPAGQLQVATALDMLACLEDRLGVLRHQLLAAARQLAGAKVLAARLYGVGPVTALALTCWPGGEDRFSSARKAVRFAGLDITVYSSGGKRSPGQLSRQGPPVLRWAAYEAGKVRARAAAPGHGCCAAVAGRKNTRRAALSGARKIIRQACRILAGLGGDALTAA

SEQ ID NO: 272598 - protein, 400 aa, unidentified
MRVVFGIDVSKVSSEVAILVNGEKVHNYTMSNDAIGFSRLLGDLRTVHKPEIIFEATGVYSRRLQAFLDEHGYAYTRLNPLEAKKQLDSLRVRKTDQIDAEKLAQSQFVLNRKPTYVQEEVYQELRDLSRFYQNLTEDIVRAKNRLHKVLQVTFPELETILSTPTGEQYGNLVVAFPCKDFVLDLSKDELSESIRQSTSKRISDKRVAYLAEKLIALANQSYCAVKKTSPMLEEVRYYAQELLRLSERRKAVLDQMVELAQPLPEYDILLSIPGIAETTATSIIGELGDIRRFQSANQINAFIGIDLRHYESGNFLAKEHITKRGNPYARKILFKCIHNIASASHTNPCHIADFYEKRKRQSQTTSTKPHTIASIHRLIRTMYYLIMHNKLYDYASTQNR

SEQ ID NO: 272599 - protein, 322 aa, unidentified
MHPFYLGIDVAKAKLDCALRLPEGKIRHKVVDNTPAGFAALRSWLAKQGANSVHVCMEATGIYWEAVAEFLAGVEMITVSVINPAQIKAFGASQLVRTKTDKADAKLIAQFCCERRPAAWQAPTPAEQALRALVLRLDALQTMRTQESNRLEVARAAVQAGITRHLEWLDQEIARLIKAIHDHIDADPTLHDKQRLLDSVPGLGERTIAVLLAFYGHLARFANARQAVAFAGLDPRQHESGSSVKAKPRMSKVGHAFLRKALYMPAVVTLYKTDWGKLFRERLAAAGKPPMLIIGAMMRKLLHVAYGVLKSGKSFDPAKHGA

SEQ ID NO: 272600 - protein, 366 aa, unidentified
MKKTSTFRVNGNVIFKGQKLTIGLDLGDRWSNYCVLDEAGEILLEQKLATTPEAMKQTFEKIPRSLIAMETGTHSPWVSRLLKELGHEVLVAHAQKVNLITKSTRKDDRHDARTLARLARIDPELLGPIRHRSAKAQIHLTVIRARAELVSARTALVNAARGLVKSYGERLPKCGTDQVSRELAAELSAALREVLEPLLKEIESLTERIKEYDTRMEKIARESYPQVALLKQVKGVGTQIALTYVLTLDDPQRFAKSREVGCFLGLKPGRRDSGQSQPQMHISKEGDRYLRTMLVQGAHYILGPFGEDSDLRRWGLRLAERGGKNAKKRAVVAVARKLAVLLHRLWVSGEVYEPLRNSRKAMRAAA

SEQ ID NO: 272601 - protein, 315 aa, unidentified
MANLKKSKSIINVGVDVGKYELDVCIHEKQIHWQDENSEAGIKRILKRLAHYQVERLVMEATGRYEFELAQAAHKKMLPVCIVKPLRVRRFAGAIEKTAKTDKLDAKLIAEFAFKVKPKITPEKSKNLLAIKDLISRRRQLMTMRTQEINRTQIMAKTIETSCRRIARYLDQEIKRIEIRLSKHIEDQAEWTDKQEILKSAPGVGNTLVYTLLADLPELGHLNRKEISALVGVAPINRDSGKMKGKRRIQGGRHSVRTILYMATLSATRCNPIIKAFYQQLVAQGKHKKVAITACMRKFITMLNAMVRDKCVWAY

SEQ ID NO: 272602 - protein, 344 aa, unidentified
MDNHTQYSGFAGVDLAKKVMQIHFVSGDGEITDKQVKRAEFLDFFRNRSKCLIGMEACGASQDWARKLEAMGHEVHLMSPKAVKPFVSGQKNDYNDAIGIYKAIFNGVRRVPVKSTEIRDLQTLRRIRSQVTKDRVKEINHVRGLLAEYGIVMGKSITAFNKGISSALESLKERGDVSPLVAEELRTTVEAIKAKIERQKKLDQEIEQLARGCKNYENFLKTPGVGPFAAAMLCVLLCDPAIFANGRQFAAYIGLAPRSRGSGGKNFIIGIPSKFNCDSESRAVLVECAQAIARCKNKSLWVEEILRRKPKKVALIAIANKLARQVWAMANKGESFKQMVVLTA

SEQ ID NO: 272603 - protein, 352 aa, unidentified
MRIIGCDLHARQQTLALLDTTTGEVVKTTLKHEGNIVREFYGNLPRPARVGIEATGSMQWFVNLMEELGIECRVGHPATIRAAEPRKQKHDRRDADLLLSLLIEERFPAIWLPTKELLDLRALLRHRHQWVGLRVKIQNALQAMALAHGLRRGSSLWTQAGQHAIASLPLSPHAAYRRNELQRMYVQFETEIEKLNQRVEQQARERSGTRLLMTHPGVGPITALATEVFLGDPARFANSKELASYVGMIPGEYSSGKRQRLGGLTKQGNPLLRFLWSEAAIHAVRRDPELKQFYRRKLIQKGLGKARAAVARKLGIRMWIMLRDRIEYHEFCRRGPMQQKSGDACAGMPAAR

SEQ ID NO: 272604 - protein, 429 aa, unidentified
MKIIYPRVCGIDVHKKFIVAVICISESVEPVYLKKRFSTFHNDLIRFRDWLIQNDCQNVCMESTGKYYIPVYNILESHISNIVVANPKWVRAVKGEKDDDKDAKWIADLFKLGIVKSSFIPQKDFRILRELTRYKYKLVNMRSSEKNRYQNALTSGNCKLDMVFTDVFGKSASNIIDLILSDNPYTEEDILSKVHKNCKASPDMILNSINGTDLTPVQKSRIELVNNHIKQLSSNIQRLDKLIDLMIEPYEDYISFLCQIPGVSRNSAITILSEIGVDMNQFTSTRRLTSWAGLTPSSNQSAGKKKSVRISRAGVYLKPCLVEVAHATVKDTNHPYYANKFNKISKRRGKKRAYIAIVRKILVAAYHMLLTGEIWNPADLAEVETPVEQRIKYVKNNLKSDIKQLLDIGLTVEELTLMIQQNANNIATQ

SEQ ID NO: 272605 - protein, 345 aa, unidentified
MNKVVAGMDLHSNNVMIGVMDMNGKRLASRKVPCELGEVVKFLAPYKKRLERVAVESTYNWYWLVDGLQFLKYPVVLANPAGMAQYSGIKHADDTNDAFFLAELLRLNILPTGYIYDANLRPVRDLFRRRLMLVHQRTALMLSFKSLYTRTTGQEMSLSELKALEIKEAQELYDHPANQLIAGVQIDHVDQLNESVDKIEKAVLASARELPCYAKLTTLPGVGKILGMTITMEVGEINRFAEAGNFASYCRAVQAQRLSNSKKKGENNSKCGNKYLAWAFVEAANFARRYDEPCRKWYDRKAAKTGTIIATKALACKLAKAAWFVMAEGTDYDPKRMFGPAATQK

SEQ ID NO: 272606 - protein, 391 aa, unidentified
MERPMPQPNDLSRSLVTLEQDSTLIAVIEMGQSSWLVAGIVPGIERQPLKKLAADQDGLLQLLHRWRKEAAQAGHPIKRIAVAYEAGRDGFWLARWLRAREIEAYVIHPSSVPVSREHRRAKTDRLDTELLKRAFLGWLRGEPKHCSMAAIPTVEDEDARRPSRERESLVGECTRIVNRVKANLARLGIRGFRPRLAHAPKRLETLRTPEGTAVPANTLAELQRDMAHLRFVKQQIKEIETARAKRLEQASEGGRDAMVRLLARVVGIGIETADMLVQEVFSRKLRDRKAVARYAGLTGAPDESGQKRRERGLAKAGNARVRHAMIELAWGHLLHQKDSALAEWYQKRTVDARGGTRKTMIVALARKLLIALWRLVTTGEAPAGLLLRPAA

SEQ ID NO: 272607 - protein, 357 aa, unidentified
MPLGHETAGELGSPRPFPNKPEQLLGAPEVSGSPYLQGRATQEVIMSDICIGIDVSKDRLDVATWPEIRHLSIANDEAGIKELVKTLLPIRASRIVLEATGGYEMPAVAAMADASLPVVVANPRQTRDFARSTGLLAKTDRIDAVALARFAEAIKPEIRAMPDTLAQELSNIVVRRRQVVTMLTAEKNRRQMPTSSNMQKEIDMHIEWLEQALQRLNDELKTMIRNSPAWREKDDLLQTVKGIGPNTSALLISELPELGRLDRREIAMMAGLAPVNRDSGRFRGERHIFGGRAAVRSALYMATLTAIKRNPVIKAFYHRLRADGKKFKVAITACMRKLLVRLNAMLRDGMPWTENIA

SEQ ID NO: 272608 - protein, 343 aa, unidentified
MQTITTIGLDIAKSVFQVHGVDAGGQAVIRRQLKRRYVLTFFQKLTPCLVGIEACASAHHWSRELQALGHTVRLMPPAYVKPYVKRQKNDATDAEAICEAVTRANMRFVPTKTPEQQSGLVLHRARHLFIRQQTSVINAIRAHLAEFGIVAPVGRHGVEELLTVVADPNDRRVPEIARACLSALGAQLRRMKEQILEFDRLIRAWHRSNEMSMRLEEAPGVGPVLATALVATVADPKSFRSGRNFSAWIGLVPKQHSSGGKNRLGNISKQGDRYLRGLFVAGALSVIRYAKIHGTKHRPWLTALLARRPTKVAAIALANKIARMVWAMMARGERYKEPVALAR

SEQ ID NO: 272609 - protein, 343 aa, unidentified
MGAQITGGVDTHLDVYVAAALDDHGGVLGTASFAATRDGYVALARWLGSFGDVALVGVEGTGSYGAGLTRQLQREGMPVVEVDRPNRQRRRRVGKADTHDAVSAARAAFAGDALGVPKDRDGDVEAIRVLRLARSSAARDRTKALNQMRSIVSTAPEELRDQLRGLTIPKLVRAAAGFRPAGRTGVTNACRVALRTLARRIKELDDEIRTLDELLAPLVAQTAPEMIQRVGVGTDTAGALLVAAGENSSRIRNERSFARLCGAAPLDASSGKQQRHRLSRAGDRQANSALWRIVITRLSYDPATRQYLERRCAEGKTKTEAIRCLKRYVARELYAYLPHQTLD

SEQ ID NO: 272610 - protein, 406 aa, unidentified
MYYVGIDVAKEKHYVCVLDENKEIACKPFWIYSDCLGLNELVKRLYDLSLTCDDFILAVESTGAFSENIYEYLTDLDFKVMLLNSYQTAKYRDFITMKKVKNDSIDAYVIAELIATGKYKESHISSNTYHTLKVLNRLKKSLDDKIKTIKREISTVMAIVNPEINNILPNIFTKTAIAIIKEYPTAIDLQSTTPKKLCKVFRNIKGNNFNEDKAKALIALAKDSIYLGRAKDARSLMITTNINILELIVQEKTLLEHEIKILIDDNQDDNFSNGIENLKTIPGVADKTISAILGECGDLTRFDSAKSFIGYLGLYPTQYQSGNSLSVGRLAQRGIPIAKHALYMSAVASVLHNEQLRKIFRDKVSSGKSKKEALIIIAKKIATMIYSMFKYNKPYDPKRVLVSYRK

SEQ ID NO: 272611 - protein, 377 aa, unidentified
METARPDEYTRNPVMFMALELSAKKWKVGTTVGIGQKLRKESVEAADLRGLLEEVEKAKARFGLPADARVVSCYEAGRDGFWLHRWLTKQGIENVVIDPASVHVDRRKKKAKTDRLDLGKLVRTLIRWSDGEPKVWSVVQVPSVKDEDDRQLHRELQSLKKEQTRHVNRIKGLLVSQGVKLAIRKNFVEMLKRCRLWDGSSLSEHPVGRLEREYQRLEMVRRQILQLEAKRREALKASTYKKVEKVRQMKRLRGIGIESSWLFVMEFFGWRAFENRRQVGSLAGLTPTPHESGAMSRELGIDKAGNPRVRAMAIEIAWSWLRFQPQSELSLWFEHRFGSGGKRARKIGIVALARRLLVALWRFVDQGVVPAGAVLSA

SEQ ID NO: 272612 - protein, 310 aa, unidentified
MDACFVGIDVSKERLDVHVLPDGAAFHVTRNGAGIEELAARLQGLAPSHVAIEATGGFETIVAAGLAGAGLPVVVVNPAQVRHFARALGERAKTDPVDAAVIARFAAATRPPIRPLADEATQLLADLVARRRQIVEMIAAERQRQKRAMLKSVRTSLARLIAALEKELATLDADIDDGIKGSPAWRKAEDLLTTVPGVGPITARTLIADMPELGSLDRRQVSALAGLAPYTRQSGQWRGRSFISGGRATVRTALFLAAQVAKRHNPPLKLFYERLIAAGKPRMVATIAVARKLLIILNAIIKTKTPWQHA

SEQ ID NO: 272613 - protein, 316 aa, unidentified
MNITQCNEVNIGLDTSQSQLDIYVRPVGDYFSVANTEEGAKEAVQRIILYKPDRVLIEATGRLELEFICAAHKAGLPVVVCNPGQVRQFAKSTGRVAKTDKLDAQDIAHFGEAVKPKETPLKPEKLRQISDLITVRSQCLEMSTMQKNRLKRMPYSVHKPIQRILKSIQKEVTHIEQQLDKLIDEVPEWRKKRDLLLSAKGVGKVLAYTLMSELPELGKLNRREIAALVGVAPMNRDSGRYQGKRFIRGGRHKVRTVLFVSMLSAIQCHPKLKPMYKRMVAAGKPKKLALIACMRKQLVILNTMMKNGTHWDETMA

SEQ ID NO: 272614 - protein, 318 aa, unidentified
MNSHCKKEMADPSVNFVGLDVSKARLDSFVPGGKPRAWDNTATGHASFIKHLGILQNPRVVCEASGGHERAVVAALQAAGTGVCVVPPGRVRHYALAEGLFAKTDRIDAELLARYGAGIRPPLELPADPAVVRLREMLDFRRILSDRIVAATSQFQLAQGYLREGLQSQLDHLKASLRQVNKDIAAHLKSNPVLNAKAKRLRQLCGVGPVLASTLLAYLPELGLLGDKTIASLVGVAPHPADSGKHRGKRRIRGGRAVVREVLYMAAVTASTHNPILAAVYQRLTGKGKLAKVAIVAVMRKMLSVLNRMIADPQFSLA

SEQ ID NO: 272615 - protein, 348 aa, unidentified
MALTIVEDTRAVTGGVDTHADMHVAAALDPVGGLLGVGEFPATAAGYARLLGWLGGFGTVCLAGIEGTGSYGAGLARHVTAAGIRVVEVDRSDRQDRRRQGKSDPLDAVSAARAAQSGRARGAPKSRDGAVEAIRALMVAKRSARSERTQTISQARALIVTGPDDLRARFARHTAAGLVSELAALRPRPGATVGYATRIALRELGRRAEFLDGQLGRLDELIVPLVTARAPALLALHGVGPDTAALLLIAAGDHPHRLRSEAAWAHLCAVAPIPASSGKRTRHRLNPGGNREASHALWRIVITRMSSHAPTRAYVERRTKEGLSKKEIIRCLKRYAARQVYRHLRPAG

SEQ ID NO: 272616 - protein, 426 aa, unidentified
MKKTDLLSTLFVGIDVSSRENVVCAIDYEAQKLLRFSVQNNHPGAVEMARKLHALLAGNRDINKLIVALESTSFYGIHIANYLSSCEILMPFHTHVYCLNPKMIANYKKSYIDLGKNDAVDAFVLADFARVGRINTAPWRGSQFLALQRLTRHRLHIAGSLTREKTYMLSNIFLKFSELSILDNDKQPFSDYYGATASSVLTDFLSIEDIANMPLEALVDHICKKGKNRFANPAHTASLLQQAARNSYRLDMCLYEPLTISIASSFNLITAYESEMKAINKAIEKTLKGLDPNAYQSLLSIPGIGPVYAAGIIAEIGSIGAFNSHDALAKYAGLVWRENQSGNFRADDTSLSKAGNSYLRYYLIEAANHVKNHVPEYAAFYSKKYDEVKTHQHKRALALTARKFIRLIFGLLANHQLYSQSRVSQI

SEQ ID NO: 272617 - protein, 405 aa, unidentified
MNAVGIDVSKGWSMVAVMRPLGEVVASPFEVTHTVSELGELVRFLKSLIGETKIVMECTGNYHLPIANALSNAGLFVSAVNPQLIHDYGDNAIRKRRNASIKIANYALSYWLELPQYVPDEEIRQSLKAFSRQYNKYNKVKTMLANNLISLLDQTFPGLKDLFASPARERDGHEKWLDFAARFWHAECVADLSLQAFTETYRKWCKRSGYYSVGAAEIHAASRQCTPVMPKNEATKSLITLAVAQVNAVAESLSAVAREMNRLAAMLPEYPVVLQFRGVGKILGPQLIAEIGDVRRFKKKSSLVCFAGLEPTDNQSGKFKGDETISKKGPPHLRKALFQVMDCLLKHSPADDPVYQLLDRKRAEKKHYYSYMNAGAAKFLRIYYARVNEYLNSLTYLTLTARLHF

SEQ ID NO: 272618 - protein, 387 aa, unidentified
MPQANDLSRCLLTLEQDSTLIAVVELSQASWLVAGIVPAVERQPLKKIEADEAALLRLLGRWTDEATRAGRAITRVCVAFEAGRDGFWLARWLRARGIEAHVIHPSSVAVPREHRRAKTDRLDTELLKRAFLGWLRGERGHCTTAAIPTAEEEDAKRPNREHESLVGERTRIVNRMKGALARLGVRGFKPTLRKACERLGTLRTAEGAPLPPNTLAELRRDMARLRLVREQIAEVEAARLQRLEEEPGSRPHAMVRLLARVVGVGLETADMLVREVLSRELRDRKALARYAGLTGSPDESGARRREKGLARVGNARVRRGMLQLAWRFLRFQADSRLARWYRARTADARGGTRKTMIVALARKLLIALWRLVTTGEAPEGVALRPAA

SEQ ID NO: 272619 - protein, 411 aa, unidentified
MEWVACVGIDWADQKHDYALRGREGERRCGTFSSSPEDVHGWVEGLRVQYPVGTIVVAMEQSRGSLLYALSIYDFLVLVPINPRAASSYRDSLHLSGAKDDPVDAGLICDFAATHLEKLRVWRADDAATRKLRLLVEYRRTLVEQRTSFKQALIAILKQYFPQALTWFGNNSALLGAFVAVWPTLERAQQARADRIRTVIRSCSRMSAERVASTLAAIRVARPLTTDAAIIAALALRVESTVAIVRQLDEQIERHDRAIDDAWAAHADRELFASFPGAGPILAPRLAAAFGSDRSRFTAADEMQNYSGTSPVTVRSGKRCSVHARWQRPTFLHQTFHEFAEASIPHCSWARAFYQHQRERGAGHRMAIRALAFRWIRVLYACWKENTPYVDARYLDALKRRGSPVAARLAA

SEQ ID NO: 272620 - protein, 310 aa, unidentified
MNDIFVGIDVAQDHCDLYVYPLAQKITFGICDMEDVISRLQDFQPAMIVMEATGGLEIPVAAELVAADLPVTVVNPRQVRDFARALGILAKTDAIDARVLALFGEKVRPTSRPLPDARMRALRELVTRRQQLVEMRTMESNRRRMLRSERASTSIQFMLDTIENEIHKLDLEIKKHITKSPIWQKKADLLKSVPGIGNTTAPLLVVMLPELGKLNRRQIASLVGLAPMNRDSGTLRGHRTIIGGRRMVRTALYMPTICAIRFNPIIRRFYERLRTAGKPPKVAITACMRKLLIILNAIVRKNVPWVPYIA

SEQ ID NO: 272621 - protein, 474 aa, unidentified
MLKPTQQPAAAGKPEPKVARSKRASQRKEVEHAMFQPNAAGIDIGAREIYVAVPADRDDHPVRKCETFTSDLHQMAEWLVCCGITTAAMESTGVYWIPVYDVLEEHGIQPCLVNPRNMKNVPGKRTDFHECQWIQHLHSMGLLHSAFRPDGEVCAVRSLMRHRNDLVEMASQHVQHMQKSLTQMNVQFQHVISDITGTTGLAVLDAMVAGERDPGKLARLRDPRIKASEETIRKSLEGNWRAEHMLALKQRLVLYRSYRDQINDCDKEIEKLVASFEPKVDPEQKPLPEDRKQKQRRRQKKTGNPDFDMRTEAYKLFGVDLTQVPGLMTLVFMLFSEIGRDMSRWPTAAHFVSWLGLCPDNDISGGKVLWRGARRTKSRAGTLFRLAAHSLHRNQTPMGDYLRRMKAKLGPAAATTATAHKIAIIFYTMVNKQVEYDVSLWAQRDAMREKRLEARLHKQAAQRGYKLVPLEPVA

SEQ ID NO: 272622 - protein, 328 aa, unidentified
MQSGVPTKVFTMPEGPMTDKTIVGIDVSKNWLDVASAGAAGVVRIDNTPAAIAAWLAQARPALVAFEPTGGYERTLCAALRERAILFVRVHPNDVVAFRKSRGLKAKTDSIDAGLIAAFAAEELVRRGLRPTILGDEVLRELAARRRQLADTLQAERCRAALATTSEVRASLHIVIEALAASLATIDQALATRIAADPQTAALDGLLRSIQGIGPITARTLIADLPELGHLNGKEIAALAGLAPITRQSGKTRYRERTAHGRIGVRNALFNAARSAIRHPSPFKHFYDRLVTQNQRPGKVALAAVMRKILVTANAVARDKQPWKHHTA

SEQ ID NO: 272623 - protein, 371 aa, unidentified
MKQQTKSSNITVGLDLGDRRHRFCALDERGEVVEQDSICNDRVSLRKLAGRYHGALGVMEAGAHSPWISRFLEALGWRVVVSNPRKVRAIYQHERKSDQRDALMLARIGRMDLALLYPVRHGTAEAQQDLLRIKLRDSLVRARVAVINSVRFTLKSLGYTVRNPSSERFHKVVMEEVPESVREMITPSVQALAELTARIKMLEREINTLAQMKYPQSAQLQQIPGVGPITALYFVLKIEDPNRFAHVRDVGAYAGLCPRRDQSGESDPQLRISKRGDAYLRRLLVSAAHYILGPFGPQSALRAYGLMLAADGTARAKKRATVAVARKLAVLLLSLWKSQQPYQPFPGACLNGKQEDRRSGTIALHRMEATD

SEQ ID NO: 272624 - protein, 351 aa, unidentified
MAIVGGFDIHRRQVTFDYLDTVTGQVRRGRIEPACRLVLREWLQERFAGRDDVTFAVEGCTGWQFVVEELQRSGIAALLAEPAQTADLRGSKKRAKTDKTDARHLRTLVADGRVPASWIPPAQVLELRALLQLYRDLREEHTAWTQRIHATLFHQGVPGLAGRLSDPQARARLAAAPAGMGLSAAGAQAVQVALRRMEDLEAELAPVHAQITAFARRQPGCKTLQHELFGVGPLVAAIVWAFLGDTRRFSSSAQAVRHTGLDVTVHSSDGKGPPGSLSHQGPPILRWALFEAGHQGSRASSPDHRYYADVAARIDANRAALSVARKLARRSHHILRRLGDQAYAPVPAIGR

SEQ ID NO: 272625 - protein, 314 aa, unidentified
MVIIGIDPHPASLTLAVMEQTGEVLLTRTIANDGEAVPYTLELARGFPERRWAIEGAGNAYVTELVRALTTLNEHVTDVPPGLTSQYRSKRGRKKTDQVDAGIIAKAALANPALPRYTRDEANEHLKRLTRTRQRLAKHLQSERAALRALPLGSPLRQVVEGVVASLQRAIDDVTGRIEQQVQEIDPRILREHGVGPVVSGVVLAETGNVQRFRNADAFAAHCGAAPVERSSGQIKRVQLNTGGNRRLNHALHIAALARLRSHPESQAYVARKIAEGKTQRAAIRQLKALIARRLYRVLNEPNPPTPRLEPLAT

SEQ ID NO: 272626 - protein, 338 aa, unidentified
MKLYGAIDLHSTNNVTVLIDEQDEVVYQKRLPNDLPLIVEQLSPYASSIQGIVVESTYNWYWLVDGLMEKEHVVHLANTAAIQQYQGLKYTDDHSDARWLAHMLRLGVLPVGYVYPKEQRAVRDLLRKRGQLVRQRTANLLSIQNLITRSTGSSINGNRIKRLSAEEVEGILTDADVALAAKANLSVMRSVDAEIATLEKAVKERVKLKAAFRYLLTVNGIGEILALTIMLETGDIRRFSTVGNFASYCRCVGSQKISNGKKKGQGNTKNGNKYLSWAFVEAANFAVRFNPRIRRFYQRKKAKTNGIVAIKAVAHKLARACYHIMRDEVPFDIARAFA

SEQ ID NO: 272627 - protein, 413 aa, unidentified
MIVGIDVGNEKHYFRAFNWRGIELTRKPVAFSNSMEGFNSFYNTIVELMQKSELEEALVGIEPTGHYWFDLGQFMGEKDIKFVMVNPHHVHKTKESDDSSPSKNDRKDPRVIAELVRDGRYFYSYMPIGIYAELRNASNRRFVLAKEQTRAKNRLQKWIAVYFPEYKEIYTHIDAKGGLLVLKQAPTPEEIVRLGVEGIIKIWKDAKLRGNGHKKAMLILNAAMKSIGLKAGLTEARMEIQDLIEDYELQTKRLERVNDLIKELCQQISYADKLLEIKGIGITTVADFIAEVGDITRFGSTKGLQKLAGLELVADSSGKHNGKTKISKRGRKRLRYLLFEAAISVVGKNEGFKEIHRYYTTREKNPLKKMQSLIAVACKLIRVFHVILTKGISYDASKILKDIRHPGEQLKAT

SEQ ID NO: 272628 - protein, 363 aa, unidentified
MYDSTTTVTVGLDVHARSIRLAAVRAEELLEERTLPYDEEAVERALRRWPVVRCCYEAGPTGFGLHRFLVERGIDCQVVAPGLVPQRPGDKVKTDSRDARKLARLLAGGLLEPIHVPAPTLEAARDLVRAREDARLDRMRDRHRLSKFCLRHGRRLPGLSWGVVRRKWLSEQRFEFAAQQQTFDTYLHAVDLVDARIEQLERAIRETADEQPWSGLVARLRCLRGVETLTALALVAEIGDFGRFKTAEEFMAFVGLVPSERSSGEQRRRGSITKVGNAHVRRLLVESAWHARRRPSVGYRLARRQRGQDAVVIERAWRCQGRLHARWQRMAGRGKPQQKIVVACARELAGFVWAIANDQPLRS

SEQ ID NO: 272629 - protein, 392 aa, unidentified
MYIVGIDIGKNHHEASIVSPEGKQIGHSLRFATTHKGADSLMSFIFNNIGNSSCIFGMEATGHYWYPIYSFLKARGYTIYVINPIQSDSLRKMYIRQTKNDSIDSFLIAEVIRFGQFTTTSMADENILAMRQLCRYRDSVISSRTEIKLRISTIMEQIFPEYEKQFSSLWLSTSMGILEKYLTPENIENAPIDELFEIIKDKSHNKLTMKKAISIREAAADTFGIKIAQDAFSFQLKQLIDRMNFLDKQIEALDCQILEYYEKFDCYLHTIPGIGMIAAATILAEIGDINRFNSSSALVAFAGIDPTVRQSGEFSSTHNHMSKRGSPYLRHAIFLAATTCSFHNSPLNAYYKKKREQGKHHLTATGAVARKLTTVIYAVLRDAKPYEPKSFC

SEQ ID NO: 272630 - protein, 408 aa, unidentified
MNLTLFVGIDVSKSSNHVYAMNLNRDKLLSTNIPNTQDGATIIESKLCDLLMKHSLSKIIVVLESTGVYSAHLATHLSNSKFLSIYDSKVFIINPKISKNYRRSFSDMDKTDPKDAFVLADIARVGRTDGLTPFKGAQRLALERLTRHRLHIAELLSTEKTYALNNVFLKFSEFESLFADNFGKTAVDLLLEYHTTDDIIQSSLEDLTAFIIKSSKNRFSDSQAIANKIKAAARASYRLDKLAYDPINFSLASSINVINCYEAEIKEIDKAIIRQVAGFNQNHYDVLLSIPGIGKVYAAGILAEIADINQFESDDALAKYAGITWRKTQSGKFEADDTQMTKTGNKYLRYFIIQAANTARQFIPEYRDYYQKKFDEVTTHQHKRALALTARKLIRLIYGLLSTNRLFQ

SEQ ID NO: 272631 - protein, 467 aa, unidentified
MRLRLGIDVACKAAHQVTCADETGKFLFTGRKFRTTVDDLEKLWASLPTADEVLVVLEPTRNAWVPLAAWLRARGAKVVLVPPEQSADLRDYYHKHTKNDRLDSRVLARLPLLHPEGLRVLGDDELGPADPLRRATRRRRSLVKRRTATYARIDALLELLGPWWADALNTGEYSKSALTVLERTGGDPHALKRLGRKRLTALLVRASRGAWRDQHADRILHAAEQSLHLWTAGGLDFTELAADLSGEARLALQLSTEIDGLDDRIGVLYDEADPAGLLTSAPGLGVTSAATILAGLGDPDRFTTLAGVRSFTGLVPKLDESGTSSRHGPPTKAGDPALREALFNAADRARKTDPTLAARYQRLIQAGKHHNSALCTLAAVLVTRLAACWRNRTPYQLHDVDGQPITAAEGRTICATRYQVTDADRAKNRSQRAAQRQKQGTGRRRKESRNAPAASLSTNHTNHPTAA

SEQ ID NO: 272632 - protein, 394 aa, unidentified
MFFIGIDIAKRSPQAAVTDISGNVIVKPFNFKNSSDGFSKFLSVVESNAIEKNDCTIGLESTGHYWYPLYFFLTENGFDVKVFNPIQTAAFREITIRKVKNDNLDSLLIADFTRFGRYSETYIPDENMLALKNLTRFRLSISDICGSLKKKVIAILDQVFPEYTGVFSDVFGKTSKQLLEQFSTPDEFMDISTTKLTNLLLKVSRGRNGREKAELIKTAAQSSIGISYALDAFSFELKQLLAQIEFMENQLSDVDAEMEKLLSQSEYAVITTISGIGPMLGSVIVSEIGDINRFENSSKLVAYAGLDASVKQSGEFNSSKNKISKRGSPYLRRALWMAAFMSLQCDSALYDYYSKLRARGKTHRCATTAVARKLCIIVWAIMKSKKPYSPVLKK

SEQ ID NO: 272633 - protein, 361 aa, unidentified
MKYVALDCHKQYDHATMIDTETGEIKNKKMAHIKEEFREFIGDKAGTRMVIESCRDWSRSYELSEDLVEDIILAHPLKVKAIASAKIKTDKIDSQILARLLMADLIPQAHLRKGDNRIKQRVIRHRAFWIVIRTRVKCRIHDLVDNQLWLPEILKAKPRSLFSKKGMTWLTSLEWTREEDKEMVESCLRVMENINREISVSNKMVEEIYKEDRDAQLLTTIPGIGVTLAMLISTEIDGIERFPSASKLCSYAGLVPSTHSSGGRTYHGKITSEGNHWLRWALLEAVVPASYGDVEIRQRLNDFRKRKPANVAKIAVARWLLKVVYHVLKEKRCYAAAYNRLEREEPPFISSSEFTTCGLRS

SEQ ID NO: 272634 - protein, 433 aa, unidentified
MKIIHPICCGVDVHKKFLVATIAVTAKSGVTRYITETFSTLNPDLFRFLTWLTDNNCLHVCMESTGKYWIPVFNILEAAGIHVLLTHPMYVRAIKGKKTDKKDSKWIADLFKHDLVRSSFIPTPQIRALRELARYRYKLVCMRSSERNRFQDCMTVSNIGLASVLSDPFGKTATDIMNHVLSSDVFDEQLCQKLIYKSAKKKTDLILQSIRDCKIESDQRFKMTEVNVHMEYLDHSILRTEAELYTRIQPFMSIVDHLSTQLPGISKLSAAMIIAEIGADMSVFESANHLVSWAGLAPTNNQSAGKKKSVRISKAGQFLKPLLVQCALAAAKSKKQPYFAIKYQRIKKRRGHKKAIIAIARMMMVCIHRLISKGEDFCPSDYQAVVLPSQPRKQVLNDKTVFAYLAAQGYDVSSLVKLNPDAPLSVSEHQVPA

SEQ ID NO: 272635 - protein, 359 aa, unidentified
MMSIAHVGMDVHKQQTRVVLLPEHMADPLDECTLPTTPAALCGYLHRWAQRFQLRCYYEAGPLGYQPYRWLSGLGVECQVIAPSKTPRACGDRVKTDRRDARVLARQGRAGALVRVHVPSAQQERGRGLVRYREGRLRDVLAGKHRLLKFLGTRGLFFSEGRHWTQRHFCWLGSLRFEDLDDWTAQQYLADLQYRLDRLAEADREVAALAEREAYREAVGRLCCFRGLDVLSAMVVVSETIDFTRFPSASQYMSYWGLTCREESSGSSRRQGGITKCGSGRARRVWVEAAWHYRHKPAVRGRLRKRQQGQPLAIIAHAWKAQQRLHKKFWRIALRKDSRTAAVAVARELAGFVWGAMTM

SEQ ID NO: 272636 - protein, 426 aa, unidentified
MADYEYRIYVGIDWPTEAHQACVLDCTGCVLAERSFAHTGEAVAGFAQWLQGVAGGEPGQAAIAIEVPRGAVVETLVEHGFHLYAINPKQLDRFRDRHSVAGAKDDRRDAFVLSDSLRTDRARFRRIRLDDPLVIQLRELSRVDEDLGREVNRLTNRLREQLHRFYVQALKLCPSADEPWLWALLELAPSPSAGSRLQPKTIERLLRQHRIRRLKAQDVVAALRAPALRVAPGVVEAATEHIALLLPRLRLVHTQRQRCGARLDALLDKLAAVEGDDGQQREHRDVEILRSLPGVGRIVAATVLAEASGPLAERDYHALRTHAGIAPVTKQSGKRRTVVMRYACNGRLRYALYHWARVAATWDPASQTYYAALRQRGHSYARALRSVADRLLRILVAMLKSDSLFDSTHPRRSPHPAAAPEAPCAA

SEQ ID NO: 272637 - protein, 406 aa, unidentified
MKQNNTSGQSPQQTPKQSSQQNTKQTSLQTPKQSPRQSAKQASKQASKQTPKQSKEICEGPITIGIDLGDKTSRYCLLNNRGEVVKEASVGMSKKGLAQAFGTMKRCRIVIEVGTHSPWVSRLLESLGHEVFVANPRQLKLISQSSRKDDRVDAIMLARLLRADPELLRPIQHRSEAMQMDLMAIRVRAVLVEARTKLVNAARGLAKSVGERLPTCDADNMGISQMGSLPKELQALLKPLLKQVESLTGEIKARDEQIEQIARMKYPETKLLRQVSGVGPLIALTFVLTVADKQRFQKSRDVGCYLGLRPKRSQSGQSEPELHITKEGDLYLRKLLVQGAHYILGRKGPDTDLKRWGTRLALGGKRSKKRAVVAVARKLAVLLHKLWSCGEVYDPLRNSVARQAAA

SEQ ID NO: 272638 - protein, 412 aa, unidentified
MNQDKLYVGIDVSSKNNVCYLMYSDGSKHSSFSVPNNRNGAKIIVDRVTSVLLLQDIPKVVIGMEATSVYGDNLMRFLRESGSLGRFERSLHMLNPKQVKKFRDAYSDLPKNDYVDSFVIADHLRFGRINKEVYMDDYKYQALKMYTRARHQLVQELTREKQRLLNTVFISFSGLTQEKIFSDKFGATSMALIEEFSSLDELAYMNTDELADFIRKHGKNHFENPEEIAEAVQRAAKNSYRPPQVIADAAKQMIVISMNTIRLLQKQIKEYDKAIEKMLEMIPQTLTSIKGIGNVYAAGIIAEIGDINRFPSQASVAKYAGLVWTQHQSSDFEAEDKRMIQGGNHHLKYYLCEAANALRRCDPEFKRFYSLKYKEANKHNHKRAFALTARKLVRLVYTLLKTNRLYIPPEEY

SEQ ID NO: 272639 - protein, 331 aa, unidentified
MDNSLYFVGADIALKKFDAAIRLDGNRYKHKVFANTPEGFTAFHAWLQGFGSHFHILMEATNVYHEDLADYLLVQGLTVSVINPRCIPNFAKSTNMRSKTDKVDARLLADYAYCNAARLRKYAPLATNYRTLKRLMRQLTHLKKIIAKEQVRIQMMMDALCVEISQEIIAGTKALAKELEKKIKELVKEDKVLSRNAQLLQSIPAVGWMSAMYLLSHLGDGSRFRNSKAAATYMGLTPIVKQSGDSLHIVSGISKMGPRDIRDVLYAPAMSYAFGPWKERVYAPFVQRLTANGKAPKEVIVALMRKLVSIAQAVLQHQHPFDSAILVGKAA

SEQ ID NO: 272640 - protein, 383 aa, unidentified
MKKNISTTVRMTATSVNVTTEKPQPTEDGAASVTQRYHAIVGLDVGDRQSHYCVLDLDGDVVAEGAVKTTEASFRVLFDGKGRMRIALEAGTHAPWLSRLLIALGHEVLVANPRKLRLIAESDAKHDRADARLLARLAHVGPALLSPIHSRSAQTQIDLALIRAREVAVQTRTKIVNAVRGMTKSTGHRLPASPTLTFARKATAGCPEALQPALLPLIRLVQTLTDEIAAYDRLVEEKARAYPETKAIQTIHGVGALTAVAFVLVLNNDRARFTRSRDVGCYLGLKPKQRDSGMRSPQLGITKTGDPLIRRLATQSAQYILGPFGRDSTMRRWGLSLASRGGKTAKKRAVVAVARKLVVLMHRIWITQEAYDPMRGVRARPAA

SEQ ID NO: 272641 - protein, 485 aa, unidentified
MAKRRMSTFERLESGRLNRKQRRELGRQVAVADPGLTIVHANAGGIDVGNESHYVAVPPDRDPNPVREFGCWTAALNQIAEWLQSCRIDTVAMQATGVYWIALYDVLEQHGIQVVLANAQHTKNVPGRKTDVQECQWLMKLHTYGLLRDSFRLAQEMESVGTIWRLRDRHVKEAGRAVQHMQKALTKMNIQLANVISDINGLSGQEIIAAILQGERDPWKLADLKHYRVRASREEVARSLEGNWREDVLFELQQAVDSYHFAHRQMQECDRKLEGYLASLPARMLDIPVQPENTQAATPKKKTKKAKRPRGNQPHLDLKTELKRICGVDLTSIDGIDVMTALTIVSEIGTDVSRFQDETHFASWLGLTPAKDITGGKTIGRGKRKVKNRVAVALRTAATTLLKSDSYLGARYRSLRRKLPSFASAVKAMGRYLAVLIHRLLTKGEAWVDRGATQFERRHTEQELASLSFKARAKGFKLIPITEAS

SEQ ID NO: 272642 - protein, 408 aa, unidentified
MEVLFDRCCGLDVHKKEVLACVITPGGKKTRTFHTMTDDLLELADWLTEEQVTHVAMESTGPYWKPIYNLLENEFTLILGNAQHIKIVPGRKTDVKDAEWIADLLRHGLIKGSFVPDRAQRELRELLRYRRSLIQEHTREANRIQKVLEGANIKLGSVASDILGVSGRAMLRAIADGVDDPKAIAGLAKGRLREKQDELEKALKGLVGSHQRIVIACQLEHLVFLEGQIDKLDKEIADRMSPLQSQIDAADSIPGIDVRTAQDILGEIGTDMNQFPDASHLASWAGVSPGNNRSAGKRRSGRTMHGNRWLKAALVLAARAATRSKGNYLNSQYHRLAARRGDKKAILAVAHSILVMLYTMLKKGQVYQELGPDYFEKRNSNATVRRAVQRIEQLGFKVTVEVIQPSFS

SEQ ID NO: 272643 - protein, 351 aa, unidentified
MIVAHHYDHVVGVDTHARTHTYAVVATKTGEILGTKAFPVTTAAIDRAIAWVRGVARGSVLFAMEGTGSYGASLGRALQRDGIVFCEVRPPKKSSRVRGKTDEIDAIAAATSAMGIELDSLTRPKADGLRNALRVTLDVRRDMEIRRTSARNQLNALVRTTDFGLDTRRALADRGVQRLVDLDAQCSDVAERIIRAEAVRLASTVIELGRQMRENREALAELVELLAPGLQQIYGVGPVTAAAAVAAYSHPGRVRSEAAFASLAGVNPIPASSGNTTRHRLNRGGDRQLNRALDVIARVRMVSEARTRAYVDRRISEGRTSREIRRCVKRYIAREIFKALELRMGTALAVV

SEQ ID NO: 272644 - protein, 391 aa, unidentified
MDKAWAGIDAGKEFHWAHVLDASGTQLLSRKVENDEADIARLIDEALSLAEGIVWAVDQPGGSAALLLALLWERNQRVFYVPGLSVDRARDTYRGESKTDARDAHVIAEQARMRPDLGELEPGEQEIAELQLLLARRRDLITDRSRTIARLRETLLSLFPALERALDLNSKGPLTLLTHYQTPAQLRRAGHKRVAAYLRNRGVKGSNKVANKALVAAKAQSVTLPAQEVASRILAELAKDVLGLKERIESIDEEIGQRFFARPEARILTSLPGMGPILGAEFLVAVGDIRTFESADRLAAYAGLVPAARDSGKRVGNRRRMRGGNKTLKRVFYQSAFASLRGCAQSRAFYDRKRAEGKRHTQALVALARRRVNVVWAMLRDGSEFEERSAA

SEQ ID NO: 272645 - protein, 339 aa, unidentified
MKKVFIGIDFSKLKFDVAIYSVESKAIVSTEVFENEENGFNLFLKWVKEKTSCNKSGILFCGEHTGYYSGKLSLFLHESGYDMWLVSGLELKLTQGLKRNKTDRVDACKIAEHAYRYQDKVVLFQPVSKALDEIRELLSYRERLVETRKVLTTSAKEMKRVKDNASCNYIYRDSIEYIKSLNASVRDCEKRIEALLKQDISLKTNYKLVSSVVGIGLVNAALILVATDNFTKFENPRKFGCYCGVVPFEHSSGTSVRGKTRVSKMANRHLKTKLTLAAQNAVRFDPELKEYYQRKLREGKNNWLVLNNVKNKLIHRIFAVVRDRQMYEKQYVHPLKQAA

SEQ ID NO: 272646 - protein, 398 aa, unidentified
MESQLRVGVDVGCHAHRVGIADPDGSILEEFDISHSEAGFREFFRRVEERRAELGFPVAVAMEGYNGYARPLDRLVQEKGYRLFNVNNLKLARFKEVFPGAAKTDPIDARKILELFHLRNQLPMAKDVLQEVLPAPEVNEKLKRISRRRRQLVTEELRVLNRMQADLQAVSPELLAATHDADNLWFLRFLSFRDDLRQLAKLRRATIRQIPSVGAKYAKVIEEWQAKATFSDEVEYVGPMIVEDAKRILELHKQIDVLDEALAKLAAESEIARRLSTIPGFGKTSIAELAGEIGTLSRFSSEASLALYVGMSPLTVQSGQSSRARAPRQVNTRCRAAMMTTVARHIGCVPQSRAYYERKRAQGKTHSQAIRALGRHMVRVIWAMLRDGHDYELRGDAA

SEQ ID NO: 272647 - protein, 433 aa, unidentified
MQAVIGVDPHKYVLTAVALDARGGVLGRWSGDASSAGFRALRAWAAARAPGAVWAIEGSNRLGRRLAVLVAADGTAVRDVCPTRTADQRRRRPGRGKSDTVDAEAIARELLAHPGLPHAFKAAAAGPPDPLREELSLLVRARRQLADRHRQVLNEVEPLLGELPGPLAEGLPPGKKVLPRLVAAARRRRTGERLTDLRLGLLRAHAREERALAAACAALERQVAGLLRRVGTSLPGLCGLGVLGAAEVLVEVGDPRRFRSADAFAAYTGTAPIPASSAEAQGHPVHHRLNRFGNRRLNSVLYGMALVRQRVHPETRAYTARLLAAGKTSRDALRIVKRRLARLVWQTMMRDLRPSGREAAEAAVVGGSEERPPMNAGEGWFADEPAPFVDAGAGRHPRGRSAAEQPSAARLDAPAGAEPPAPLGSPEPIWPPT

SEQ ID NO: 272648 - protein, 386 aa, unidentified
MIYVGVDVAKNTHYACVTDDKPKVLTSPFSFTNDETGFVKFKNLFAKYPVNDVIVGLEATSIYGENLMAYLADLGYKIALINPIETSSVRKTRIRNTKTDKIDAKNICKYLSKEEYRLMQPKELAMLQVRGLCRFRQTVKKSNCRLKTQLASYLDVSFPEFGSAFCSIHLKSAYAVLSDFPTANSISKANIVKLTNILSSASRGRFKREKADELKSLAKRSVASSKNDMTFQIKNTIAQIQLIEAQLNEVEKRICAVFNELDSIIQTIPGIGEINGSMILSEIGDISRFSNPGQLIAFAGLDPITNQSGNFRAKSTRMSKRGSSVLRYALINAAWNVSLNNDTFKSYYSEKFAQKGGHYAALGHVAGKLTRVIFKILKDNVPFDLP

SEQ ID NO: 272649 - protein, 366 aa, unidentified
MKKKIAYVGIDYHKNTLTIAVRIEGEKEIHDTIHIRNEDKIIQKYLKKISKDFDIRACYEASSSGYYFYRKMTSWGYHCDVIAPSSLPKKRGDRRKNDFRDAINLAQNYANGTLSIVQVPTEEDEAVRSLVRCRMVFKEDEKRAKQQINSLLLSQGLHWPRSKWTLRHRKWLSELKMSDEHLQKVLDEYLSHLDYLETRLKHLDQQIEQIAASDLYAPAVKKLRAFKGIGTLSAMLLLAELTDFRRFPDPRALMAFLGLIPSENSSGDSVKGGPITKTGNRRCRTQLIESVQHYVKKPKIGSQMQRDLAELDSRSAAIAIKCLERLHKRYWSLTMKGKLRPVAITAIAREFVGFIWAMMQPQAAVA

SEQ ID NO: 272650 - protein, 315 aa, unidentified
MEPQAVFVGVDVSQEQLDYAIRPTGQRGQLPNNETGVAELVTQLTAVQPALIVLEATGGLELAATAALASAGCPVAVVNPRQTRDFAKATGELAKTDRIDAATLAHFAEAIRPRVQELPDEQALRLKALLTRRRQILEMLVAERNRLALTHPEVQGRLKEHITWLEHELDQLNHDLDHEIRNSPLWHEHDQLLQSVPGVGKVLSTTLLGYLPELGVLDRKAIAALVGVAPFNCDSGKLKGKRRVWGGREQVRYALYMSALSATRFNPVIRTFYQRLRQAGKPFKVAITACMHKLLIILNAMMKHQTRWSPILTAY

SEQ ID NO: 272651 - protein, 338 aa, unidentified
MNIARIGIDLAKQVFQIHGVDRTEKVLVRRQLRRSQMLDYFSKLTPCLIGMEACGSAHYWARELGKLGHEVRLMAPQFVKPYVKSGKNDANDAEAICEAVGRPNMRFVAIKTAEQQVIQAEHRIRARLIKSRTALSNEIRGLLAEFGIVVATSIGRLRKALPELLEDGENGLPGSFRVLLAELGEELRALDDSITAFDARIAQAAREDDRIRRLLEVEGIGPITASALVAAVGNGTQFNSGRDMSAWLGLTPRQYSSGGKNKLGGISKRGDKYMRMLLIHGARAALNAAKNKEDGRSRWVKNLATRRNKNIATVALANKNARIAWSILSRSESYRKAA

SEQ ID NO: 272652 - protein, 346 aa, unidentified
MEQIIRIGMDTSKHIFQLHGVDAAERPVLRKRLGRKQMVAFFARLAPTVIGIEACGAAHYWARVLGEFGHEVKLIAPQHVKPYVKRNKNDSRDAEGLCEATGRPTMRFVPVKTAEQQAALMLAGLREQMVARRTQLSNAIRGYAAEFGIGAAKGLDKIEPLLAQIAQDEGVPALARVSFAVQGRQYAQLQVELKAIEARLRAWHRANADSRRLAQIPGVGPIGATALVMKTPDPRAFPSGRQFAAWLGLTPKDHSTAGKTRLGKITRAGDERLRSVLVAGATAVIQQAKHGRGHPSPWLIALLKRKPPKLAAVALANKIARIAWKLMVTGESYDGARMLGASALAA

SEQ ID NO: 272653 - protein, 354 aa, unidentified
MKRTTKYVALDVHQATTVASVREESGRVIARSVVPTDAGALTEFVRGMRGTRHVTFEEGTQAQWLYELLAPLVDRVVVCNRRGAPHQGNKGDQIDADQLSELLRRGALRAVYHGSADRATLKELTRTYRNLVEDATRVMLRLKALFRARGIATAGTAVYHSRHRARWLAQLLEDGARFRAEALYAELDVLRKLRPKAKAVMVTEARQDPAWPVLRTIPFLGPVRVALLLATMQTPWRFRTKRHLWAYAGLAVVTRSSADYTLVAGQAVRRRRAPMTRGLNRNHNRVLKDVFKGAATAATARPGPLQDFYHGVLARGTREELARLTLTRKLAALTLRLWKKGERYDPTKLTTPAR

SEQ ID NO: 272654 - protein, 345 aa, unidentified
MANLNQFCNFTKIIGIDIAKSVFQIYSCDTQTGEITNMQVKRDKVLEIFVNCGKCLIGMEACGSSQYWARQLQALGHTVRLMDPKLVKPFVRHNKSDKADAEGIYHALVSAVRSVAVKTETERDIQTLLTMRALLVKQRTARINHVRGLLAEYGHVMPKSVDQFDKKVDECINSLEGDAVQLVIDTLRDTVKSIRDDQDRIKTLQREISRLASQTKNAKHFLTVPGIGETIMAYMCVLLADPAQFSSGRQFAAYLGLVPMHTGSGGKTVTTKIPGRCDKALRALLVQGAHAVARSKCRTDWVKTILAKKPKKVAMVAIANRMARQCWAVAHKGQSWRRTFIAATA

SEQ ID NO: 272655 - protein, 356 aa, unidentified
MKTDYQKGKILAKGKNVYIGIDVHKDKWHVTAQVAGEEVFNGSMPSNYHSLRKLLDRFENCRIKVAYEAGPCGFWLYDKLIVDGIETIVVPPSLIPIESGNKVKTDKRDSRKLAKLLESNMLKRVYVLSEADRADRELVRTRRQILEHRSDVMRQIKSKLLFHGIKSPFPNKDRWSQRYVKWLKALSFEHQVLKISFDSLIELFEYLSIQLVKISKQIIALSQSEKYSHKVKLLKSVPGIGILIGMELLVELPDIERFKSAEEIASYMGLTPSEYSTGQHVRQGRITRCGNSRARTCLVEGSWHLIVKDPFMRVKYMTIKNRKGAKRAIIAIARNLIVRIRRILLNNEPYKIGLAA

SEQ ID NO: 272656 - protein, 422 aa, unidentified
MVMDEITEEPGALVERVAALDIGKATLTVCIRVPDEGKPGARRQEVRTYATLTPALLELRDWLICQGVTLVVMEATSAYWKPPFYLLEDDIECWVVNARDVKNVPGRAKTDKLDSVWLAKLAERGMLRASFIPSRPQRQLRDLTRYRRTLTQERTREKQRAEKLLEDAQIKLPVVISDIFGKSGRAMLDALIAGQRNPHELAGLARRNIRAQTSVLQEALTGHFTDHHAFMLGMMLARIDALTTQITTLTTRIEQATAPLSAQIAQLDEIPGIGITAAQDLLAEFGTDMSRFPTPGHLVSWAKFAPKARQSAGRNKAASTGKGNPWLGGTLGESAAGAARTKTFLASRYKRIVRRRGKQRALVAVGNSILTIAWHLLSDPAAHFTDLGPDWHDRLTPLRRKHHLIAELERLSGKKVTLHDAS

SEQ ID NO: 272657 - protein, 426 aa, unidentified
MKSTQNEKISQIKTWILVVGIDVAKEIHYARAFDYRGIELAKLLKFSNTAEGFQRLEQWMQDICRQHNKADIIVGFEPTGHYWFTLGDHLKKQGHRLAIVNPFHVKRTKELDDNSPTKNDRKDPKTIAMLVKDGRYREVYIPEDLYQELREAVAERDRLVQRMTSINNQVDRWLDIHFPEYQTIFSDWQGKAALLTLRHFPTPEKIVSAGPEKIEAIWKASMKRSAGLKKAQGLVTVAKESIGRKTGLVAAEASLQNLLTEHKLYREQYEQLEQLMMDLLKQVPNAEKLLDIKGVGLITAAAFVGEVGNISRFQDPRQIQKLAGFNLVENSSGKHNGKTRISRRGRRRLRHGLFMAMITILATNQEFRMLHQKNLTREKNPLTKMQSIIALCGKLIRVFYGLLRNGTDYSADKMLSDIELGMRTAA

SEQ ID NO: 272658 - protein, 373 aa, unidentified
MNYSTIYVGMDVHKESFSLCCYTNEKETAEYPQRTEAHYSKVLNYIESMRFHYGRDALFICGYEAGCLGYTLYKQLMAHNVECVILAPTTMLQQKGRKRVKTDKRDAALIARCLAHHDYSPVYIPTEQDEQVKEYLRMRAAYKQKLKELKQQILSFCLRHGYIYDGTKGNWTQSHLKWLRELRLPGLYADILQEYIATYNYYIDVLERTERQIEAFASVEPYADDVKNLSCFMGIKTLTALTVLTEIGDFKRFATAENFASYIGLTPGEDSSGGDKNYLGITKAGNVNVRCLLVEAAQSYCRGKIGFKSKALKVRQEGVSTQVIAYADRANDRLRRKYYRLVLKENKNSNVAKVAIARELACFIWGMVTGATA

SEQ ID NO: 272659 - protein, 482 aa, unidentified
MKAKPQEKNKRATNHPTQHHWHEMNRKQRRETMRKIQSEDLSLEVIHPDAAGIDIGNESHYAAVPPSRDSQPVRCFGCTTAELKAMAAWLQQCRIRTVAMQSTGVYWVAVYDILEQAGLEVYLVNARDTKNLPGHKSDVQESQWLMKLHTYGLLRNSFRPSQKIRTMRTYWRQRNDLVQSASRHILRVQKALTQMNVQLANVLSDISGVTGQAIIKAILAGERNPHKLAEFRDPRVQASEEEIAHYLEGNWQPDLLFVLKQEQDGYEFCQQQMAECDRQLEQYLQSTEDRSHGAPLPEEKRKGRLKKKKGNKPQFDLREGLFRMSGTDLTRIDGIDVMTATTVISEAGYDMSKWKTENHFVSWLRLCPDNRISGGKVIGKGRLPTNNPVSIALKMAATTLRQSKTYLGAQFRRLRTRLGAPIAIKAMAAKLARLVYRVLRYGMKYVDQGAAFYELKHRERQVHQLKWKAAQLGYKVTLLPAA

SEQ ID NO: 272660 - protein, 388 aa, unidentified
MLLPIDLSKKSPTTFEQGATLVAVVELSLKSWLVAGIVPGIDRHPLKKFEASENRLLALLGHSQQQALNAGSRIKRIVVAFEAGRDGFWLARWLRARGIEAYVIHPTSVAVSREHRRAKTDRLDTELLKRAFLGWLRGETHHCRMVAIPTLEEEDAKRPNREHDTLVRQRTRIINRIKSGLVRFGIQNFKPTLRKSAERLAKLMTPEGMRLPPNTVAELHRDMERLRFIRDQIKAVEQARIKDLKTAPKTQSNAMVLLIARVFGIGIETADMLVHEILSRNLRDRRAVARYAGLTGSPDESGDRRREKGLARAGNARVRRGMIQLAWRFLRFHSDNPLAQWYHKRTADARGSTRKTMIVALARKLLIALWRMVTTGEIPRGLKLRAAA

SEQ ID NO: 272661 - protein, 413 aa, unidentified
MDAIVERCAGLDVHLDTVVACVSYGKLDIKPKKEVKTFSTTTKGLLELLDFINQKECTHVAMESTGIYWKPVWSILESGAFDLIVANAKKIKNVPGRKTDVKDAEWIASLLRCGLIEKSFVPLERIRDLRDLTRLRKELLGEVNRNKNRIHKVLQDANIKISSVLSDVFGETGKSILNQIIGNQCITEEFIYSLYEGRGKSKLKSTPMEMYEALNGKIRGHHVILLGMHNSNIVFLEKQINELEKEIDILLQKERDSLELLETIPGISKISASSIIAEIGTSMDVFKTEKHISSWAGLCPKNNESAGKKKRSGIKSWNNWLRSMLCECAWSATKKKDSRFKNKYWSMVPRMGRKKALIAIANMMLRLIYHLLKTKSTYKELEIQYFIDKDKRREDRIIKELKSKGYLVEKDSL

SEQ ID NO: 272662 - protein, 311 aa, unidentified
MFIGIDVSKTRLDCCAYPVEDRWSVSNDETGFSNLIVRLEKMAVKLIVLEATGGLQIAATAALAAAGLPVVVVNPRQVREYARAKGILAKTDRIDARVLAMFAEAIKPQIRPLHDEATLELQSLQVRRHQLITMIVAEKNRLTTARKHVRRQIDQHIRWLEQRLTELENDIETTVRSSPLWKENSDLLKSITGIGSNTSAMLLATLPELGTLSNRQITALVGLAPFNRDSGQFRGKRMIQGGRARVRTALYMPTLAAIRHNPIIRGFYTRLIQAGKPPKVAITACMRKLLTILNAIIRTRKPWRPDYAFNS

SEQ ID NO: 272663 - protein, 405 aa, unidentified
MYDELAEGNVPEIWAGVDIGKTHHHCVVINADGKRLLSRRVANDESELLALIGDVLEISADALWAVDLNHGVAALLIGLLVSHGQPVAYLTGLAVHRASATYKGEGKTDAKDAFVIADQARVRRDLGLLRPGDEIAVDLRTLTTRRLDTVFDRTRQINRLRAQLLEIFPALERALELTNRGPVMLLTGYQTPAAIRRAGASRIEMWLKNRKVRGAAALAKTAVEAAQAQQTALPGEKLAATMVVRLAKGVMALDEEIAELDALIEAKFREHPHAEVIRSLPGMGAKLGAEFLAATGGDMDAFGSPDRLAGFAGLAPRPRDSGRVSGNLRRPRRYHRGLLRTMYLSAMVSLQCCPVSKAFYDRKRSEGKGHKQALLALARRRLNVLWAMIRDGECFHASPPVTGAA

SEQ ID NO: 272664 - protein, 310 aa, unidentified
MEHLFVGIDVSKDRLDVHVRPGGEAFAVSRDGKGLEQLVERLRALSPALVAVEATGGFETIVAAAIAGAELPLAVVNPAQIRHFAQAVGKRAKTDPIDAGVIAHFAEAVRPAPRTLPDEASRLLAELVGRRRQIIEMMVAERHREKRATNVRVRKSLARHIAVLEKELNAIDQDIDTLVRGSPVWRDKEDLLASVPGIGKTLARTLLAELPELGTLGRREIASLAGLAPYTRQSGRWRGKSMIGGGRGTVRAASFMAALVASQHNQPFKAFYQRLLAAGKPKMVALIAVARKLLTTLNAILRDNRPWQNA

SEQ ID NO: 272665 - protein, 369 aa, unidentified
MNKFSKYVGLDVHQETIAVAVADMAGEVRYMGEIVNTPEAIAKVVARLKRGTGRLAFCYEAGPCGYTICRQLRDLKQDCQVVAPSLIPRKPGERVKTDRRDALSLARLHRAGELTPVWIPDEAQEALRDLTRAREDMKHLQRQAKQRLLSFLSRHGHRYTGRSRWTQAHWRWLEGIKFARPEQQIVLQEYIDTVQACGRRVASLDPAVETAAHASPIWPVIEALMALRGISLLAAVTVVAELGDLARFAGAPQLMAHLGLVPSEHSSGKRERRGGITKTGNSHVRRVLIEAAWTYRHAARKTAILQRRAERTAPEVQEIAWSAQKRLCQRFRNLMARGKLKNQVCTAIARELVGFIWAIGQHVVPLSRA

SEQ ID NO: 272666 - protein, 318 aa, unidentified
MNSHHKTELTEPVRYVGLDVSKARLDYVIEAGPKATVPNTAQGIATLLQRLREVPGVRVVCEATGGYERALMAALWQEQIGVCRVPPGRVRHYAKAEGLRAKSDDIDRHLICRYARNMHPRLDQPVPPECVVLRELLDYRRQLGEQLTTTCHRQEVAGPTLLALLAAQQGQLETALAQADRAIQSHLRAHESLQAKATRLQQMQGVGPVLAATLLAYLPELGQESDKRIAALVGVVPDPNESGLSAKPRHISGGRSEVRTVLYMAAVSASQHNPVLAAFYQRLRAAGKPPKLCLTAVMRKMITVLNRMLRDPHFSLVS

SEQ ID NO: 272667 - protein, 354 aa, unidentified
MIIIGCDFHTRYQQIAMAREETSELLGERRLDHESGEAHSFYRSLQSLQEPVRVGIEATGPMHWFERLLAELGHELWIGDSAKIRASEVRKQKTDERDARLILELLLAKRFPKIWVPTPAERDLRQLLWHRHKLVCLRTMLGNQLHFLAMSQGLCRKKKLFTKKGRAELTGLAMGPWTRRRREELLKLLDQVDAPIAELDRAVLEEAQRRDDAVLLMTHPGIGPVTSLAFVLAIGPVTRFCCSRKLVSYLGLNPSEDSSGQRRRLGAISKQGNTMVRWLLIEAVYPAVRQDLALRQDYQRLKFRRGHAVAKVAIARKLAVRMYWMLRSGTAYAQLVRRQGSPGATLVDASPSLG

SEQ ID NO: 272668 - protein, 399 aa, unidentified
MKGSMPMQSVLAIDVAKGKSMVSLISSCGEVLIEPYEINHSINDFTNLLNKINKQKLDNVSVIMESTGIYHRPVERFFLENNFKVFVINALYSKMYKRNLRKTKTDKLDCISLSELFFTTDFREYIKPDDIYLNMNALSRQYHALDELCVNLKNRYKNLVYLCFPEYELIFKKKTIYSELALSFIEKYPHADIISNTRIDTLQNFFKKNGFRHWKKKPATIKEYAINSYPSVSKDDEITSSLSQLARLINTYQKEIETIKYKIIFLGKKTKYFESINSIFGIGEFTASLIIAEIGDINRFKNIKELTAYCGLDPSIKQSGKSINIKGPISKSGNKYLRKILFVSILNILSVTRICHIENDIETYYRKKRNEGKHHYVATIACTTKLLRQIFVLCKQLDK

SEQ ID NO: 272669 - protein, 355 aa, unidentified
MRNHNILGIDLAKNVFHACEMNAQGRVLRRARLSREQLYPWVIKHFKGIVAMEACGGSQYWARRFEAAGYEVRIMAAQFVKPFVKSNKNDTVDAEAICEAASRPQMRFVSTRQEWQQDIQNLHRVRERLVRNRTALANEIRGLLLEYGIVLPKGISHVRQKLHVILEAQRSEHSELWHKTFVELYEEFCEIEKRIEGQEATLTALCRSREDCRRLKEIPGVGELTATAIVAAVGNAKAFRNGREFAACLGLTPKQHSTGGKNTLGRISKCGDPYIRKLLVLGARSSAIAAERKRNHKDPHKREVNRTNKWLFEVAARRGGNKAIVALANKTARRIWVVLSGKDFKQPEELFPLAA

SEQ ID NO: 272670 - protein, 457 aa, unidentified
MQGKQKKVRGRSSGQLPTLNEHAAGLDVGSTFHVVAVRGDQDEEPVRTFRSFSGDLHKMADWLDRVGITTVAMESTGVYWIPVFEILEARGFEVLLVNARDVKNVPGRKTDVNDAQWLQQLHQHGLLRGSFRPRDEVVRLRAYLRHRERTVEYAASHVQHMQKALMQMNVQLHHVVSDITGVTGMRIIRAIVAGTRAPAELAQHRDVRCASSEETIREALTGNYRPEHVFALKQGLELWEFHQAKIAECDSEIETVLQSLNEQRTNPEAPLPPVRHAKARNEPKFDVRRALYTLLGADLSQIHGFGPYTVLKLVAECGDDMTKWPTAKHFTSWLSLAPGNKISGGRVLSSKTRRSSNRAAALLRIAAVNIGKTQTALGAFYRRLAARTGKAKAVTATARKLAVLFYRALRFGMTYADPGAEYYEERYKRRVIDSLQRRARSLGFTLIANPVAFEGVS

SEQ ID NO: 272671 - protein, 367 aa, unidentified
MEKSSTAYVGMDVHKESVDIAIADGGEARLFGRVGGEAAAVDRAVRKIRSVHRDPLFVYEAGPCGFWLYRRLAAQGLRCMVVSPSMTPRRAGDRVKTDRRDALMLARLARAGELSPIYVPDARDEAIRDLVRAREDAVCMQRQARQRLQALLLRNEIRYVGRSAWTQAHRRWIAHLKLPDPAQQIAFEEYVQAVEEAGARLERLAGAIAAQLAHWRWRPVIEALQALRGVSCIHGVRIVAELGDLARFESPRKLMGYLGLTPSEDSSGGRRRQGGITKAGNSSARRALIEAAWAYAHPARVSWVIARRHTGLAKSVTDLAWKAQLRLCARFRRLAARRLPRNKVVVAIARELSGFVWAIARQVKPAA

SEQ ID NO: 272672 - protein, 419 aa, unidentified
MLTARWFVGIDWATEAHEVCVLDPEGQVCDRRSVPHSATALQAFVDALLERAHGDASTVAIGIEVPRGALVDVCVERGFGVYAINPKQLDRFRDRFTAAGAKDDRRDAHVIGDSLRTDPQAFRRVRLDHPLVIQLREWSRFDEDLAGDLTRMTNQLRDLVYRIAPGLLTLCPAADERWLWTLLRDAPTPADQRRLSLRRLERLLRDHRVRRLEAAQVREVLQQPSVYTAPGVVDAVAAHIQLLLPRVDLLAGQRRDAEKQLERLLDALDAQEPAAGDQREHSDVAIVRSMPGIGTRVAARMLAEASQPLVERAYHVLRATMGVAPITKQSGRRRTVSMRYACNARLREAGYHWARTGAQKDPASRAYYAQLRARGHSHGRALRSVADRLLRVLMTLLNHGQLFDLTHGQHAPAAIGAGA

SEQ ID NO: 272673 - protein, 342 aa, unidentified
MSNRTVISADIAKNVFQCVQFKNDRQIGKNKTYKRENFAKLITGSQPGKLVMETCSGAQHWTRMAKAHGHEVVLIPPRVVAPYRQGQKTDANDAQAIYEASQRKHLKASPHKTVEQQALGVLESVRAHYQSRKNKLSNAIRGHLAEFGLIIPKGYKSLRIQLPLILEDAENGLPMSVRMAVNIYWQDWQQAHQKVMELEKEKLVELNQIKAAKEILKIEGIGPVCASGLICTLGDGSVFKRGKEAAAFIGTSPKQHSSGGKVIMVGISKTTGHKKLRSALIQGARSVILKLKAKKEPSSEKERWLAQLIERQGENRAAVALANKNVRTAWALLVHNREYIAA

SEQ ID NO: 272674 - protein, 379 aa, unidentified
MDCTSTAAPAGSILHCALELSKNTWLLGIQFSDRPQPSLYPIRGGNTEDLMAKLTAARDRCAKLSGRTPSIVLCYEAGYDAFWLARFLKARGFECLVIDSASMQVNRRARRSKTDRIDVGKLLRGLIAWHRGDRQVWSVVRIPSVDEEDLRRSHRERDYLVHERTAHINRIKGLLFAQGIRGINVKRQYKTLHVDKLVTGDGHPIPPRLASEIVREIARLALLQEQIATLERERDEAPTPCTATEKKRAQLMFLNGIGPAISAVMTREVYYRQFDNRRQVAGFLGLAPSPYDSGEVERSQGISRAGRGQVRGTMMQAAWLWIKHQPKSTLTRWFLERTMGQGGRIKRIMIVAVARKLAIALWRFLEHGLVPQGAIMRSK

SEQ ID NO: 272675 - protein, 303 aa, unidentified
MVFVGVDVSARRLDVAIGSEVRQFPNPEGIPDLLRQLPPGAVVGLEATGVYGRPLAFALYRSGFRVYVLNPLAVKSYARSLLRRAKTDRADARLIARFLAERHADLEPYEPTGDVLYQVGLLVRFARGLVAQRVAALNRLHAWGYAWPDGLGLVRQVPDVLASLRREVEAMALSLLETDPEAWRHFQALQALPGVGPSIALTILAYSGDLRRFRSARAYAAYTGLTPRVHQSGQLPERASITRIGPSALRAAFWMAALSASRVEPYASLVARLVQSGKPKKLAITAVANRLARAAWAVVVRGA

SEQ ID NO: 272676 - protein, 317 aa, unidentified
MTKTSIAVAGIDTAKDKLDVVLYGQASHWQVENTSQGWRQLRAKLAKAEVERVGIEATGGYERGVVRHLREAGFTVVILQPAQVRAFAQVHLRRAKNDALDAALIAACTAVMDKVRIEPDQRLTDLADVLTFVEQIEEDIARFKIRLEHIGEPRLRRMVLGDIVRLKARRIAQLRHIARLLRTHHDLARRLDLVLSIPGIGERTALALIIRMPELGRISREEAAALAGLAPFDHDSGRYKGQRHIAGGRERLRRSLFAAALPAAFRWNKALIGLYSRLTAKGKAHNAALIACARKLLIYANTVVARGTPWTERPATA

SEQ ID NO: 272677 - protein, 371 aa, unidentified
MDSSSPIGIYVPNWYKRHQLTVKTEESTVKISRVGVDLAKNVFQIHGSDAHGKAIWKRKLTRERWIEAICTKLPDGCEIGMEACAGSHHWARRLSGYRFQVKLIPPQFVTPYVKSNKNDANDAEAICEAMSRPNMRFVKMKTVEQQDIQAIHRVRSELMSQRIAKGNQIRGLVAEYGLVAPRQVYALRKALPLWLEDAENGLTDRFRHLLSDLWRDLRYLEERISGLDVEIREVADTDPMAARLQQLRGVGPLVATALIATVGNGDQFTKGRQMSASIGLTPRQHSSGGKDRLLGISKRGDAYLRTILIHGARSTIAHAKHREDSLSVWVTDLAKRSHTNVAAVALANKTVRMAWAMMRNNTDYDPERAVA

SEQ ID NO: 272678 - protein, 272 aa, unidentified
MEHELHYIGIDTAKEKLDVDVLRPDGRHRTKKFANTTKGHDELVSWLKGHKIDHAHICIEATGTYMEPVAECLYDAGYIVSVINPALGKAFAQSEGLRNKTDTVDARMLAEFCRQKRPAAWEAPHPLERALRALVVRHQALTDMHTQELNRTETAREVQRPSIDAHLLWLEAELKRLEKQIKDLTDDDPDMKHRRKLLESIPGIGEKTSAVLLAYIGLKDRFAHARQFAAFAGLTPRRYESGSSVRGASRMSKAGHVSLRQGVVYARNGSHQ

SEQ ID NO: 272679 - protein, 352 aa, unidentified
MRPSQKTPETITTIGIDLGKNTFHLVGLDKRGAIVLQQKVSRAQLERRLANVPRCLIGMEACSGSHHIGRQLSAQGHEVRLIPAQYVKPFLKGHKNDYRDAEAIAEAVQRPTMNFVAIKTPEQMDLLALHRVRSRLVGQRTGTINQIRGFLIERGITVRQGLVPLRRALPDILNSNTDVLSPRLVRLITELMQDWRRLDERMTALSAEIEVLARQDDSSRRLMTVPGVGPIISSAVVAAIGNGAGFKQGRDFAAWLGLVPKQESTGDRTILGKISKRGNKYLRTLFVQAAHVVLVRRPTAAMRGLWPWIEQAAKRLHRNMLAIALANKLARIAWAVLARGRDYQPRIAANVA

SEQ ID NO: 272680 - protein, 411 aa, unidentified
MSQMLVGIDVSMRSNHVQFMDESGESLASFAISNDRIGADTLVQKVISTVNKTNCATVRIGMEATSNLGWHLAHYLKCRLNDSPTNVQIYVLNARKVARFKKGYDCLPKTDRLDAWVIADHLRFGRLPQEMKDSVQYEALQRLTRTRFHLMQNISREKTFFLNQVFLKFSGIRQDNPFSDTFGTTSLAVIQELEPEQIATMPLEELIDFLQDKGKNHFANPEETAAYLKKIARSSYRLDKTLADPVNLSLSITLSVIQHMESQIKKLDKEIAKLMRDIPQTLTSVKGLGPVLSAGIIAEIGEIKRFDNHNALAKYAGLAWNKYQSGEFEAEDTMRMKTGNKYLRYYLIQAADSVRKSDPEYRAFYQKKYTEVPKHQHKRALVLTARKLVRLVYSLLNTRQLYTPSDRRDLD

SEQ ID NO: 272681 - protein, 417 aa, unidentified
MDTIYSSVAGLDVHLKSIQCAVRCRQETGKLFQQVRSFGTMTRDLRALADYLQSLGVTHVAMEATGVLWKPVWNILDGRFTLLLINPRHIKKLPGRKSDVSDAEWIAQLLEHGLLRGSFVPPRAVRELRDLTRHRAQLAAEHTRVANRIHQVLEDCNIKLGAVASDVLGKSGRAMLRAMLLGEQDAEQLAELALGVLRKKLPQLRLALEGHCTEHHRFLLERLLSHLDYLEEQIARFSTQIAAGLKPLLPAADQQRLDTIPGVNRTTIENVIAEIGPDMTVFPDEHHLSSWTGICPGNEESAGKRLRSRTRKGNRWLRRALAEAAWAASHAKDTYLAAQYRRLAARRGKKRALLAVGHSLLVIIYHVLKDHLEYHELGADFFDSLEPERLRRYLVRRLQHLGFEVTLTTKDPDKEAA

SEQ ID NO: 272682 - protein, 445 aa, unidentified
MRIVYQRCCGMDVHKDSVTACLLLIDGEGECRTEKRRFGTMTRDLKGMASWLASQGVQAIALEATGVYWKPVWNILEAEKKFALLLVNAQHSKQVPGRKTDQKDSEWIAELLQHGLLRASFVPPLEIRRLRDLTRMRAKIRQTVASFANRIQKVLEDANIKLGSVASDVLGVSGRKMLQALMAGAQDPQQLAKLAQGRLREKIQQLQLALEGHFTDHPRLQLKLLLEFVAFGEKQLSSFDVEIRHLLAQGQLEGLRTVPSARVDAEGILPRPTSPLQTAVELWDTIPGIDELTASTLVAEIGAHMDQFPSAGHLAKWAGLCPGNNESAGKRRSGKTRKASVWLRRALCQAAWAASRTKNTYLAAQYRRLIVRKGKKRTIVAVAHSMLIIAYWVLKRQCAYQELGADFFDRRDERAVAHRLVKKLIGLGYEVTLKPCRSEAVPQTA

SEQ ID NO: 272683 - protein, 412 aa, unidentified
MKDLLEISCGLDVHKKKIVACILTGPLGKPTRSEIREFSTLIPDMIALRNWIVSKNCHHVAMESTGIYWMPIYEILEDAFYGDITLLVVNARHMKNVPGKKTDMRDSEWISTLLRAGLLNGSFIPKKRIREFRDLNRYRKSVIRDITSQKNRIEKFLQSSGFRLSSFISDIFGASGRNIILHLIEHGQIDKTALDSCLKTKTRNRIDEILMSVNGTLSEHQKAFLRILMTHYDSLKKHLAEIETSLEEDMAPFTLQVEQLNSIYGISTTASCAIIAEIGIDMKPFKTAEHICSWAGLCPGNNESAGKRKSTSVTKGNPYIKSMLCEIAWVIAGKRNTYLSAWYWRIKQKKGAKKAIVALARKLLVIIYTMLKQGTLFDESCFETRRKHCEQKQLSRYIRELEKHGYHVEAQS

SEQ ID NO: 272684 - protein, 354 aa, unidentified
MKKYSAIGIDVSDKDMKVVGLNAEGETVWKHVIACRKSAVITVFGKIEPCVVALETGGHTGWLARALMEVGHEVVIANARKVRAISANERKSDWIDAEILARLVRTDRKLLHPVTLRSAQTQADMMVIKARDVVVRTRATMVNAARSLVKGRGERVGPCDTVSFAKRCRKEVAPETVALLEPLLATIESHTETVKGYDKMIHTIAGSERYAKAVEQISQVAGVGELTALNFVLTIEEPKRFSKARDAGSFLGMTPRRDQSGDVDKQLGITHAGNTMMRRLLVGSAHYIMGPFGPDCNLRRFGERLVTRGGKNAKKRAVVAVARKLSILLLKLWQSGQPYEPLHVRVAPTKKRAA

SEQ ID NO: 272685 - protein, 356 aa, unidentified
MSHDVKYIGMDVHKEATVIAVLNGSGKQVMESIVETKASSIVQFIHGLRGELHVTWEEGTWAAWLYDLLQPQVQRVLVCDPRRNALLKEGNKSDKLDARKLADLLRTGMVRPVYHGEHGLRTLRELGRSYQAIGQDLNRVMNRIKALYRGWGIPCAGTQVYAARYREEWLHKIEHVGVRRRAELLYQQLDGLQTLRRTLRPELLAESRKHKASKLLRQIPCIGPIRAARLLALMQTPHRFRSKRQLWTYSGLGIETRDRAQYRWVDGQLQRTKKPQQIRGLNRKHNHEMKEIFKGAATRASCGVGRLREFYVALLDKGMKPEMARLTLARKIAAIALTLWKKEERFDAEQLKSQAA

SEQ ID NO: 272686 - protein, 327 aa, unidentified
MNYIGVDVDSKYLVCQIQRGDKRCPLAQFDNNPPGHRKFIKWATKRHQPARVTMEATGVYSLPFALALHETTDIDVSVMNPRAIKNFAVAQMQRGKTDALDAAAILEYNLRMEFKSWQPPREEVLELQHITRRIVQLNAELTRERNRHKAAMRLGVIGRIVANDTAVNMRHIQRRIDTMAQASLDIIKHDPELNPKFEQLVSVTGIAEKTAPRILAELISLPGDMSGPQWVAHAGLDPRPCESGTSTNKPRRISKAGNRYLREVLFFPALVASQKDKHVKAFYEKLLSKGKKPMQAIVAIMRKLLLAIWGMFKNNANWEGEKFFKIA

SEQ ID NO: 272687 - protein, 347 aa, unidentified
MRFYTKQHKYYCGIDLHTKKMYICILDGTGETVIHQNIRTDPEAFLSVIAAYREDIVVAVECMFTWYWIADLCASEGIPFVLGHALYMKAIHGGKSKNDKIDSHKIAVLLRGGMLPQSYVYPARMRAARDLLRRRNHLVRKRAELLAHIQNTRHQYNLEDPLERIAKPKNRQGVVERFDNPCVQKSIAVNLEIISAYDRILERLERDIIQTANEHDALSYNLLKTIPGVGRILALILLYEVENIDRFPRVQDFVSYARLVKCAKESNGKKYGTSGKKIGNAHLKWAFSEAAVLFLKGNEAGKRYLDRLTSKHGKGKALSILAHKLGRAAYFMLKDKKAFDEKRFLSH

SEQ ID NO: 272688 - protein, 356 aa, unidentified
MQSMNEQGRRVIGGVDAHADTHHAAALDDRGALLATRSFEVSAAGYLQLLAWLRSYGEIDRVGVESTGSYAAGLTRSLVGAGVRVLEVNQPHAHTRRRRGKTDAIDAELAARHALSLVAQVTPKQTTGIVEAIRQLRVARDSAVKSRSVAMLQLGDLILTAPSALREQLAARKTLKGKASLCRRLRPDTSRLDDPLNAAKLALRSLARRVVLLDAEIAELDAQLAPLVATAAPRTTALLGISTGHAGQLLLTAGQNIDRLHNEGAFAALCGASPIPVASGKRGRYRLNPGGDRQANRALHLIAVCRLRYCPDTRAYAQRRSTEGKTNKEIMRRLKRYIAREVYATLRDDLRSISPS

SEQ ID NO: 272689 - protein, 352 aa, unidentified
MKRYFGCDAHKKYSVFASINEAGHRGSCIRVENDRYQFSRFLQTLPPGSPIAVETVGNWYWMIDEMEKARHEPRLAHAGKAKLMMGQINKTDKLDANGLALLLRNGTLPSVWIPPGELRDQRELPRTRMALVHVRTMLKNRIHAALAKYAIQIKEVSDIFGVQGRKLMENRLSELPQQTRHSVEEQLKLLDQVKEHIKECEKQIEEIIKETLAMRLLMTIPGVGPILATVIAMEVGQIDRFPRAENLASYAGTVPRIKQSGGRIRFGKVRPDVNRYLKWALIEAANVVVLHQVSWPGRHVVQLYRRIRQRRGHGKAVVAVARHLAEATYWMLKRNEAYKEPKKSETVSSTRK

SEQ ID NO: 272690 - protein, 345 aa, unidentified
MKITTTGIDLAKALFQVHGVDKHGKVGLRKQLKRKDVLSFFANLEPCLIGMEACGSAHYWARKLSALGHTVRLMAPQFVKPYVKTNKSDRNDAEAICEAVARPNMRFMAVKTAEMQAALALHRARQGFVKARTAQANQIRGLLAEFGIVIAKGIGHIAKRLPEILEDGENALPGMMRELLQRLGANLHDMDKQVRELERQIVLWHRENEASRKLEAIAGIGALGASAMVATLGDAKSFKNARQVPAWLGMVPRHEGTGGNVQLGRISKRGDVYLRTLLIHGARAVITAVERKPDHADEWLKKLLARRNKNVAAVALAAKNARIAWALLAHERSYQHDYVATRKAA

SEQ ID NO: 272691 - protein, 315 aa, unidentified
MTRTEVFVGIDVSKTQLDLALRPEGRFSAPNDEAGCAQVLERLRAVSPTLVVLEATGGLEIPLTGVLAAAGVPVVVVNPRQVRDFAKATGKRAKTDALDAQTLAHFAEVIRPERRPLPDEQTQALAAILARRRQLVEMLTAEKNRLASARTSVRKSLRTHITWLERELSHTDRDLAHAIRESPVWREKEELLQSAPGVGPVVTSTLLANLPELGTLTGKQIAALIGVAPFNRDSGTLRGTRTVWGGRAQVRAVLYMGTLVATRFNPVIRAFYQRLCAAGKPKKVALTACMRKLLIILNAMLKHRTPWRPELVQRA

SEQ ID NO: 272692 - protein, 419 aa, unidentified
MLKIVHPICCGIDVHKKFLVAAIAITDSNNVTTYVKRRFSTFNSDLIKLRDWLLSYNCFEVCMESTGKYWIPIFNVLEKSCHVVIANPKYLRAIKGQKTDDKDATWIADLFKFDIVPSSFIPPEDIRMLRELVRYRFKLIGHRSSEKNRLQNALTVSNIALASVVSDSFGKSASSIIEYILTCDTFDPEYCKSLLHKRLYKKADEVIQSIIGYELRVDQSVKMKVCRKHYDFINLCVSELDKAISQLAKPYHDLIDIAVTLPGITEKSATYIIAEIGTDMSVFKSDKHLCSWAGLAPQNNESAGKKKSVHVSRAGVYLKPLLIQCANAAIRDKKNPYFRLKYERIKKRRGHKRAIVAIARMILTCLYHMLLKREPFNPSDADYTNMPEKLYQKHKQQYIKKAIKLLEKEGCTIIPPKIT

SEQ ID NO: 272693 - protein, 317 aa, unidentified
MQEVTTFVGVDVAKDELMVCVHGQPGTQRLANQAQAVRQWLKSLPAGSAVAVESTGRYHQLLVAQAHALGMPVFVLNARDVFFYAKAMGARGKTDRVDAQLIARYLVEHYTCLRPFQPPTATQAEIDRLLNQRWSVVSKRTALRQSLADATALGECLDELELAFKKMLDRIDARIQSLIDANTDLRHAQQRLQSITGIGLQSSALLASLLSRIPFASADALVAYSGLDPRPCDSGRYRGRRRLSKRGPAALRRQMYLVAFSACHSKLLHPIYQKLRDQGFKTTEALVILARKLLRVAFAVWKSGQPFDPALIGQKKP

SEQ ID NO: 272694 - protein, 330 aa, unidentified
MTNANVRESTSPPLEFVGVDMAQQAFEWALHGVRGTHSARNDDRGFEALREALQGRRIGLIVIEATGGLERALAGFLLRHGLPVAVVNPRAAREFARSMGHLAKTDAIDAVALAHLAQTLAAKADQAGVRLTPPSAEVELLQAMVARRVQLLSMRTAEKNRLGGAVRVLHKSIEAVIKTLDKEIAKLDRDIDAHLEQHFTEQAQRFDAIKGLGMTTCAAVLAFMPELGTISGARAAKLAGLAPLNNDSGKERGKRHIWGGRSIVRSALHMATLSAVRFNPVIKAFYDRLLAAGKPKKVALTACSHKLLRILNAMARTGQPWNESFHAITP

SEQ ID NO: 272695 - protein, 407 aa, unidentified
MEVLYPRCAGLDVHASSITACLRIATGHEVTHQHRTVATTTAGLLELAEWLEAAGCTHVAMEATGVYWKPVWHILEGYFTLVLANAMHIRNVPGRKSDVHDATWIADLLAHGLIRSSFVPPAPVQALRDLTRTRKQLVGEIARHTLRIQKTLEDANLKLTRVVSDILGTSGRAILRALIAGETDPERLADLTTGRLKATRAQLVEALHGRVTAHHRFLIELHLTQIETLETAVQKLERHLGEALAPFRAAVDLLTTMPGLSETAARVLVAEIGTDMARFPTAGHLVSWAGLCPRLDTSAGKRHSTRIRHATPWLKTTLIQGAWAATRKKDCYLHAQFGRLKSRRGPKKAIVAVAASMLTAAYFMLRDGVEYADLGGAYFAHRDVEQTKQRLLRRLRDLGVEVEVKVA

SEQ ID NO: 272696 - protein, 373 aa, unidentified
MKKVRFLGLDVHADTIAVAVAEPDGEVRSLGIIPNREESVRKLVKKLGPAEQLQACYEAGPTGYVLYWQLTALGVKCEVVAPSLVPVKAGDRVKTDRRDATKLARSYRAGDLTAVWVPNQEHEALRDLVRAREAAKQDQLRARHRLSKFLLRQGRRVPSGFKVWTQRYQDWVKEHVHFEQPAQEYTLLDYLHEVEHMDDRIRRLDLAIAEAVKLAPPGMQEVIQALQALRGIAQISAVTVVAELGKISRFDRARQLMGYSGAVSSEHSSGKRMQRGQITKTGNAHLRRIAMEAAWAYRHRPAIGPRLRKRQEGLSEEVKEIAWKAQHRLHKRYCNLSAAGKEKQKVVTAIGRELLGFIWAIGVQAERNSKRVA

SEQ ID NO: 272697 - protein, 437 aa, unidentified
MAMLNPNAAGIDIGSTEHWVAVPKDRDAERVRRFTAFTCDLHQIARWLKKCGITTIAMESTGIYWLNLFLLLEDYGFEVFLVNARHVKNVSGRKTDMSDAEWIQKLHSCGLLSNSFQPDNYTRELRTYTRHRQNLIRQASRYLQHMQKSMEQMNIKLHKVIRDLAGKTGMSITSAILDGERDTEILAELRDRCIRASKETIMKSLEGTWREEYLFTLQQAYDAYHFVHVQIQQCDERIERALKKREPIEVLGEEKNPIKKRGKTKNKNTPKFDVDSYLKTQLGVDITQIDGIDSLSVLNILREMGSDFSKWPTRKQFLSWLNLVPNNKQSGGKMISSHLMNKKNTAGHTFRKCGSCLWKSKGPLGDYYRIQRAKNGGKAAAIATGNKLASIVYTMVTQQVEYDESILVKMKRNSQQKRLDNLQKKVAHIKKELEEVA

SEQ ID NO: 272698 - protein, 354 aa, unidentified
MSEKPNSAIAVIGIDIGKNSFHVVGLDDRGAIVLRQKWSRGQVAARFANMPPCLIGMEACVGAHHLSRKLRGFGHDARLMPAKYVRPYSKGQKNDFRDAEAIAEAVQRPTMKFVATKTADQLDLQALHRVRERLISQRTGVINQIRAFLLERGIAVRQGQRFLRAGLPDILAAPSNVLSPRMVRVIEDLASDWRRLDERIEGLSSEIGAVAHQDAGCERLMSVPGIGPIISSAMVAAIGTGDAFSKGRDFAAWLGLVPRQMSTGDRTILGKISKRGNRYLRVLFVQAAWVVLIKPKSWERHGLKSWLDAAKKRLHYNVLAIVLANKLARIAWSVLAHGRSFEVTRIDEAITQPA

SEQ ID NO: 272699 - protein, 404 aa, unidentified
MELTPIYRCVAALDVHQAKLTACVIYEDEQGEVQHQLREFGGFKRDRREMAEWVSSFQPEQVVMESTGIYWKSPYAALEKSGIRALVVNARHVKQVPGRKTDIGDALWLATLSRSGLLRGGFVPPENFRGLRLISRQMQKLTGILSGEKNRMHKVLTDGGIRLSVVVSDIHGKSARAMIKGLLAGETPEQVLRYASKRLKATEEELLDALNGDLTDDHRFVISEILAHIEELENRIHCFADQLLNRLAPQRSILRCLQTIPGIDEIGAAMLLVEIGEDMDAFGSASNIASWAGVCPGNHESAGKRVKSKKRKGNPYVRRILCEAANAASRTRCALQEKFKSLIVRRGRKRAIFALAHKMLKIIFVLIKRGDYYRDATINYEAISVERNAPRWIKMLKKYGYITA

SEQ ID NO: 272700 - protein, 345 aa, unidentified
MKIVGCDLHTRYQQIAMLDDETGELTERRLEHASGEAKEFYTKLTGPVRVGIEATGHTRWFERMLAELGQELWVGDAARIRAAEVRKQKTDARDAALLLELLRNGRFPRLWRPTNEERDLRHLLWHRQKLVWMRNAVGNQLHALAMGEGLCRKKQLFTKKGRGELQALKLDRWASRRRQELLQMIDPIDASLKQFDEAVNQQAAGTPEAVRLMTHPGVGPVTSLAFALLVGPVSRFSRSKQLVSYLGLNPREHSSGGRQRLGAISKQGNPMLRGLLVEAGHTAARLDPELRQDYQRLRLRRGGSVAKVAIARKLAVRMYWMLRRQVNYTQLVRMQGSSRATLVQQ

SEQ ID NO: 272701 - protein, 400 aa, unidentified
MDKDRIVAGLDVHKDTIYLCVMDNTEAVIFAKVYGTLTPDLELMCSEMVSHGVTEAAMESTSTYWVPVWNALCESISLKLVNPYFIKQLPGRKSDVKDAQWIAECLLKNLIRGSFVPDKRVQDMRKYNRRIFDLNEDLTYNSNKQDAALQRCGFRLSNYVSRVNGKSYQKCVRAIITGITDPEELVKLIHGKTLRKYGRNIIKDAVTGDFHQADICLLKQYAELIGVIERQIEECRNALISMCQEHFPKQFKRLQSIPGVKERAASAIIAETGADMKPFEKATNLVGWCGLKPRNDISNNKVKSNRTTHGNRFLRQILIEISWVASRTRNCFFSNFSYVQCTQRHKNKMKIQVAIARKLLVAVWHMLTKDEDFIDVYLKRLEKQAEWQNDIQALESLLVE

SEQ ID NO: 272702 - protein, 352 aa, unidentified
MNQITTVGVDLAKDLIVACAGDVAGRTQFYKRFGFHGFAAWAANLPPCTIAMEACSSAHHWARTLSALGHNVKLLAPDLVKPFRKSQAAKNDRNDAQAILITALQPDMRFVSVKSVEQQSILAVHRMREGWKSERTALINRVRGLLAEFGIWLGRSPQTLTRRLPQLMQEEQLPARVRALLAQAHGQLLQLEALMQQCELDIQAHARHSEAAQRLSALNGIGPITASAIVATVSNAADFRNGRQMAAWCGLVPKQSSSGGKERLGKITKRGDPYLRGLLTQGARSTLNAALARPLDQRSPLEHWIVALRQRVGYHKSLVAIANKHARICWALLVRGERYHPHAASRHVRAAA

SEQ ID NO: 272703 - protein, 370 aa, unidentified
MNRLFIGMDVHKEKIVVIGLPEEGSHSVVREEFGGGDLRRLTKRIQALSRSWEVDSCYEAGPSGYGLARIFLEAGIPCRVVAPSLIPRRPGNRVKTDSRDAKELALALRADTLTFVRIPALAEEEARGLIRCREDVARQVRLFKTTVSHWLLNRGQRVPSGTKRWTPAYWKWVRALPLSPMDRTTLDHYLDVVSLLENRRKQVEEQICALAKEDPYRERVKRLIVLRGFSPLAAMRLIAEVIEFKRFRSASSFMKFTGLTPSEHSSGDRTRRGRITKAGNSHLRHVLVEAVQKAHFSANPGRMLLRRWQDVSGPLRQIAVDCLKRLHHKFWALTQRGVPAGKTRVAMARELAGFVWALMTHPEIETPLAV

SEQ ID NO: 272704 - protein, 354 aa, unidentified
MHYVGVDYHKKSSYVTVVDERGKLVKEGQIANTQEALAALLEGSAQGASAVLEAGRNWSVMYDWLDELVDEVTLAHPAKVRVIAEAKVKTDRIDSRMLAQLLRADLIPRAYVPGVVTREQRRRLRQRMFLVRVATMIKNRIHTLMDRHPELSRQAQGYSDLFGKAGRAWLEQVELPASEAELLGTDLDLLEAVQQHITSSNRWVTQLARKDERAKLLATLPGIGDFFAVLLAVEIDDVSRFARPEKLAAYAGLVPSTYASGGYVHHGRITKQGNKWMRWACIEAAYPAIRQDRDLAALYERLKAAKGANVAKVAVAKRLLTIAYRVLSEGRPYRPAEEQARLRRRNAPAALIAS

SEQ ID NO: 272705 - protein, 330 aa, unidentified
MTSLPNSEQPTMQPVELLVGIDVAKQSIEVSLGSHLPTIALSNDSEGAHALLERLKGERVALVVMEATGGLEAMMACVLQGAGYAVAVINPRQARDFARAMGQLAKTDRIDAHILSQLAGVLDRHPQRERYVRALPAAEQTELAALVARRRQLVGMWVAERNRLPGSHPRARPSVIAMIEALAQQLANIDQDMDRHVKAHYADVSSLLDSAKGVGRRTIATLIAELPELGKLGHREISALVGVAPINRDSGQMRGKRTIFGGRASVRQALYMAVLSGTRYNPTIKVFYQRLLKAGKPKKVALTACMRKLLTILNAMVKSGKPWQESIHEA

SEQ ID NO: 272706 - protein, 346 aa, unidentified
MEVLIGVDPHKDSVAVAAVDEVKGELLERAAFPQNRKGLRSLDRWARRFPERRWAMENASGLGRYLAGRLVDSGESVVDVPPKLSARARVLSTGNARKNDGLDALATALAASRNGRLAQVDPEAASEALRLLSERREDLVAERTRALNRLHGLLRDLLPGGVARTLSADRAARILRGIRPKGTSARLRRRLASEVLRDVRSLDRKIADLNGRIKAEVEASGTTLTQIFGIGPILAAKIIGTVCDVGRFPTKAHFASYSGTAPLEASSGQVVRHRLSLAGNRHLNNALHMVAVCQARSDARGGAYYRKKIAEGKSRKEALRCLKRRISDAVFRSLMADSQAPSHSAA

SEQ ID NO: 272707 - protein, 335 aa, unidentified
MNQARMHIGVDVGKESLDVCYPNGNKEHIKNTKRCRAKLIKEAKRLGAIISFEATGPYEESLEVDCLSAGVPAVRLDAWKTRKYAESQGILEKTDAIDCEMIRDYAASLRLEKLHFVREMSEGYRRLKRASGVRRNLIKAKVLIANQLESVMDADIKASIVRLVDSIDRQIEKMDDACSAAIASDEKMNALSKRFEQVVGIGPVLINTVFATCPDIGSFTAKGIAKFAGVAPLENKSCTIKKKPKPRRGRRDLRNALYMAAVSACHSNHLLQSMYKGLLARGVPKRVALVALARHIIILMNYIAKYPDFNPAIDPKKAAILASPKRKPGRPRKNP

SEQ ID NO: 272708 - protein, 406 aa, unidentified
MTVVMIGVDPHKGSHTAVAIGSDEEPLGKLRVRASVTQAQRLVTWAADWPERTWAVEGAGGLGHLLAQQLVAAGERVLDVQPKLGSRVRLLATGASNKNDPNDALSVAIAALRSRTQRPVTADDHDVVLRVWSRRHRDLGRAKNQVACRLHAVLCELVPGGVPEEITAAQATRILERSTPSGAAGQARRELAAELLDDMRGLDTRIRESKKKLAVAVRASGTTLTDLFGVGPVVAATVIGDTGDVNRFPSRDHFASYNGTAPIEVSSGNRKINRLSLRGNRRINHAIHMAAITQIRHAHSDGRAYYDRKLAEGKTHKEALRCLKRRISDALYARLCADARQAAETPVAGPGGQPGNDSDSSAAGSHPVNRLFGQATPEPSLTLRPATTPAKRTSPTPTPKKTRRSP

SEQ ID NO: 272709 - protein, 454 aa, unidentified
MAKARGRRGTLDGFAEINHDAAGIDVGNAQHWVAVPCGRDVESIRMFGCFTADLHALANWLERCGIKTVAMESTGVYWIALYEVLESRGFRVCVVNARQAKNLPGRKTDVKDCQWLQQLHTYGLLTASFRPQGEIIILRRYLRHRETLVQEAATCIQRIQKALTEMNLQLANVISDISGTTGLRILHAIVEGERDPQCLAAMRDWRIKATPDEVAKSLHGNWRDELIFVLGENLVLFEVYQQKIERCDHRIEQHLKSMSAQVGNNTNPLPKPRKGKRPHGNSPSFDLRSELYRVTGTDLTQIDGINVVTAQAILADTGTDMSAWKTEKHFVSWLGLCPDHRISGGKVLQRTTRKVTSRAATAFRLAASSLRRSQSALGAKYRRLQSRLGAPKAITAMAHHLARLFYRMIKYGSAYVDHGVAAYETRFREQQLTWLSRKAAELHLCLAPLPNSAG

SEQ ID NO: 272710 - protein, 346 aa, unidentified
MLYAGLDLSRQRLDVHVLDEEGRTVDVLAVHPDADALRTLANRVLRHGQEVSAAIESMTGSRFVHDTLEHFGWDVMIADAVKAKGVAPLAAKTDKIDARVLAELARRDLVPEIWLPDPAVRAERERARFRLHLVHHRSALKCRIHATLMTFGHNVPVSDLFGTSGRKLLAGLELPEPWATTMATSLAMVDELDERIDECGRELARLGADHPYIPLLLTVPGVGPLLAYTIASEIGDIGRFASPKKLTGYTGLCPIVRQSGNRDFRGPLAKNGPKYLRWALVEAATHAARDLHYRDRYERNKKRLGRQRGAKVARIDIARQLAEAIWHVLTKNEPFAPVGPAIQLVA

SEQ ID NO: 272711 - protein, 333 aa, unidentified
MYYSGIDLHSDNCYITTVDDTGAVIKRQRIDNNNELILDYFHSLPGPHQAVVESTTGWYWLNDLLSDHGIDLVLAHAKYLKAISYAKVKTDKVDSQTLAILLRQDLIPRAHKISRELRGFRDTMRIRLRLVQQRTACLLRLYSIHAKFNGTVPDPYRFQLAVLEHTRDMFTSQILALEKSLHPVLIPNDDIQLLLYIPGIGKLTAFTVYLEIDGIERFVSDKHFVSYCRLVPAADNSNRSVHHRSSKDGNKYLKIAFSDAAVHAIQFYPEYKRLFQKLARRSNEATARTVVAKEIAKIVYYVLKNKTHYKGLKGQPISRQKSQQWPRLSSPLS

SEQ ID NO: 272712 - protein, 342 aa, unidentified
MTVIGIDAHKRSHTCVAVNDAGAKVAEKTVASTSAGHAQALRWALTRFGTDLSWGVEDLRSMTGWLERELLAAGQKVVRVPPHVMARNRGSARAWGKSDSVDALAVARAVLREPNLAAAFHDPISWELRLLVDRREDLVGQRVAVTNRLIGRLHQLSPDRPKPAHLERTKSQLALAEYLREQHGLLAELARQELADIGHFGRGISALTEDIAGRVRELDSTLLQLQGCAELTAAKLISETANMDRFRNEAAFARYVGVAPVPQSSGTAVGRVRASRSGNRQCNTAIHRIAIVQLRLKGPGREYYLRRRNEGDTAYTAIRCLKRRLCRIVYNRLRADYQHRNL

SEQ ID NO: 272713 - protein, 357 aa, unidentified
MPSNLRYLGLDVHAETIAVAVAEPDGEVRFLGMIPNRPEAVAKLIRKLGSRDHLRACYEAGPCGYVLYWQLTRLGVPCDVVAPTLVPIKPGDRIKTDRRDAVKLARCYRSGDLTTVWVPDAAHEALRDLVRAREAAKQDQLRARHRLGKFLLRHGLRPPAGVKPWMQRHRRWLDSVGFELGAQRATIADYLHEVDHAVARLERLERALDEAVAAAPAAQRAVIAALQCLRGSRFPHPRQLMGYSGTVPSEHSSGDRMHRGAITKTGNAHLRRVLIEAAWAYRFTPKCAKGLRQRQRGQPEGITDIAWKAQQRLCTRYRRLLARGKPTPHVITAVARELVGFIWAIGVAVERGQAMAA

SEQ ID NO: 272714 - protein, 364 aa, unidentified
MKNSAARKLKQVPKGYLVMGVDPHKERHAAVAMTQDFTTHSKFKFNNSREGFEVALEKARAEMVTTGSRGVIFAIETGGHYWRNLAYFLDKRGIPFHFINQFTLKRRREGKDLNRRKNDYRDSEVAAQLLCTGEFTDTKLQHGVYAELRAAYNAYRRLVKERTRITNLVKGLLDGIFPEFTQVFKDPCGLTALSVLSICPVPNIIAQMTEEEFVNAIRAKHQGRLMRKKLRALHYAARTSIGIEADAWSVSTELTFLVEKLQLIKRHIRNIDGTLIELVGETEEGKYLLSIIGLNYISVAGLLAELGCFRSYRSAKQLIKMAGSNPTESESAGKKRSYPNEQEGTPGAEILCMDIGHPDAAIQP

SEQ ID NO: 272715 - protein, 369 aa, unidentified
MGEYSEAFVAFDVAKKKHAVAIAEGGRTGEVRFVGEVENSPAAIERTIKKLGKKYDRLHVCFEAGPTGYGLCRQVRDLGHDCMVVAPALIPKRSGERIKTNRRDAVTLARLHRAGELTGVWVPDVVHEAVRDLVRARETAGDDLRRKRQQLLSFLLRHGRIYEGGGHWTLAHRRWLARQSFEHMAQQIVFQEKIDAIEDAAQRLRRLDEQLRTIVPTWSMARVVEAYQAMRGASFLVAVIFAAEIGDVRRLDTPPQLMAFLGLVPGERSTGDTVRRSSLTLAGNRRARRALVEAAWTYRYPARVSEALRLRLEGLPKAVRDIAWKAQIRLCTRYRRLNAAGKKPPVVVAAIAREMAAFLWAIGREVAPS

SEQ ID NO: 272716 - protein, 339 aa, unidentified
MRLYGGIDLHSSSSYLGIIDGTDNRVLRKKLRNEPQLILKTLQPFKEKLAGVVAESTFNWYWLVDLLMDEGYRVHLANPSAMKRYEGLKHSDDNHDAFWLAHLLRLGILPEGYIYPKEERPIRDLLRKRGHLMKLRTSLILSLQNIVERNCCCRINANTIKRLRENHVSPLLNGQEDLELSGSVSKEAIDFLTRKIKQIERFIEAKVKLKEEFIYLNTICGIGKILSLTIMLETGAIDRFPTVGDFVSYCRKVPSTWTSNGKTKGKGNKKNGNKYLAWAFSEAAELARRYDTLARAYYQRKAARTNFMVAHNALAHKLARAAYFVMRDRVPFDPEKLFA

SEQ ID NO: 272717 - protein, 340 aa, unidentified
MDNIGLDLHKRESQLCILTSDGEVVERRIQTSRERFTAVLGERAPARILVEAATESEWVAQHLEALGHEVIVADPNFAPMYATRSRRVKTDRRDARTLAEACQLAAYRRVHRLSPARRHVQVELTVRDALIRTRTRYVAVVKARVRREGLRVPGGDLEHTVAKLMALPLSVAVAAELAPLVALLEPLNAQIVAADARLAALAAADAVVQRLMTAPTIGPVTAVAYVATLDDVGRFATARRVAAYLGLAPTERSSGEQQRRGPISKTGNPRVRCLLVEAGWRILRSTQPAAAPLRAWAERIAARRGRAIAAVALARRLAGILYAMWRDDVDYRAAAISAVV

SEQ ID NO: 272718 - protein, 346 aa, unidentified
MTHSTTVGVDLAKNIIQVSVVSAHGKELFNRSFSRTKFAEFLGKQKPALIAFESCASAHYWARAAQRHGHEARIIPAKAVAPFRQGHKTDSNDALAVAEAARRPNIKEAPMKTVEQQGLQAIQRSRDLLIQERTALSNHLRGLLMEFGVVIPKGFASLRRRLPEILEDGDNEVPDMYRPTLHRLYVRFLELREDIELMDKQVKALVKQHPACKRLPALEGVGPISAVLLYASLGTGEAFSGSREFAVYLGLTPRQLSSGGKTNIVGLSKKIGNSRLRSVLILGARAYTYKLKEPKNSKDKWLKAIIERNGESRAAIALANKNVRTAWAMVTQGTEYQRRQQLEMAA

SEQ ID NO: 272719 - protein, 369 aa, unidentified
MAEDSTVFVGIDAAKAKHAVAIAEPGRQGEVRYVGEIATSPEAVRKLITRLAARHGKLHVCYEAGPTGYGLHRQIVGLGHACTVVAPSLIPRRPGDRVKTNRRDAVSLARLLRAGELTAVWVPDEAHEAMRDLVRAREAAVEDLRRKRQAITSLLLKHGRTFAGRKPWGERHRRWLQQQAFEHPAHEVLLQEMMLAERHARERLERIEAAILRLLPGWSLAPVVEALQALRGVSVVTAVTIAAEVGDLGRFASARQFMGYLGLVPGERSTGETVRRLGITKAGNGRLRRVLVEGAWTYRHPPRTGKKKHYVREGLPPAVRDIAWKAQTRLCTRYRALAARGKRLTVAVTAVARELAGFVRAIGREVKPA

SEQ ID NO: 272720 - protein, 338 aa, unidentified
MQTYAGIDLHSSNCYLAVIDEQQRRLYSKRLPNSLDHILTALQPFKEGLSGVVVESTYNWYWLVDGLQEQGYRMHLANPSAIRQYEGLKHTDDKWDAFWLAQLLMLGILPQGYIYPKAERPSRDLLRRRLLFVRHRTAHILSLQSMVQRCCGRGISGNAIKKLTPPEAAALFSDPQLGLTARFQVETIGFLTQQIRSIEKAVLPQVKLRPEFEILLTMPGIGKILALTIMLEVGDIRRFAKAGNYASYCRCVKSQKLSNTKKKGEGNRKNGNRYLSWAYVEAANYAVRYSPRANTFHQRKCAKTKKVVAIKALANKLARASFYILRDQSAFDEKRLYG

SEQ ID NO: 272721 - protein, 409 aa, unidentified
MRRLKDRVAGLDVHRDQVTVCVRTGSGGDKTLAKSRFKTTGPGLADLCGWLVEAGVELVVMEATGVYWKPVYYALEGAIDEMWVVNAHHVKNVPGRKTDLSDAEWLADVAAHGMVRPSFVPPPPVRELRELTRYRKTQVRVRGQEVQRLEKLLQDAGIKLSSVASTMSAQSVIAMVEALIAGERDPATLAQLAKGRMRTKIPALSEALAGRFAAHHGVVARRILDHIAFLDASIGVLSSQIAERCAPFATALSLLREIPGWDRLTAEVFVAEAGVDMSRFPTPAQLASWAGVAPASYESAGKRRPAGTRHGARWLRQALIESAKAAARGDSYLAAQHQRIARRRGANKATVAVAHSMVVIAWHLLSTGAQYQDLGADYFQGRQNPDAHTRQLVKKLEALGHHVTITPAA

SEQ ID NO: 272722 - protein, 370 aa, unidentified
MIRLARAMQYLINTELSSHEETRFEFNRSTGAIKLGIDVHQDFYVVVEQVEGGNPKPPQRFDKQAFLHWASKLKQRGAEVHAVYEACGFGFSLQRNLTALGIKCHVVCPQKLDERNKRVKTDGLDAKALCLKLDRFVQGNRDALALVRVPTEEEERSRAIHRQREQLVGARKRLEAQGRSLMVNHGVDPVQNWWKPRTFAMLPVPHWMRELLLNSQPILLALQEKIAVLTLQLQNAAAPNQPRGLGKMTSVVIDREIGDWHRFNNRRQIASYTGLCPGEYSSGNTRLQSCVTKHGNPRLRAALVELAWRLVRFQPNYKPIVKWRQILAKGALATGAARKKAIVAVARQLAVDLWRIKTGRLRAQELGLIN

SEQ ID NO: 272723 - protein, 369 aa, unidentified
MSKIVKYVGLDVHKDSITIAIADEGRDGNVRVYGKIHNDLGQIDKVMRKLISTNSELHCVYEAGPCGYPIYRHLKHQGIDCAVVAPALIPKKAGDRVKNDRRDAINLATLHRSGDLTSVYVPDETDEALRDLVRTRKDFTIALRKVKQQINAFVLRQGLSYPGKSKWSKAHLNWLMALKMPHPAQQIALTEYLDAMENHEARVKRLETAIVASCQTWRLLPVVDALQALRGICMVSAVTLIAELGDLTRFDKPAQLMAYMGLVPSEHSSGDTVKRGPITKTGNTHARRTLIESSQAYRVPARKSTAIRKRQEGLPEEVRNIAWNAQLRLCHRYRRLIAKGKNHNVVVTAIARELAGFIWAIARAVPIAV

SEQ ID NO: 272724 - protein, 345 aa, unidentified
MKHYAGLDVSVKETSVCIIDEAGKICREVKVPSHPEDLVDVLKDPAWRLERIGLEAGPLSQWLFSGLVEAGLPAVCIETRHTKAFLKAQVNKSDRNDARGIAQMMRVNLFRPVHVKTLSSQKRRALLTARKILQDKAVAIENDIRGLLRNFGLKVGVVGVAKFDERIRELVEGMAELVEIMEPLLAARQKLREMFTALHRKLLSIVRDDGVCRRLMTIPGVGPVISLAFCATIDVPARFRNSKAVGPSLGLTPVLNQSGESLRVGRVSLCGDDMMRALLYEAAQVMMTRVQKWSWLKAWAMNVAKRRGLKKAVVALARRLAVIMHRIWVDGTVFRWTKEAAPATA

SEQ ID NO: 272725 - protein, 372 aa, unidentified
MQQSIIYVGLDVDDTQYHGSAFDPPTGVVVAFHCRPTLKGLLRQLEKLRQHFSGCAFRLCYEASYLGYTLQRDLAYQGYHCDVVAPTSIPTPRSKQIKTDRIDAAQLAQFYANGLLTVLSIPEPTQEQDRDLLRTRQHLVEQQTALRKHLQALLRRNGFHYKAQTQSRTYWTLHHSCWLERTIAATSGSLKVNLELLLRHLAGLTAVLTGYDQQIEELANTERYEKPVKALICYKGIKQTFALTMITEIGDITRFAHPRQLVSWMGMDIREYSSGGTHHRYGITKHGNRYVRTAFIEANQRGYRTAIITKELKARRAHAAPDCVAIADRCLRRLHKKGNRLLFAGKHPNTVKVACAREMVGFVWESLRKVAA

SEQ ID NO: 272726 - protein, 421 aa, unidentified
MNQLSERPFTAYVGIDWASTKHDICLQVAGSEDRVFERIKHTPEAIEEWAQALYQRLGGPIAVALELSEGPIVSALGEYDFLVLFPIDPKRLARYREAFVPSGAKDDPTDAEFAMDYLMHHPEKLKALKPESVQMRKLRYLVEARDRIRGDQSRCVNRLIQALKQYYPQAVDWFNDHNTLVFCDFLKQWPTLAKARRARKAKLERFFKEHNVRFARLIEGRVAAIKAATPLTHDEAVIEAHRLQVEILVEQLRLTIKAMKCFDEEIAAIAAQFPDYELLYTALPGAGKVIAPRLLAAFGEDRDRYNCAAQLQKRSGIAPITKRSGNSTWVHWRFQCPKFLRQTFIDYAAQTINKSAWAGAYYRQQRDKGASHHVAVRALAYKWIRVLYRCWQDRTPYDESKYLEALRRRGSPLLKQLAEAA

SEQ ID NO: 272727 - protein, 378 aa, unidentified
MNRIIKIGMDVHTTNYTLCIFEPSFEHDGTVHCITQVKPEVKNIIHVIETFKKKHENEELNIVCGYEVGCLGYSLYHELKEKGVECVILAPTTMKTEKGGRKLKNDYRDAKMIAECLAYGGYSAVHVPTELDNSVKEFIRMRDDIKENLKSIKQQIIAFLTRNGKQFEGKSFWTRKHIDWINTVSFSDPLLQDTLKEYMIEYNHLCDRVETLDKQIEEISLKEEYVEKVQQLQCLIGIKTHTALSLIVETSDFKRFKKGNMYSAYLGLIPGDDSSAGHENKLGITKAGNSHLRKLLVEAAQGYTRGKVGFKSKDLKSRQEKCSSEVVAYADRANERLRRKYYRMTLRGKRYNVAKTAIARELACFVWGIMTDHIDLCN

SEQ ID NO: 272728 - protein, 400 aa, unidentified
MIHVGVDIGKSKHAAAAVNDAGACVMRPRFFTQDAGGFASLFGALEGQGGAASVVVGMEATGHYWKVLRHALVARQYRVDVINPLITSREASADVRGRKSDKLDALAIANVLRKGGYSPAPGELAATDTLKVLARHRKALVARGSDAKRRLISALDVAFPEAAKTLGDLFGAASLAVVRAFPSARLGAAADIRTLTSLFAKASGGQLGREAAEAYREAARHSLSLAMDTKGEEFVITQIVDEIRAAADQIDEVERRILAEPQPIIARLLGSIKGAGKIQPMAVAAELGDPSRFAGPDMAKKVLAYAGCDPRVRESGKWKGRAKMSKRGSPTLRNALYLLAGTIRLHTPYFNAVYKRQIAMGKHHNVALSHVVRKIVEVMCGMYKTNTPFMPQQPEVTPCS

SEQ ID NO: 272729 - protein, 369 aa, unidentified
MDVHSTNYTLCALEPVIGAEDRVFANITVTPDYKNILMFISNLKMKLGITDEYSIECGYEAGCLGYSLYNQLTAAGVKCVILAPTTMLTQQGKRIKTDARDAHMIAQCLAYGGYHPVYIPTEQDDSVKEYLRMRDDHKSSLKKIKQQTNALCLRHGHHYDGTKWTIKHIKWLRKIELSALYRETLDEYLATYDELVAKIERYDKRIEEIAAQENYCRKVKKLGCFLGIKTHTALSLIVETGDFKRFKKGNTYAAFLGLAPGENSSGDKIRRSGLSKAGNSHLRLLLVEAANGICKGAVGHKSKALKARQAGSSAEVIAYADKGNIRFRSKYYRMIRQGKKHNVAVASIARELACFVWGMMTDNIGTNAA

SEQ ID NO: 272730 - protein, 355 aa, unidentified
MIQPSDYLAVVGLDVGDRKTHYCILDLDGDLVVEGEVATREASLRVQFAGKGRMRIALEAGAHSPWISRLLVELGHDVIVANPRNVRMISRSDSKNDPADARLLARLAHVGPELLSPIQTRSQQTQVDLALVRARDVAVQSRTKLINTVRGIVKSTGHRVPKSSTLTFARKAKDACPEALQPALLPLLRVIEELTREIELYEKLVVHKAEAEYPETKAIRTIHGVGHLTSLALVLLLNNDRSRFRKSRDVGCYIGLRPKQRESGLRAPQLGITKAGDPLLRRLATQSAQYILGPFGKDSALRRWGLSLALRGGKNAKKRAVIAVARKLVILMHRIWITQEVYEPLRGVTLKSTAA

SEQ ID NO: 272731 - protein, 350 aa, unidentified
MIIIGCDYHPSFQQITFVDTETGELQERQLQHREEAEKFYRDLAAQGMKVRVGMEASGHARWFERLLAELQLELWIGDATVIRAKRGRKPKTDRQDAQHILKLMLKDDFPKIWVPSGENRDLRQLLWHRHRMVQARTRLMNQLQAVALNEGLRCKKKLWREKGRKQLEAIRLAPWASRRREDLLQLLDGLNPTIAELTEAIDQEVEKSAEARRLMTHPGVGPLTSLAFVLIIGRAERFQCGKQIAAYLGLVPLEDSSGERRRLGHITKQGNSLLRFLLVEAAQVTARSLPEWRSKYVHLTMRRGRKIAKVAMARKLAVRMYWMLRKGWDYGQLTKFGSHAGKPGPGDGVR

SEQ ID NO: 272732 - protein, 466 aa, unidentified
MRQRKQAVKRSMTTTPSNPLELLNPNAAGIDIGAAQHYVAVPAGRDGDGQDVRCFNAFTADLYALAHWLKACGIDTVAMESTGVYWIPLFELLEAQGLQVRLVNPRSVKNAPGRKSDVLDCQWIQQLHTYGLLSGAFRPEEQICILRSYVRQRAMLISSAATHIQHMQKALDQMNIKLHQVVEDITGATGMRIIRSILDGQHDALSLAQLRDARCKHDVATIAASLHGNWRKEHLFALKQAVELFDFYQSQITACNRAIEEHLHSFEAEDSSSPGSPAVAGKGPKHQFGFDAHGHLLRISGVDLTRIEGINVTTAMGIIAETGLDMNRWPSEKHFGSWLGLCPGTNVSGGKRLSSRSKPTANRAAHLFRLAAYSLHRSKGAIGAFLRRKKAQLGAPKAITATAYKIARIFYNMLKHGTEYVDLGQDYYEKRYRDRLLNNLKRNAQTLGYQLVQLSEKTYEMVNNPV

SEQ ID NO: 272733 - protein, 430 aa, unidentified
MDQVEPVGAGSVESFGSLTHFGGFDWAMNEHQFAMVDREGKVLMNLRFADDAEGWASLREAIAPYPRLGVAIETSTGPAVERLLELGVVLYPMNPKAAERFRDRKAPSGVKSDFLDAWCFADALRTDGHGWRQLRQSDPLTMELRILCRDQISLIGQRTALVLQLKAALHEYYPVALEAFDDWTKQGPWEFVLQFPDPHRLASASKHKWEKFLHTHKLYRPETAAKRLELFKKAKAFASPSQAVTSAKTLLAVSLAKSLCTLADQLEMYRKRIGELFNNHPDRDCFGSLPGAGEKIAPRLLAELGSDRARFESHESLQMYAGTAPRTRQSGNSSVTCIRWLCNKTLRNTVHHWANLSRPGCAWAEAYYQQKKKSGMSHAAALRCLGQRWLKILWKMWQTRTTYDEALHTRNQIKHGSWVITLKQSPATAG

SEQ ID NO: 272734 - protein, 350 aa, unidentified
MPGKFDTAVVTIGIDPGKNTLHLVGLDARGGIVLREKVARARIVSRLANMPPCLIGIEAGMGTHYMTRELLALGHGVRQVPPVYAKPFRQTHKNDFRDAHAVAEAVQRPTTRCVPPKTDEQLDLQALHRVRSRLVAQRTAIINQIRCFLLEHGITVRQQLHWLRHALPDILAQRTDVLSPRMVRILEDLAQDWRRLDDRIEAVSGEIEGLSNNSEPCQHLMTIPGIGPIISSAVVAAIGNGSAFTRGRDFAAWLGLVPKQISTGDRTILGRITKRGNRYLRMLFLQAARVVLLRPKNWMKHSFGPWLTAAAQRLHHNVLATALANKLARIAWSVLVQDRVYEARLSGAAI

SEQ ID NO: 272735 - protein, 296 aa, unidentified
MIIIGVGYHPSDQYIAFADSETGECGERRLNHGDGEAEKFYRDLQQSAVSVRVGMEATGYSRWFERLLAELDMELWIGDAAKIKTKRVRKQKTDRNDAQLLLGLLIENRFPRVWAASPENRDLRQLLWHRHRLVQMRTRIMNQLQALAMNEGQRRKKKLWSAQGRAQLEKLPLARWASLRRQDLLELLDRMTPAIAELTAAVEQEAKKRPEVLRLMTHPGVGPITALAFVLIIGTPERFPCGKQIGSYIGLIPAKDSSAGRQRLGHISKQGNALLRYLLGEAAQAAVRCDADWRRR

SEQ ID NO: 272736 - protein, 342 aa, unidentified
MTTFAGLDVSQAKTTVCIVDERGLVTWRGTCVTSPSAIAETLAAQASSLERVGLESGPLAPWLVHELRALELPVVCLDARHARAALSVQINKSDANDADGLAQIVRTGWYREVEVKSVESHLVRATLGVRKQLVGMRTEMTNQIRGLMKIFGLIVPKGSGARFEASVRARVAEKAELGVVVEPLLAAWRALDGQVEALERQLVRRARRHQVCHRLMTVPGVGPLTALAFVTTIDDPIRFRRSSSVGAYLGLTPRRHQSGERDVSGRISKCGDRLTRSYLFEAANVLLTRVERWSFLKAWAFRLAKRSGPKKAKVALARKLAVLLYRLWRDGTTFRWTKEAAA

SEQ ID NO: 272737 - protein, 342 aa, unidentified
MSGMIIGLDLAKSVFQVHAVDADGKVVITRKVRRSQMLEFFARLDPCLVGMEACPSAHHWARELSALGHEVRLMVASYVKPYVKRQKNDMVDAEAICEAVTRPTMRFVPIKSESQQAILMVHKTRALLVRQRTMLVNALRGHLTEMGVVAPKGIRRHADLVERVLAHGADEIDLPPLVRDIVFSSARQIDSLNTEIKELERKILEWHRTSEASQRLATIPGVGVITASAMAASVVDPAAFRSGRDLAAWLGLTPRSNSSGGKERLGRITKAGNRYLRTLLVIGATAVVGFSRRSNEGPLLSWVRKLLQAKSARLTTVALANKMARICWAVMARKTIYGETAA

SEQ ID NO: 272738 - protein, 357 aa, unidentified
MTTMTTTTPGVTGGVDTHGQTHHAAVLDHLGRQLGDREFPTTPSGYRSLLSWVASHGQLERVGIEGTGTYGAALTRQLRAAGVQIVEVDRPDRKARRAHGKSDPLDAYSAARSALAGTATGTPKGRDGRVEAIRALRVARSSAVKARSQTTNQLKSLLITAPAELREQLRALTTTALIATCARLRPTGDIADPETATKTALRRLARRYDYLSTEIGEADAELRALVTAAAPRLIALPGVGPEVAGQLLTTLGDNPDRLRSEAAFAHPCGVAPIPASSGRTRRHRLNRGGDRAANNALYVVVLGRLRYDARTRAYAARRTTEGLSKPEIIRCLKRYVARELYNALQPTQQSKDLAQTP

SEQ ID NO: 272739 - protein, 344 aa, unidentified
MRIAILGVDLGKNVCSFVGLDQAGAVVMRRRARRDTLIKFVSNLPACVIAMEACCGAHHLGRLFAACGHEVRLMSPEYVRPYVKAQKNDDRDAEGIAEAATRPTMRFVEVKTQAQLDMQTLHRSRDRLVGERTALINQLRAILLERGIVVPQGKRKLECYLVALMEEPEGGALTARMRMLIADMQAQWLGLDRRISAFEAEFVAFAKEDEDARRLTTIPGVGVTIATALIAAIGKAETFAHGRDLAAWLGLVPRQWTTGGKPRLMGISKRGNKYLRKLLIHGARAALPHVAERDTSLGRWAKGLLARVHPNVAVVALADKLARICWAVLRSGQNFSAKGAPLAA

SEQ ID NO: 272740 - protein, 410 aa, unidentified
MEVLYPNCAGMDVHKETVVACSRRVIAGKAVCEVRTVQTTTKDLLALSEWLGSLGCTHVVMEATGVYWKPVWNILSDGDFELTLANAAHVKNVPGRKTDVNDATWLAGLLAHGLVRASFVPDTQTQEQRGLLRTRKQITRERASHVQRLQKTLEGANIKLDSVISDIVGATGRAMIEALIAGETNPAKLAVLADRRIKASPETLVEALRGRVTKHHRFLLRLHLEQIEALDRTIDKIDTEIEANLDPFRPLIPVLTSIPGIGELAARVLLSEIGMDMSRFPTAGHLISWAGLCPKNDESAGKRRSSRMRKGAPWLKTTLIQCAWAGTRKKDSYLRAQFHRLRARRGAKKAIGAVAASMLTAAYHMIANGTFYHDLGADHFERRDKPTQMKRLLAKLQSLGYEVEVKTLPT

SEQ ID NO: 272741 - protein, 340 aa, unidentified
MSHTVVGIDIAKRVFQLHWVDHETGEIFSRQLKRDKFLLHFANKKSCLIGMEACGGSQHWARELLKLGHQVKLLSGKFVKSFVMGNKGDAADAKAIWIAVQQPGVKPIAIKSEQQQAVLALHRMRQSLVKIRTMQTNALRGLLTEYGEVMPMGKSALSKGIAPALDAVAKRLPGIVMEALHNQWQRICELNKQIIEIEHKLQSWLKVDHAAKVISEIPGVGLLTATAAVATMGDPRAFKSGREFAAWLGLVPGQTGTGGKTKLLGISKRGDTYLRTLLTHGARSVLTHAKQPNPWIEDLLKRRPSNVVVIALANKMARMIWAILAHGRTYQQDWRSVNPA

SEQ ID NO: 272742 - protein, 330 aa, unidentified
MNLIGVDVDSIFLVCQIQRDGKSSSPAKFDNTSAGHRKFIKWATKRGATARVCLEATGVYSLPFALSLHAEQHIEVAVVNPRAIKKYADSIMQRGKTDLMDAAVILDYLQRMPFKQWQPPSEETLEIQHICRRVVQLNVELNREGNRHKAAKRLGTLGKVVAHDTELTMRHLQRRIDALEQTVLNLIQRTPKLQQLLELLVTTTGIALKTGPRILAELLTLPTDMSAKQWVAHAGLDPKPHESGSSTNKPRRISRQGNQYLRNALYFPALVASRRDANVKAYYEKMINAGKKPLQAIVSIMRKMLLSIWGMFKYGQAWDGNKFYVIENTA

SEQ ID NO: 272743 - protein, 315 aa, unidentified
MTTITESYVGIDISKDKLDVAVVGNKEVVQVSNTKRGIAKWVTEMLKLNPKLIVVEATGGYEEAVVLALFEAGLPVALVSPQRVRQYARASGLLAKTDGIDAQTLADFGEKMQPRRYEGKSEAARRLSRLVGRRKQLGEMLKAEKNRLRTANAEIQNSLATVIGVLKAEIKRLDQEIMKFMKEHADFGEQEKLLRSAKSIGPVTAATLLADLPELGKLDRKEIAALVGVAPMNQDSGKKRGYRKTKGGRPDVRSVLYMSALSAIRYNPVIKAQYDQLVKRGKLKKVAITACMRKMLTILNAMMRDQVPFRETVMA

SEQ ID NO: 272744 - protein, 486 aa, unidentified
MPSPIPDGQGQPSLTLHQYGVGVDCHSRFFQVCVLIPDGTQIVKIEQKVPALWPALRAAKAWILETLRTHGLDVSPSDLRYTCESTGEYHMPLCLAWRGHPAIINPSDTSHVRRKTDRLDAVKLAQHSLHGLWRESWIAPDEIQELRVLANQRSKLVAERSRLTNRINGDLLRFGHTVGQLGKINGSVVRALIEDFCTTGSVSIHRDHFSDTRIPAGVIFGFDQRWKRIDALDQEIKSIEELCMKKTDALTWRIGASRTASGCQLRSNLQSIPGVGTQTVTTWLGEVGDITRFASVNNLLAYAGLDPSGQISAGKVTGTKTRKGNARLHGALRHAARAMLSRAPSCKFSMWARGYMGRHSRARKSKAIRALARRVGKALYYCHLKNEPFDDSGYHALLSESSYPFCPTEEMGLSARVVGILKGNGLHTSRQVVDAFYSDLGRRPGCGKVTVQAVATWITSHTNRSRDGIRRPKGTKPSKSLPAPEG

SEQ ID NO: 272745 - protein, 351 aa, unidentified
MEEYIAFDSHKRYTWVDRRDRGTGKSKGHRLEHAPGAVRDYLSGCAEGTAVAVEATGNWYWIIDEIEQAGLLPQLVHPRKAKLMMGLTNKTDKLDAQGLNRLQQNETLPTVWIPPGPLRDLRELTRTRLVLVAQRTRLKNRLSATLAKWGVPASEYSDPYGKKGRQELAGHLQRLPEQTRWVSEQLLAQLDFVSGQVRELEQRLEKLVDVNESMQWLLSLPGVGVILAATIALEIGQVERFPDAMHLASYAGTTPRVHASGGKVRYGPLRVDVNRYLKWAFAEAGNAIAVNHTRHPERHVSQLYLRLRMRKGHHKAVGAVARHLAEASFHVLRKKQVYRDPGLGRGRTSPG

SEQ ID NO: 272746 - protein, 353 aa, unidentified
MEYIAFDAHKHYTLASVARPDGGLVREQRIPHASGALQQFLQRCERGSPVAVETVGNWYWIIDEIEAAGCVPQLVHARKAKLMMGMINKTDKLDARGLNRLQRAGTLPTVWIPPGELRDQRDLPRTRMVLVRQRTQLKNRIHATLAKYALHDREVSDLFGARGRALLRQRLALLPPHTAYATQHLLEQVEALDRHVRDFEHRIQAVFKLTPAIQLLMTLPGVGLVLAVVIALEVGDVTRFATAEKLAAYAGSTPRVHASGGKTRFGRLRPDVNRYLKWAFVEAANAICLNRGRAPGRRVSRLYERVARRKGHPKAIGAVARHLAEATYWILSKQEPYREPKASAVSPTGDQRG

SEQ ID NO: 272747 - protein, 387 aa, unidentified
MKNVYCKVACSGMDVHYEFSKVTFRDEAGRVVRRERLDHRDRERLRERVARWPQGLPVVLEASFGWGWLSDLLEEAGLEPHLSNCYKVEQMRKARGWVKTNDKDADLVSLLPFEASSWWEVWRAPPEVRDQREQMRFRADLVALQTCVKNRIHAVFHRHGIFHDFSDLFGGQGRAFLSELCLYNPTSLPPQAWLALRGQVRLLDHVRRQLADIERVLHRQWTTTPLVRRLKTIQGIGLVLAHVLSAEIGRIERFGNHKRLASYSLLAPRANDTGQADPTTAPLGRHLGARGNRTLKWAFIEAAHGAVRSGGRWRAMYDRVTQGGRKDRNRGYIKVARELVKVVYVVWAKGVPYSSSPPARPGRGKNQKKSRSGTGQLCHPMVHALPA

SEQ ID NO: 272748 - protein, 317 aa, unidentified
MDVLGIDISKADFHACLIQGTNYSKKSFPNGPAGYRQVQSWLKNRRCTQVHACMEATGAYWEGLAKALYDLGKTVSVINPAQMTFFARSQLRRTKTDAVDAEMIAEFCLERRPRAWVPAPEEILELRGLLTYRTHVIQEAVSLKQMVSQIRVGTELHKAHLQQLKALDKTLAAVEKQLRSHARAHESIGKAVKALTAVPGLGETTALAIIAKLPVERLRSGKAAAAYVGLAPSERQSGTSVRGKPRICKIGNASLRRDLYMPAIVAMRFNPILKAFADRLKERGKPGKVIVVAVMRKLIVLAFSILKGLHPSADVMA

SEQ ID NO: 272749 - protein, 342 aa, unidentified
MTPSPAPCYDLFVGIDIAATTASVAWMASDRKVSRALTIDQTPQGFTSLQQRLLTTGHLAQSILVVMEATGSYWMTLATTLAQAGFAVSVINPAQAHHFAKALLKRAKTDAIDAQTLAQLAALLRPAVWNPPPAIFVELYQRLTERESLMQMRQQLLNQLHALAHCSSVIASVHARMKHLVESLTKQIIEVEAELDEALTLDPTWAASARRLQTITGIGPLTAAWLLVTTLNFTLCDTVEELTAYAGLAPHPFQSGTSVHGRSCIGHTGNAALRTAVYLATLSAAQHNPVIKAFYDRLRAAGKPMKVARCTAARKLLHLAFAVVKNEEDFDPLYAHKQQKAA

SEQ ID NO: 272750 - protein, 370 aa, unidentified
MATPPPGVTVIGGVDTHKHTHYAGAIDDQGRLLGHREFAATDDGYRQLLAWMRSHGEVRSIGVESTGSFGATLTRYLTAAGVEVIEVNRPNRLARRMDGKSDRLDAEQIARAVLGQTSTAVPKTKSGIVEVIRTLRVTRSSAIKARTQAFNTLWGVMIGAPSPLRDELVVLTKRTLVNRCLRLRPETDDLLSLAGDPQRMLTAGIKTALRDLARRWKALDEEIKALNKNIASLVRTAAPELVELHGVGIEIAGQFLVTAGDNAERIHSEAAFAKLCGVAPQPASSGRTTGRHRLSRSGDRAANSALYIITIVRMRHHRPTRDYVERRTAEGRTKREIIRCLKRYIAREIFNSLPAATRTSPPAHEPRTAP

SEQ ID NO: 272751 - protein, 314 aa, unidentified
MSQPIFVGVDVSKDTLDVCLLPSNEHFKVNYDPEGIKQLIQKLRPLPLQVIVMEATGGYEKRLAAELCAAGQDKIYIVNPRRIRDFARSTGRLAKNDSLDANILAFYGQIFQIKPQVLPSEAEEQLKDLVRRRQQLVNNRGAELNRLQQTSTPYVSSSLKRIIRVLDKEIKALELHIQQIIKNNPVWYDKAESLQQVKGVGNTTACSLLAALPELGQLNRREIAALAGLAPFDRDTGKFRGKRMISGGRADARKALYMATLAASKHNPVISGFYQKLVRAGKPKKLALTACMRKLLIFLNVILKNYNNSVCVNS

SEQ ID NO: 272752 - protein, 344 aa, unidentified
MQYYAGLDVSVKETSVCIVDKTGKVIREVKVATKPMAILAVLTEQALAIERIGLEAGPLSQWLYSALVEADLPVICVETRHMKAALSAQINKSDRNDARGIAQMMRVGLYRPVHVKTLASQKRRMLLTSRQLLQSKALDIENDLRGTLRNFGLKVGMVGTVKFEARIRDLVAEHPDLAAIVEPLLIARRVLREQLGVLHRQLLEIVRHDEVCRRLMTTPGVGPVVALTFRATVDVPSRFTSSKAVGAAFGLTPRRQQSGEIDRMGSISKCGDAMMRERLFEAALVLMTHSRKWSWLKAWGMKIARHRGMKRAIVAVARRLAVIMHRMWVDGTEFRWSTKEAAAA

SEQ ID NO: 272753 - protein, 364 aa, unidentified
MKVQRTSIGLDVHARSVVACGLDGDTGEVSQRRLCPVHREILEWIAGLPAPVAVTYEAGPTGFGLARAARAAGVEVMVCAPGAIPRQPGDRVKTDARDALKLARLHAAGQLRPVVVPAPELEALRDLVRAREDLRGDLMAARHRISKLLLRRGLVWAGPGETWSERYLGWLSRVSLDAPLADVVLGEYLACHEALLARRERLDALIAEQAAREPWAPTVARLRCLRGVDTLTAVGLVAEIGDIAAFAHPKHLASYVGLVPSEQSTGERRRQGTITKAGSGHARRLLIESAWHYRRAPRVSRTLRRRQAGQPAATIDAAWRAQLRLHRRWTHLDATRGKKRTTVAVAVARELACFVWEIARQPEG

SEQ ID NO: 272754 - protein, 348 aa, unidentified
MVLIGCDFHPSWQQVSWLNRETGEAGDQKLVHEPGAVEKFYRQFPAGTRIGMEATGNCQWFVELMMRLGHAVLVGDAAKIRASDSRQQKHDKRDARLLVQLLAEDRFPQIWVPSREQKDLRQLLIHRYKLVRIRAQVKNGLQHLAMNQGVLKKRKLWSRAGEKVLRELPLAPWASRRREDLFKVREMLNGQIDLLDRAVVEAAEKNEKARLLMTQPGVGPITSMAFVLTMGDVSRFQRGKQVASYLGLIPREYSSGGHQRLGSISKQGNTFLRMLLVEAAQGAVRCDESFRNEYLHRCHSKPKGVAKVAAARKLAIRLYWMLRSNTKYPEIVHVESSSRVALVVPHAG

SEQ ID NO: 272755 - protein, 356 aa, unidentified
MPCSNLCLDRGIIVGVDTHKDQHVAVAVDRLGARIGQRSLPTTNTGYADLEHWARDFGEINAFGIEGTGSYGAGLMRYLRDQGHRVVEVNRPDRSTRRRLGKSDPTDAEMAARAVLAGVARDQPKSGVAEVEMIRMLKSAKDSAMKSRTQAMNQIKSLIVTSPVEIRELFRGCKSAHLVSRCANMHVNKLETPAQAAKFTLRSLARRYLLFTYEIESLNTGLKHLTSAFAPSLLQPLGIGVDTAAALLVTAGSNPDRLKSEAAFAALCGVSPIPASSGNTNRFRLNRGGDRQANAAIYRIVLVRLRYDDRTVAYLRRRIADGKTKSEAIRCLKRYVAREVFAILHDIGQKLTTQGA

SEQ ID NO: 272756 - protein, 359 aa, unidentified
MEYIAFDAHKHYTVASVERSTGEVVREVRLAHRRGDIREFLAQWTPGSPVAVETVGNWYWLVDEIEEAGMTPRLVHARKAKLMSGMINKTDKLDVRGLNRLQRTGTLPTVWIPPAEVRDQRDLPRTRMVLVKTRTRLKNRIHATLAKYALTVTDVSDLFGKQGRAVLTGALAQLPPHTRFTTDHLLKQLESLDEQIAEFEARMREVFKKTPALEWLMSLPGVGFILGIVILLEIGDVHRFPDAEHLATYAGTTPRIHGSGGKIRFGRLRPDVNHYLKWAFTEAAEVICQHRARWPQRHVSQLYTRVRHRKNHPKAIGAVARHLAEATYWILLKEEPYQEPKRRSGRVHEGVSAGNPLSP

SEQ ID NO: 272757 - protein, 419 aa, unidentified
MPFKIFRKNCCGLDVHKTWIYACIGITDTNGRTEYKQARFSSFTKGLQELADWLAKYSCTEVCMESSGKYWIPVFHVLEESCYVVLAHPKYTKPQKGNKTDRKDAKWICDLFMCDMIKPSFIPPPDIRHLRDLLRFRTKMTNQITGMKNRALNCLTVSNLKLDDVFTDVFGKSSRSIIQQILDHPGETFDVTPFVDRRCKHPIEEIQAAVDGAISHEQATKLKICLAFIDEQQKRISELDTEIFRLAEPHTTVLDFIRTVPGFSKEPLTAIRLLSEIGPDMSVFTTSKHLVSWAGCCPRNDQSAQKVKSTRISRAGSYLKPLLVQIANALLKSKKHPEFKERYRRIKARRGHKKAIIAVCRMLLTAIWNVLSKLEPYSAKGYLADKLTEHSVVITKSEGLALLRKRGYIFRDEIADTGS

SEQ ID NO: 272758 - protein, 366 aa, unidentified
MVSNISNNKKARNSDFSVKNSYEGKTVYVGIDVHKRTYSVVTVVEGIVVKKWQTLAHPTRLALQLYRYFPGASFETAYESGFSGFVLHRTLEQAGIPNIVVNPGSIEIAVHNRVKTDKRDALKLATLLEASRLKGIRVPSVEQEQQRLLTRTRQQLVEDRSAIKNKIRMKCHQMGLIDPDEPREMSHKLVSEMLTKTPSPEFTLAIEAYWQVWKSIDTQIKKIEQNLSEQAAIDPNETIYRSAPGIGPLSARILSNELGDLSQFANERQLFSYTGLTPSEFSSGDTVRKGSITLQGNKRVRYILNQAAWRALKKDRDLNEFFERLHPRTGKKRAIVAVARKLIGRIRAAFKTGKPYQLNPMILQTA

SEQ ID NO: 272759 - protein, 332 aa, unidentified
MKKIIHFIGIDVSKETLDIALIRNNDKSNIYSSKVTNNKTGFKKMKQWLKAEKVSLQEAVFCVEHTGMYSKPIGQFILSLQGNLWMEMSLKIIRSMGVQRGKNDKIDAMRIALYAQRCQDEMKLYEPPRPIVEKLRTLLQLRKRLISSRNSLQVPCNELTTIDEQAGKEATRLIKSSVAALEKNIDMINEEIDELISSDEQLAHEFEIGTSVPGIARITLAYIICFTNEFKNYSGGKQLACYCGVVPFEYTSGKSVRGKPHVHNMANKFLKKLLHMGAIAAVTYYDEFKCYYKRKVEEGKPKMLALNNVRNKMVLRLAAVIKNNKPYQKIAA

SEQ ID NO: 272760 - protein, 398 aa, unidentified
MTESSDYESVQVFIGVDVGKDTHHAVAINRSGKRLFDKALPNDENKLRSLISDLKQHGQILLVVDQPATIGALPVAVARSEGVLVGYLPGLAMRHIADLHAGEAKTDARDAAIIAEAARTLPHALRTLKLADEQIAELSMLCGFDDDLAAQTTQASNRIRGLLTQIHPALERVLGPRLEHPAVLDLLQRYPSPEKLASLGEKKLAAQLCKLAPRLGKRLAADIAQALAEQTVVVPGTNAAAVVLPRLALQLITLRKQRDEVALEVEQRVLAHPLYPVLTSMPGVGVRTAARHLTEVACRAFASAAHLAAYAGLAPVTRRSGSSIRGEHPSRRGNKALKRALFLSAFAALRDPLSRAYYTRKMSQGKRHNQALIALARRRCDVLFAMMRDGTFYTPQGS

SEQ ID NO: 272761 - protein, 339 aa, unidentified
MEEVSTIGLDLAKRVFQVHGVDRAGKVVVRRSLRRGAVLVWFSKLTPCLVGLEACGSAHYWARELGKLGHAVRLIPPSYAKAYVRRNKNDAADAAAICEAVSRPSMRFVATKTEEQQAAAGLHKVREMLVKQRTMLMNQLRGLMAEFGIVVPQGPGHIRKLLLILEDRTDQRIPELLKQALLLTATSLRSVQEQEEAIDKQILAWGRRNRTCRHLITIDGYGPILSSAMAAIVTAPEAFASGRDFSASLGLVPRQNTTGGKAVLGPISKRGNGYLRRLLVNGAMSVLSSKRARQDPWLMKLMATKRRKVAAVALANKMARIGWAVMMRQEDFRPRPIAA

SEQ ID NO: 272762 - protein, 354 aa, unidentified
MQIQKQELWVGIDVSMKSFHAALDFPMLFSNQQKIPVSDLPNREFKLTSAGVRSFLNWIQLQQSDFFAQYSDEEQNNLPVAFLMEATGLSSTTLKKMLYASVPDAKVIVANPEPIKAFRISLNIKNKTDKSDAQVIARYGRERSPDPKPEMSVEMTKLRELARTRLFLKDQRTAIDNHHDNIDSSLPKRMCTAVVKAINKEIDGLDREIEKIVSDTPEIKHEVEIMTSMPGIGIGTAVVLLCELGSLKNYPTRQKITAMCGLNPAKKQSGTSVNSTRLSKKGSPVVRRFLYMCSKTAVSRIPLLQDLYNRLLARGNTRMQARCAVMRKMLLILRGMVIADKEFDKNYKNISKSA

SEQ ID NO: 272763 - protein, 341 aa, unidentified
MQIHSIGIDLGKTTFHLVALGAAGKVLVKKKFTQKLLLAYTANLQTSLIGLEACSGAHFLGRALRKQGHDVRLIAAQFVKPFVKSNKNDFIDAEAIAEAVDRKNMRFVPIKTDDQLDLQAIHRIRDRLVSRRTAVINQIRAFLLERGMVFAQKPAKLKAAMADILENAEADLTPLMRNLIDTLWGEWKTVEQQIEELNDELERISAADAGCTRIRQIPGIGPVVATAIVAAIGNGAAFRKGREFAAWLGIVPRQYSTGGKAKLLNISKRGNVYLRKILIHGARAAVLRIKRDRVPIGAWLDRLDARAHKNVVVVAMANKLARIAWAVLSSGNEYRPTALPA

SEQ ID NO: 272764 - protein, 387 aa, unidentified
MSRVVIGVDPHKASNTLVVIDERERVLGQQRFANDRAGYRSMKTFARAHRDRVWAVEGARGVGAGLAQRLVAEGEPVLDVPARLSARVRALGGGSGRKTDDADAFAVAVAGLRARDLQVVRPDDTIEILRMLSTRRQEVVALRIATVNRLHDVLCQLIPGGAKRHLSATKARALLSGVRPRDAVGKARKRLALDYLGELDRLDSRLKELKKSLAEVLAAHPTTLQEINGVGPINAAKVLAETGDVRRFPSRHHFASYTGTAPVDVSSGDNNRHRLNRGGNRRLNHALHIAAVVQYRMPGEGQDYYRRKRDQGKTHLEALRCLKRRLSDVVYRHLVDDLADRATGSPGGQVGASLQSSAADLIPMASTSEQSLPGLANDPTPDLAVVS

SEQ ID NO: 272765 - protein, 459 aa, unidentified
MFRREFIYIGVDIGKFKHVAGFISKTLLERHQHFEHCPAFVFEQSREGFRALVERIRSYCPLEHCFIVMEQTGHYHRPLLQYLLELDIPVYVMHVQNRQGGMLKTDKRDALGLANHLYNQLALGVQVENKLQAIRRAVPPSEAAAQLKGLMRHRYELAIEATQRKNKLTAICDELFPEFTQVFKNPNLPTALDLREKFSTPHAVATATLVALRDVRKKNYPSEAQLILLQQLAAQSIGTKNLARQRGLLLEQELLIKEMRLIQEHMERLDMEIAQVVEHSREGQILLSIPPICPMYAAAILATIGHIANFEDSGHLKAYFGWAPKRAQTGASFDRARLTQGGSREMKKVMYLVAWNAVKSETEWASLYKRLVPRLCTYDERTQTYKGRGKALGHVIGRLITLIYALLKQDDEILSHLSPGAEPPEPILYDPDLHKRHRTGHYRPIRKEQTTNRIVQVEP

SEQ ID NO: 272766 - protein, 446 aa, unidentified
MKKSSRMSVIHPHAAGVDIGAEFHVVAVPPDADAAPVRTFQRFTGDLHRMSDWLKTCHITTIAMESTGVYWLPAFEIPEAAGFNVILVNARDAKNVPGRKTDVNDAQWLQKLHSFGLLRASFRPEHDISVLRSYLRQRERLTEYRAAHIQHMQKALMQMNVQLHHAVSDITGVTGLSIVRAIVSGERDTSVLIQYRDVRCKKTPEVLQQALTGNWQPEHLFAPEQSVAFFDFYQEKIRECDDQIETSLLQLSTGTEEPEGVLPSARHRTKQPNQLSFDVRPLLWKITGADLTQIHGFGPYLALKFVAECGTDMNRWPDASHFTSWLCLSPGNKISGGKVLSSKTRRSSSRIAAALRLAATTIGRSDTALGAFYRRLSSRIGKAKAVTATARKLAILFYNALKYSQKYVDPGADYYEECYRNRVLDGLKRRAKSLGDSLQQDPELCV

SEQ ID NO: 272767 - protein, 348 aa, unidentified
MKNKSFVGIDISKNVIDVSIFREDTNIKMFPHEVFNNTRKGFGDMCSWLKKSRVVLSQALFGMEFTGCYSLDLEKFLTSKNYSFCMLSTRIVKHHPMGTIDKRDKNDSAKIADFLYRYDGTECAKPYKLPSKAMQQLKQLVNERKFLVEQRTNFMNRMQMFETKEDSAMYESYIKKLNHDIEKIDQEECELMSKEEDVFDTFQNLLTIPGIGFVNATNIIAITRNFTAFDTARQYARYVGVAPCSHTSGTSVKWRARPSAHCNGQVKADLSMAALRAVEYDVEMQMFYNRKLGGRKDSDTKRKALNAVKFKLIRRMFAIGKQKRKWEVLNTSDGRKNLHIEKSKASEL

SEQ ID NO: 272768 - protein, 377 aa, unidentified
MKRILRIGMDVHSTNYTLCAMEPVIGEDDRIFANIQVTPDYKNILMFIENLKMKLGLDAEYDIQCGYEAGCLGYSLYNQLTAAGVKCVILAPTTMLTPQGQRVKTDARDALMIAQCLSYGGYHAVYIPTEEDDSVKEYLRMRDDHKTALKKIKQQISALCLRHGYHYEGTKWTIKHVAWLRKLELLPLYRETLDEYMASYDEQTAKIERFDKRIGELASQSSYEEKAKRLGCFLGIKTHTALSLLVETGDFSRFAKGSTYAAFLGLAPGENSSGEKINRTGITKAGNRHLRQLLIEAARGICKGAIGHKSRELRARQSGNTAEVMAYADRANTRLRSRYYKLIRHGKKKNVAVAAVARELACFVWGMMTDNTGMKMA

SEQ ID NO: 272769 - protein, 350 aa, unidentified
MVTLGGDSHKQTHTLVAVDDNGRQLAQKTSPATKTGHLEVLQWARRWPERRWALEDCRHVSRRFEADLLVAGEVVVRVPSKLTGGARKVARTSGKSDPIDALAVARAALREPDLPVAKLEGPGRDVRLLLDHREDLVGERTRIQNRLRWHLHELEPEAAIPARMLSRYHSLTEIEQRLGRHRGVVAEIALELVVRVRELTRRINELEADIEHRVGGLAPTLMSLSGCGALCAAKVVGEAAGVSRFRSRAAFAMNNGTAPVQASSGNQKRHRLNRGGNRQLNVAMHRIAITQLSRPGPAKDYVAKRLAAGNTKTEAIRALKRRISDEVYRRLLQDERASLTNNVSSSDAAA

SEQ ID NO: 272770 - protein, 366 aa, unidentified
MKKISTVAVEGIQIFKDNQLTIGLDLGDRTSHYCILNEAGEVILEQELPTTTKGIEPVFSKIPRSRIALETGTHSPWISRQLAQLGHEVIVAHSRNVRLISESSRKDDRLDARTLARLARIDPTLLSPVRHRSAKAQIHLTVIRARAALVSARTALVNAARGLTKSYGARLRKCGTEQMTRELTKELKPELREALDPLLTEIESLHERIAEYDRRIEQIAKEVYPEVARLKQIKGVGPLIALTYVLTLDNPYRFRRSRDVGCFVGLRPGRRNSGMSEPQLHISKEGDRYLRTLLVQGAHYIRGPFGQDRDLRRWGLKLSERGGKNAKKRAVVAVARKLAVLLHKLWVSKEVYEPLRNNRKQIAAVA

SEQ ID NO: 272771 - protein, 449 aa, unidentified
MGNCAGIDWGSTKHDVLIEDPAGHELLAATFAHDEDGVSALCAALACFEVGVVAIERPDGLLVDRLLDAGVRVLALAPKQVKAARDRFRASGGKSDRFDGFVLCELARTDAHRFRILEPDSDQTKALRALTRAREDLVGARVALANQLRAELERFWPGPIGLFRDLDSPISLAFLARYPSFQDTRGLGEKRLAAFLKTQGYNNRKTPARLLERLRAAPTGRAGEIETRTRRSIVLGLASTLQTIVAQIADLRSQIAAALDAHPDGEIFRSFFVSPGSVICPATLLAEIGDCRARYPHRDAIAVDAGHAPVAVESGKRKNAMFRWACNKRLRAALATLAQSTQRWNPWAADRYLTARGRGLHHPRAIRTLGRALSRIIWHCWQTRTPYDPERHTGLQQHIAVTLPTISGPRPDIPATQRMAGAAVTPRAARRAERAALDRQPPTAIPAPA

SEQ ID NO: 272772 - protein, 338 aa, unidentified
MKITTIGLDIAKSVFHAVGVDKAGKLIKKKMLRRKDLLSFLAQIEPCLIVMEACGGANYWAREFELLGHNVKLIAPQFVVPFRQGNKNDYNDALAIAEAAQRPNMRFVKPKSVEQQDVQLLHRMRERLTKQSTALINQVRGMLAEYGIVITKSKSAFKVQFPDILADETNALTTKGRAIFYQLYEEFSDIEKRLKGCDVQVLTETKNNVICQRLETIPGIGPVTATAFYAAAGDGKDFSNGRHFSAWCGLVPKQHSSGGKDNLLGISKRGNAYLRTLFIHGARAVLQHSCHKQDKFSCWAIQLAERRGFNRACVAVANKLARMAWVIAAHDEEYRLPV

SEQ ID NO: 272773 - protein, 367 aa, unidentified
MFNSDYTVGCDAHKHFSLFTVLDERGDLVQRTRIGHVAGAIGAFLSQFPEGTPVALETVGNWYWIVDEIEGAGCVPLLAHAAKAKVMMGNIHKTDKLDAQGLATLLYLGKLPSVWIPPAEVRDERELPRTRMTFAQHRTRVKNRIRSTLAKYALSLDTASDIFAPKWRPDLEATLQFLPEETGRCVRQQLQILDALSEHIRRLEDRIIERIQTSPTMQLIQTVPGPAKILVIVIDREIGSIDRFPAAKHFTSYCGLVPKLSASAGRAHYGRMVKQCNTYLKWAFIEAANVIVRHRHAPNWRRKYVAHLYERIRRRKGHSVAVGATARYLAESTYWVLKKSEPYREPPHWAPEGKKSPVSLSQGQVRA

SEQ ID NO: 272774 - protein, 344 aa, unidentified
MNQYIGLDISLKETAISIRQDGKRIWRGKCPSDPTLLAGMIRKHAPHARRVVFETGPLSTWFYHALIAKGMHVICIEARHAQKVLNETLNKTDANDADGLAQLAEAGFYKAVRVKAFDSMLTRTLVGARNHLLNISIQLSNQIQGLMKTFGLIVPKGTGRVFDGHVKALLDGHDSLARIILPLLDAWRDIRRHAAELDRQLVLAARQSHAAKRLMTIPGIGAITALSYVAAIEDPANFTTSRSVGAWLGLTTRRYQSGEVDYDGHISRRGDSHLRGLLYEAATVLLTRTGTRAECNLRAWGLKLRERLGFKRAAVAVARKLAVIMHSMLTTGEEFNTSAGADLA

SEQ ID NO: 272775 - protein, 451 aa, unidentified
MIGQRVSKVKLSTQHFGDGPTMTKRSSTPADAVLVAIDMSKHRQEVLIERPEGGRRRRMTVMATKADYDRLAADLADIGRSVIVGFEATGNYHRTLAHRLLAAGFELRLISSVALARTREALHNGWDKNDSKDAQVILHMLRIGATQRYVDPLAAGINDLQEMSKTHEAISKVKTQTWHRILTHYLPLYFPEIERFAGNSRSDWFLALLERFPTPASMTALGQEAFSNEAWSLVGRKVSKARLINDIYETACASVALPVDEDSVAITMFRMVIAQARSLIRQRDEIERTAHALLSENRDYQLLRMIPGIGPINALTILAEAGDLRRFAHHRQFLKFCGLDLATCQSGTFRGRTKLSKYGNARLRRTFWMATQVAIRQRDNSFRDKLGRYVAGHGNDPDRRRKAMTALTAKMARVAHAVIKTGTEYRPFVERADTRWKDPSLWSREGAAATL

SEQ ID NO: 272776 - protein, 387 aa, unidentified
MARKRTLSTLDTSIAYEAVGLDLAKEDVALAAFDSEHKEPYLIDRIPYDKLYELLADMAPTLVAMEPCSGAHQIAEQIQELGHEVMMISGRHVQTWVKDHCNGQKTDLNDAFAILNLAYDRWLTPIRGKTREECRLLALQASYRQLKGQRTKTMVHVKATLHAWGFPIRAGSFNQKVLHELIDTNREAFGDEVVETLHLMINRVRDLDHDIATVLKLLTEATKRDPRASLLRSIPGFGILTMSRWCAVIGDIARFDSPKQTMAFVGLVPNNRITGHHTETSSGREARGQGRMSKRGDKMLRSLCILGAASLCLMVRNDRLPDCPFVASIKERLASPRPWFKVLVYVAAKLVRIATALLKYGETFSYEKAGISKAVLKQWELEQAKAA

SEQ ID NO: 272777 - protein, 353 aa, unidentified
MSKKQTQESSQQQEMSRERIWRWYGEDVSKDSFAVTLYDGLTGNNSEVLTFDSNRKGVKNFLFWRKKHVCEDFPAAIAMESTGCYSARLADLMLKLDSSIHVSICNARSVAYYIKSHSANKTDASDARLIARYGYDSQPSKLREKSHEEKIIKELVSEREKLVNIVTMLKNKDETLEYKKTKKINKDARSSIEEKIKELDEEIKAVIKQSEEISAEVQLMDTVPGVGWLSAAILYGLLGSLKQYTRPQLSALSGLCPVISQSGSAPVKSRLSKNGSSYLRQILYLNTTQAMKKIPSLASMRERLLARENTSKMTARCACMRKFLLIIKGVVESGIPFDPNYSQKKQGISLETA

SEQ ID NO: 272778 - protein, 404 aa, unidentified
MNAVGIDVSKGKSTVAVLRPFGEVVASPFDVAHTGSDLKILADFIKKLPGESKVVMEATGNYYEPIARYLHEQNIFVSVVNPVLISDFGGNTLRKPKTDKKDSLKIASFALTYWLELKKYVPQEDLRKSLKLLNRQYQQASKLKTMMNNNLISLLDLTFPGINKLFTSSSRESDGHEKWVDFVLAFPHCDMISKLTIKTFSKKYKKWCASNSYYFTEVACERIYDYSKDCISSVSLEESTAFAVIQAAKMLNSAIENCHAIQLEMNRIAAQLPEYDTVMSMYGVGKSVGPQLIAEIGDTRRFHSRKAITAYFGYDSENNDSGKKVSISNPMTKKGSGALRRTLFIIMQVLLQTKPINNPVYDFLIKKQSEGKHYYSYMNAAANKFLRIYYARVKEVLIAADIST

SEQ ID NO: 272779 - protein, 462 aa, unidentified
MARRKRKNTSSSDALPPQLTTVNLHAAGIDVGAEEHWAAVPPCDDPQPVRRFGANTADLEALADWLWGCDVTTVALESTGVYWIPLFELLETRGFQVLLVDPSKLPRSGRPKTDVHDCQWLQRLHTYGLLSACFRPEEQVVVLRSYLRQRATLLADAARDIQHMQKALTQMNIKLQHVVSDITGVTGLAIIRAILAGERDPMQLARWRDPRCKQDEAAIAAALHGTWRVEHLFVLQQALERYEFQHRQLAACDARIAAHVETFADQSHGAPLPPKRGQRRRHRNRPAFDPREPLYRMTGVDLTRIEGIDETTALIVISEIGLDMSKWPSEKHFTSWLGVSPQRRISGGKVLSSRTRPTTNRAAAALRLAAASLHHSQSALGAYFRRMKSRLGTSKAITATAHKLARLLYSMLKHGTAYVAQGLEAYEQQYHERVVKHLSRKARKLGYALVKPGEATVETSLA

SEQ ID NO: 272780 - protein, 407 aa, unidentified
MEVVYRRCCGIDVHKKSIVACLNNGGKQEIREFGTTTSEIRVLANWLAEAGCEMIAMESTGVYWKPLYNLFELKNLDAIVVNASHMKALPGRKTDVKDAEWIADLLRHGLLKASYIPDREQRELREIARYRKSLIEERTREICRLQKVLEGANIKLDSVVTDITGKSARKLLDKITANEMPDSSEVAQMVHGRLLPKLDQLMQSIEGITTPLQRKLIAQIVDHIDDMTRRITDMDDLIKGYVEQYEAAIAAIDELPGIARRSAEVIIAEIGTEMNRFPSAAHLCSWVGVSPGNHQSAGKRGHGKTTKGNKALKSILSQCAKVAKSCKDSFFSAQYHRVAAHRGKNRATIAVAHSMLIAIYHVLKNGVAFRDLGSNYYDSFNREHKIMGYLKRLHALGWAPDNAVVSA

SEQ ID NO: 272781 - protein, 428 aa, unidentified
MLLVGDDWAEDHHDVEIMDPAGRTLAKARLPEGIAGLARLHALIAGQRGDDAEQVEVRIGIETDHGPWVAALTAAGYTVYPVNPLQAARYRDRHAVSGAKSDAADAHTLADMVRTDAHQLRPIAGDSPDADAVKVVARAHKTLIWERTRQTQRLRHALREYFPAALDAFDDLDAADTLELLAKAPDPTAAVRLTRAQISAALRRARRRDVDTKTTAIRAALRTPQLGRPAVVVAAYAATTRAAVAVLATLNAQITALEAQVGAHFRRHPDAEIILSQPGMGPVLGARVLGEFGDAPGRYADAKARKNSAGTSPITRASGRRKTVHARHVHNDRLVDALMLQAQSALQASPGGACLLRPPACPQARPQSRAAPTRQPARRHLARLPEDPHPLRRSHRLVASQSTNCRLTFQLLGCLKERGRSRPTSVVF

SEQ ID NO: 272782 - protein, 341 aa, unidentified
MKHFVGLDVSMKETAICVVDDAGQRVWEGSVPSSADAIAAIVREKAPDLVRAGMETGPQAVWLWHALREKGIAVDCIHARRAAAALKLQANKTDRNDAFGLARLVHSGWYEPVAIKSFDRYRMRAVLTARERIVRMCTTMINQIRGLAKTFGLRLSTGKGQVFEQSVRRALPVDAVLRDLFESLLPVLSGLKDQRRAFDRQLARFAREDEACRIVSSAPGVGSLTAIAFVTAVDDPTRFRSACDVGAYLGLTPKRYQSGEVDIGGRISKTGDRLTRKLLFEAATVILYRTSPSIGLKQWGLRLSARSGSWKARVALARKLAVTLLTMWKTNTMFENRSFAT

SEQ ID NO: 272783 - protein, 346 aa, unidentified
MTGVMIGVDPHKASHTAVAISGAEEQLGQLRVRSSAAQAERLLEWAAAWPERTWAVEGAGGLGHLLAQQLLSAGERVLDVQPKLGARVRLLATGNVNKNDPNDARSVAVAALRSPGVREARPDDHAAVLKVWSKRRRDLASSRTQVVCRLHAVLCELVPGGVGKKIIAAHAARLLGSITPPDAVAAARWELAAALLEDLRRIDGQLGETRKKLDTAVRASGTSLTGLFGVGPVIAAIVIGEVRDVSRFKNRDRFAAYNGTAPIEVSSGGRKVHRLSRRGNRRVNHAIHMAAITQIRQPHSEGRAYYDKKLAEGKTHREALRALKRQVSDAVFTRLRADAQRAAAQG

SEQ ID NO: 272784 - protein, 355 aa, unidentified
MTSTKYIGMDVHKESISIAVRNDAGKMVMECVIETKASMILQLIDGLRGDLQVTFEEGTWAAWLYDLLKPHVMKLVVCDPRKNASLREGNQSDKIDARRLAELLRLNHLSSVYHGEHGLRSLKELVRSYLTITKDLGRVMSRVKAIYRSWAIPCSGKQVYARRHRAEWMGKITEPGVRRRAEFYYQQLDALRILRQDVRRELLAECKKHKAWKRLRQIPSIGPIRSAVLLGILQTPHRFRTKRQLWTYSGLGIETHSSADHRSVNGQLQRVKKQISIRGLNRNCNHDLKNLFKGAAIVASGKPGPFQEFYTALLDKGIRPEMARLTLARKIATIVLMVWKRGVCFDAQHLKPQTA

SEQ ID NO: 272785 - protein, 349 aa, unidentified
MSEKLNPAIAVIGIDIGKNSFHVVGLDRRGAIMLRQKWSRGQVGTRLATMPRCLIGMEACVGAHHLSRKLTSLGHDARLMPAKYVRPYSRGQKNDFRDAEAIAEAVQRPTMKFVATKTAEQLDLQALHRVRERLVSQRTGIINQIRAFLLERGVAVRQGLRFLRAELPRILAMPCDALSPRMLRVIEDLAGDWRRLDERIESLSSEIEVLARRDAGCERLMSVPGIGPIISSAVVAAIGTGDAFTKGRDFAAWLGLVPKQTSTGDRTILGKISKRGNRYLRVLFVQAAWVVLIKPRSWDRHGLKPWLEAAKKRLHHNVLAIALANKLARIAWSVLAHGRTFEASKTQAA

SEQ ID NO: 272786 - protein, 412 aa, unidentified
MSLPECDFYVGIDWAAEVHAVCVQDAAGKITAEFTIDHTADGFATLLSRLGRLAGDPMQVTVALERPDGRLVDALLEAGHPVVPVSPNAIKTWRDGEVLSGAKSDAGDAAVIAEYLRLRSHRLRPAAPFSPQTKALRTVVRTRDDIVAMRTAATNQLTALLDAHWPGATKVFADIESPIALEFLTRYPTAKHAAGLGEKRLQAFCVKHGYSGRRPAAELLTRLRAAPDGTTDPDLIEAVRDAVLALVAVLRTLGEVRKTLDRSVTAHLGEHPDAAIFTSLPRSGQVNAAQMLAEWGDSREAYDSPDAVAALAGLTPVTKASGKYRAVHFRWACNKRFRKAMTMFADNSRHESPWAADIYRRAIQRGHDHPHAIRVLARAWVRVIYRCWIDRTPYDPGRHGNAIKINNSALAA

SEQ ID NO: 272787 - protein, 394 aa, unidentified
MTGTEPHAWGTGLMDDITFVGLDVHKATVCIAVAEGGRGGEVRQLGVFENRPEILSKVASRLSKGGRRLSFCYEAGPCGYGLHRLLTGYGHECVVVAPSLIPMKAGDRVKTDRRDALMLAKLHRAGELTAIWIPDAAHEAMRDLVRARATAVRVLAKARQHLQGFLLRHERIYHGARAWTLAYRRWLTTVRFEHPAQQIVLQDYIHAVQEAETRRDRLTQQIEELLPNWSMAPVVAALQSMRGVALVVAVTVVAEVGDFRRFANPRQLMAYLGLVPSEHSSGSSVRRGGITKAGNALARRVLIEGAWTYRMSARVSRKLHDRLEGLPAAVREIAWKAQLRLCSRYRRLAATGRPKVVVTSAIAREMVGFIWAIAASRSRLRSDRAPTTVAAGTR

SEQ ID NO: 272788 - protein, 329 aa, unidentified
MEQEYIGIDLHKAFFQVCVVNGRGERQWEHRWPTTDEGIAGLVARCGASSRVAVEASSPTWAFVDRIVDHVGAVHVVDSRKTRLKAGYAAKTDRLDAQRLADALRRDSVVGIYYPPPPIRDLRELCRYRCHLARTQASLKQRIHALLLRQGVREPRVSKLFGKRGTQWLDTLRVKGWAGASLTGLRQLLGDVRTQLVPVLATIRATAAADPIARAVDARPGFGPVFSVTLRAEVGIITRFPDGPHLASYAGLVPRVERSGGRQWSGRITKAGSPWLRWVLIEAAIHQLRRQDDFGRWARRLAVRKGILKARVAIARALCDELFDAWPRA

SEQ ID NO: 272789 - protein, 346 aa, unidentified
MLYAGLDLSRQRLDVHVLDEEGRTVDVLAVHPDADALRTLANRVLRHGQEVSAVIESMTGSRFVHDQLELAGWDVAIADAVKAKGIAPLAAKTDKIDAHVLAELARRNLVPEIWLPDPRVRAERERARFRLHLVRHRSALKCRIHATLMTFGHNIPVSDLFGTSGRRLLAGLELPEPWAGTLATSLAMVDELEERIDECGRELARLGADHPYIPLLLTVPGVGPLLAYTIASEIGDIGRFASPKKLAGYTGLCPLVRQSGNRDFRGPLAKNGPKYLRWALVEAATHAARDVRYRERYERNKKRLGRQRGAKVARIDIARQLVEAIWHVLTKNEPFAPASPAILLVA

SEQ ID NO: 272790 - protein, 319 aa, unidentified
MNHTNTNTTWIGIDVSKKELEIHCYDETLKLPSVTANTQIAITKLISKLKECAHPHLVFEATGGYEKLLLALFQAEGIKASRITPSLARNFAKAKGLLAKTDAIDAKVLTDYGIQFNPRLTAPLDPILEEIQALIKYRRHLNDELHRERMHLEHALPKSVADMVKTRLKSIQKQMDQITATTLALKAKSPTLAEAVKLLSGTKGVGENSAISLLVAMPELGKISNKEAASLAGLAPFNRDSGKMRGQRKIYGGRKEIRQALYMAALVGTRFNPILKEFYQRLLAKGKPKKLALIAVMRKLLSYLNALMKKHLQQIEIAC

SEQ ID NO: 272791 - protein, 417 aa, unidentified
MIRKVMEVIHQRVGGLDVHKKTVMACRRRLLAEGQVESEVQEFGTSTAQLRSLAAWLAMWGCTHVAMEATGVLWVPVWNVLEDEYQLLLANARHLKKVPGRKRDVSDSEWIAQLMQCGLLKPSFVPSREVRHWRVLTRQRMKLNDQHTGVVNRLHKVLQQGNIKLSSVATDVMGVSGRAIIEAMIAGESDAEVLAAKAKGRLKATHEQLVESLEGRLNQAQRWVMNEMWEQLEFLELEITRYDEQIRDEMQPYEELITRLITIDLVKRRSAENILAEIGPDMSFFPSDDHLVSWSGLCPGADESAGKNRSGKTPKGNQWLRRALLEPAWCASRRRDGYMAALYRRLAVRRGKKRAAVAVARTILQAAWHVLKEGVDYKELGGDHYDRLHGDKTRNNLVARLEKLGYQVELKPKQAAR

SEQ ID NO: 272792 - protein, 370 aa, unidentified
MIYVGIDVAKDKHDCCILDDEGLKLYPVFTISNDKVGFDEFFSRIEEVTSDKTEIKVGLEATGHYSNNLLASLVDKGFPTVVINPLHTNLYRKGLSLRKTKTDKVDASSIAMMLMTDRTLKPYSETSYHNEELKSLTRYRFDKVHERSKLKSSLARLVNILFPELEKLVPTLHLNSVYTLLEELPGADYIAGCHLTHLKKLLESSSKGRYSRDKAIEIRNAAINSIGTPMDAKSMELRHTIHLIWILSEEIEEIEASIKAIMDEIQSPIMTIPGINYRMGAMILAEVGDFERFDNADKILAYAGLSPSTYQSGQLDSSHSHMEKRGSRYLRYALFNATKFVCKWDESFGTYLGRKISEGEEKFPKASTTM

SEQ ID NO: 272793 - protein, 421 aa, unidentified
MSYRVAAIDIHKKVLMVVVSTVADEVKDAAGEALAFACRRFGAGSGERKHLVVWLQEQGVSEVVMESTAQYWKPVWLDLEPHFAKLHLAQAQSNRAPKGRKNDFADAKRLARRLLAGELLLSFVPEPEQRTWRTLTRSKQQLVRDRVQLQNQLEALLEEMRIKLSSVISDLLGVSGRRILTALSEGEVEPAKLAQLGDDRLKCSQEELADALRGAPTPTHLAVLKLFLERLKLLDEQIQALDKLVARELKKHEDAVIRVAEIPGFGVDSAQQIIAEVGVEAATFPSAGEFSSWVGACPGSNISAEQNHSSRSPKGNRFVRKILTQAAQAAVRKKGCHLQSIFRRFLPKLSYNGAIWVIAHRLARLVWKILHAGVRYIEQGTETNPRAKKRRAQKLVQSLRKLGYAVTLTPITPDGLVDASA

SEQ ID NO: 272794 - protein, 328 aa, unidentified
MFLGIDIAKASMDCAILAGPGGKPLGRRSFPNSAEGVDRAVRWAARVSGAEVAETHVVVEATAAYHELAAHRLAAAGMRVSIVNPARVRSFARALGILGKTDRIDAQLLARYGQLVGPKLWSPPAKALLDLRSLIARLDDLEADSRREENRLEQARTRGCPELVQRSLLASITALEAQAGDLRRGIAAHVAADAALQADLERLMTIPAVGPKTATRMLLMLRSRAFDTARQAAAFLGLVPVERTSGTSVRGRPTLSRAGNPRLRAALYMAAVVGIRKNPDLRAQYGRLLARGKCKMAALGAAMRKLVHLCFGVLKSEGGYRPAAAIKA

SEQ ID NO: 272795 - protein, 344 aa, unidentified
MVTTIGIDPHKATHTAVAIDGSENVLGEITIRADKDQTRKLVDWAGSVDGDGRLWAVEAATGLGYLLSQQLMAQGETVVDVPPVLASRIRVLSSGKSQKNDENDARSVAIAALRRDGLAEVHREDEAAVLRMLAKRHRELTALRTQAVCRLHAMLAVLRPGGMGHRLSAKQASRMLGGIRGLDAVGEQRRLMAKTHLVDIRRLDRDLDANKARIRQAVAAAETSVTDIYGVGPVVAAFLIGYTPPIERFTTPDRYAAYNGTAPIEVSSGGKVRHRLSRRGNRILNHAIHTAAVTQISHHTPGKVYYDRKIDEGKTNKEALRALKRRISDAVYRQLRQDAERRDG

SEQ ID NO: 272796 - protein, 350 aa, unidentified
MTTIARTVTGGVDTHLCVHVAAALDERGAQLGVQSFPATAAGYRELLDWLEGFGTVELIGVEGTGSYGAGLTRHLLGNQIAVVEFDRPNRQRRRRTGKSDPHDAVAAARAAQGGDATGLAKTRDGNVEAMRVLRVARSSARRSRTQAINQMRSLISTAPDELRAELRDLSIYKVLTVASAFRHTGRTDVTTVTKLTLRTLARRALSLEAEVKEIDGLLKTLVAETAPELNAIDGVGTDVASAILVAAGDNPECLKSESTFAKLCGVSPLDASSGKQQRHRLNRSGDRQANSALWHIVFTRMVNDPRTKHYIERRMKEGRTKKEAIRCLKRYVAREVFAALPRSQFALDSP

SEQ ID NO: 272797 - protein, 338 aa, unidentified
MALYCGIDLHSNNSYVAVLDDDDRVVGRGRVPNHLEAVLQALEPHRSALCGVVVESTYNWYWLVDGLMDAGYRLHLANPAAIQRYKGLKYSDDSTDAAWLAHLLRLGLLPEGHIYPKETRPVRDLLRRRSQLVRCRTAQILAIETQLARSTGRRFGGNLIKRMDAQELRQLVGTPELALAITSNLEVMRCLYRQIAKIEKAVLARTRLKPAFVALKTVVGIGDVLGLTIALETGDIGRFAKVGNYASYCRCVGSEWLSNGKRKGRGNTKNGNKWLAWAFVEAANFTVRYSPEAKRYSQRKATKTNRIVATKAVAHKLARACFYVMRDGTPFEPKRCFG

SEQ ID NO: 272798 - protein, 347 aa, unidentified
MRFYTKQHQFYCGIDLHARTMYLCVLNQDGEILLHRNMPAGPEPFLKAVAPYRTDLVVCVECIFTWYWLADLCAREGIPFILGHALYMKAIHGGKAKNDKIDAQKIAVLLRGGMLPQASVYPAAMRATRDLLRRRMHLMRKRAELLTHVQQTHWQYNMPEIGKKIAYKANRAGVAERFADPAVQKSVEVDLALIDYYDELLRDLELALVKTAKQHDAHTLYLLQTVPGIGKILSLVLLYEMHDIARFPRVQDFVSYCRLVKCAKESAGKRYGTSGTKIGNAYLKWAFSEAAVLFLRNNPAGQKYLARLEKKHGQGKALTILAHKLARAVYYMLKRGTAFDMAQFLSS

SEQ ID NO: 272799 - protein, 342 aa, unidentified
MNIPVRIGMDTSKSVFQLHGVDENEVVVVRRQFRRAEMIRYFERLPPVLVAIESCGSSHHWGRLLQSFGHEVKLIPPQYVKAYVKRGKNDAADAEALCEGVTRPSMRFVPVKSKERQAACMLMTVRERLVSVKSQLSNAFRSYAAEFGIVGPAGQQNVAALIKRVLEDESLPEMARDRFRLQADEYAAVQARLAKIEAKLMKWHREDDISRRIATIPGVGPIGSSMLSMKAPPPETFRSGRDFAAWLGLTPKDHSTGGRQRLGGITKAGDSILRSTLIVGATALLRHIRKGRHKPTPWLASLLGRKPPKLVAVALANKFARIAWRLMISGGVYKQPGAAMPT

SEQ ID NO: 272800 - protein, 323 aa, unidentified
MTGTICGVDVASKSLEARIGQHGAAGSFPNNAEGIAELGAFCRSHQAELVAMEATGGYEQQAFALLSEQGLGVAILNPRAVRQFAESMGSLEKTDRIDAGMIAWYAEVKKSRPVCLAPQSQQHLRALVTRLRQLTEIRTAQLNQQRLVIDRSVQASFTKLLTFVGRQIRDLEQRITKLIEQDPLWRELNQTFRTIKGVADRTVARLMAEMPEIGTLSNKTISKLAGVAPIARDSGKHQGKRIVRGGRPAVREILFIVASVVGRYEPDFIAFQQRLRAAGKPPKVVRIALAHKLLVRLNAKAREVRQHSAALQPASSALLLEKI

SEQ ID NO: 272801 - protein, 345 aa, unidentified
MEIRTIGIDLGKTVFHFVGVNARGEVVIRKKGSRTQLLRFTSNLRECLIGMEACGGSHFLGRALREQGHDVRLMPAQYVKPYVKTNKNDYIDAEACAEAVTRPTMRFVPIKTDDQLDLQSLHRVRERWVVRRTAVINQIRGLLLERGITIRKGRHHIEESLPRILEDPDNKLSGALRVLLRQLQLEMQYLHGQVEESDQLIVRIAGELEPCRRLIAIPGIGPITATATIAAIGNGAAFKKGRGFAAWLGVVPGEHSTGGKQKLTGTSRRGNKYLRKLFVQGAHSVLLQRTKQSSGLSMWLANLVTRKRKQVATVALANKMACMAWAVLFKGEAYRPPLLPQTVAA

SEQ ID NO: 272802 - protein, 388 aa, unidentified
MNRIIKIGMDVHSKNYTLCAMEPTIGAEDRIFGEVQVAPDYKEVICFIESLKMKLGFCDDYSIECGYEAGCLGYTLYHQLTGAGVKCVILAPTTMLTQQGKRIKTDKRDARLIAQCLCYGGYHPVYIPTGEDDAVKEYLRMRDDHKLALKKLKQQINAFVLRHGQQYSGTKWTIKHVTWLKKLELDPMYRETLDEYLASCEEQEAKIERYDKRIEEIASEARYQENAKKLGCFLGIRTHTALSLIVETGDFKRFAKGNTYAAFLGLVPGEHSSSDNVNRLGISKAGNTHLRCLLIEAAKGICKGAIGHKSKELRARQSGQPAEVIAYADKANTRLRSRYYKMIRHGKKKNVAVAAVARELACFIWGMMTGNISIRPKGDTSGPAVSQG

SEQ ID NO: 272803 - protein, 425 aa, unidentified
MTTKDDANPSKTLVAIDIAKRSHAVLIETPDGKQKRFRMASSFDDHARLVELLRASPQPVRVAMEPTGDCHRTLAFRLLKEGFEVCLVSSIAGARYREALFNSWDKNDPKDASVILALLKQGITQKYVDPLVAGHHGLQELSKTYYQISIARTRLQHSVMTHYLPLYFPEFERYFHASRAEWFARFLLRFPTAESIRRMEFKAFEADAWEIVGRKVNKAIWIRELYDTALQSIGLPIADDSLEVESFRLQLRRYQELNSQREALSERAHALLAGRADYEALRSIPGFGPILALTVLAEGGDLRRFPHHRQFLKYCGLDLAKSQSGESRGREKLSKRGNARLRFAFWFAATIAIRMRENSFRAKYERYIKPDPGSADRKRKALTAVSAKMARVAYSIVKQQSVYRGYFESALPSGSIPLRAAVGAT

SEQ ID NO: 272804 - protein, 450 aa, unidentified
MGSTFAGVDWASEKHDVLVSDDAGERLLAATFAHDEAGIAALCRALVRLKVQLVAVERPDGLLIERLLDAGLRVLAIHPNQVAATRDRFRVSGGKSDRFDAFVLCELARTDSHRFRVLVPDSDQTKALRALTRAREDLVETRVALANQLRAELDRFWPGATLIFAEIDSPIGLAFLERYPSPADAHGLGEKRIAAFLARHGYSGRRKPAELLTKLKNAPEGRAGEHETEARRQVVLALVTALRPLVAKIAELTAEIAHRVRSHPDGQVFLSLFKDPKSVITAATLLAEIGDCRERYPTADSLAADAGMSAVAVESGKRKVATFRRGCDKRLRAATSTLADATRHWHPWAQDRYAAALARGHDHPRAIRTLGRAWCRVLWRCWQDGAPYDPAKHRGLQQHITVTTPNSSGPRPDLAATQRMAGAAVTDTAAHRAEREALDSKPTTANTLEG

SEQ ID NO: 272805 - protein, 356 aa, unidentified
MTSTKYVGMDVHKESISIAVMNSAGKIVMECVIETKASVLLQFFNGLRGDVRVTFEEGTWAAWLYDLLKPRVSEVVVCNPRKNALLKDGSKSDRIDARKLAELLRGNHLKPVYHGEHGLRTLKELGRSYLTITKDVTRVMNRLKALYRGWGIACAGHEVYVPRHRSEWLGKISEAGVRRRAEHCYQQLDVLRLLRQQVRRDLLLESRKHPAWRLLGLIPGIGPIRAALLIALIQTPHRFRTKRQLWTYCGLGLETHDSAQYRVVEGQLQRSKKSVTLRGLNQDHNRDLKDIFKGAATKVSSSNSGPFHDFYEHLLAQGRKPTMARLTLARKIAAITLIVWKKEVRFDASYLKSQAA

SEQ ID NO: 272806 - protein, 394 aa, unidentified
MQPLINSREAMMSAPAQGAVHVDLAAIFVSLELSRSTWLITSLSPGSGERMSKHSVRGGDVAGLLDRLARLQEKAQARAGRTFPIIVIQEAGLDGFWVHRVLEREGIESHVVDAASVLTTRRRCRAKTDRIDGEALLRTLLAYKRGEPRVCSMVRAPSPGEEDRRRLCRERKTLVAERVRHVNRIKGLLFAQGISDYEPLRRNRRPRLEELTSGDGRALPAHLKAQIGRELDRLELLLEQLKAVEAERDALLERVGDAAPEPVAALARLRGIGPEFATVLWLECLFRPFGNRRQVAAYAGLAPTPWQSGSVRHEQGVSKSGNPNLRTTMVQLAWLWLRNQPTSALSLWFRSRVKRDDGRGKKKAIVALARKLLVALWKFVTSGVVIEGAVVRAA

SEQ ID NO: 272807 - protein, 424 aa, unidentified
MDAITERSAGIDVHKDVVTACAMTGPLDRKPQEEIREYSTSTQDLLALAEWLGEQGITDIAMESTGIYWKPVWHILAGSEYNFKLLLANARTIKNVPGRKTDKCDARWIAQLTRAGLIEGSFVPPQDIEELRELTRYRKRLISDATAEKNRIHKVLKKYNIRIDSYMSDIFSASGRAILDALISGEVITLEKLELVVQSRMRSKIPEILDALNCELGIATREMLDYSYSHLQYLEQLIQKIEKSIDDHLTPYKKQVELLDAIPGVNKNGAAVVIAELGVDMSVFPSAKHCSSWAGLSPGNKESAGKKGRTKAVHGNRALRALLCECAWAASRKRGSHIASKYWRLVKRMGEKKAIFAIGHSLLTIAYNILKDLSPYKELGADYSEKSKPNHINLMIKKLLKAGYCVIPDPDAMRTAVKTLPETA

SEQ ID NO: 272808 - protein, 352 aa, unidentified
MQYVGIDWAYRRAAWCALSDGGAISGEGMVPADEDGLARLVLTVGREVRACVEMMSGAVWVRDRLAAAGWKVEVAHARKVRDIAPLACKTDKVDARVLAELCRRDLVPALWLPSLEDRALRERLRRRMHLVRLRTSARNRIFGLLTQWGLRLSLKRLRAPDAMDVLAACGVEEAWRRSIAEALEVIDLLDARIAPLDAELRPLAAADPRVLLLRTIPGLGDLLGLTFAAEIGDISRFSAPRKLIGYAGLAPKISQSGDRSRTGALSKAGSRTLRWAAVEAAHQAWRPTNPWHELYADIAKRAGKNPAKSAVARKVLIAAWHVLSREQPFNPARPRNTDSTTVPASSRCFLAA

SEQ ID NO: 272809 - protein, 375 aa, unidentified
MREKIRFLGLDVHAETIAVAIAEPEGEVRSLGTIPNREDSLRKMIKKLGPTDKLRVCYEAGPTGYVIYWQLAELGVKCEVIAPTLVPVKAGDRVKTDRRDAEKLARCYRAGDLTAVWVPDEGSEALRDLVRAREAAKQDQLRARHRLSKFLLRSGQRPPSGVRSWTRPYLIWVAQLRFTQMAQEATRLDYLREVEHMRERVERLEQAINEAVKLASPALQQVINDLQALRGIADISAVTIAAELGQVSRFDSARQLMGYCGAVPSESSSGKRTRRGSITKTGNAHLRRIVVEAAWSYHRPPGIWYGLRKRQESISEEAKEIAWKAQHRLHKRYMRLAAAGKDKRKITTAVARELLGFIWAIGTRAETVVRQRMAA

SEQ ID NO: 272810 - protein, 340 aa, unidentified
MLYIGLDVHKEFCQACVIDESGRALSNERFSSTNEELDRFLGRFQDAKFVLESTGIWEFIYEGIERRGFEAVLAHPLKVRAIAEARVKTDKVDAETLAQLLRADLIPRSWIPPKDIRDLRQLVRQRAYLVRQASRFKNRIHAEILRRGVRRPENLKTPFAQRSIRWMRALDIPTVMSCLNCLESVQAQVQEINAQLLVEFERRGDAQLIATVPGIGFYGALLILAEVDDVRRFHHPEKLCAYAGLVPTVSQSASCVRYGSISKDGSAYLRWILTESVHVHTRYERGSQLSRFHARVAKRRGRRVATVATSRKLLRIIYWMLVRHEPFHSHGFNPVKRLHS

SEQ ID NO: 272811 - protein, 366 aa, unidentified
MPSMPQPAQPDHNTNATDEVILGVDTHKDRHVAAVITAVGAVAASRSFPTTMAGYHQLLAWARSFGTLRRAGVECTGSYGAALSRHLQTAGITVIEVNQPDKATHRRRGKTDTIDAQAAARAVLSGRATATAKTGDGPVEMLRMFKLAKSSAIKSRTQAINQLKAVLVATDPTLREALSGLSTQILIRQCAQLPTGAPSDATSAATWTLRLLACRILELTNEIDDLNQQLARAVDRHTPKLLARPGVGPDCAAALLITAGDNPERLGSEASYAALCGASPVEVSSGKTVRRRLNRGGDRHANAALYHIALSRLRWDPPTQAYLARRIAQGKTRREALRCLKRYIAREIYQIITTPRPHSTATSIAA

SEQ ID NO: 272812 - protein, 378 aa, unidentified
MRRLLPRNFKLNRLINYAKTVTMSQIKQLDFTGSTIYCGIDVHKKNWRVNIQDSEFELEDFSQDASAGILYKHLKRKYPGANYKLAYEAGFSGFSAARWFNGQGLNCLVINAADVATTDKEKRQKNDKVDARKLCEHLQSRKVKSVNIPDLHWEHGRSLVRARDRIVSNQTRCKNRIWQLLHFSGLSLPAEYGAEKYWSRRLAEQLLLLDCGSMALRKTLDLYIKDYQQTRALLLEATRAIQSLCREPLYQNDIMLLRTIPGIGQINAAVILFELQDVTRFKHLDNLCSYAGLVPNTSDSGETKKTKGITNRTNHALRTALVESSWVIIRKDPSMLMKYKEYCRKMEKNKAVIRIAKHLLSRINYVLKNKKEYVIGIV

SEQ ID NO: 272813 - protein, 421 aa, unidentified
MKKACTGKVKFVKDDTLIVAVDIGMEMNRGYCTTPDGRDIKPFKFDNTRGGMDKLWGMVMASKNRFQCEEIIIGYESTGPYGEPMVHYLMKKPVMLVQVNPMHTKRVKEISDNSPLKTDDKDPRVIADIIKLGRTLSIVIPEGDAAYLRRLNNSRERHVREHTALLNQLQQLVFLLFPEFKNVFKNIKCMTPLYLLKQYPTPETISVLDKNTLGEEMRKKSRGKFKEQHAERLISFARNTVGIKEGVLGLSMDIRHILTQLEMLHTLIAEIESEMETVLARISYSSKLLSIKGLGVVSVAGIIGEVGDFKKFQTRGEIMKLAGLDLYEISSGKWKGRRKISKRGRSLLRKILYYAAIQTIRNNGILHDYYTRLTERGMKRMIALVAVSRKLLGIIYAIVRDDSEYIANFESIKRQVIKKAA

SEQ ID NO: 272814 - protein, 407 aa, unidentified
MRLFVGDDWAEDHHDVELMDEQGRVLARKRLPEGVAGMARLHELIGEQLGEDADDAEVIIGTETDRGPWVAALVAAGYTVYGVNPLPASRFRERHGVSGAKSDTGDAHMLTDMVRTDSHQLRAVAGDSPGTGAVKVVARTHKTLIWERTRQVQRLRHQLREYFPAALGAFEDLDAPDALELLARAPDPARAAKLTRAQISAALKRARRRDIPGKTTVIMAALRGAQLGQPPAITAAYAATVRSLIAVITTLNEQVKILQRQVAAHFGQHPDAEIYLSQPGLGPVVGARVLGEFGDDPHRYASGKARKDYAGTSPITRASGKKKMVMARFVRNDRLIDALMAQALSALGSSPGARAFYDAQRAAGVEHNAALRKLANRLVGILHGCLKTRTLYDESTAWSHRENKRAA

SEQ ID NO: 272815 - protein, 369 aa, unidentified
MNQNILFIGMDVHKESIEIAISDGSTQETRRYGKIGGTRDAMRKALIKLTASGKSLHFCYEAGPCGYELYRYLVSEGHACCVVAPSLIPKKPGDKVKTDKRDAVQLARLFRAGELTPVYVPDREDEAIRDLSRAREDTMLVQKAARQRLKAFLLRHDIRYSGKRSWTEKHLRWLADEVRCPSPAQQVVFQAYVNAVTEASQRLERLNGQIEVFVKLWRLYPVVVALMGMRGVQMIVAVTVVSELGDLSRFNNPKQLMSFLGLTPSEYSSGGRTSRGRITKTGNGHVRRILIEAAWSYRYPAKVSPEMQKRQEKLPLAIRNIAWKAQLRLSQQYQHMQRKGKPHNVTVVALARQLAGFMWAIANEITYPR

SEQ ID NO: 272816 - protein, 341 aa, unidentified
MKLIRVGIDLAKNVFQVHGVDRSEKVTWRRRLRREEWIDAVREHAEPSCEIAMEACGGAHHWARVLQKLGYRVKLIAPQFVKPYVKSNKNDAADAEAICEAMARPGMRFVPVKTVEQQDLQAIHRVRASLVEQRSAKANQIRGLAAEYGLVAPKELLHLRRALPRWLEDDGNGLTTRFRWLLRGLRDELVAFNGRIAELDREIEQIAQAEPDAKRLMQLRGVGPIIATAMLATVGDARQFSNGRQMSASLGLTPKQFSSGGKERMLGISKRGDAYLRSLLIHGARAVIRTARSKTDPLSRWVIRLADRSHPNVAAAALANKTTRIAWAMLSRGTNYQAAVN

SEQ ID NO: 272817 - protein, 378 aa, unidentified
MKKIRFVGLDVHSDKIAVAVVEPDGEQRFLGVIPNREDSVRRMIRKLGDPNNLRTCYEAGPTGFVLYWQLTALGVECDVVAPTLVPVKSGDRVKTDRRDAEKLARCLRAGDLTKVWVPDAAHEALRDLARARECALRDELRAKHRLGKFLLRHGKRRPDYLKAVWTTKHLKWIKTEVHFEQHAQEVALADYVHEVEHAQLRVERLNLAIQEAARAVPPQMRAVMDGLQTLRGVAELAAITIVAELGQISRFEGAKQLMAYSGLVPSEYSSGERKVHGTITKTGNAHLRRVVMQAAWAYQYRPWLGGEILKRQAGASAEVREIAWKAQKGLHMRYQKLLARGKNKNQIVTAVGRELLGFIWAIGVAVEREMPAAKSAAA

SEQ ID NO: 272818 - protein, 410 aa, unidentified
MAERFVGIDVGLREHRIAVLDRDGEAVGQSFTIAASKDGVATLLRALDARDAPPAQTLIGLEASGHLWENLEAALVGAGYRVIVLNPLQTRRYRDVVRRKAKTDDIDAHVIAGLLRSGVAQASYVPDEQVQSLRELARLRARLMADRQDYQRQLIAQLDVVLPEHHAVLGDLLTARARGILAQFPTAQHLAQANPRAIRRAAEDAGARGFSLNDATVVRDSARRSLYSGKAAVARAHVVRTLVNQLERLINAIDEVDRAATALLPPSEPGTGPSDAELLQTIPGIGPQTAATLLGELGALTRFTDARALVAYVGFYPVIHESGDRAATPRLSRVGSRIARRSLYLAAVNAVRRSGEWRTIYLRKKAQGKTAKQALVVVAVKLIHALYAMLKHRQPYNPSRLLVAPATIGT

SEQ ID NO: 272819 - protein, 368 aa, unidentified
MSNFITSFVGLDVHQDSIAIGVAPAGREEPRFVGTVAPQWASLCKALSRLGRREGLQIVYEAGPCGYTLARQLRAHGYACEVIAPSKIARRPADRIKTDRRDALLLARAARAGEMVSVTIPDERDEAIRDLSRAREDAVHARLKARQQLKAMLLRHGHRYSGRSSWTQAHERYLAQVSFPQAPQHITFAEYRSAVRDGHERVERLTEALRAQLEHWRMRPVVEAVMSLRGIDLIAALTLVAEIGDFTRFARPHELMGFLGLVPSEYSSGATRRQGAITKTGNSHARRVLVEAAWNYRFPARVSRVLQLRQQGQPKAVREIAWRAQLRLARRYRHLSARKLALNKICVAIARELSAFVWDIARQVKPSA

SEQ ID NO: 272820 - protein, 321 aa, unidentified
MDDREFPATTEGYRLILEWLSSCGTIVDVGIEGSASYGAGLTRYLHNADISVSEVPHPSRRLRRASGKSDELDAYAAARVVLSRHQLSTPKRGNGAIEAIRALRVASTSATKAATASMNTLRALIVTAPDELREQLRGLRAATLLTRCVDLPTDAERLSDPAEATKMALRSLATRTKLLRSEATQLKKNLAALVADAAPATSAVFGLGTDTAAALLITIGDNPDRLRSEASFAHLCGVAPVPASSGKTHRHRLHRGGDRRANQALHTAVIVRLRYHNGAREYANRRTTEGKSMPEIIRCQKRYLAREVFTALRTDYRDLTP

SEQ ID NO: 272821 - protein, 398 aa, unidentified
MEAARGVVLGFDVGRYSHHMTAIDARTGEVVASRGVEQTEPDIREAIEPYALGDAAVVVDQPGDLSSLLLAVARDMGLGVGFITPRAMAKGIELYGGELKSDAHDSFVIADLAARIPSLVRPVPERRADVEELASLMSYDRELTDDVRRAASRIHELPLATCPALGAVYAGQRVKQRLPLAMLARFGGAGGLSAAGRGEVEGWARGQPRCGARGLAFVGSALDAVGSQGVATTSSPFYDELLRIEAASLRSALDAREAVGARVDELLGRIPDAQMLLSMPGVGRVTAATFVSEVPDVGAFASAAKLAAYAGLAPRVRQSGRSLNSVTRPRAGNRRLKRALVLSAARSVDFCEESRAYYDRKRSEGRCHYSAVVALARRRINVMYAMLRDGKRYESRLG

SEQ ID NO: 272822 - protein, 493 aa, unidentified
MSPRAKKADPSSKTSPTPQPTSGPGKRLTRWEVINPHAAGIDVGATSHYVAVPPDSVADNEKNVRVFGAFTPDLHSLVDWLKTCGVTTVAIESTGIYWVALYQILEASGIEVVLANAKAVKRAPRRKTDVSDCQWLQQLHSYGLLSGSFRPCQSICQLRTLMRHRANLVSSASREVQHIQKSLQQMNLHLHHAVSDVMGATGQRILKAILAGQHDPEALLALRDENITKSTPAQMKAALQGDYRPEHLFVVAQALEAYEFIHRQMDESDKQIQSVLELIGPTASAKAATASESDNQKQPEKKKKKTRQSRKHNDPKIDFAPQLKRIFGIDLTQTLGMRVLSILVLLSEVGFDLSKFPNAKAFCAWLGLCPNNKVSGGRVLSSCTSKVVNRIASMLRLSAVAIGKTQTCLGWFYRRKCAQLGPAGAATATARKLAVILYHLVTRREEYVEPDLIQYQLRYQRHRTVKLLKQLETMGYEVSIKEKSETQTIVTTA

SEQ ID NO: 272823 - protein, 402 aa, unidentified
MRFFVGIDWGSQAHAVCVIDQTGRIHWQGCVPHTAEGLTEVLRRLQRFRRRGHLRVALERPSGLLVDTLVDAGLEVVPIHPNALKASRPRYSAAGGKSDPGDAFILADVLRTDGHRFRPLRPPSDDTRALRALVRGRDDLMAQRVALANRLRALLERFWPGAAAIFADVDSPIALAFLTRYPTPHSAARLGEARLAQFLGQQGYSGRRPVAELLARLRRAPVSQVGATEAEASGEVVGALVAVLTPLVTHLQQLSARLEAAVPQHPDGPLVQSLPRSGAVNAAQILAELGDDRARFATDEQFAAEAGLAPVTHASGQHHAVVFRWACNKRLRRAVTTFADNSRHGSRWAALVYQRARARGCRHQHAIRILARAWARILWRCWQDRTPYDIRRHRAAQMLGVA

SEQ ID NO: 272824 - protein, 340 aa, unidentified
MTITTVGIDLAKNVFAVHCVDQNGKTVLVKSRVTRAALPGLIAGFPPCVIGMEACSGAHYWARLFRQYGHEPRLMAAKFVSPYRMAGKSGKNDAADAQAICEAVRRPHMRFVPVKDESQQAMQCLHRTRQGFIEEKTATYNRLRGLISEFGVIAPQSTDALRHIVFEQKNSLPLQVQQCVDDLLEHVARIEDNIAEYDRILSRMAKTDHRSQRLMELKGVGPTTACALVASIGNAHDFKNGRQLAAWLGLTPSQYSSGGKSKLGRITKAGDSYLRTLLVQGARSVLIGAEKRTDLFSRWVCSLVERRGYWRAVVAIAAKNARLCWASLHYGDDFRLYSAS

SEQ ID NO: 272825 - protein, 419 aa, unidentified
MTQREDSKIIGIMHPICCGLDVHKETISACVIFPDKDGVDQYDIKEFGTFTDDLMHLRSWLLDHCCPVVAMESTGIYWRPVHNVLEDSVQVVLVNARDIKNVPGRKTDIGDSKWLAGLLRHGLLRGSFIPMKEVREWRDLTRLRKKYVHTVGDYRKRAHKLFESANIKIDSVVSDLFGVTGRNLMNLLVFDRKALTLEDIHQCVRGKLKGKEEELYRSIQGFFSDHHRFILKRLLHTIDLLEEEISMFDAQIRHLMKDQNALLDRMKKAAGIADVSSREILAEIGPDLTAFPTGEAMISWSGLCPGNNESAGKRKSGKSPVRKHHLKTIMIEVAWAAVKKKGSYFKDKYYRLKARRGAKKAIVAIAHRILLGLYYVIRDGVEFRDLGEDYLAQRNKAQKMSHLRKQAQLLGFNLVPQTT

SEQ ID NO: 272826 - protein, 353 aa, unidentified
MRIIGCDLHSRQQTLAMLNLETGEVEECVLLHEGDKVRDFYGALPRPVQVGIEATGSMQWFLELMEELQIECLVGHPAKIGAQEPRKQKHDRRDAQLLLRLLVERRFPAIWMPTAQQRDLRALLRHRHLWVRMRVRIQNALQAIALSHGLRRGAKLWNQEGQQSLRELRLAPHTRARRNELLRLYRHLQKKIERLDRQVAEVAEKRPLSRLLMTHPGVGPITALATEVYLGDATRFPDGKALSSYVGMIPAENSSGEKRRLGRLTKQGNAMLRFLGCEAVGHAVRQDVELKRFYTRKLAQKGLGKAKVAAGRKLGIRLWIMLRDQIDYHEFCRRGRQCGEAHAERPAREHSPA

SEQ ID NO: 272827 - protein, 374 aa, unidentified
MNTIYIGVDFHARQQTICYLKTETGELVTCELRHEDKEKVRAFYAQFPGPVIIGLEASGYSPWFEAMLEQLGCEVWLGDATEIRRRARWRQKNDRRDAELILDLMVHHEFPRLHRPTVQSREVLRMLRYRQKLTKLRTMSKNSLQAIALQSGLAKGSRLFTKAGETEFSAAEMSPVMHWQREHWLQLLQPLNQQLLETMVWFKAQSKGDVCVTRLRTHPGIGLLTALCLVHTLQPVSRFRNQRKVAAYVGFDPVERSSAERQRFLGISKAGSRVLRYLLVEATHTAVRKDEDLKRFYKRLVERRGRPKAKVAAARKLLIRAYIMLRDEIDYAEFRRRAVAARLARRGQRPAVPEVLIGQPAFAERQEPTHCSEK

SEQ ID NO: 272828 - protein, 342 aa, unidentified
MNHISIVGIDLAKHVFQLHAVDPKGRQIFSKKVSRSGLRLTLAQVPPCRVAMEACGGAHYWAREIQALGHEVQLIPPQYVKPFVLGHKSDARDARAIAEAAARDATPRVAPKTLEQQALQAMHRVRSRAIANRTALGNELHGLLAEMGICVAKGHSVFRQGEVRRLLAEHRAQLGDDLFVVLDDVLDQWLSLDARIHAYDQRLARLARATPVCRRLMSVPGIGPVNATLLASHIGDPRRFANGRSFSASIGLVPRQHSSGGKERLLSISKRGNGEVRRQLVHGARAALRAFQCQQQPDRLARWACALAARRGAAKATVALANKLGRICWAVMVRDTVYAATP

SEQ ID NO: 272829 - protein, 424 aa, unidentified
MKPPPEVAFAAFVGIDWSDTKHDICLQAGNSEEREFAVVPHRPAAIDAWASALRQRFAGRPVAVCLELAKGPLVYALQKHDFLVLFPVHPATLAKYREAFVPSHAKADPSDAQFALELLLRYRAKLKALTPQSVPMRTLLRLVEQRRRLVGDQSRISNRLTDALKQYFPDVLAWFADRDTLLFCDFLSRWPTLKQLKRARRTTLLSFFHDHHVRSQARIDERLQAIKSAVPLTDDPAVILPNQLLVLALVEQLRATLQAIESFDAEIATVSESLPDYALFRALPAAGPAFAPRLLAAFGEQRERYHSAAELQRYTGIAPVTECSGNQHWVHWRLQCPTFIRQTFVEWAGATIPRSFWAAAYYRQQRAKGCSHHAAVRALAFKWIRILYRCWQTRTAYDESTYLNALQRRGSPLLASMMQTAKNI

SEQ ID NO: 272830 - protein, 469 aa, unidentified
MPPKTQKNKSKKKIAAKTKPQQDPTQGLQVMNPRAGAIDVGCAEHWAAVAPGSTENPVRRFGCCTADLESLIDWLVACGTDTVVLEATGNYWVVLYDLLEARHLRPVVVNPRYAKNMSGKKGDIPDCQWMQKLHSYGLFANSFRPSEPLRALRSYLRQRESLVAGAGQSIQHMQKALTEMNVQLANVISDISGETGLRIIDAILGGERDPRQLARLKNERIRASLTELARSLEGHWKQEQLFNLEQARLTYAHFQEQILQCEQRIEQQMGAIQSRLPQGPRVSQCPTQPHGGPVPSPNVRLHPKYHLSTELRRITGVDLTAIDGIGALTAQVVLSEVGTDMNAWPTEKHFASWLGLCPDHRISGGRILGRSTRPVVNRARNALRMSAYTLEHSKSALGAKYRRLKRRLGAPRAIVAMAHHLARLIYRMLKYGQDYIDKGTEAYEAKYREQRVRWLEKQAKELNLKVVAA

SEQ ID NO: 272831 - protein, 421 aa, unidentified
MKEWKDITHYAGFDWARDHHAVVIVNVQGEIVADFQFEHSAEGWKSFREKTAAWPNLAVAIETNQGAAVDQLLQHDSTVYPVNPVASESYRKRKAPSGTKTDHVDGWGLADALRLDGRDWKPLQPIDPLTQQLRLLCRDEVLLIEQRTVLVNQLQQALLEYYPSARQAFDDWTCPFTWDFIIQFPTPEALLKAGQRRWEKFLHTHKLWRPETAEKRLGIFGQANEMKACPAITKAKSQLALSLCKLLRTLDQQLDGYRQQIEALFKEHPDHDLFGGLPGARKFLAPRLLAAIGTDPDRYGNHNVLQCFAGTAPVRYQSGQISKVKIRWACDKFLRQTVHLWANCFRKASAWGQTYYEKKREQGMNHACALRCLGQRLLKIVFKMLVDKKPYNAELHARNQQKHGSWVLKLINADPIQKGGE

SEQ ID NO: 272832 - protein, 344 aa, unidentified
MQIASIGIDLGKTVFHLVALADNSKVLVRRKFSRSQLLTYTANLPSSLIGLEACGGSHFLATALREQGHQVRLIPAQFVKPYRKSNKNDFIDAEAIAEAVTKQNMRFVAIKTQDQLDLQAMHRVRDRLMHRRTALINEIRGFLLDRGITFQNRPIHLRKNLPLVIEDADQKLSSRMRWLLEQMWQEWKQMEIDIESISNEIDRIGQEDAHCRRLRQIPGFGPLVATATVAAIGNGAAFRKGRDFAAWLGLVPRQYSTGGRPQLFGISKRGNSYLRRMLIHGARAVLLRVKYDTGGFGEWVKRLEERAPRNKVVVAIANKLARIAWAVLSSGNDYHHQPLQVNAA

SEQ ID NO: 272833 - protein, 414 aa, unidentified
MNYAACIGWDWASKTHELFIREIDTGKATLVKLPHSAPELHTWAMKMRAQYEGRSIAVAIEGHHKAVIGALMAYEFISIYMINPEAAANFRQSFHPSAKKDDPVDAEELCSMIERHEEKLRKFDPADAQSRLCGMLSETRRKFVEILVALVQSLRANLETYYPQALMLAGELDSPMAGDFLRQWPTFDKVARSREATVAAFYAEHRSRSAKKMKERLEYIKTSYPLTNDRALMEAGQAKTRALVEMIQTTRESIAKLEKEIKAAFDAHEKVDVIRSLPGLGDALGPRVAAIVTADPMRFQSAEELQQITGVAPIRRQTGKRKVQVLRRSRRPVFVHQTMVEWAGASLAFCPWAKAFYDLQKLGGHGHFSVLRKLAYKWIRILYRCLQTGTLYDETIHQASLKKRGSPVALKLAA

SEQ ID NO: 272834 - protein, 348 aa, unidentified
MKKIAIGIDFSKKTFDVTIKRRVDNDFIELGYSKFDNNEKGFKCFISWVRKSVKHLPEGKGRASWIFCGENTGICSAALSDYLVSKGFDMWLESALQIKRCSGIVRTKDDRDDSSRIADYALRYFNSDVHLHQLATDAYKKLRALYTLHNILTKDMVAKNNQIKSGTLDASPEALKLANRQLGLIREQLKDVDRQIERMLKENDEFSENYRIMDSIKGIGSITACCIIVKTHNFKYMADARTFGNFAGVVPSHREQSGTSVDRSPHLSKCRDKAPKATLSQAVNLALRYNPTIRTYCDRLVGRGVHINKAKNNCKFKLINIIMFFIKKKTAYDIEKYGVAKKKWNDAV

SEQ ID NO: 272835 - protein, 390 aa, unidentified
MQALYPRPDEHAAVRTDLKAIFVSLELSRSTWVITSLSPGGGEKMSKHAVPSGDIPALLARLSQLKEKARARTGQVFPIIVIQEAGLDGFWIHRVLQQEGIESYVVDPASIATSRRRRRAKTDRIDGEALVRALLAYKRGEPRVCAMVKAPTPHEEDRRRISREREVLTAERVQHVNRIKGLLLAQGIGDYAPLHRNRRERLEELITGDGRPLPECLKAQISRELDRLELLIEQIKAVEAERDAVLAQVQASSGVPAPAAQLLTLRGIGPEAAATLWTEGLFRTFSNRKQVAAYAGLAPTPWQSGSVHRDQGVSKAGNPRLRTIMIQIAWLWLRHQPQSALALWYRARIKRTGGRLGKTMIVALARKLLVALWKYATAGVLIEGAVLKPA

SEQ ID NO: 272836 - protein, 358 aa, unidentified
MSKMLYVGLDVHKDTIPVAVAEDGRGGEIRFHGAIVNSSDAVLRLTKTLTKNGCTPSFCYEAGPCGYGLHRYLTKLGFECAVVSPTMIPRKSGDRIKTDRRDAVMLARLWRAGELTPIWTPDEEQEAMRDLIRARKQAMDAVKTAKQQLLSFLLRHGLRYENGKYWTQRHRRWLAELRRFRFPHQQLAFEEYKRAITQAEDRVATLDKVIDDTIPGWHFAPVVDALRALRGVNTTIAATVVAEIGDITRFENPRQLMAWLGLVPSEHSSGSTKRRGRLTKTGNALARTMLVEAGWSYRHPPKEGQPYLKRSAHLPQHIKDIGWKAQTRLCKRYRNLSRTGKPQPRVLSAIARELAGFV

SEQ ID NO: 272837 - protein, 412 aa, unidentified
MDPIFDSCAGLDVHKRSITACVRRLRPGRSIFQEIRTFGTMTRDILELADWLASEEVTHVVMESTGVYWKPIYNLLEDRFTVLLVNARHVKHVPGRKTDVQDCQWLAQLLQAGLLKGSFIPERPQRELRDLTRHRAQLVAEKTKVINRLHKVLEDTNIKIGAVASDLLGASGRDMLRALIAGQQTPQEMANLARGQLREQIPQLVLALEGKVTEHHRFVLAELLDHLEDLERRIERFSHRLEEVSGPFDQAIQILMQLPGIERRGAENIVAEIGATLEAFPSAAHLASWAGMCPGSNESAGKRKSGKTTKGSRWLRSALCQAAWAATRKKDSYFQAQYRRLAGRRGKKRALVAVGHSLLVVIYHILKDNLTFKDLGADHFEKLNVKRLIPKLVKRLENLGYEVNITPLKDAA

SEQ ID NO: 272838 - protein, 384 aa, unidentified
MKTKTTRSAQFTEKQENLYLAFELSNSTWKLGFSVDPGQPVRERDCPAGDTEKLQKEIEAAKKKFGLSASAEVRSCYEAGRDGFWLHRYLTKNGIENLIVDSSSIEVNRRAKQTKTDRIDVKKLVSMLMRYYSGEKKLWSIVRVPTVEEEDRRHLHRELKGLKKERTRSINRIRGLLANQGVKVKLTQSGSSEWIEQIRLWDGTSLPKGLQTRIKREWAYIRYLNDQILAVEGDRRKELQRPDGEKERDVKQVEQLLGLRAIGINGAWVLVREFFGWRKFKNRREVGGLAGITGTPYNSGESGREQGISKAGNRHVRGIIVELAWAWLRYQPKSKLTCWYQRRFGNGTSRQRRIGIVALARRLLIDLWRYLEFGVLPEGAELKS

SEQ ID NO: 272839 - protein, 681 aa, unidentified
MRGQRNEISFRGQKIYIGIDVHLKSWSVTVLSETSVLKKFSQHPSPEALHGFLARSYPGAEYHSVYEAGFCGFWIHERLTALGIDNIVVNPGDVPTKSSEKLRKSDAVDSSKLARSLRANELKGIYTPDSASLEMRSLIRLKNSITKDTTRQKNRIKSQLRYLGIGIPQEFLEPFSNWSKRFIAWLKEVETLTPSGRQALDIQIRHLEELRRQKLEMTRALRTLAKTDRFREPLRLIMTVPGFGQATGMAFLSEICDIARFRNAEQLAAYIGMIPMCHSSGEKDGTGDITVRRNAVMRCNLIEAAWVAVRQDPAMNLFFTEQCKRMPKSKAIVKVARKLVNRLYFVLKHQTEYVNDVMKTAEEFHNSMPECIRTEKPIVHISLNPDPKDEIDDELLITIAEEYLDGMGWGNQPYIIYKHTDIERIHIHIVTTQVDITGRKINDSHRNRRSVAVIEELEKKYHLHPAKEQKKVTLWQLKPVDYHKGDLKNQIAAVVKPALAMYRFQTMGELRALLALYRIGVEELQGTRAGKPYHGLVYTVLDENGEKAPVTPLKASSLGDDASLKKVETILASSPEKIKSANLHKMTLHHVEEALIEALSEEELCKRLKPHHIDLFLRRNAHNRITGVTFIDHENRCVLNGSRLGKRYSANAFNERFNAVKETRETSRQVKKESNIKLKKR

SEQ ID NO: 272840 - protein, 303 aa, unidentified
MQGKAMPEPNAMPVYVGVDVCKEWLDVHVHPSGQTLRVSNDRVGLKRLKRMLAPLPVARILMEATGKHHRAAQRSLHAADLAVAVVNPLRARLFAEAAGTIAKTDAIDARLLAVMGAALEPAETAPPPAALEEVCELVNARTAATAELRRRCDACQRHIERLDAEIERRILAQPDMARRHAILCSIPGIGPITAAIFLAGLAELGTCSAKQAAMLAGVAPVANDSGDKSGRRAIRGGRMPVRNAAYMAALSASRHNPDLAAFAKRLKNAGKRPKIVIVAVMRKLVVLANTLITQNRLWTPIAP

SEQ ID NO: 272841 - protein, 448 aa, unidentified
MKQKKPIKRKSIKLPKHLLNLNPYAAGIDIGSKSHFVAVPEGTDEQSVREFSSFTDDLEQLAQWLTACGVTTVAMESTGIYWIPVFEILESYGLEVRLVNARHVKNVPGRKSDVLDCQWLQQLHTYGLLRGAFRPADQVCALRAYVRQRSTLVRSSASHIQRMQKALAQMNLQLHNVVSDITGVTGMRIIKAILAGERDTKVLSGMRDPRCKNSEETIARSLQGNYRQEHLFSLRQAVELYDFYLAKINDCDQQILEQLKIFDASDDNDKPDYKPPKNIGEALQRMSGVNLADINGIDTNTALKIIAEIGIDMSRWKTAKHFASWLGLCPGTKVSGGKILSSATKQVANKAAAALRMAAFALINSKSALGAYIRRQRARLGASKAITATAHKLARLVYSMLKNGTTFTDAGQDYYEERYRTRVIQNLKRKAQEMGYKLVSIQDEPQTA

SEQ ID NO: 272842 - protein, 372 aa, unidentified
MENIIYIGMDVHKESFSLCALHGTTGEIVREARCASNVSLVKKFVEKLKTKYGEDIKIKAGYEAGCLGYSLHNLLEQNGIDCDILAPTTMYSSSKNKMVKNDRFDAKMIALNLANGTYKEVYVPEEEDVAVKEYIRMLGDFKTSLKKIKQQIKAFLLRHGYIYEGKSSWTIAYMKWLKNLDLQGLFKETLDEYLLQYDVLVDKIERFSLRLEELSHSERYEEPVAKLRCLKGIDTTSAMTVHVEIADFTRFPTAKAFMAYVGLTPSESSSGEKISRRSITKQGNSTVRSTLVECANALVKGAIGLKSKRVKARQKGQRSEVIAYADQAVERLQRKYYRMIYQGKPRNVAVTAIARELGCFIWGLETGKIHRK

SEQ ID NO: 272843 - protein, 465 aa, unidentified
MSRRSKSNRSHSDRVKKRIAGHLEKINLFAAGIDIGSESHFVAVPEELDEQPVRSFGCFTADLEAMADWLVKLGITTVVMESTGIYWIPAFEILESRGLDVKLVNARHVKNVAGRKYDVLDCQWLLQLHTYGLLNGAFRPDEQVCSLRSYRRQRDTLVGYRASHIQHMQKALRQMNLLLDNVVTDITGKTGMTIIRAILNGQRNPVELAKYRDKHCKKSEEEIAKSLKGHYRDEHVFALRQAVELYDTYDEKIRACDKALEQKLNTFDSKDDKDSQKPSTPDKPSKKRKSRCAPDFDVRSELNRVSGVDLTDIDGIDENTALKIVSEIGLDMSRWPSAKHFASWLGLCPGTKISGGKVLNRKTKRLPGAAATAFRLAAYSLTRSKSALGAYYRRMRSKLGAPKAITATAHKLARLVYSMLKHGSQYVDEGQEYFEQRYRERVLKTLKQKAKDMGFTLTPVETAVG

SEQ ID NO: 272844 - protein, 330 aa, unidentified
MKSWDFTLGVDVSKKTLDISCSELNEHIKIINGSEGFTLFLKWCKNLNIDLPNSFLVMEYTGGYEYKLIQFCVSQKIKYARIPGLAIKNSLGITRGKNDKVDSFRIAQYGEEKHKSLTPQKPVSPVIIRLKELLSFRKRLVRENAGYQTTIKERVHMFGENKKDIIARTLKSKLKTNVKNIEAIESELLNIVLQDEEININYNLITSIKGIGKINGLMTIAYTENFTSFSNPRSYAVYVGVVPFDHTSGTSIRGRKRVSHIANKELKQELNQAARSALEWDKEMKIYGERMLQKKCYKIVLNNIKFKLILRMFAVVRNGEMYVDHYRNVA

SEQ ID NO: 272845 - protein, 340 aa, unidentified
MLSVGLDIHTKHIALCVLSEAGHVVQRARVRGLEELLRLLKGLPDRFEVCYEASCGYGHYHDLLRPLAARVLVAHPGRLRLIFRSRDKNDRKDAERLAKLLYLGETPTAHVPSLDVRTWRELINCRSQVIAKRTRAKNALRALLRGAGVVPPKSPGPWTKKGLAWLRQLGLPTASQQLRRDLLLEEVEALNGQVRRLEQELNRRAQQTPAVARLRSIPGVGIRTAEAVAAFIDDPQRFRHAKAVGRYFGLVPCQDQSGDKNRLGHITREGPAVVRRLVAEATWQAVRRSPAVRAFLERTQRGDPQRKKIAVVATAHYLVRVMWALLKRGTVWQENEARAK

SEQ ID NO: 272846 - protein, 341 aa, unidentified
MEHYAGIDVSLECSSVCVVDGNGKIVREAKVASEPQALIAWFGSLGFGLERIGLEAGPLSQWLFAAMKEAGLAVELLETRHVRKAFEAMPVKSDRNDARGIAQLMRLGWFRPVHCKSMSAQETRSLLTARKLVQSKLHDVENSLRGILRGFGLKVGKTTGQTFAGRIEELVAGHPHLQTIARALLAVRTVLRAEFAAFEKQTRRMVRSDMQARLLTSVPAVGPIVALTYASAIDDPARFKSSKQAGAHFGLTPKKHQSGETNYTGRISKIGDASVRTALYEAANVMLTKPVKGCSQLKSWAMRIKRRAGMSKAKVALARRLAVIMHRMLADGTPFNAAAAA

SEQ ID NO: 272847 - protein, 365 aa, unidentified
MAEITRSAVARVGVDLSKRVFQVHAVDRSGRMLLAKALSPDRFFAWCAVLPASCLVAMEACGGAHHVARRLRLLGLDVRLIAGHFVTPYRMAGKSGKNDANDAAAICEAASRPHMRFVPVKTTEQQGQLAVHRLREGFKEERTALINRIRGLLAEFGLVFPQSPEALRAVLADVIEDAGNELPGVARLALQRAQLHWIEIELQMSWCDERIAHHVQSDARAKAAATLQGIGPVTASALVASVGDFGQFTNARQFGAWLGLVPSQNSTGGKASLGRITKRGDDYLRTLLIQGAKSAVMSAGKRSDRISSWLVQLKERAGWQKAVVALANKNARILWAVLTRGAPFNPDHVPEPPAARCCLKPNTAD

SEQ ID NO: 272848 - protein, 422 aa, unidentified
MGNGVRLEDEELRGKVVAGVDTHVDTHWLCVLDESGRVALSEEFPATAEGYAALAGAIGDPAGCAAVGIEGTCSYGAGLAEELARRGFRVLEVLNKKKERRRGRGEGKDDAMDAERAARDVLAADGTSVPKLRGGWVDDLRSLLVARDRCVSARVEAHAAALSLARCAPDAERRRWEGMSQQAMMTAMAGIEGEGATALGRSMLALARAWRACSDEAEALEAELRRVLERSCPSLLAVYCCGPVSAAQLAVAAGENPSRLRSEASFAMLCGAAPIPASSGKTSGRMRHNRGGDRRANSALHTIVVRRMRYDPETRAYVERRRSGARPLGRAEIMRCLKRYVAREVYRALMHPHNVGEMVDRSSLRQARLSAGLTQAQAAKALGVSPASVSGVETGRNQCRRLAERYSRWVMDGLPVDVESPQ

SEQ ID NO: 272849 - protein, 341 aa, unidentified
MRKTLFCGVDLHSNNAMYVIADGRDKQLLAKRLPNQLPLVLGALEPFRKQLQVVAVESTFNWYWLVDGLMEHGYPVVLANPSEMEQYDGIKEADDLTDAAFLARLARLNILPTGYIYPKEDRPVRDLLRRRMLLVQQRTALVLSLQNLAVRQSGRAVGWRDIRRLDETDRAELLGRHDCLTFVADQQIDLIEQLNEKIKRFEKKVLEHAQLKPTYERLQTMPGVGVILALTILLETGDVGRFPTVGDYTSYCRCVRATHRSNSKKKADHNSRNGNAYLAWAFVEAVHHAIRVCPKAKSFYDRKRAKRNGTLATKALAAKWSKAAYYVMKRQEPFDLARVFG

SEQ ID NO: 272850 - protein, 329 aa, unidentified
MNYTAFIGIDVSKLTFDAFICGKHVKQQFDNNDKGFSDFMHWLKKHLSAIELKSALICFEHTGIYSLSLSLFFQQQSVLFTIVPALDIKHSIGTTRGKSDQLDAQRIAAYAYAKREKLIPTKLAPKVILRLQPLLSLRDQLVTDRARYKSTCKEREAVYKQDGYFELFTTYQDLIQVLNEKIKAIDQTIEYLLIHDPETKTIYSLITSVKGIGPLTAAYLIVYTHNFTRFDCWRKFACYAGIAPFPHTSGTSIKSKTRVSHLANKHIKSLLFLCANNAVKTDPELKAYYQKRVNEGKSKMSTLNVIKNKLVARVFAVAKRQTPFIIKAA

SEQ ID NO: 272851 - protein, 388 aa, unidentified
MAALTFVTQTRPFVIGVDCHARTHTYAIIEANTKRQVACEQFPTTPGGISRALAWVGRRTDGDMACLWAVEGIGSYGARLAKAVTDAGYDVAEAPRMNARVRRGIGKSDPLDAAAIGTAVLGLEVSQLRTPRRDEGIRAGLRILNAARDQLTRDRTVNVNALIALLRAHDLGTDARKPLVSAQIASISRWRERDEPIELSIAREEAVRLARRVLEVTTQLSANQKRMTELIQQSPAAPLLEIVGAGAVTVATVLTAWPHPGRVRSEAAFASLAGVNPLPASSGNTVRHRLNRGGDRRLNRALHTITMTRMVHDPGTRDYVAKRTQEGRSYREIRRSLKRYIARTLYRQLNTLYTTEEPPRTFVAGEAPGQGEKGYPSAAVCLEVPASH

SEQ ID NO: 272852 - protein, 429 aa, unidentified
MNDREIIRLEQFRQLKKEIRGSEEHLIIGIDVAKQKHNAFLGTATGKTLLKRLVFENNKEGFEKLLMHVESISASNSHKRVTFGIEPTANYHKPLAEFLINKEHDLVLVSGVAVKRNRELLDGRWDKNDMKDSANVADLISQGKCLFYEYPTHVLRDLRSFLSLKKKFKKIEHGFRVRIRNHLLAQYFPELDRYYGHNEPENLAIVRWCLSPSKIAEMKYEDFFRLVTTRDRGLTQHRRLKAIWDSAHYSIGCSTGMAAEFEAEVLVEALKRIRETIGSINEKVIEICVLFPEYQYLLSIPGFGPVISAIVIAAIGDPFRFESGNQVLKTAGWDLNANRSGKRSDSVIPVISKRGKSDLRYALYQAALIASTRNKHVTSWFIEKLRGREKEQGIKTKMRVKLAAKLLIIAWTLMKKKESFNPELLKIKK

SEQ ID NO: 272853 - protein, 404 aa, unidentified
MYNAVGIDVSKAKSTVAVLQPGGTVLRKPFDVSHTSQSLHELSDYLGSLDGNTKIVMECTGRYHEPVVKVLSEAGLFVSVVNPHLIKNFGNNSLRKVKSDPADAKKIARYTLDNWAELRQYSGMDNTRTQLKTLNSQFSFFMKQKVAAKANLIVLLDNTYPSVNKLFDSPVREDGSEKWVDYAYSFWHVDCVRRIGLKAFTERYRAFCKKHHYIFQPDKPEKLFNASKELVAVFPKEKTYKLLIQQSIQQLNLASEHVERLRKEMDELASTLPEYSTVMGIYGVGKTYGPQLIAEIGDVSRFTHREALTAFAGVDPGVDESGQHKSKSNRASKVGSARLRKTLFQIMTTLLQNAPQDDPVYRFLDKKRSQGKPYYVYMTAGANKFLRIYYGKVKECLRNLEQAE

SEQ ID NO: 272854 - protein, 422 aa, unidentified
MSKHRYQAIELQTVDWSALAREVAAQRLVFSVDVAKENFYGAFMVSPLAVLCTIKWRHPDETPALGRFLADLPAATIEVPLEPSGTYGDSLRGFLRGLGFEMYLVSPKRVHDAAEVYDGVPSLHDAKAAYLIGRLHLEGASKPWREAPERRREQQALVAELDLYQSEHRRNLNRLEALLSRHWPELGRVAELNSAGVLHLIAEYGTPRAVCENRTQAAAFLRHARRGVDNPVLVAAILDSAERSLGLPGTEGERHLLQVLAEELLRTRKALQALARRIVGQVNQDPQLRLVGAAFGKATALVLETALGSPLDYPDAHAYLKAMGLNLKERSSGQHKGKLKITKRGPGRARHYLYLSAMRFVQKDAVVRAWYRKKVERDGRIPRHNALVAVMRKLGMAIWHVARGSVFDSRKLFDFRALGMGA

SEQ ID NO: 272855 - protein, 322 aa, unidentified
MAISILGVDISKKTFDVALLRIGKFKHKKFRNSESGFKELSVWLDRLKADELHVCMEATGTYGEALARYVYDADFKVSVVNPARIKGFSQGELMRTKTDKSDASLIARFCLAMTPSFWAPEAGEIRLLRDFSRRYESLLEVRQQELNRLDVIGVELKSDVENHISYLDTSIVEIRKRIRDHIDHNPDLKRKKELLESIPGMGEVTINVVLSEFADISRFDSAKQLASFIGLAPKHRLSGTSVRGRTSMSKIGNAKVRKSFFMPALVAMRYNPILIEMRKRLLKAGKPKMLIVGAVMRKLIHIIYGVLKNNQPFDPHFQAKNA

SEQ ID NO: 272856 - protein, 330 aa, unidentified
MEREYIGIDLHKQFFQACAVTPTGIRVWEQRFPRTDGGLVLFRERCTSMTAIAVEATGPTWAFVDALRPSGATVCVVDPRKTRLKAGYAAKTDRLDARRLADALRRESVVSIYVPPPAVRELREVCRGRHQVVRLRARIAQMIRALLLRSGVSDVPVTRVFSARGLAWLSQVQLPSEAGASLERWRRVLLAVQAEATVAEAMVKARATADAIARALDDLVGIGPVLALTLRAEIGDITRFPRGAALASYAGLVPRVDASADRYWSGRITREGSPWLRWALVHTAIHAIRRQDGLGRWARQLAMRKGVYKARVALARRLCDEVVTVWPRCA

SEQ ID NO: 272857 - protein, 431 aa, unidentified
MSKFFYRPTVGIDVSADFSVVAILSPDGEIYRKPFKIIHNRNGFDYLVDQIKKAEEEFNMKTAIFMESTGVYHLTLFHFLKDTFEVCILNPLITNCNKNGDIRKVKNDKKDALTIATIGKFQNVKYSSDFDVEIYTLKSLCRDYYKFTDSKSTFKKKLSADLRVIFPSYSSVFSDITGKTSIAILKTYSSPEAVLSANRDELINLISTNSRKGLTHSEKIYKKLYDAADEAAYIGLKSPSLFVKIINTIAVIESLEIQIGNLLTEIHLLMRSTRISDEFKKNVQLLYSIPGVGELTAITIMSEIGNIKGFVKPKHLVAYFGLDPSVSQSGKFNSDRNAMSKRGTRIGRRALYAVALTSIRKNRNGEPINRVLLNFYNENMKDKKKKVGLVAIMHKLINYIFSVLKNQKEYELRDPKIHSKMYLNNKSKQTA

SEQ ID NO: 272858 - protein, 431 aa, unidentified
MNSSLNNDHTQNTYAAFIAIDWADQKHTFSLQVAGQAKKETGTLEQKPEIIGPWVAKLRERFGGRPIAVAVEQSRGALIHALLAYDFLVLYPIHPTTVAKFREAFKFSGAKSDPLDTDQILEILTKHLELLKPLNPDTQETRLLGRLVADRRNAVELRTSHIQALLASLKEYFPQAIELVSGNLTSRLAGDLLKKWPTLESFQQAKPSTIKRFYYGHNVRSPEVIETALKLAISAQPLTTDSAIIESSRRVSEMHSQMIQALNPVIDAYDQRIEKVFHDHPEFPLFSQLPGAGPVMAPRLSAFFGTDRSRYAKAQNVQTFCGISPVTKSSGKTRVVYFRRACPQFQRQSFHEFARLSVASCQWARNYLDYYTGKGKKYNTVVRSLAFKWIRILFRCWKDRTVYDDNKYMEILKKRGSIFATLHLEQKNENC

SEQ ID NO: 272859 - protein, 348 aa, unidentified
MLIIGCDYHPGFQQIAWVDTETGEADERRLAHREEAEQFYRTLKGRRVRIGMEASGHARWFERLLNDLQFELWIGDAAEIRSKRVRKQKTDRQDAQLLLKLLMEDRFPRIWVPDEANRDLRQLLWHRHRLVQMRTRIMNQLHVVALNEGVRRKKALWRPAGRSELESLPLAPWASRRRQDLLDLLDQLTPKIQELTRALEQEVEKRPVARRLMTHPGVGVLTALAFELVIGTPERFGCGKQIASYVGLVPTEESSGDRRRLGHISKQGNALLRFLLVEAAQVTVRSQPQWRSKFFHLAMRRGRKIAKVAMARKLAVHLYWMWRQGLDYGQFGKLGSHAGEPGNRQGVQ

SEQ ID NO: 272860 - protein, 388 aa, unidentified
MSQTAAVLTPAAVDYERTLVLSIEVSNKSWVLAAQVPGLPHTKAKRTINPEAEALSAAIAGYRARAAAVGRSIERVIAVYEAGWSGFWLARWLMSHGVEVYVIQPSSVPVDRRMRRAKSDGIDAELLLRTLLAWLRGEPRVCSMVPIPDEADEDARRGVRERAELISERVGLVNRITAVLATLGVSDYNPLLRNRHHRLAELRTGLGKSLPLNAHAKIVRLLARLELVLAQLAVLEHERDAVMEADASDQASKMIQQLASLRGIGVQSATVLVREAFVRRFANGKALGSYAGLASSPYSSGGIDREQGIGKGGNRRVRTVMVELAWLWTRYQPAAAQVCWFRERVGSTGRRVRKVMVVALARKLLIALWRFVTDGVIPAGAVLKPAAT

SEQ ID NO: 272861 - protein, 353 aa, unidentified
MRTYYVGMDVHRASIVIVVLNGAGKVVMEYVTETSAGRVRDFLKQLKGKVYITFEEGTQANWLHDIVRPLVTEVVVCDPRQNKLLQSGNKSDRVDAQKLAELLRNGALKAVYHGDHGMRMLKELVRTYDCLVSDTTRVMNRLKAIYRGRAIACSGHDIYRPDRQKQWLKKLREPGARQRADFLYRQLAALKPLRHEAKRLMVKETRRQTAYPWLLSVPRLGVVSVAQLLAIVGTPHRFRSKRQFWTYVGLAVVTRTTADHEVINGVMQRSRRPIATRGLNRNHNHVLKRVFKNAATTACHSGPFKAAYEARVKQGMDASLARLTIARQLAAITLALWKRGQRFDPERMKLQAA

SEQ ID NO: 272862 - protein, 349 aa, unidentified
MKVNTIGVDLAKNVLQVHGVDEQGKVVLRKQLRRNQVMNFFAQRTPCLVGMEACGSAHDWARRLIKLGYTVKLMAPQFVKPYVKTNKNDAADAEAICEAVRRPNMRFVPVKTEEHQAVLSLHRARQGFVRQRTAQANQIRGLLAEYGVVIPQGIRHIGQCLPEILEDADNALPGLFRQLLRQLGEHLKTLTRLEEMEEQMQQWHGGNEASQKLAAMPGIGAITATALVASVGDARNFSNGRQFAAWLGLVPRQHSSGGKTTLLGISKRGDRYLRTLLIHGGRSVIAAAERRKTSPVEESLTQQRSWLQGLVSRRNKNVAAVALANKNARVIWALLAHDRSYQAGYAVAA

SEQ ID NO: 272863 - protein, 355 aa, unidentified
MNGVRYVGMDVHRDTISVAVLDEQGRLMMQSVLATRAAAILDFIHGVRGTLHVTCEEGTHSAWLYDLLVRRVAKLVVCNPRKNALLKSGSKNDAIDAHKLAELLRADMLSAVYHGETSGLEVQHGARSYTMLTEDTTRVMGRLKAVFRGQAVSCAGKKLYGKRQREDYLAQLGTGGLRRRAECLYQELDVLQQLRRQSRRELIVECRKHAAARWLQSVPFLGPIRAGLLIGRVQTPHRFRTKRQFWTYCGLALETRDSGEYRVVNGQVERKHKPALIRGLNWNHNHEMKNLFKAAATTASIREGVFREFYLGLLAKGMRPEMARLTLARKIAAIALQIWKKGEAFDAEHLKLQAA

SEQ ID NO: 272864 - protein, 399 aa, unidentified
MLEVLIGSCAGLDVHRRQVVCTVIREGRKETREYATFTRELKELAVWLGREQVELAVMESTGIFWKAVFASLEEAGIQGCVVNARHVKQVPGRKTDVCDSEWLAELGRCGLLRPSFIPPRDLRELRLLTRYRRKLSGIIAGEKNRLHKVLDDAGIRLGCVVSDIDGVSARSMVEALIEGGFTPEQIAGEALGQLQLALEGEISDRHRLVLKKIQSHIKWLERHTTLIDAQIVVGMKPYQEEWKLLQTIPGLDALSAAMLLAETGVDMSRFGSKDRLCSWAGMCPGNQESAGKRKTGRVRKANSYVRSLLCEAANSARKTRSQFQGFYKGLVIRRGHKRAIVAVGHKILEIIYVLISRKEPYRDPEIDYEALVVHRNAPRWIEALSKYGYLARLQRSAQR

SEQ ID NO: 272865 - protein, 365 aa, unidentified
MPSVSHLAPTYLGLDVHKDTISVAILAPDRDGLDVDRIPHDEASVRRLVGRLGDPRWLRACYEAGPTGFELARLLDRMHVRCEVIAPSLIPKAPGDKVKTDKRDCRRLARLHRAGELVAIRVPTVREEAVRDLCRARADMVIDRTRARHRLGMFLLRHGRPWRGGNAWTLTHERWLLAQHFEEPALAATYAHYRAVLAGRDAQLEAIGADLAGWYDRAPFADAVHRLAAYRGITRLGALTLASEVCDWRRFPRAAAFAGFCGLVPSEYSSGSTTRRGHITKTGNAHLRAQLVESAWSYQHRPAVGADLRERQQGLDPQVAARAWAAQLRLCGRFRRLAARKDSKNVVVTAIARELTGFLWAEMAA

SEQ ID NO: 272866 - protein, 386 aa, unidentified
MQNLNDLSRSLIALEPAVTLIAVIEMSLSSWLVAGIVPGLERQPLKKLAVDESALLKLLHRWREEAEKAGCRIERIVVAFEAGRDGFWLARWLKARSIEAHVIHAASVAVSREHRRAKTDRLDTELLKRAFLGWLRGERDHCKVVAIPTLKDEDAKRPNRERENLVGEQSRLINRMKAALIRLGIRGFNPKLKRAAGRLDSLRTPEGEPIPPNTLAELRRDMERRRLVRNQIRQIEQARLEHFEQTPNDGPHAMVRLLARVIGVGVETADMLVHEVLSRNMRDRRAIARYAGLTGSPDESGRKRREKGLARSGNGRVRRGMIQLAWRFLTYQKQSALAQWYRARTVNAVGARKPMIVALARKLLIALWRLVRQGVVPDGVVLRPAQ

SEQ ID NO: 272867 - protein, 400 aa, unidentified
MDETPRFRWFLGIDVSKERFDACCINLKGESLFSLSTSMNRKGFEELIKQLSCLSVSQESVLVGMESTACYHVNLYSFLVSSGYTVIVINPLLISNFVRLQLRKTKTDKKDASVIAQFLLLNRDSLCQTLISSDVSELRDLSRQRESLVDQMSSIKSDIKRLLSVTFPELEQIAGVFSKSMLRLLCHYPSAASIKQLKRSQIAKILIPGSYGKQTASSVERMIKAAQGSIGTTSPAKEIILKQKASLLMQLEQHLQELTDILKQLCQEKIQQDTGILTSMKGIGEKSAMNFLIEMGGDIKQFERHQKLIAMAGLDPALYQSGKIDRKGKISKRGNRHLRRIIWLMTTKVIQFNVRFKQYYLKRIKDGLPYKMAVLATAHKLIRVMFAMLTNRTLFDARMN

SEQ ID NO: 272868 - protein, 347 aa, unidentified
MPVMIGVDPHKASHTAAALDEHGHLLGQQRVAASVDGYQELRRWAGRWPQRCWAVEGAHGIGRALAQRLVGDGDQVLDVPAKLAARVRVLSVGHGRKSDPHDAVSVAVAARHAPSLRQVRMDDQTVVLHLLTKRRQDLVAARTQTINRLHRLLMDLVPGGARRNLTANRAAGLLARVTPAGAPAVTRWQLATELVADVRHLEQRIAVVEVRIKTAIAESRTTLVELFGVGPVLAATFLGEVGDVGRFPTRHHFAAHTGTAPLEASSGQVIRHRLSRAGDRKLNHALYMMAMVQVRRPSAGQAYYRRKLAEGKSPKEALRCLKRRLSDAVYRCLIIDQQRKADPTALA

SEQ ID NO: 272869 - protein, 353 aa, unidentified
MLIIGCDFHPGFQQIAIFDNQTGAYEERRLSHRAEAEQFYRALAGQEVRVGMEACGHYPWFERLLAELGFELWLGDAAKIRASVVRQQKTDRRDAEHLQMLMREDRFPRIWVPSLEERDVRQLLVHRHKQVQARTRTKNQLQALAMSQGVQKKRKLWTAAGRAELESLELLPYAAQRRRQLLHRLDALEAEIAGLNRQVEEEVKGRPAAVKLMTHPGVGPVTALALVLTLGPAERFRDGRKVGSYFGLIPSEYSSGGRQRLGHISKQGSSFVRFLLVEAGQSAARKDAELGRFYRRLGARKHRALAKVAVARKLAVRLYLMLREDWTYAQLCRAVVQASPSHSVAASSNRPLE

SEQ ID NO: 272870 - protein, 395 aa, unidentified
MNKIVHYIGLDVHKETIAVSIAPQNSTEVRRYGIIGGTLDAVDKLVKKLAKEHTELRLVYEAGPCGFVLCRHLRNKGLHCEVIAPSLIPKKASDRVKTDRRDADQLARLYRAGELTAIHVPDQLDEAIRDLVRARTSAMTDQRQARNRLKGFLLRLGFRYTGKSSWNDAHKRYLSGLVMPQGPQQIAFQEYIHAINDATDRLERLAQAVQDALPGWKWEPVVRALMSLRGVQVLTAMTLVAEVGDFSRFDDPRSLMHFFGLTPSEHSSSDKRVQGGITRCGNAHCRRVLTEAAWHYRLKPKVSETIQKRQEGQSKQVRLIAWKAQERLHKRFHQLSAKKKSVVAATAVARELVGFVWAIACQVKPAEQPAAPEIIRTCRGKVYRLDPEKKFQKNK

SEQ ID NO: 272871 - protein, 310 aa, unidentified
MDRIVVGIDVSKDRLDVAVRPGNEIFSVGRNAAGLEQLVARLRELSPRVVALEATGGFEIVAAAALGAAGLPVAIVNPAQVRAFAKAIGQRAKTDPIDARVITHFAEATDIEPRPLPDEQTRLLADLVGRRRQIIEMIGAERQREQRLSAPRLRKSIARLTKALEKELASLDTDIDEAVRGSPAWRAKEELLASVPGVGPVIARTLIAELPELGQLGGKEIAALAGLAPFTRQSGKWRGKSFIGGGRPAVRAAIFMGAMVAKKHNPVLKAFFDRLVAAGKPKMVALIAVARKLLTILNAIVRDNRPWQSA

SEQ ID NO: 272872 - protein, 356 aa, unidentified
MSTRKVQDFVVKGKEVFIGLEDSKKTWKIAVRSEKMLIHRASMEARCPVLIQYMRNKFPECTIHLMYEASFKGFNLYDQLTEDSIDCVVIPPHVVTEPKVTRVKTDKRDALRLALVLENHDFKDPCYVPDKERREDRQITRTLIAIQKDIIRTRNRVRKFLDFHGIAVSFPDRWGREEFRALKKLSLSESLRISLNILLTQLEQLWVHQTSLRAALRQLCSTERYQKAFKIARSLPGIGWFTAIRFVLELGEDLSHFTSGKKIASFVGLTCSEYSTGETVAKGRITGMGSGFIRATLIENSWTAIRKDPVLLAKFTRIWRGSGSKKKAIVAVARTLIVRFRACILSGTPYAAGVIQ

SEQ ID NO: 272873 - protein, 365 aa, unidentified
MNAIYIGVDFHARQQTVCYLKTETGELVIATLRHQDKEQVRAFYQQFAPPVIVGLEASGYSPWFEALLERLGCEVWLGHATEIRRRARWRHKNDCRDAELIWELMVHDEFPRLHRPTLASREVLRMLRYRQKLIKLRTMAKNSLQAIALQAGLAKGKQLFSAAGQEEFRAAALSPVLHWQREHWFALLQPLNQQLLETMVWFKTQSKDDRCVTRLRTHPGLGLLTALCLVHTLHPVSRFRNTRKVVAYAGFDPVERSSAERKCFLGISKAGSRLLRYLLVEAAQTAVRYDEDLQRFYKRLAQRRGRPKAKVAAARKLLIRAYIMMRDEIDYAEFRRRAVAARLARTGQRPKVPEVLIGQPASSGQ

SEQ ID NO: 272874 - protein, 402 aa, unidentified
MNAVGIDVSKGKSMVAIMRPFGEIVSTPFEIIHTTSDINSLVELIKSVEGESRIVMEHTGRYYEVLAHQLSEANLFVSAINPKLIKDFDIDSLRKVKSDKADAVKIARYALDKWQNLKQYSVMDELRNQLKTMNRQFGFYMKHKTAMKNNLIGILDQTYPGVNTYFDSPARSDGSQKWVDFASTYWHVDCVRKMSLNAFVDHYQNWCKRKKYNFSKSKAEEIYGKAKELVPVLPKDEITKLIIKQAIDQLNSSSTTVESLRTLMNETATKLPEYPIVMAMKGVGPSLGPQLMAEIGDVSRFTHKGAITAFAGVDPGVNESGSYEQKSVPTSKRGSSDLRKTLFQVMDVLIKTHPQDDPVYQFLDKKRAQGKPYYVYMTAGANKFLRIYYGRVKEYLSSLPES

SEQ ID NO: 272875 - protein, 337 aa, unidentified
MSTIHILGIDLGKHCFHAVGNNHTGKDVIRRKFSRSQLFRFLSVLEPTIIAFEACGGAHWLARKCEVYGHRVRLIPPQYVKPYVKGNKNDFIDAAAIAEAASRPSMRFVSAKSEEAQVIATIHRVRDGYIKERTACMSRIGAILLEFGLSFPKGHAKMKALFQWLAEQDIKLPPSLVAELLSIHEHYKYLNEQVSTQDRKLKAITENNENAELLKSIPGIGDLTATLCVANISSPSNFGGGREMVAWLGLVPRQYSTGGKSKLLGMSKRGNKHLRALFIHGARSVLSRIETTGKVFGDWLVNLRATKPINVVVVALANKLARITWAVLYHRQAFKAV

SEQ ID NO: 272876 - protein, 474 aa, unidentified
MRVRLGIDVACRADHQASLAGVDGEFIWSGWRFRTIPTDLTALWEKIPPGAEVQVILEPTRNAWVPLAAWLSAQGAEVVLVAPEQSADLRDYYNKHTKTDRLDSRVLARLPLLHPEGLAAYDGPTPADPLRRVMRRRAKLVKARVATFQRIDALVELLGPAWAEVLGAGDYTKTALVVLERYGDPRALRRLGLRRLSELMIRTSKGAWREDKAAALLAAADDAMALWAGGGLDFAELAADIAAEVRVARSLNDEIAVLEQRAAPMFAAQDRRPAVDDGDERGIIASVPGLSGVLGAGILARFGDLDRFANLAGVRSFTGLVPKIDQSGLTHGHNGITKAGDPGLREVLYLAADYLRRIDPQLAARYYRLIVETGKHHDSALCHLATTLATRLAACWRRRERYVLRDVDGTPITEIEGRAIVAERYKIPDNVRQARRRASRAKQLKQRTTRREKESTKAAPAPGRTTDDSNQKVA

SEQ ID NO: 272877 - protein, 376 aa, unidentified
MENDSTLYVGLDVHKDSITIAYALGAGEVELLGKIGTTKADIDRLCKRLQSKARRIRIVYEAGPCGYGLYRQLVQKGFDCMVCAPSLIPRKPGERVKTDRRDAIKLVRTLRAGDLSAVYAPSVEDEAFRDLARAWVSAKDDLKRGRQRLKAFLLSHGVRYTGRSDWGAAHRRWLSAFAFDNAWQQLAFEELRRTIEDRLAQCERLEAALREAVVSWRFYPAILGLQAMRGVQFTTAVGMLAELGDLSRLAHPRQLMAWLGVTPSEHSSGEKRRQGSITKNGNSYARKLLVEAAWSYRYPARVSPEIQRRHEGIPKPIVDRAWDAQVRLCRRYRKLVARGKEKNIAVVAVARELSAFIWDISRLAMSLTVPRAALPV

SEQ ID NO: 272878 - protein, 393 aa, unidentified
MICVGIDVAKDKHDCFILSSEGEVLADVFTIPNNAEGFDTLLQTIRRCARPEDKIKAGLEATGHYSYNILGFLLNEGLDTYVINPLHTNLYRKSLSLRKTKTDRVDARTIAAMLMSDVDLKSYTDTAYHNEELKSLTRYRFDKVRERAKLKQSVSRLVTILFPELEKLVSTLHMASVYALLSEFPGAKQVSEAHLTHLKAVLYDASKGRYGSDMATTLRDAARCSVGSVMSAKSLELRHTIRLIHELDAEIEDIEAAIQSMMGEIQSPITTIPGMGVRMGAMILAEIGDFSRFDSPDKILAYAGMSPSTYQSGQLSLSGAYSHMEKRGSRYLRYALYNATKYVCLWNPTFAAYLAKKRAEGKHYNVALSHATKKLVRLIYALEKSKWPYSTAA

SEQ ID NO: 272879 - protein, 351 aa, unidentified
MSHKTAATVAHTIGIDTGKNTLHLIGLDDQGAIVLREKIARGRIAARLANVPRCLIGIEAGMATHYVARELGALGHDVKQVPPAYSKPFRQGHKNDFRDAHAIAEAVQRPSTRCVPVKTDDQLDLQALHRVRSRLVGQRTAVINQIRGFLLEHGIAVRQGLRFLRQQLPDILAQRSDVLSPRMIRIMEDLSGDWRRLDERIEHITKEIEVLASTDVNCGQLMTVPGIGPIIASATVAAIGNGAAFARGRDFAAWLGLVPKQMSTGDRTILGRITKRGNRYLRMLFVQGARAILLRSKSWVKHSFGPWLTTAVRRLHRNILTIALANKLARIALSVLIQGRSYETRIVPAAA

SEQ ID NO: 272880 - protein, 338 aa, unidentified
MKKVFIGIDFSKLKFDAVVLFDSQSTPIHMVFNNGEQDYERFLDWCKSLTQHEPCTWLVCGEHTGLYSLGLTKYLNESAIDIWLEPGLQIKHSMGITRGKNDKVDAYHIALYACRFVDQARSTKLRAETLDRIKDLLAYRERLICAKKYLLVAAKELYAFKSNDSVNYIFEDSMTKAQEISKTIKVLENKIDSLIANQKELYENYKLLLSIKGIGRQNAVLVLVLTENFTRFNDARKFGCYAGVVPFEHSSGSSIRGKNKLSHLANKKMKTLLTNAANSAVRNDITLNEYYKRKREEGKDHALVINNVRNKLIHIMFGVVKNKKTYDPNHADSYKKTA

SEQ ID NO: 272881 - protein, 389 aa, unidentified
MIDCYNQKLGEITFPNRPAAFPKLVTKVKKCNTDGKEVVYGLENAYGYGRALAVWLIDKGYLVKDVNTAISHRQAKHRGAMYRKSDSDDAKAIALATLNMLDKLPDACPNDAYWSLGQLVHRRDNIMKQRTRLVNQLHEQLCIAYPSYKQFFNDISRPTALYFWEHYPSRKYLKGKSVEDLRAELVPVSHNKCSTKTCEKILDAVASDKVKNNAYQDARDMVTLSIVSDLQHYDSQLTEVDKMLEQMYKMLGCTLTTIPGVNVITAVKILAEIGDIKRFSNANKLAQFAGIAPLHLSSSGKGKDVATKQGNRRLQATIYFLAIQMVQVSSKGTPRNSVVRAYYEKRKAEGKTSQQALICISRRLISIIYGMLKNGTEYRMPVVESAGEK

SEQ ID NO: 272882 - protein, 435 aa, unidentified
MAVRPDRDPDPVRRFDCFTADLHRLAHWLQHCGVPPLPLQSTGVYWIPVYEILEARGLEVYLVNARHTKNLPGRKSDVQESQWLLKLHTYGLLRNSFHPSAEIRVVRTYWRQRGDHVRAVTTCIQRMQKVLTQMNIQLANVISDLSGWTGQRIVRAILAGERDPETLAALSHPGIHATHAEIAKSLEGTWQPDLLFVLKQEVDLYDTYQLRIAECDQELERHLKSFADKTPDPPADPEPSPTLAPSDARAHQHHPKRRRKAGSHAPQFDLGRELHRISGVDLTRIDGIDVGVAQTVISEVGLDMSRWEDEDHFASWLGLCPDNRITGGKVLRRGTRHVINRAATALRLGASTLLRSQSYLGAQYRRFRGKLGAPKAITAMAHKLAVLVYRMLRWGHAYVDKGLQYYEERHRQQQIHLLKKRAAKLGLQIVEPQVA

SEQ ID NO: 272883 - protein, 416 aa, unidentified
MVLFVGNDWAEDHHDVEVQDGQGRRLGKTRLPEGVAGIAGLHALIGQFADPDDEAGPAQVLVGIETDRGPWVAALVAAGYRVFAINPMQVARYRERHTTSGAKSDAGDAHALADMVRTDAHQLREVAGDSALVEGIKVVARTHQTMIWDRQRHVLRLRSMLREYFPAALGAFEGVIGDLAAADVLELLERAPDPDLAAHLSRAQIAAALKRARRRDIDTKTTTIQSVLRAQALRQPAVLATAYAAGVRSLVAVIGVLNTQIAVLQGQVEAHFGRHPAVEIYRSQPGLGEILGARVLGEFGDDPHRYTDARARRNYAGTSPITRASGRKKVVLARYARNDRLADALHQQAFCALSSSPGARAYYDSLRARGTGHHAALRQLGNRLVGILHGCLKTGRRYDEDTAWAHHSKQHQQDAA

SEQ ID NO: 272884 - protein, 430 aa, unidentified
MTNVQPIPPEAAVVAIDIAKLRHEVLIEVPNARRRRRLTVTNCRAEHDRLVAELQALACPVTLGFEPTGHYHRCLAWRLVQAGFDVRLVSSVALAHTREALHNSWDKNDPKDAQVILHMLRIGATQSYHDPLAHGINDIQELSMTHEVVSKSKTELLHRIQTHYLPLYFPEIERFRNNTRSDWFFALLERFPVPATITALSKEAFVAAAWDVAGRKVAKARLLGDIYEAAQHSMALPIPPDAPAVAMFRLVLAEARHLIQQRNTIEQLAGELLGGQADFQRLQQLPGIGPINALAILAEAGDLRRFGHHRQFLKFCGLDLATHQSGQFRGKTKLSKRGNARLRRTFWMAAQVAIRQRENSLRAKFERYVAKDRADPDLRRKAFTAITAKMARVVHAIIKSGDDYRPFVEGPVPGGRTPLCQSREGASATL

SEQ ID NO: 272885 - protein, 364 aa, unidentified
MDKFIMVGCDLHDRTMLLKMAQNRGKATMRSWPNDRSSRRKVIEDLRSRARRAGGARIVFAYEASGSGFVLCDELTAAGIECHVLAPTRIERSVKHRRRKTDERDAQRVLDILRAHLMAGVELPSVWVPDCQTRDDRELVRRRLNVAEKRSAVKTQIRWLLKRNGIENSMAPASPWTCEYWCWLQDLAEMHLASGAALGLSSLLRQLDWLSREIELLDKQVQSLARADRYAGPVAALRRYQGVGLLTAMVFLTEMGDLGRFSNRRQVGSFLGLTPGSQESGEADDRKGHITHQGPSRVRKVLCQAVWSRLGSVTSEQAAYQRLVAKNPKHKKIAVVARMRTMAIWMWHAGRVAQQRLEVASPAA

SEQ ID NO: 272886 - protein, 449 aa, unidentified
MREPQEIEDEEHEQVLERVAAVDVAKASGMVCMRVPHPCRAGKRLSRVWEVGATTGAIIGLGEQLVAQGIERVTVESTSDYWRGFYYLLEAAGLSVQLVNARDVKNVPGRPKTDRLDAVWLAKLTERGMLRPSFVPPAEIRQLRDYTRLRVDLTHERTRYWQRLEKLLEDALIKVSSVASTLETASTRDMLGALIAGERDPKVLAGLARGKMKAKHAALVEALTGRFDAHHAELARMLLDQIDALSAQIGTLTARIQQLLAAIPAAQGVDADGTTGPGAGSGPGAAVLPAAVRLDEVTGIGPGAAQVILAEVGLDMGVFPSPAQLVSWARLCPRTIQSGAKHHAGKAGKGNPYLRGVLGEAAAAAAKTDTFLGERYRRLVKRRGKLKALVAVARSILVIVWHLLADPAARYHDLGAGYWADRIDKGKKARNHIRQLEALGFTVTLAPAA

SEQ ID NO: 272887 - protein, 356 aa, unidentified
MSRDIKYIGMDVHKEAVVIAVLNGTGKQVMESIVETQANSILQFIHGLQGELHVTWEEGTWAAWLYDLLKPHVQQVLVCNPRRNALLKEGSKSDKIDAQKLADLLRTGMLRPVYHGEHGLRTLRELGRSYHTISQDLNRVMNRIKALYRGWGIACGGTQVYAARYREEWLDKIEHKGVRRRAELLYQQLDGLQTLRRTLRPELLAESRKHKAAKLLRQIPCIGPIRAARLLALMQTPHRFRSKRQLWTYSGLGIETRDSAQYRFVRGQLQRAKKPQQIRGLNRNHNHEMKDIFKGAATRASCGVGPLRDFYVALLDKGMKPEMARLTLARKIAAIALTLWKKEERFDAGQLKTQAA

SEQ ID NO: 272888 - protein, 339 aa, unidentified
MMEITRIGLDIAKGVFQVHAVNAQEQVVLRRSLRRNQLLAWFARLSPCLIGMEACGTANHWGRELSVLGHTVRLIPPGYVKAYVRRNKNDAADAAAICEAVSRPSMRFVPLKTIQQQSETLTHKARQMLIKQRTMTQNSLRSLMAEFGVVVPQGPQHISKLLAILADPEDPHVPAVARVALNTMSEMLSALEQQIETLDKTIKAQVRANPTARHLDTIPGFGPILSGAIAAIVADPRHFDSGRDFAASLGLVPRQDSTGGKTKLGPISKRGNGYLRRLLVNGATAVLNGKNARNDPWRAKLLDSKPKKLAAVALANKMARIAWAVMTRQENFRPRAVAA

SEQ ID NO: 272889 - protein, 316 aa, unidentified
MTSSAVYVGIDVASAELVVAVRPTAEGWSVPNDDAGVATVVRRLRLLAPAVIVLEATGGYERAVVAALAAAGLPVVVANPRQVRDFARATGQLAKTDQVDAAVLALFAERVHPEPRALPDAATQALDAVLTRRRQLLDMLTAERNRLAQAVPAVRRDVQAHIRWLERRLGDLDRDLDALIQHSPVWRAKDNLLRSVPGVGPVVSRTLLGALPELGALTHKQIAALAGVAPMARDSGLWRGRRRITGGRAAVRATLYMAALVATRHNPTIRGFYQRLRAAGKPKKVALTACMHKLLTILNAMVRANAVWRNTLAQTV

SEQ ID NO: 272890 - protein, 415 aa, unidentified
MTEQRWYAGVDWASESHHVFLTDGSGRKIGEKVFKHSGEGLAEMAAWLLAASGAGGPSQVSIAIEVPHGPVVETLIERGFIVHAINPKQMDRFRDRFTLAGAKDDSRDAEVMASALRTDPHCFRLLAALDPTVIELREWSRIASDLGTEHNRLTNRLREQLWRYYPAMLELEEDLGAAWLLELWELAPTPGKAARIREGTVGKLLKRNRIRRFDAAHVLDVLRKPPVQVAAGTAEAASAHIETLIARIRLVNAQIKEANRQLDALTAKLIPAEDAAAGQQKQHDVEILASLPGVGRIVLATLLAEAWDALLRRDYAALRSLAGVAPVTKKSGKSCIVIRRQACSNRLANAMYHWARVSIQHDPKSKAKYAALRGRGHSHGRALRSVADRLLNVACAMLKNGTLFKPSLEAQNTPC

SEQ ID NO: 272891 - protein, 329 aa, unidentified
MTGILRRGGRALSNETCVGIDVSKEKLDVAIGSSGEVWPVTNDEAGHAELRARLAAASARLVVLEASGGYEAIVAGTLWDAGFQVAVVNPRQVRDFARGMGKLAKTDQIDARVLALFGEKVPLEVRAPIDAEAKELQGMVLRRRQLVEMLTMERNRRGLVAAGRARKSLDKHIAWLEEAVRRASDDIDQTVRKSPLWREQEDLLRSFKGIGPVSARTILVELPELGKLNRRKIAALVGVAPFNRDSGKFRGKRMIAGGRSQVRTVLYMAAVTAARSNPVIRSMYQRLLAAGKAKKVALIACLRKLLSILSAMVRDNARFAPRPAARTLA

SEQ ID NO: 272892 - protein, 402 aa, unidentified
MKEFNAEELQLETASALETVRQVEAMSKYPAFIGLDVHKESIVVAVARAGREAAEPRREIANKPQSVAKLVERLNQEFGGEVLLFCYEAGPCGYGLYRHLLGLGHDCQVVAPSLIPKKPGDRIKTDRRDACKLAQALRSGDLTAVWVPDEEQEAMRDLTRARADMKAQERKARQQLNAYVLRHGHGWPSGKTRWTKTHYTWLEALRFAHDWQQVVLQEYIDAAKAASQRVGDITAQMERVLPQWSLAPIVGSLVALRGIDKLAAMVLLAELGDISRFDSPKQLMAFLGLVPSEHTTGGRRRQGAITKTGNRHARRMLVESAWSYRFPARQTAHLKRKATSASDEARDIAWKAQKRLCGRYRTLTRAGKETKRVCVAIARELVGFVWDIVCREMPKVQLHKAG

SEQ ID NO: 272893 - protein, 415 aa, unidentified
MSDETPEVVYVGLDWAAVIHAVCVMSAAGKVLAQFTIEHTAEGIASLIARLAKYGDPADVQVGIERPNGRLVDLLLEAGHPVIPVSPNAIKTWREGEVVSGAKSDTGDALVIAEYLRLRHHRLHPVQPYSTQTKALRTVVRTRDDIVELRVAATNQLTALLETYWPGAKEIFADVESPITLAFLRRYPTAASAAHLGDKRLAAFLTKQGYSGRRSSTELLARLRRAPAGTTDPELVRAIGDAVLGMVTILEALNTAGKQLDRSVITHLGEHPDAAIFTSLPRSGQINAAQVLAEWGDARPAYEHPDAVAALAGVAPVTKQSGKHRSVEFRWACRKRFRRAITIFADNSRHASPWAAGIYNQARAAGKDHPHAVRILARAWIRVIWRCWLDGQPYNPAKHGGAAALAEKPASESAT

SEQ ID NO: 272894 - protein, 395 aa, unidentified
MFIVGIDVAKRSHEVCMITSDGQTVQRPFSIRNNCTGYNLMLEKIRKHTNIKSQIVFAMESTAHYWLALFTRLRKDGYHVILLNPIQTSAMRDMFIRKIKTDAKDSFIIAELIRFGRYAESNVAQDRLLALKELCRNRFYLVDMAGDLKRKLIALIDRVFPEYEAQFDTIFCKSSVAVLKKYPTPQKLSNAHLDKLTELLWNSSNGHFGEWKARELRELARNSFGVEDCDGAYSTLILLMLDQIQSLSGKADALEKEISRLFQSFDTTVTTIPGVGPIIGAVILSEVGDISRFSSADKLAAYIGVDPSVNQSGEFQAAHAHMSKRGSPYLRRCIWMASQVAVQRDPMFRAYYEKKAAEGLKYMTIIGHVTRKMTAVVFAILRDHKVYEPILSTAA

SEQ ID NO: 272895 - protein, 404 aa, unidentified
MNAVGIDVSKGKSTVAVLRPYGEVVVSPFDVAHTGSDLRALADLIKKLPGETKVVMEVTGNYFESIARYLHEQNIFVSVVNPVLISDFGGNTLRKPKTDKKDSVKIASYALTYWLDLKEYTPQEDLRKSLKLMNRQYQQSIKLKTMMNNNLISLLDLTFPGINKLFTSPSRESDGHEKWVDFVLEFSHCDMISKLTIKAFAKKYKKWSDKNSYHFTESSCEKIYAFAKDCVSSVSSDKAIVFSVVQAAKMLISATENCHAIQSEMNRVASKLPEYDTVMNMYGVGKAVGPQLMAEIGDPRRFHSRKAITAYFGYDSENNDSGQKTTRSNPMTKKGSGALRRTLFIIIQVLLQTKPQDNPVYDFLIKKKSEGKHYYSYINAAANKFLRIYYARVKEVLNVSEQMT

SEQ ID NO: 272896 - protein, 408 aa, unidentified
MNTLYVGIDVSSKSNVVYLMLPNGDKHSNFSVANSHEGSTLLVKKIYSALTSHSLDTVLIGLEATSVYGVNLVYFLREDATLAPFNRKIHVLNPRQVKKFHDTYNDLPKNDYVDSFVIADCLRFGRINKEVYMEDYRYKALQNLTRARFFTVQNLVKEKQRFINVLFKKYSTMTQEKVFSDTFSTTALAVYDEFESAEALADMDLHELTAFIMEKGKNRFPNPNAVAKAIQKAARSSYRLPKTVNDSVNQVLSISITSIKALEAQIKEFDKAIATQMELLPNVLISIPGIGPVFSAGIMAEIGDINRFHNQAQLAKYAGLAWKQHQSGDFEAQTTRLINSGNRFLKYYLCEAAFSLVRCDKEYSDFYHLKYKEVNRYQHKRALALTARKFVRLVFRLLKDNRLYTSAE

SEQ ID NO: 272897 - protein, 393 aa, unidentified
MICVGIDVAKDKHDCFILSSEGEVLADVFTIQNNAEGFDMLLQTIRRCARPEDKIKVGLEATGHYSYNILGFLLDKGLDTYVINPLHTNLYRKSLSLRKTKTDRVDARTIAAMLMSDVDLKSYTDTVYHNEELKSLTRYRFDKVRERAKLKQSVSRLVTILFPELEKLVSSLHSASVYALLSEFPGAKQISSTHMTHLKAVLKNASQGRYGQEMAETIRNAARSSVGSVMPAKSLELQHTIRLIRELDAEIEDIETAIQAIVDEMQSPITTIPGMGVRMGAVILAEIGDFSRFDSPDKILAYAGMSPSTYQSGQLSPSGAYSHMEKRGSRYLRYALYNATKHVCHWDPTFAAYLAKKRAEGKHYNVALSHAAKKLVRLIFAMEKSQRPYCAAA

SEQ ID NO: 272898 - protein, 402 aa, unidentified
MNCVGIDVSKGKSMIAVMRPFGEVVVSPFEVRHTANELSELAGLLKSLDGETRVVMESTGNYHAPVAWLLHDAGLYVSVVNAMLVHDYGNNSLRRAKTDKKDAVKLANYGLDHWLTLPRYVPEEDTRLMLKTCYRQYQQYSKVQTMLKNNLISLLDTAFPDANRLFTSPPRADGSEKWVDFVAAFWHCECVCGLSEKAFTAKYQKWCKKHGYNFSKDKALDIYASSCGHFGVMPKTDTAKLLVEQAVSQLRATSAALAALKQEMQSLAASLPEYPVVMEMFGVGPTLGPQLMAEIGDVRRFHSKKALVAFAGIDAPPYQSGQMDVRSRSISKRGSASLRRTLFLVMGVILQHAPMNEPVYQFMNKKRSEGKPYRVYMIASANKFLRIYYASVKAYLDSLEHD

SEQ ID NO: 272899 - protein, 355 aa, unidentified
MTQNTYLPKDYDTFIGIDVDKSSFAFTVKDHGVMNRAKKIPANPENLYNYIQKHFAHERVLCAYEAGPTGFHLHDYLTQQGQPCFIVSPLSIPKAKNDKVKNNRIDSEKLSTYLRTGELKAIRVPYGPYRELRHLINMRENYVYNRKSAKQRIKALLLSDYLYPALKDVEQNWSNNYIQHLKKISCTPAARQRLDMLLMDLDYARQQTLSILKQLRVFNEAFPEIKRNVEYLQSIPGIGFIIAISILGRIGNPQNLRNVREIAAFAGIVPTERSTGDTINQGSITHLGNRNLRCLLIEAAWVAIRKDTELYQFYCRIKARHHPRIAARKAIVAVARKLTQRIYKILKEQRIYTMH

SEQ ID NO: 272900 - protein, 337 aa, unidentified
MEYFAGLDVSMDETHICVVDRDGSMVLETRATTSPEAIAAVLAKAPGCRRIVFETGRMAPTLYHGLDALGLPVTCIESRQAYQALKSLVTHKTDRNDARGLAHLARTGFFKPVHVKSLPAHAVRALIIARKKLVGQRVTLENQIRGLAVVFGVRLPRGLSPAFAEHAISGSEGIAGLSGAMRGLLAARNAMLKAIAAINGDLKRLARSSEACQRLMTIPGVGQLTALAFVAAIDEPERFRRSRDVGAYLGLVPRRYQSGEIDYTGSISKCGDRRVRTLLYEAANVMLTRYKPPLKLKDWALAIAKRSTMRKARIALARRLAIIMHAMLRHGTEFKTA

SEQ ID NO: 272901 - protein, 424 aa, unidentified
MKALKTNVAGVDVHKDMLAITIMIGAGDEDAAVEHLECSTMTDDLRACGIILKEKGVRDVAMESTGVYWKPVYNVWEPLGLNVIIGNATHMKNVPGRKTDMNDSHWIAQLHRFGLIRPSFVPDGIYQRLRLLSRHRTNLVEDLSRVKNRVEKVLQDGNVKWSSVVTDTFGVAGIQVLDLISEGVTSAQTLAASVRTKIKKKGDVEKALTNCLTNEHIFVIRKLMDQYRHIQTQLLDVENELTEKTLPYAHLIEELDKIPGIDKILAMSIITEATADMSSFPDERKFAAWAGVASGNNESAGKKKRSKCRYGNPHLRKVLIQAANGAKQKKGSYYRSKYRKLQARLGSANKAKVAIANRIARAIYKVLGGESYKDLGYMRGDPVEKQIEGLVRKLKSLGVDIHHEGHQLITKRKVKVDDTGIVLQ

SEQ ID NO: 272902 - protein, 412 aa, unidentified
MKDLLEISCGLDVHKEKIVACILTGPLGKPTRSEIREFSTLIPDMIALRNWIVSKNCHHVAMESTGIYWMPIYEILEDAFYGDITLLVVNARHMKNVPGKKTDMRDSEWISTLLRAGLLNGSFIPEKRIREFRDLNRYRKSVIRDITSQKNRIEKFLQSSGFRLSSFISDIFGASGRNIILHLIEHGQIDKTALDSCLKTKTRNRIDEILMSVNGTLSEHQKAFLRILMTHYDSLKKHLAEIETSLEEDMAPFALQVEQLNSIYGISTTASCAIIAEIGIDMKPFKTAEHICSWAGLCPGNNESAGKRKSTSVTKGNPYIKSMLCEIAWVIAGKRNTYLSAWYWRIKQKKGAKKAIVALARKLLVIIYTMLKQGTLFDESCFETRRKRCEQKQLSRYIRELEKHGYHVEAQS

SEQ ID NO: 272903 - protein, 418 aa, unidentified
MNEEYAVLIGLDWADQKHDLCWRETETGQTGHGVLEQRPERINEWIVTRIAKYPGRRIAVCLEQSRGAVVYALMGYAEVDLYPVNPVTLADYRNAFRPSGAKDDPTDAALLLDLLDRHREALKVWRPDTEPTRLLRSLCEDRRKAVDARSALCNSLRARLKEYFPQALSLVGDELSSPMCCAFLMKWPRFEAVASARADTLRRFYYAQHSRSETQIQERLALIGASRPLTTDAAVVEAGIRWVHTLVAQIRAFNRSIQVYDQRITEVFKVHPDRSIFVSFPGAGKQLAPRLAAVFGTDRERYETPVNVATYTGVAPVIERSGQQVWIHWRWHCPKFLRQSLVEFACKSVGFSTWANVYYQEQIKRGKKHQAAVRSLAFKWSRILFHCWKTRTPYDEAKYLDALHRHGSWIAQAIKNAG

SEQ ID NO: 272904 - protein, 451 aa, unidentified
MSEEEVSEVVGELVARAAAIDIAKASALVCTRVPDESRPGRRVQRTWTVGADTAAILELGDHLRCLGIERVVMEATGAYWKPYLYLLESCGLQCWLVNARDVKNVPGRPKTDKLDAVWLCKLTERGMLRASFVPPREIRELRDLTRTRAVFIRERTRHKQRAEKMLEDAQIKLSSVVTDLFGKSGRLMMDALISGERSPAVLAELACGRLRGKKEALALALRGGFTEHHAFMLGQLLQMVDTLDARINDITARIEDHLSRIEPPTGHRPGGGAAQTPHGDTRPGLLALVDRIDAIPGVGTRIAQVILAEIGTDMSLFPTADHLASWAKLSPRTIQSGPMSTSGGTGKGNPWLRGALGEAAASAARTDTFLGARYRRLVKRRGHNRALVAVARSILVIVWHLIHDPDTDYQDLGAQWHHRLGDPARKTRDLVRQLEHLGHQVTLGPTPEPAT

SEQ ID NO: 272905 - protein, 327 aa, unidentified
MRQHKSLTEKAKTTVAFDVCKAVLDVHVRVDGKAFQVPNTDEGFDQIAVMLADYDVSLILMESTGGYEDVAACCFQSLGYDVAVINPRHARSFAIAMGQLAKTDRLDAAILADFAAVIDSRPDRARFIKPPTDAERKFLSQMVARRRQVVDLLSTEKQRLSHADDYAMQSINKVIDYIESQLKEINQDISVYVKKNYADLSKMLSKVPGIGELSVGLLIGDVPELGNIGNRQLSAVIGVAPFNHDSGKRRGKRCISGGRQNVRNVLFMGIMAATRFNPVIKAFYERLINKGKPKRVAYIACVHKLLRIINAMVRDGTSFNPDLHTVI

SEQ ID NO: 272906 - protein, 349 aa, unidentified
MKIIGCDFHPGYQQIAMLDEETGELSEKALSHEKTEEVRAFYSALPGPVRVGIEASGQSQWFERLLAELGHELWIGDAAKIRAGCERKQKTDRRDALLLLQLLMEGRFPRIWVPTPAERDVRQLLLHRAKLVRMRTQVKNQLQALALNQGVQRKWKLWSVAGRKQLEGLPLLPWASRRRAELLVLHDQLEASIDELDRAAVEQANIRPTVRRLMTHPGVGPITALAFVLTVGPAQRFRRGKQVASYFGLIPSEHSSGGRGQRLGHISKQGNTFLRGLLVEAAQSAVRHEPEMRREYQRLAQRKCRALAKVAMARKLAVRLYWMLRSEVDYAQLIQGSHAGQPESFRGRG

SEQ ID NO: 272907 - protein, 408 aa, unidentified
MNPLYVGIDVSSKSNVVYLMMPNGDKISNFSVVNSHDGSSQLVKRIVSAANSQSLDTIIIGLESTSVYGDNLVYFLREDATLAAFDKKLHVLNPKQVKKFKESYNDLPKNDWVDSYVIADCLRFGRINKEVYLGDYRYKALQNLTRARFFAVQNLVKEKQRFLNVLFKKYSTMTQEKVFSDTFSKTALAVYDEFESAEELANMDLQGLTDFIKEKGKNRFPDPDSVAKAIQKAAMSSYRLPKTVNDSVNQVLSISITSMKALEAQIKEFDKVIKTQMELLPNVLTSVPGIGPVFSAGIIAEIGDINRFQSQAQLGKYAGLAWKQNQSGDFESENTRLIYSGNRFLKYYLCEAAMSLVRCDTVYSNFFHSKYKEVNRYQHKRALALTARKLVRLVFRLLKDNRLYKSAN

SEQ ID NO: 272908 - protein, 314 aa, unidentified
MKENNWVGVDTHKNTIACYKDGKFKEFPTTQSGFKKALQWADNAKWAIEGAYCFGKPFAAYLIQNGCEVYEVNTLLTKTWRKIYAISNAKTDFGDAKVISLFADNAKLQKVSLNTVKLKEKLTARKLVVKQRTEIICSIKMLFNTRGLTLPFNDLTTLKSAKWLLEQEDSIIKNFANILKALNESIKIFDKEIEAELPQKAQKLTVLKGIKSLTAATIYTETKGKLISAKALASYAGIAPIDNSSGKKVRHRNNKTGNRILNSVFYQLSLHQSLWDEKGKAYFEKKLAEGKTKRHARKCLARQLINIVFKILNE

SEQ ID NO: 272909 - protein, 348 aa, unidentified
MKYIGLDCHKQYDHATLINTETGEVKAKRLAHIKEEFRKFVGDKADTKMVIESCWNWSRTYELAKDFVEEIILAHPLKVKAIASAKIKTDAIDSRTRAQPLMADLIPESHLRKAENRVKQRVIRHRTFLVVMRTRVKNRIHDLVDSQLLSREMLRSKPKRLFSKEGMRWLNSLEWAKEEDRKTVESDLRLVGYLNEEISASNKMVEKIYMGDRDAQLLSTIPGIGITLAMLISTEIDGIGRFSSPSKLCSYAGLVPSTHSSGGKTYHGKITLEGNRRLRWALVEAVVPASYADTEIRTRLNTLRKIKNANVAKTIMARWLLKVGYHVLKENRPYVCQLIWPMQIRAAF

SEQ ID NO: 272910 - protein, 309 aa, unidentified
MNEELVYLGVDIAKAYLDAAIANEKRRFSNDAVGHRRLIQWFKQIEGPVQVICEPSGGYERALVRALVAAQIKVSLVPANRVRQFARASGILAKTDRIDAKLLCAFGEAMKPGIISASQLEQEQLRELESQRRHLTHLLVMEQNRAARVSEACVRKMNRRLITQIKKQVEQLDLLIQEQIAASRELATKAEKLTAISGVGARTAALLLAQMPELGQLNRREVAALVGVAPFNRDSGRMRGKRAIYGGRRSVRHGLYMAALVAARHNPILRGFYLRLRAAGKPAKVALTATMRKLLIVLNSALKPDLNYA

SEQ ID NO: 272911 - protein, 313 aa, unidentified
MADKLIVGVDVSKGWLDVCPGAAGGGVERLANEREAIVAWLDRAQPTIVAFEPTGGYERTLRDCLRERGILFVRVHPNDVIAFRKSRGIKAKTDRIDARLIGAFAAEAALRRGLRLNTIGNELLQALAARRRQVADALQAERCRLALAAAEAVRKSLEIVIDALRHSLDTLDQEIANAIAADPEVAEMSKLLQTVHGIGPMVAALLIAHLPEIGRLSSKEIAALVGLAPQTRQSGKTKYREHTSHGRPDVRRALFNAARAAIRHPSPFKDFYDRLVAHNQRPGKVALTAVMRKILVTANAIARDKQPWRLHPA

SEQ ID NO: 272912 - protein, 339 aa, unidentified
MRYFIGLDVHSNNTVIAVLDEKGKRIYSRRVNNFIKLVLEELEPFKHKIQALALESTFNWYWLADGLKEAGYEVHLANPSANKQYEGIKHTNDFSDAFFLAELLRLGILEEGHIYPRRERAIRDLLRKRLMLVRQRTAHILSFQSLYNRVKGCSFGGSNYVKRLKEDEMDDYFEEEDFALAAKTDIASIRFLTKQIEELEKSVLKKMEILSEFEKLKTVTGIGDILALTIILETGDIRRFPKVGNYASYCRCVPSERSSNKKKKGENNRKNGNKYLAWAYVEAANFATRYCPKAKRFFQRKSAQTNNIVATKALAHKLARASYFVMRDRVDYEPERLFG

SEQ ID NO: 272913 - protein, 305 aa, unidentified
MFVGVDVSKNHLDFATSADDRGRQANTPEGIATLVKRIAELKPTLVVLEATGGFEIAVAAELALVCATAIVNPRQVRDFAKATGRLAKTDAIDAKTLARFAEAVRPDPRPLPDAQTQELVGMVQRRRQVLDMIVAESNREPRATSAVRARIRSHVKWLRKELDAIDDDIDRLIKSSSVWRANEELLRSAKGVGPVLASTLVAHVPELGQLDRRKIAALIGVAPFNRDSGRWSGKRSIRGGRSEVRHVLYMATVAATRFNPTLRGFYRRLVDAGKPKKLALVAAARKLLTILNAMMRDRQEFRLPT

SEQ ID NO: 272914 - protein, 347 aa, unidentified
MNFYNNMHPYYCGIDLHARILYVCILDQDGDTCVHKEIPADPAKLQELLNPYIGNVVVGVECMHCWYWVSDFCNDIGVDFILGHALYMKAIHGGKAKNDRIDSFKIANLIRGGNFPLAYVYPKDMRATRDLLRRRTKIVQHGADLKAHVVNTTSQYNLPPNKVNLKNISAREQLKSTFPDVSVQKNINLDMVILDCYAEQLSKVEWFIEQQAKQHKPVHLHVLKSIAGVGRILSLTIIYEIGNIDRFESVQDFASYARLVKCKAESAGKSYGTQGNKIGNAHLKWAFSEAAVLYLRGNDKAKSYLLTLQKRMSKAKALSALAHKLGRCIYFMLKNETVFDEMKFLKR

SEQ ID NO: 272915 - protein, 350 aa, unidentified
MYFAGLDAHLKYVTVAVLDRLGTLVLETTVPTREPERLLAVLAPFRPLEVVVETCPFWPWLYDLLVPAGIKFHLAHAKRLRAIATAPQKNDRVDARLLARMLLSGLIPEAYPRPGDQRELLRLLRHRTTLVRYRTRLAGRIHSQLHQQRLLLPREQLLRQATRTWLRETAWPRLTTEQQAIVTTHLELIDHLTPLIQALERRIDTAAGANPTAALLATIPGIASYRSLLLAAELSPVSRFPRVEHLASYAGLAPVTRSSGGHTRHGSIPQGANRWVRGALVSAIPSHVRWAPTSPVTRAYAQLTARLGWRVARVAAARKLLRIVYIMLRRGEAWRSEPVAGADVRDEVHV

SEQ ID NO: 272916 - protein, 421 aa, unidentified
MRGIRGKRVKMVKEGTLLVTIDIGMTSNTGYCTTVDGRDTKPFKFGNTREGLDVFWSMLLTSKNRFCCSEVVVGYESTGPYAEPLVHYLMDKPVTIVQVNPMHTKRIKELNDNSPLKTDDKDPRVIADVLRLGHALSVVVPEGDAAYLRRLNNARERHVGERTALLNQLQQLVFLIFPEFKTVFKDVTVKTARHILKNYTTPERIGTLHKDELGEEIRKRSMGKFGVRQAELLISLARDTIGIKEGVAGIVLDIHHILVQLEAVNGFIAEIETEMAKALERIPCSMRILSMKGLGVVTVAGLIGEVGDFSKFRTQSEIMKLAGLDLYEISSGKRKGQKRISKRGRSLLRKILYNAAVGTIRKNGIMCTQYEKLIGRGMKRTPALIVIAKKLLRIIHAMLRDDRDYIRTYESPKRVVIKKAA

SEQ ID NO: 272917 - protein, 411 aa, unidentified
MRVHHNVCCGIDVHKKSVTVCLMWGPADKEPQFEIRRFGTMTRDLQKLAEWLKQAGCEAATMESTGSYWKPVWNVLEGRIPKLILANAQHVRALPGEKTDRKDGKRLAELTRHGQIRPSYVPPRAILELRDLTRYRNKLLSTGSSERNRVQKVLEDANIKLGSVLSDMFGASGQKMLQALVKEDTVDTAKVAQLAHWSLKPKIEAIQHALEGKLTDHHRFLIGASLQHMRFIEEQLVRLDKEIQRRLQPYQEEYALLQTIPGIKETGAARILSEIGADMSPFPDGDHLSSWGGACPGNNESAGKKFQSKIRKGNPHLLAALTECAWAATKKKDCHFRNKYYRLKSRRGSQRAIVAIDHAMLKCIYVVLSQRKPYEEPKPTSLTQAQKERKASSLCRQLRALGYDVKIQKAA

SEQ ID NO: 272918 - protein, 344 aa, unidentified
MKEVITIGVDLAKNVFQVHGVDAEGAVIVCRQLRRRQVLPFFGRLAPCLVGMEACATSHHWARQLIELGHEVKLMPPNYVKPYVKRNKNDAADAAAICEAVTRPTMRFVAEKSAEQQSVLMLHRTRDLLVRQRTMLVNAIRAHMAEFGIVAPVGIPRVKELFAVIADADDDRLPPIARACLEGLARQFLSLHEEIAIAERRIHAWHRSNEASQRLETIPGIGPITATALAATITDPSVFRSGRELAAWIGLVPRQNSTGGKERLGRISKQGDQYLRWLLVAGAMTIIRHAKRRGTTNLPWLASLIASKPTKVAAVALANKMARIAWVLLKTGQDYQKPALTHGT

SEQ ID NO: 272919 - protein, 412 aa, unidentified
MELLHRRCCGLDVHKETVVACLRLVSDGKVTTEVRTFQTTTADLLRLSEWLTANECTHVAMEATGVYWKPVWHILDDGEFALVLANAAHVKNVPGRKTDVNDAMWLAELLAHGLIRASFVPDAQTQEMRNLLRTRKQLVREQSSHVLRVQKTLEDANIKLDSVLTDLMGKSGRAIIEALIAGETNPVKLAGLADRRVKASPEEFREALRGRVTKHHRFLLRLHLNQIDALDAAMATLDVQVETNLGPFRIAVELIRSIPGIKNLGAHVIVSEIGIDMSRFPSAAHLISWACICPRNDESAGKRRSNRVRKGGTWLKTTLVQCAWAAVKKKDSYLQAQFYRIKARRGPKKAIMAVVASILTTIYHMLKDGTMYKDLGRNHFDRRSSDQQKNRLVKRLIDLGYAVEIKPLAAAA

SEQ ID NO: 272920 - protein, 327 aa, unidentified
MIHYIGIDISKAKFDVAFINPSTNKVKTKVFNNNKAGFDLLLAWLKTNVSNHLDELHIILEATGVYHEHLSEFLDDNNIKQSIVNPNYVRNFADSSGVIHKTDKKDSIILSRYGYSHKPEVWVAPSIEAKQLKALLARLEALKEDLQREQNRQELLLSPNLPDLVKASMQTVISVLQEEIAKLTKDIDDFVDKHPSLKQDKTLLETIDGIGSVIAKEVVCLIHTKQFKKASQMASFLGLIPKQRQSGVFKGATKLSKQGQVSLRAELYMSAMRAMRYTSTIKAFYERLQQNGKTKMQALCACMRKLVHICFGVIKTQTSFEQQVSLS

SEQ ID NO: 272921 - protein, 402 aa, unidentified
MTASQLWAGVDVGREHHWVCVVDSAGKVMLSRKLVNDEQSIRELIAEIDKLGPQVCWTVDLTMTYATLLLTVLADVGKSVRYLAGRAVWQASTVYRGGESKTDAKDARVIADQSRMRGADLPVLHPDDDLVTELRMLTAHRADLVADRTRTINRLRQQLIAVCPALERVADLSSDRGWAALLSRYQRPKAIRQSGISRLTKILTDAGVRNASTIATAAVSAAKAQTVKLPGEEVAASLVAELAQGVIALDDRIKTTDADIEGRFRRHPLAEVITSMPGIGFRLGAEFLAAVGDPALIESADQLAAWAGLAPVPRDSGTRTGNLRTPKRYSRRLRRVMYMSALTAIRCDSHSKAYYQRKRDEGKRPIPATICLARRRTNVLYALIRDNRTWQPDSPPITQSAA

SEQ ID NO: 272922 - protein, 346 aa, unidentified
MDNGKDIILVVDYHVENLEVRVFNCVTGEERRSNVKTTRANILRLVGEAIVEAAKSGGGVRWIMESTTGWVRVKELIGGRVEFVVGNVLQMPLPPKAYRRKTDKIDTGRMLREELNGTLPRAYQPTGWWRQLRRLVDSREDLVRRQTAIKNWIHSFLYHETWAEHGGLWTAGGMRRLRAAKLPASDRFVLDLKLDELEQVGRWLSQVEARMQAVYDHWPQAQWVDAVRGIGMVTAVSVLAHIGPAERFGSAEELISYAGLAPGHRQSDQSCHSGRIGGGGTDSHLRYLLIEATTWLREIPRYRSAYERMVARRGKQVARVVLARMFVRSLYKMLREKVRFNQAPAA

SEQ ID NO: 272923 - protein, 395 aa, unidentified
MALYVGIDVSKEKFDACGIGDDGKKVFSVCCPMNREGFDKLILQLPTRGTASLLFGLESTASYHIALFSYLAAQGYRVAIINPLLIANFAKLSLRKTKTDKKAAITIAEFLLLKKEALAMETEPPRLAELKDLSRRRERLADQVTALKNDMMRILSVTFPELETITGIFTKSTLRLLAQFPSAQAIREAGYDAVASVVLNRSKGRKSAASVKALVDAAATSVGVSSPSKDLILKQEAALLLHVQEQAEEITKVMACLADEKMRRDAEILTSVKGIGDKTALSFLIELGGDIKAFENHKRLIAAAGLDPSTHESGKYKGQSRISKRGNRHLRRAIWLMTTKTIISNEVFRTYYFKRRKDGLVYKMAVLATAHKLIRVLFSMLVNERQFEPERRKKI

SEQ ID NO: 272924 - protein, 348 aa, unidentified
MKNKSFVGIDISKKVIDVSIFREDTNIKMFPHEVFNNTRKGFGDMCSWLKKSRVVLSQALFGMEFTGCYSLDLEKFLTSKNYSFCMLSTRIVKHHPMGTIDKSDKNDAAKIADFLYRYDGTECAKPYKLPSKAMQQLKQLVNERKFLVEQRTNFMNRMQMFETKEDSAMYESYIKKLNHDIEKIDQEECELMSKEEDVFDTFQNLLTIPGIGFVNATNIIAITRNFTAFDTARQYARYVGVAPCSHTSGTSVKWRARPSAHCNGQVKADLSMAALRAVEYDVEMQMFYNRKLGGRKDSDTKRKALNAVKFKLIRRMFAIGKQKRKWEVLNTSDDRKNLHIEKSKASEL

SEQ ID NO: 272925 - protein, 336 aa, unidentified
MDIIKQVVGIDVSMDNLTARFGTIDSKQNQDIKASKEFANNHIGHKELIKWANKNKLNFEVPIWFVMEATGVYYENLAFYLAENKQNIAVILPNKIKNFSKTLDSKSKTDSIDSATIAQFGLEKQLKQWQTSPGIIRQLKTLCREYHTLKELSVQVGNQVHAKQNSYKPEQNTLRRLSAQLKLFSRQQIQIIGEIHKLIDQQPEIKERIDKIDKIEGVGFITIVSIIAETNGFAIIDNQKQLTSYAGLDIVHNESGLKKHKTSISKKGNKHLRRSLYMPALTACRYNQKLKELYIRLTIKKNNKKIALIAVARKLLILIYTIWKKNVDYIPDYQVT

SEQ ID NO: 272926 - protein, 399 aa, unidentified
MLAVGIDISKSKSVAAILNQDGSMHTSPFEFHHTQPELDAFIKYILNSKQSATILMENTGHYHYPVLKAFREAGLPVCMVNAYQIKKFGDMDLRKAKTDKKDAVRIARYALEKSYSLVPYTSMEQKYEDLRFLARQYNQRMLTLKTNKVFLLNLLDETMPGITNILPLTTRTPETSLSVLFINRFKSYDRIKKMGKSRFLDAFEKIARKSRNRQTKTYGLAIYEAALRNITTRGENEYTLAAQDQCLELVCESQKAADSIILKMKTLAETLPEYAVLRSMAGVGDRLGPLILAEIGDIRRFHSGKALNAYAGNDPPPYQSGTFESYNRHISKRGNAALRKYCFEVMQALKLTRPQDDPVYLFLLKKEQEGNPYNVAKMAGVDKFLRIYYARAMETLKQQ

SEQ ID NO: 272927 - protein, 319 aa, unidentified
MNESDSSSPGRFVGIDVSQDKLDGCLLPGGELRQFANDAAGREELLAWLRPQRPTSIVLESTGGYERPALWALQDAGLPVTLVNPRQIRDFARGIGQQAKTDRLDAAVLAEFARLATPPPSEPTSAKQRELDALVVCRRQLVETRVAHQNRLGQARDKFVQQTLQRMIKTTDREIKAVEDRIAKLLESDDQWRDKLQLLESTPGVGKMTGAMLLAELPELGRLSRQAVAALAGVAPYAQDSGTRSGRRSIRGGRRRVRSVLYMAALTARRFNPTIKAFAARLAAAGKSFKVIHVACIRKLLVVLNALLKTKTHWTNKNC

SEQ ID NO: 272928 - protein, 392 aa, unidentified
MTTTAKTIAADTILALDLGKYKSVACLYRSADDKQFTTIPTSRTELTRLFARHQPAVVLIEACLLCGWVRDLCLELGLRCLVANTTSEAWKFKHLKRKTDRDDALRLVEVYLLGKFPHVAIPDKQVREKRALIEHRQKLVGRRVGLQNRIRAILVSQGLVAPVGVRAWSALGLAGIAAHAQPLAECTATELWRGRLHLTLAELGQVRALLEEAEKKLDELARTDEGIKIVGTIPGVGPRTAEAVVAFLGEPRRFRTTKEVSAYGGLVPRQYQSSDTDHRGRITKRGPRTLGKLLVECAWCMLRYNGWARAVYQRLTHGGKTRKKQAIVAVARKLLVRCWAMLREGVAWYDPQTGPKQKLPPSKQRGQAEAQQRREARQQGKQTGALASPATQ

SEQ ID NO: 272929 - protein, 347 aa, unidentified
MRFYNRQHRHYCGIDLHVKTMYICILDAVGQVLVHRNVKSSPEAFLETVAPYRDDLVVAAECMFTWYWLADLCAAEGIVFVLGHALAMKAIHGGKAKNDKIDSRKIAGLLRGGLLPQAYVYPSAMRSTRDLLRRRLHLVRKRGQLLAHIQNTRAQYNLPAFERRLAYPANRDGVSAHFADPSVRKSIDVDLALIDQYDTLIVDLELTIVREAKRHDADAFHRLRSVPGIGKILALTILYEVHDITRFDRVQEFASYARLVKCVKQSGGKKLGTGGAKMGNVHLKWAFSEAAVLFLRHTANGKKILTPIEHKHGKGKALSILAHKIGRAVFYMLSRGTVFSMEKFLAA

SEQ ID NO: 272930 - protein, 346 aa, unidentified
MDHYAGIDVSLECSSLCVVDAKGKIVREAKVASEPEALIVWFRSLGFDLARIGLEAGPLSQWLYAAMKQAGLTVELLETRHASDAFKAMAVKSDRNDARNIAQLMRLGWFRPVHCKSMSAQEIRAMLTARKLIQSKLQDIENSLRGILRGFGLKVGKTTKLGFAARISELVAGHPALETIAAATLAVHMVLLREFNGFEKRVRAMSRLDAMARLLMSIPAVGPVISLTYASAIDDPSRFTSSKRAGPLFGLTPKKYQSGETDYSGRISKNGDASVREALYEAAHIILTKPIKGCAQLKSWAMRIAKRAGMNKARVALARKLAVIMLRMLKDNVPFNPAAKAIAAAV

SEQ ID NO: 272931 - protein, 409 aa, unidentified
MLFAGIDWSEKFLDFHLRTAEGKVLTQGRVKPSVEGMADLFAELESHASVSEIGIAIETAHGAWVQALLDRGYQVYPLNPKTVERFREALSANGVKTDKIDRKVLAMFLVTFHKENKPLRPDAPEIIQLRILCQDRLRLVEERSAKVNELGAILKCYYPAFMGLFGDLDSGIALDFLQQYPTQKQFLKLSEHRLRNWLSRHRYSYPKRIDAMVSLLKQPVLPVAEHLQQAKKNLICYLARSIKTLNSEMAQRDKQINNHLDGLAESDWIRSLPRAGKVLAPALLACLGRDPERFSSVGEARALMGTAPVTKASGKSRVVVFRRGCWKFARRTLQLFADQSRHQCPWAQAFYEKQRNSGHKHHEALRALAHRWLKILLAMRQSASLYDEDIFLNSQRRYQLKTPILKTFK

SEQ ID NO: 272932 - protein, 323 aa, unidentified
MNKDIKYFGIDISHLVFDVTDSEGNYYQFKNNPSGFKKFVKLIEIDSHCVMEATGYYHYQLAYYLLESGVKVSVENPLAVKRFIQMKLSKIKTDKSDSKLICEYAKKVELKLWKGNSKHQTECLQMTRLLAVYTKQSTMLKNKLHGESVLGNPSKAVVSSLKRSLKQVQKEIKTLEEKLMILVKKVHQDVLTRLKSIPGIGNKTALMLVVLTDGFERFKSGSELCSYAGLTPVIRKSGSSVNGRSRISKIGNQKLRNLLFMCSFNACKYNKACRAIYERLVAKGKSKKLALIAVCNKLLKQAFAIAKSGLVYDQTYRSILVTN

SEQ ID NO: 272933 - protein, 386 aa, unidentified
MQKLKDLSRCLTPLEPHGTLIAVIEMSRSSWLVAGIVPGVERQPLKKLAVDESVLLKLLHRWGEEAEKAGYMIKRIAVAFEAGRDGFWLARWLRARDIEVHVIHTSSVAVSREHRRAKTDRLDTELLKRAFLGWLRGERDHCKMVAIPTIMDEDGKRPNRERENLVGEQSRIINRIKATLVRLGIRGFNPKLKKAAERLQGLRTPEGEPIPPNTLSELRRNMERRRLVRDQIRQIESARRDRLEHAPGEGAHAMVRLLARVMGIGIETADMLVQEVLSRNLRDRRAIARYAGLTGSPDESGRKRREKGLARCGNPRVRRGMIQLAWRFLLFQKDSALAQWFQARTENARGTRKTMIVALARKLLIALWRLVRDGVVPDGVILRPAQ

SEQ ID NO: 272934 - protein, 345 aa, unidentified
MTQYKRIGIDTSKAVFTLHGIDQQDRPVLRINLRRAQMIAFFKKLPPTEIAMEACGGVHHWARELAAFGHHVQLLPPQYVKPYVKRGKNDRNDAEAICEAAGRPGMHFVPVKSVSQQAQGMVLKVRETLVGQRTQLANALRGHGAEFGVIARKGLGEIGPLLTAIEQEATIPPEVKEMAALLGRQFDELDVRIKEVDAKLSAAHKANAVSQRLATIPGVGAVTALTLAVEIDPTAFESGRHLAAWAGLTPKDCSTGGKQRLGEISRAGNERLRALLVSGATSVINAAMKPGSRQMTDWLRSLLQRKPRKLAAVALANKMARMAWAIMTSGEAYRCPSTAAGAVAA

SEQ ID NO: 272935 - protein, 312 aa, unidentified
MDALNIGIDVSRDRLDVAANTSSMAPFHVPRDHDGLEDLIARLKPLGAARIAIEATGGFETVVAAALASAGLPVVIVNPAQVRAFAQALGKRAKTDPLDAAVIARFAEATRPALHPLPDAETQALGDLVARRRQIIAMIGAENQRLKRSSQRTAKSINRLLKALQKELTDIDQDIDDSIRRSPHWLAKVELMKSVPGIGDQIARTLIAELPELGTLDRRQIAALVGLAPWTRQSGQWRGRSFIGGGRAGVRTALYMGALVAAHHNPSLRAFRDRLVAHGKPKLVAIIAVARKLITILNAILRDNHPWREQNA

SEQ ID NO: 272936 - protein, 339 aa, unidentified
MKLYGAFDLHSNNNYLGIIDSKDKRVYKKKLSNDCQTILAALEPFKENLVGIVVESTYNWYWLVDLLMDNGYKVHLANPSAIQKYEGLKHSDDKYDSFWLAHLLRLGILPEGYIYPKEERPIRDLLRKRGHLVKLRTSLLLSLQGIISRNCGVKVQANQIKVIKENRVAPYLSGDDDLQLSGAVSKETIDFLTRKIRKIETAIKKKIRLEKSFVVLKTICGVGDILSLTIMLETGSIDRFPTVGDYASYCRKVPSGWTSNGKTKGKGNKKNGNKYLAWAFSEAAELARRFDENARAWYNRKAAKTNFMIAHSALASKLARASYYIIKDGVAFDHRKLFV

SEQ ID NO: 272937 - protein, 325 aa, unidentified
MTRIICGVDVASRSLAARVGPDGAEAEFANNREGIAALEAFCRTHQTELIAMEATGGYEQQAFLLLSAHGLPVAILNPRQVRRFAQSVGRDEKTDAIDAGLIAWYAQVRCCPSTAAPAPDQQHRRALVSRLRQLTDTRTAQRNQRRLVTDAAVLAMIDDLLTLLDRQIRTLEQQIAGLIALDPLWRALDAEFRSIKGVASRTVARLMAEMPEIGTLSNKSISKLAGVAPLAQDSGLRQGARRVRGGRQPVRDILFMAAGVAGRYEPDLMAFRQRLVAAGKPLKVVRIALAHKLLVRLNARARDVRSRLSTSSAAASGSVPEAVTS

SEQ ID NO: 272938 - protein, 422 aa, unidentified
MLEETHDREELIERVAALDIGKAELTCCVRVPSPDTPGRRLQEIQTYATMTRSLLGMADRLRQLGVTRVVMEATADYWRPAFYLLEAQGFECWLVNARDVKHLPGRPKTDRLDAVWLCKVAERQMLRPSFVPPPPIRRLRDLTRYRVDLVVARTAEKQRVEKLLEDAQIKLSVVASDIFGVSGRDMLAALLAGERDPKALAQLARGRMRAKLGVLQEAFTGHFSDHHGFLLATMLGRIDQATADIAAVEAHIETEIAPFQAAVDRLDEITGVGRAAAHVIIAEIGVDMGRFPTAAHLASWARFAPGVNQSAGKTKGKNATGHGNPYLARVLGEAAVTAGRTDTFLGERYRRIARRRGKKKAIVAVGRSILVIVWQLLADPDARFHDLGSGFYDTRVNADRAKRNHIRQLEALGYKVTLQPAA

SEQ ID NO: 272939 - protein, 411 aa, unidentified
MRLFVGDDWAEDHHDVEVMDEAGKVLAKRRLPEGVAGIAQLHELIGRHVPGDAEDAEVVIGIETDRGPWVAALVAAGYVVFPVNPLQASRYRERHGVSGAKSDQGDSHMLADMVRTDSHQLRPAAGDSPEAGGIKVVARTHKTLIWERTRGVQRLRYQLREYFPAALEAFEDLDARDTLELLGKAPDPARAAKLTRAQVAAALKRARRRDIAGKTDAILAALRGEHLGQPAALTAAYAATARSLVAVITTLNEQVKILEGQVEDHFGRHPDAEIYQSQPGLGAILGARVLGEFGDDPHRYAGAKSRKNYGGTSPITRASGKKKVVAARFVHNDRLIDALMSWAFSSLNASPGARAFYDEQRAKGLEHNDALRRLANRLVGILHGCLKTRTLYDEATAWGHRENLPQSSVAA

SEQ ID NO: 272940 - protein, 441 aa, unidentified
MDVVFPRCAGLDVHKKSITACRLVPDPTGQEAEGRAELREFGTMTLELLALADWLTEASSTHVAMESTGEYWPPVYNLLEGTFTVFLVNAAHVKNVPGRKTDKADARWLAKLMRFGLLQASFIPPQGQRDVRDLTRYRTKLVQERVREVNRLQGVLERANIKLASVASDIMGVSGRAMLEALIAGNADPATMADLAKRRMRSKLPLLEQALTGVVRDHHRQLLAMQLAHIDFLDEQIAALNTTIETALRALGADEQPSPPPVPGAPALADSAPLTFTRAVALLDTIPGIDQRGAEVIVTEIGIDMARFETAPRLAAWAGVAPGNDESAGKQRSGKTRKGNRPLRAILTQLAHAAVRTKGTSLSALYQRLAARRGKQRAIIAVAHSIMKSIFSMLSRNVPYHELGANYFDARRRHYTVDRLARRIEPLGYRVHLEPVTAPAA

SEQ ID NO: 272941 - protein, 337 aa, unidentified
MKIKYFVGLDVHKMKTTYAVIDRLGNILLIGETATNYNELNERLKPYLNSTIIGLEASTSYYALYQKFLKKGYNIKVANTIQLRQLISKNDPLDAKRLSQMLRLGTFPCSYIPDEKIQHMRGMVQVRHALMEEKTRCNARIQSLLDKNGVVMPSYTAFSKKWRHALMQYMGSGDVGMELRHEYDHFIFLEKKTEQVDQEMKGYALNLWKNEYQIIQSVTGFGPVLSCYIIAHVLPIERFQSNRKLRRYAGVVPVFHESGGKTSKGHIPKTSSRKLLRWALIQAANTAGKTNTKLGRYYRMKKRQKKNTSIAKVAVASSMIDIIYKVLTTKKPYNPKC

SEQ ID NO: 272942 - protein, 429 aa, unidentified
MNYTQNEKIEQVTDSTMVVGVDIGSQIHYARAFDNRGRELTKRVFSFHNDLEGFNSFNLWAETLKSENKKTAVLIGCEPTGHYWFAFAKYVKDHQKRLVMVNPFSVKKIKELDDNSPKKTDSKDPKTIAKLVVDGRYSIPYVPEGIYAEIRDLVYSRDRIMKQHNISANRIQRWLAIHFPEYLGLYTRFDAASGLAVLEKAPTPKDVIALGVNGIRKIWHDKKMRGRGVTEDRAKTLVGAAHNSVGLDGGIGTKSELYMLLEEHRLWTSQLEAVNKVLEEMILKVPHVEKLLAIKGVGSITIAGFIAEVGDIRRFDSPKQIQKYAGLELVENSSGKHKGRTRISKRGRRKLRKILYQVMVPLLARNREFREIYDYYVTRVKNPLKRRQAMVAVSCKLIRVFYAVLTKGMEYDRFKMMSDIHRKSDIIAA

SEQ ID NO: 272943 - protein, 374 aa, unidentified
MASTFREASNTPIICGIDVSSTKLDARIGRDGPHLQVPSTEEGADALQAFCQQHGATLCVMEATGGYERPAFARLWARGMPTAIANPRSVRKFAEGVGVLEKTDRIDAGVIAWHAETKRMKPTQPASADQQRLTALVTHLRQLTEQKVVLQNQARLVDDADVLASFGLVLGTVRAQIKAVASKVAALIDADPLWAKLDAAFRTIKGVADRTVARLMAELPELGTISGKAITKLTGLAPLANQSGNHDGPRRTRGGREGPRSILFIAAGLAARHEPDFHDFDERLTKQGKPRMVVRIALAHKLLTRLNAKAREVRAEMAEAARKLEQTNPEHNDAAQAAHPGPLPKEEGAAGAVVPRQEGRYPFSARKNWSASSS

SEQ ID NO: 272944 - protein, 364 aa, unidentified
MQKISMQTSGKNIFEGQLTIGLDLGDRSSAYCVLNAAGEIVLEHKLATTPEAMKQVFGSLPRCRIAMETGTHSPWVSRLLMALGHEVIVGHAQKVRLITKSRRKDDRLDARTLARLARIDPELLSPVKHRSAQAQLHLTEIRARAALVSTRTALVNAARGLVKSYGERLRKCHTQQVGREMTRELSMGLREALKPLLQEVESLNERIKEYDRRIEKMAKEMYPETALLKQVKGVGDLIATAYVLTIEDPHRFRKSRDAGCFLGLQPGRRNSGESEPQMRISKEGDEYLRTLLVQGAHYILGPFGEDSDLRRWGQKLSARGGKNAKKRAVVAVARKLAVLLHRLWVSGEVYEPLRNSQKPMSTAA

SEQ ID NO: 272945 - protein, 372 aa, unidentified
MNYNTVYVGMDVHKESFSLCAYTIEAEKASHYQRTEADYKKVLNYLEFLRTIYGDDANFICGYEAGCFGYTLYHQLTANNVKCIILAPTTMLEQRSKKRIKTDRRDAEIIAKCLAQHNYSPVHIPTAKDEETKEFLRMRDDHKLALKKVKQQILAFCLRHNYRYDGKSHWTAAHLKWLKALTPEALYKEILDEYLLTYQTLSDKIERLDKRIEELATQDEYKEAVKKLCCFIGVKTHTALSVLVEVGDFKRFASAQHFASYLGLVPGEDSSGDDQNRLGITKAGNRHVRLLLTEASQCYARGQVGFKSKELKSRQSGNTPAVIAYADKANERLRRRYYKMVLNKYKKHNVAKTAIARELACFMWGMMTEHIS

SEQ ID NO: 272946 - protein, 385 aa, unidentified
MSELNDLSRSLISLEQDKTIIAVIEMSQSSWLVAGIIPGIERHPLKKLEPSEEELVRLLMRWRTEATKNGHTITRFAVAFEAGRDGFWLARWLRARDIETYVIHPTSVAVSREHRRAKTDRLDTGLLKRVFIGWLRGEPDHCHMAAIPTLAEEDAKRPNREREGLVRERTRIVNRMKSCLARFGIRKFKPTLRKAPERLATLGMPEGVPLPPNTLLELRRDMARLRFVMDQIKEVEETRAQRLEQAPQEKTHAMVRLIARVIGVGIETADMLVHEILSRQLRDRRAVARYAGLTGAPDESGNKRREKGLAKAGNARVRRGMIQLAWRFLVFQKDSALARWYRTRTESAGKKRKTMIVALARKLLIALWRLVTIGEVPAGVVLRAA

SEQ ID NO: 272947 - protein, 316 aa, unidentified
MAEPLVCVGIDVSKARLDLALRPMGHEWSVPHDHDGITTLVERLQTGGPTLIVLEAPGGLELPVAVALAAADLPVVVVNPRQARDFANATGKLAKTDRMAAGVLAHVAEAVRPALRALPEAQSQARSGLLMRRRQRIDRLTAEKNRLSAAAVGLHPRIQAHLHGLEHERQDIDTELGHRIRSSPIGREQENLLPSVPGVGPVLSRTLVAQWPELGTLKRQEIAALVGVAPLHRDRGTRRGNRTVWGGRAHVRAALYMGALVAVRHNPVLKECYTRLRTAGKAAQVALTACMRKRLTILNAMLKHQTPWHINHAPTP

SEQ ID NO: 272948 - protein, 309 aa, unidentified
MIIHPGFVGIDISKDFLDVFDSNVGAVRRIDNRPEAIDRLIAGWAGSEVFVLFEATGRYDKALRQAFCAAGIGFARVNPARARDFARSAGFLAKTDAIDARMLAAMAQCLRPGADGAVDPVREQLAELHKRRDELVAFRKQDRTRMAGASAHLVASLAAHIAWLDEAVQDFDRRIAALIAEQQALQNAQRLMRSVPGIGPVCAATLLALLPELGSRSPKAIAALAGLAPFNVDSGKFRGARKIHGGRRRVREALYMAAVSVTRTKSRFARTYRAMRKAGKPAKVALVAVARKLLVTLNGILREQQPFHP

SEQ ID NO: 272949 - protein, 416 aa, unidentified
MNAAGIDVSSRKSTVAVLRPFGEVVRLPFDVAHDTEGLASLAEQLKALDGETRVVLEHTGRYYEPVAKALHEAGLYVSAVNPLLIKEYGANSLRRVKTDKADAVKIARYALDNWTDLRDYTPMDTIRYDLKTLNRQFQLASKQRTACSNNLIALLEQSFPGIRKCFDSPVRSDGTQKWVDFAHTFWHVDCVRKQSLNAFSARYRKWCKRHGYFFKQSNAEEVYSLAKNAVVLVPKSEVTKVLVQEAANQLTSISRSVETYRTEMERLASMLPEYPVVMEMYGVGKSFGPQLMAEIGDVRRFERKQALVAFAGIDPMPNQSGDKNVRSNKSSKRGSPYLRKTLFNVMGIYLKCAPQDEPVFQFLDRKRSEGKPFYVYMTAASNKFLRRYYAKVRDYLATLENLPPVDMDSTGLQERN

SEQ ID NO: 272950 - protein, 344 aa, unidentified
MEHYAGIDVSMECSSVCVVNASGKIVREAKVASEPEALIGWFGPLELGLARIGLEAGPLAQWLYAAMKQAGLAVELLETRHVYEAFKSMPVKSDRNDARKIAQLMRLGWFRPVHCKSITAQEIRAMLTARKLVQSKLLDVENSLRGILRGFGLKVGNTTRTSFAGRIDELVKAHPNLQTIAQALLRARAVLLAEFSGFEKRVRTISRLHDQARLLMSTPAVGPIVSLTFACAIDDPCRFSSSKQAGPHFGLTPKKYQSGETDYTGRISRHGDASVREALYEAAHIMLTKPIKHCSELKSWAMRIARRAGVNKAKVALARKLAVIMLRMLKDNVPFNPAAKATRA

SEQ ID NO: 272951 - protein, 417 aa, unidentified
MKLMSEKSFTAFIGIDWADSKHDICIQAADNPRREFGRLPHQVDDIEQWAQSLHQRFPGPIAVAIELSKGPIVYALQKYDYFVIFPINPSTLAKYREAFQPSRAKDDPRDAELALELLLTHPEQFEPLQPQSAEIRALTTLVEHRRSLVNERVRITNRLRNTLKQYYPQALEWFDRIDTLLFCDFVERWPTLTQVKRARRSTLEDFFNKRNMRRNDLLETRLEAIKSARPLTFDEAVIAPNKLQAVVLIEMLRLLLGSIKKYDQEIAELASAHADYNLFSSLPGAGPSLAPRLLVAFGEQRNRFSSAAALQKYSGVAPVTERSGKKHWVHWRWQCPTFIRQTFVEWAAQTINKSYWAGEYYQQQRDKGCTHQAAVRSLAYKWIRILYRCWQTSTPYNEAVYLKALERRGSTLLKKAA

SEQ ID NO: 272952 - protein, 347 aa, unidentified
MKRIAVDLAKSVYQVAESVRPGQVVQRKRLNREAFRRYIQEQVEPVEWVMEACGTAHYWGRLAQSLGHQVKLLHPRYVRPYRRRNKTDRNDCDAMLEAARCTDIHPVPVKSHDQQQLQQLHGLRETWKKSRTQRINLLRGVLREAGIEAPASTAAFIQAASELVDQPELTSLSRLLHIVLAEINLYEQCMAECEQQLQRWHADDEIVRKLDEVSGIGLLTASALTATVGKPERFASGRQLSAWLGMTPREFSSGNSRKLGHISRQGNVYVRTLFIHGSRAALLAAQRCQARTPEKLTQLQRWAVETAARIGHNKAAVALANKLVRICWAVWCHERRFNGNWQSVKAA

SEQ ID NO: 272953 - protein, 342 aa, unidentified
MRIIRIGLDTSKHVFQVHGVDENETPALRRQLRRSEVAKFFAKLPPTRIGLEACGASHHWARRLRGLGHEVLLMPPQYIKPYVKRGKNDAIDAEAICEAMSRPTMRFVTVKSAENQAALMMLGVRDLLVKQRTMLINAIRGHAAEFGVTAAKGPKQVVELLQRLADDAEVPALAREMIGVMAAQLDAVEAKLKAIEARLMAWHRQNQTSQCLATIPGIGPIGGVSFALRVSDPKAFRSARHFAAWVGITPRENSTGGKQRLGKISREGDEGLRRLLVLGATAVIQQADKGRQGKKGRARPWLSKLLARKPKKVAAVALANKMARIIWVMMVSGETYRQPQEA

SEQ ID NO: 272954 - protein, 402 aa, unidentified
MNAVGIDVSKGKSMVAIMRSFGEIVSAPFEIKHTTSDIHSLVELINSVEGESRIVMEHTGRYYEILAHQLSEANLFVSTINPKLIKDFDNDSLRKVKSDKADAVKIARYALDKWQNLKQYSVMDELRNQLKTMNRQFSFYMKHKTAMKNNLISILDQTYPGVNTYFDSPVRSDGSQKWVDFASTYWHVDCVRKMSLNAFIDHYQNWCKRKKYNFSQLKAEEIYGKAKELVPVLPKDAITKLIIKQAVDQLISVSTTVESLRTLMNETASKLPEYPVVMAMKGIGASLGPQLMAEIGDVSRFTHKGAITAFAGVDPGVNESGTYEQKSVPTSKRGSADLRKTLFQVMDVLIKTMPQDDPVYQFLDKKRAQGKPYYVYMTAGANKFLRIYYGRVKEYLASLPES

SEQ ID NO: 272955 - protein, 411 aa, unidentified
MRVHHKVCCGIDVHKRSVTACLMWGPADQEPQSETRRFGTMSSELKQLAEWLKQAHCEVAVMESTGSYWKPVWNILEGHVRLILANAKHVRALPGEKTDNKDGKRLASLLRHGLIRPSFIPPREIRELRDLTRYRRKLLGNGAAERNRIQKILEDANIKLGSVLTDVFGVSGQRMLHALVESESIDVEQVAELAHWSLKPKMDSLKKALEGRLTHHHRFMIEISLDHMEHIERQILRLDEEIAKHLVPYQKEYELLQTVPGIAETGAASVLAEIGADMSAFDDDDHLSSWVGICPGNNESAGKRFSGKTRKGNLHLTSALVECAWGATHKKNCHFKSKYYSLKQRRGAKRAIVAVAHSLLRTVFVVLKSGQPYQEPVRPPLPEAKRLRKAQRLSRQLRSLGYEVTIKTKAA

SEQ ID NO: 272956 - protein, 313 aa, unidentified
MMATHRIGVDVGKAELWISIDGETAQPCPNELPAIRRWVRSLEGPADFALEATNDYHLALALEAHHQGHRVYLVNGYRLNRYRESIGGRAKTDAGDARLLVRYLQREQDELRPWTPPPEGYRTLQKLLRRRATLVRARVMLEQSLRGVPELQSNLKDLLREIGRLDAVLQRVLRETVGRAGWSDHARRCQQIEGVGPLTAAGLTMAFQRGAFRNSDAFVAFLGLDVRIRDSGTKRGQRKLTKQGDPELRRLLYLAAMQAKSKPAWSDYYQRCLDRGLATTQALNALARKLARLAFALMNNQTDYQPKTPCGET

SEQ ID NO: 272957 - protein, 341 aa, unidentified
MKKSKRYLGVDLHRTQFTVCERNEKGEEKLCRYHIKELEEFASKLDRNVEIAVEATGNTKFFCDVVKKKAGKLVVINPHQFKVISKSVKKTDENDAKTIALFLEKDMLPEIRMKDDLHAKISSLVQTREKLVRLRTALKNKINNIFSSNMMPLEKESMSSEKGLRKILSATFDPITDVELRVMVSEIRNLNNSIKELDDAIAENGNKLEGHKNLTSIKGIGDKGSAILLSVIGNVHDFSNKNKLAAYFGIVPRVSNSNETVHHGRITKNGSKIGRSTLVQCSLIAKRYCKPLRDYHERIKSRRGGGKVNIALARKFLDIIYYTLKNDKVFEDFPTFKLVES

SEQ ID NO: 272958 - protein, 355 aa, unidentified
MSQEKYIGMDVHQATISVAVMDAQGKLIMECLLETKAATIVEFIQGVQGTLSLTFEEGTSAAWLHDLLKPHVSRLVVCDPRKAALLKDGNKSDRIDARKLAELLRTHQLKPVYHGEHGVRTLKELGRSYLTLAQDVTRVMNRIKALYRSWAIPCSGTTVYAPRHRAGWLAKIGEPGVRVRAERLYQQLDGLQPVRQAARHDLLSESHKHPAVKLLRQIPSIGPIRAALLVALLQTPHRFRTKRQLWAYSGFAVETHDSGEYRCVRGKLQRNRERITVRGLSDNYNKDLKNLFKGAAISASTRPGPLHDFYAARIAQGMRPTMARLTLARKMAAITLTMWKKGVGFDPQQLHRQAA

SEQ ID NO: 272959 - protein, 330 aa, unidentified
MLNLNEYYVLGIDVSKEYLTVYDGNEHYTVRNEKRLKELDRLIRRRVGEEYEKVIISYEPTGGYSYHLFRFCSKKGIKVVRVNPYRASHFFKSQKTRGKNDKKDAEDLRKFVFVFPEEVKEIRLDERLEKLKTLVSLYEKTQKDITNWKNRLNHMKEYLSEKKEVIEDMRGVIKNLEKNKRRLLKDINSIINEDKELKRRREYIRSMYGVGEVISMALLVFFMRYPNASRSQIVSLSGLDVVHSSSGKSVKRKSKISKRGNKFVRKLLFMSAMRLSRKDGRFKDMYEKLLSKGKSKKAAYVAIMRKTLLITRALYKNMTFFREDYNYSAA

SEQ ID NO: 272960 - protein, 346 aa, unidentified
MMIIGCDFHPSWQQVDWLDTETGDYGERKLVHASGDAKQFYQQLAAPVLIGMEATGNSQWFVELVEDLGHEIWIGDAAQIRASYVRKQKTDKRDAAHILKLVVEGRFPKLWTPDREQRDQRQLVLHRHKLVEIRSRVKNELQHLALNKGMQRKAKLWSQAGQKLLRELPLKPWAACRREDLLGLLSMLNQRIGQLDTAVQHAAEENPQARLLMTQPGVGPNTALAYVLTLGDVSRFPRGKQVASYLGLIPREHSSGGRQKLGVITKQGNRMLRSLLVEAAQIAVRFDPGMKKQYLHRCHQKPKGVAKVATARKLAVRLYWMLRTNVAYPEIVRIESSPRVPLVGAS

SEQ ID NO: 272961 - protein, 414 aa, unidentified
MVSDQDHLDGDQLSTPALFGGIDWGGSFHQLCVLDGQGTVLLQQQVIHDVAGLALLADRLEQFGAHVLVAIERAEGLLVEFLQTLPRVTLFCVSPKISARARERYRLSGSKSDTFDAFVLADTLRHEHRRWRPLSRPSALTAELQAVSRDRHRVQHAKVACESRLRAVLEAYHPAPVHLFSELDRDISLAFIRAYPTPGQARRVGTTRMEAFCRRHGYSGRTDPQVLVDRLKPHLLGASQGTSAGKAFTAQLFAEELRMHTDHLRAFDHKIAELLDQHPDAPIFLSFTGIGPIVAAALISEMGDDRARFPTVEVLLAETGLAPVTKASGRTRQVRFRYAANRRMRHVIDWWMFIAAREDPWSKAIYQAGRAHGQGKYRALRGLGARWVRILWRCWTDHTPYDPARHHQPELLTA

SEQ ID NO: 272962 - protein, 369 aa, unidentified
MRKVLHVGLDVDDKSFHIGAFCKETGEIFEMTSKPNVGNLMRKLEKLTAQDFELKLCYEATYIGYTLCRDLNKNGYETEIIASSMIPEVASGRVKTDRLDAMKLAKYYSNDLLTPIHIPTKEEEQDRDLLRARRFLVDQRKTLRKHILSACRRNNLHYKVETGRKYHWTKTHENWLIDRVNKLSDAVRLNFEILLRQLEKLTEGIAEYDKAIEELAETEKYKKKKDALNCFRGIDTLTAMTLITEIGDVRRFKHPRQLTSYCGMDISEYSSGGKEKKFGITKMGNWRIRTAVIESCQRLDRVKTLSKRLKAHRNGQDLKVIDIADRCTARLKKKSNHLLDLGKHRNKVKVACAREFLGFIWETLQYVAA

SEQ ID NO: 272963 - protein, 453 aa, unidentified
MARKAEKEKTKDGLKLKIVNPNAAGIDIAYGEMQVCVPEDRDGENNRCFGSFTCDYEEIASWLKACGITTVAMESTGSYWVGLFFFLEEKGFDVLLANAKDVKNVSGKKTDEADAEWIMLMHSYGLLKPSFHPDAAARSIRELARHRDNMLRSASKEVQHMQKSLVLMNIKVDTVISDILGKSGKAIIEAILNGNHDPKSLVQLVDPRCKASKETIEKSLEGTWDVVHLFELKQSYDLYKYIHTQIADCEAEMDRLLGEYTDGCGTDMQGYTATKKRVSKKNAISFDAEKHAFSMWGVNVMEIPGMGLGALAVLMGELGRGFTEKFTSAKSFCKWCNLVPNNKISGGKLLSSKVPKQKNRVGQMFRQCANSVKSVKTGLGIYFRRQKSKGGHLQAIVATANKIARIFYTMVVSKNHYDESKVGLDEKQLLERKIILAQKTLDRLNRKLSVTQG

SEQ ID NO: 272964 - protein, 338 aa, unidentified
MKLYGGIDLHSNNSVIVLSDEEDKVIYRRRLANDIELVILELAPFGKDIEGLVVESTYNWYWLVDGLMDAGYRVHLANTAAIVQYEGLKYADDDTDARWLAKLLRLGLLPEGYIYPRQERPVRDLLRRRSRLVQQHTGNLHSIQNLMARNRGRSLGANRIKQLTYEEVDRLLPDGDLALAVKSNLAVMRTLEGVIAMLEKTVKGRIKLHPAFKPLLTVSGIGEILGLTIMLETGEIERFAKVGNYASYCRCVGSEHISNGKRKGRGNRKNGNKYLAWAFVEAANFAVRYNPKIKRYYQRKCARTHPVVAIKTVAHKLARACYYILRDQVPFDVNRAFA

SEQ ID NO: 272965 - protein, 277 aa, unidentified
MSTKKRFKIAYLTSNTKEMVKEQQIKHNEDHIKKFINKLKTEWNEIHCCYEAGVTGYPLYRYLKSLGVNCILVAPGKIPRQSSDKIKTDKRDAIKLARLLRSGDLESIHVPSEEDEAVRDYLRSRDSLRLDLGRNRQRLMKFLLRKGNVYSTTKYWTVSHYKWLNNLHFENEILHETFNDYYSRVRVQEENLKAMDQKIQEIAKSEAFRERVGILRCFRGVDYLTAMFLLSEVNDFRRFKTAGSFMSFLGLVPGEYSSVRKKQTGITKREVRDLEGF

SEQ ID NO: 272966 - protein, 409 aa, unidentified
MMKQNIIFGIDVSSKSSTVCVVIDRIKQGETFKITNDSFGYQDLLDRLNQYLITPLVVFEATGVYSLSLQAFLEDYHIKYLKLNPLKAKKLMDNNLRHNKTDKVDAYRLALIQFNAPQKLRAPQPKEYHELQNASRYYEELTQALIINKNQLHRNLQSTFPQIENILSTSSGRVYWTIVSLFPHAQYVLNHNENQVFQSLLAISGIGRQRAHYLTTRLYALARQAYPYDNESSITIRAIQRNIANLLSLSAERDNVINYMEKLAMQANARSLNIYESIPGIAKTTAVRLVAELGDLRRFDTSAQIDAFVGIDPGRYQSGEKDSHLGITKHGNHLARKILYRTITQMETVKATQPCHITDYYDKKKRSSNSRGYKKIAIASVHKLIRTMFALIKHDQLYDYNVATHNQRL

SEQ ID NO: 272967 - protein, 447 aa, unidentified
MRIVYKRCCGMDVHKDSVTACVLLIDEDGEFRKQTRYFSTMTRDLKEMSGWLASLGVEAIAMEATGVYWKPVWNILEAEKKFQLLLVNAHHIKHVPGRKTDQKDSEWIAELLQHGLLRASFVPPVEIRQLRDLTRTRARIRQTLARFANRIQKVLEDANIKLGSVASDVLGVSGRHMLKALMTGERDPQKLANLAQGHLRKKIEPLQLALEGHFTDHHRLQLKLLLEFVEFGEQQLSHLDSEIQLLLSKVQGEPGLSGPADRTVAEAEASPPQATSPLQTAVELWDSIPGIDQLAATTLVAEIGANRDQFPSAHDLASWAGLCPGNDESAGKRRSGKTRKGSVWLRRALCQAAWSASRTKSTYLAAQYHRLIVRKGKKRSIIAVAHSMLIIAYYLLKRQCTYQDLGPDYFNLRNEDAITHRLVKKLTALGYQVTLQLAHAVAVSPTA

SEQ ID NO: 272968 - protein, 326 aa, unidentified
MAFIELPILGIDISKAKFDVALLVYGKVKKSRVFENNLVGFKALSLWLVKQDITHLQACMEATGTYGDELATYLYDQGFEVSVVNPAQIKSFSGAQLNRAKTDKADAKLIAQFCASMHPTAWMPPPMHVRELQALVQRLSALLQMERQEQNRFGTAAPVIQPSIKAVLATIKVEIKAVERMIRDHIDRHPDLKDQSNLLDSIPGIGIATIARLLAFVGDVHRFNDAKALAAFVGLNPTVHQSGSSVRGKSRLSKKGNATIRKALYMPAVVARRYNPTIKAFAQRLKKAGKSNMLIIGAVMRKLLHIIYGVLKSGKPFDANYAVKNA

SEQ ID NO: 272969 - protein, 451 aa, unidentified
MNEPLEIVDEEHEQVYERVAAIDVAKATGMVCVRVPDASRPGRRVSRVWEVQATTRAVIELGDHLVCEGIEKVTLESTSDYWRIWFYLLEAAGLDVQLVNSRDVRNVPGRPKSDKLDCVWQGKLTERGMLRPSFVPPAEIRQLRDYTRLRTDLIQERTRHWSRLEKLLEDALIKVTAVASKIDAKSVRAMLEALIAGERSPRVLADLALGKMKAKRAALIEALTGRFDDHHAELARMLLDQVDQLDRQVDRLTGRIEELIAAIPAARGVDADGTTGPGAGAGPDAAVRSAVARLDEVTGIGPRGAQVVLAEIGLDMSRFATAGRLVSWAKLSPRTIQSGARSRGGRTGKGNPYLKGILGEAAAAAAKTDTFLGERYRRLVKRIGKLKALVAVARSILVIIWHLLADPTARYQDLGAGYYASRTDKDRKLNNHIRQIEALGYTVTLMAAQAA

SEQ ID NO: 272970 - protein, 412 aa, unidentified
MRRVIGMDIHRTFAEVVVWEDGRLRPHGRVDMTRSGLEGFARGLTKGDEVVVEATGNAMAVVRVLSPYVARVIVANPLQVKAIAHARIKTDKIDAGVLAQLRAADFLPEVWVPDPETERRRRLVARRNQVVRHRTRVKNEIHAILAAHLVPPCPHAELFNGPGRAWLAGQVLPDDERATVERHLRELDRLGEDLEVLDRDIGSAVVDDPAVKRLLTIAGVNVTVATGLVAAIGDVRRFSSPQKLVSYFGLNPRVRQSGLGLAQHGRISKIGRAHARALLVEAAWAAAKAPGPLHAFFVRIRARRGHQVAAVATARKMAVLVWHLLTKEADYLWARPALVAQKVRALELQAGRPAKKGNKRGSTYAYNVKELRDREKAIAEQAERAYEHLVASWRPKPGRKRTGAASAAGSTA

SEQ ID NO: 272971 - protein, 370 aa, unidentified
MSIKRILVNTIDTDLEYEVIGIDLAKNCVSAILLTTDGEIFGIDRLDYQELEKSAQELSPTIFAMEPCTEMNYMVQKLEDWGHHCIVISGKNVKDYVESHFSNQKTDLNDAQALAFLTKDTQLRTVKAKDPEQLKYASLTTLREQYVKQYRQTMVSLKGICQVWGLSISKGISGKARLKDMIENHAAFPAELRTALVGMVAHAQAVQKDLKSVTKILEELAKKDKACQLIQTVPGLGTICSCRLRATVGDIQRFKHPKDFPAYYGLVPRSMATGHNEKKGKITHRGDKTMRSLMVQGAGIVINQATKGNLHSKQLTKWILKKQKEKMPWGKLICAVAAKLLRIVRAILISGKPYNPKIAGVAKCSLPKAS

SEQ ID NO: 272972 - protein, 406 aa, unidentified
MRAIGLDIHRGFCEVAIAEDGRVRSARRIGTAPAELEAFGTSLGADDVVTLEATGNAAAIARILAPHARVILANPKATKAATRLRTKTDRIDARTLAQLLASGFLPEVWRPDRATGALRRQVSRRAHLVKQRTKAKNQVHAALIRNLVGRPPASDLFGRRGREWLAGVELPADERDGVEASLRAVDFLDAEVARLDAVLAGAVLASPDMRRLMTLPGVSGTTAATLVAVIGDVQRFPGPGRLVAYLGLDPRVSQSGEDAARHGRISKQGASVARHVLVEAAWVASRTAGPLRAFAQRVAARRGWNVAIVAVARKLAVIAWHLLSRKEEYAYGSPSRVRLKLRRLELRAGSERFQGRAIGLAASEAERRLERERAEQAETAYRRLVADRAAAGNGAGDANGARISRR

SEQ ID NO: 272973 - protein, 344 aa, unidentified
MQIASIGIDLGKTTFHLVALGERSKVLVRKKFSRTQLLAHTANLPPSLIGLEACSGAHFLGGALREQGHEVRLIPAQFVKPYRKSNKNEFIDAEAIAEAVNKQNMRFVPIKTQEQLDVQAMHRVRDRLVQRRTALINEIRGFLLERGIIFPTQPTHLRKNLPTVVEDTEQNLTPRLRWLLDRLWQEWKQTDVDIDTVTDEIERIGVEDERCRRLRQIPGFGPLVSTAMVAAIGNGAAFRRGRDLAAWVGVVPRQYSTGGKQKLFGMSKRGNIYLRRLLIHGARAVLFRIKYDTAGLGQWVHRLSQRAPRNKVVVAIANKLARIAWAVLSSGRDYRHPPLQSAAA

SEQ ID NO: 272974 - protein, 343 aa, unidentified
MAYFAGLDVSVKETSICIVDDTGKIVREARVASEPEALLQVLTNTIYRFKRIGLEAGPLSQWLYSVLAEAGLPVICVETRHMRAMLKAQINKTDRNDARGIAQMMRVGLYRAVHVKTLRSQKLRVLLTHRKLLQSKTIAIENDLRATLRNFGLKVGMVGTVKFEVRIRELVENLPDLAVLVEPLLIVRRVVREQLGILHRRLLAIVRDDDVCRRLMTIPGVGPVVALTYRVTVDVPARFRNSKAVGAVFGLTPAKYQSGENDRTGAISRCGDEMMRMMLYEAAQSMLVRSAKWSWLKGWAMKIVRHRGMKKAIVALARRLAVIMHRVWVDGTAFRWTREITPA

SEQ ID NO: 272975 - protein, 396 aa, unidentified
MHGFEGPYDVYVGLDVGKRAHHACAVLADGSVAFRTGVDNSEAAIDRVIADAAELGTPLVVVDQRRNIGMLAIRRARAAGVEVAYLPGISANRASALFPGDAKTDARDAEVIARTAMGVPQSLRPVPEEDDLEGARRLEAQRADLIKDRTHQVNRLRSLLLESNPDFEGALEPEATWCVAILERLGGPWNVLDSGRRRFLRAASQAPRERAEAVWRSLGMATRPTERQVEAEMVLVPMLARRIREDTEQIEALEELIDDQVAEDETYRCLLTIPGVARRTATQPVPNVRLADFADHDHLASYCGLAPRNRQSGTSLNSVSSSRQGNKQLKNVLIFSCNSLLRSKGYFREYYDSCRFRGKTHKAAVKATARKRMKVIYAVMRDRVPYREDLLRRQTQ

SEQ ID NO: 272976 - protein, 356 aa, unidentified
MLGVFTFHESMEAPMDEYDGRQFVGIDLHRQRSVIVRQSESGEQLSAVRIVNDPVALALQLEQAGSDPEVVLEATYGWYWAVDVLQDCGARVHLAHPLGVKGFRYRRVKNDVRDAGDLADLLRMGRLPEAWIAPPETRELRELVRYRAKLVAIRSGLKAQIHAVLAKAGVLIAVSDLFGVTGRQRLAKVPLGPAYAQRIRSLLELIDILDGHVARFAAMIAERLRAQRGYQAIQQLPGVGPVLAAVFVAEIGDVHRFAGPAQLCSWAGLTPTHRESDTVVRRGHITKQGSKLVRWAAVEAIQRQPDITKIALDRKRIEARRGRNIAKIAAARKLLTLVYYGLRDGHIRALARQVAA

SEQ ID NO: 272977 - protein, 355 aa, unidentified
MGRPQHQRKTAVTHYIGIDVSLERSSVCILDGSGKIVREAKIASEPEALVAFCRELGLPVTRIGLEAGPLSQWLHTGLTSAGFDTVLLETRQVKAALSAMVVKTDRKDARGIAHLLRMGWYRPVHCKSVPAQEVRALLAGRKLLLGKLRDVELSMRGLLRGFGLKVGEVSKIRFEMRIRELIAGHGMLEQVIEPLLCAREALNRQYNVLHRAMLNLVRRDAVCRRLMTVPGVGAMVAITFTSAIDDPARFPRARAVGAHFGLTPKRYQSGETDVVGAISKIGDEAVRTALYQAAHTMLTRSGQFSSLKRWAMEVARRRGLKRATVALARKLTVVLLRMWTSETEFRFSRLAVAAA

SEQ ID NO: 272978 - protein, 401 aa, unidentified
MWAAQHLEVTDMSYFVGIDIAKNKHDCFIATGDGEVVRNSFTFPNNDEGFRTLKATLDQLNHSQKIKIGLEATGHYGKNLKQFLTSIGYEYSELNPYLVKKFTQSITLRRTKTDKVDAQIIAKFTQLEASKPTTPPSYNTMELRTLVRNHDRLVRSRSDELVKITNSLDMIFPELKKFLNDRIGEWALYLLEHFTTPEKISRLTSGQIQKLHNVGRKVTVNRITMLKELAAKTIGHPSPADELVIKQSVKMVRAINDSIEAYRSRIEAIMKEVDSPLLSIPGIGMMTAACLHAEYGDLRRFSSPAKLLSFAGLECSKNQSGQSDRKGRMVKHGSAHLRYVLMNAAISVKNHCPAFSAYFQKKYSEEHKNYRVALNHVVRKFLRVAFKLVTLNESYSLELSK

SEQ ID NO: 272979 - protein, 305 aa, unidentified
MGKSFVGIDVSQDRLEVYVRPLGERWGVPNTPQGRALLVERLAALAPELVVLESTGGLERAVAGALRKAGIPTAVVNPRQIRDFAKATGRLAKTDALDAEVLARFAEVIQPEPRPLADEGTAQLRELVVRRGQLVKMATAERNRLKRASPKMKPRIRRHLEWLEEGIARLDEEIEEMKRKREEWAHRDRLLRSVPGVGPVLSATLIGCLPELGALVGVAPFNRDSGQWRGKRGIWGGRATVRAVLYMATVAATRWNPVIREFYLRLIGAGKPVKVALVACMRKLLVILNAIVRDGRPWRYNPAST

SEQ ID NO: 272980 - protein, 414 aa, unidentified
MKQQEVAAWIGLDWADKKHSIHLEVREGKREHRMLEQKPGIIHEWVAELRQRFQGQRIAIAIEQRKGAVVHALMMYDFIVLYPINPKALARYREAFRTSGAKDDPSDSELLLDLVSKHGDKLRAWIPDTVVARKLQLLCEQRRKIVNHRVALTNRITSLLKQYFPQAIEWVGDVASIQACDFLSNGSTLASIQRARKETLRKFYRQHNCRKASVIDERISQISNAVPLTNDAAIIEPLSLSVQIYAVQLRSLIRAVQQFDKQIVETFAQHPDHDVFDSFPGAGQVCAPRLAAAFGTDRSRWQSAVEIQSHSGIAPVTERSGDSKWIHHRLACPKFMKQTFHEFSDQSIRFSKWARAHYDELRSRGKDHHAALRALAYKWIRILFRCWKDRKPYSEEKYLAALRRRGSPLTEKIA

SEQ ID NO: 272981 - protein, 412 aa, unidentified
MQAIIERCCGLDVHQETVVACVLIGAPGQQPTKEVRTFRTMTRDLEALRDWLQALGVTQVGMESTGVYWRPVYAVLEGRFELIVGNARHIRNVPGRKTDVKDAEWIADLVRHGLIAKSFVPPPPLRELRELLRYRRKLVESQAAERNRLLKLLETANIKLASVASDVFGVSGRAMLKALIAGDASPEAMADLARGQLRRKRADLVLALDGRLEEHHRFLLAMQLRRLEAIEADIATLDRRIGERLEPYAAPHALLMQIPGVDWVVAAVLIAEIGVDMSVFLSVYHLAAWAGVCPGNHESAGRQKSGRARKGNIHLRTILVGAAISASRTKGSYLKDKFHRLKARRGGLRAALAIAHKILVAAYHMLAKNLPYRDLGEAYLDQIGQTRTVANLKRRLERLGYRVTLEPNAQPT

SEQ ID NO: 272982 - protein, 341 aa, unidentified
MDKELYFGVDVSKKTLDLAYYDGETIDWKNAHIKVSNDDAGFKKIGSVVAKVGKDFDTFLFCMEYTGLYNQNFRLWLESKEYIYGMVEPRKMHRFEPDLDDDQRSLDRIKTDELDAFRIAIYCEQNHKKILRNPSKLPSPVYFKLKRLLAERKQNTKQSTLYKQQLHDICAYDTDLSVERKKLLLKNMQENQKAIDKEIDSYMNEDTSIRKNYNLLTSIPGIGRIIALETIVLTENFTAISNPRKYACYIGIAPFKKESGTSVRKKTGVSKKGFSEAKADLSIAVLSAIRNNPSIRDYWIRKRKEKCGGIVLNAVKFKLVLRMFAVIKRGTPYVETDAYKN

SEQ ID NO: 272983 - protein, 370 aa, unidentified
MHQSSTLYIGLDVHKESIAVAYVAQEHHAEVVSLGNIGTRQCDIDKLVRQLQSKSKHLVFVYEAGPCGYWLYRYLTKKGQVCWVIAPSLIPKKPGDRVKTNRRDAIKLARLMRSGDLTPVYVPKVEDEAIRDLCRAREDTIRALKAAKFQLKAFLLRHDIRYTGRATWGPAHLRWLSEVVCPTPAQQIVFQEYVRTVTEHTERLERLEQELTDQVQTWRLRSVVDALQALRGVQFVVAVTTVAELGDLTRFDNPRQLMSYLGLTPSEYSTGERRRQGGITKAGNSHARRALIEGAWAYRYPAKVSRHLQLRLEKVPKPIQDLSWKAQVRLCKRYRQLSARGKNANQVVVAIARELSAFMWAIAQEVPLTP

SEQ ID NO: 272984 - protein, 410 aa, unidentified
MTVEDGLPVYVGLDWAAEIHAVCVIDHAGQQLAAFCVDHSADGISSLIRKLARYGDPADAQVGIERPNGRLVDLLLEAGHPVVPVSPNAIKTWRESEVLSGAKSDAGDAAVIAEYLRLRNHRLRPVQPYSPPTKALRTVVRSRNDLVRMRVAATNQLDAILDAHGPGVHAIFADTESAISLAFLRRYPTATAAAHLGEQRLTAFIAKRGYSGNRSPAQLLARLRAAPAGTTDPALTAAVGDVVQAFVEVVGALSTAIKRLDKSVIARLGEHPDAAIFTSLPRSGQINAAQVLAEWGDVREAYDGPDAVAALAGLTPVTKESGKRQHAVHFRWACNKRFRVAVTTFADNSRHASPWAATIYRRARARGHDHPHAIRILARAWVRVIYRCWHTSQPYDVNLHGGAQRMQIAA

SEQ ID NO: 272985 - protein, 375 aa, unidentified
MSKLRFLGLDVHAETIAVAVAEPNGEVRSMGIIPNRLQSIRKMIGKLGPVEQLRACYEAGVTGYALYWQLTRLGIACEVIAPTLIPTQAGDRVKTDRRDAEKLARHYRSGNLTAVWVPDAAHEALRDLVRAREDAKQDQLRAKHRLSKFLLRHGVRPPETVKKAWTHKYMVWMKDHVRFDQPALEATLLDYMHEVDHAGERIQRLEKAIEEAVSTAPESIRSVVVALQALRGIAQMTAVTIVSELGCFSRFKNPRQLMSYTGLVSSEYSSGSRIQRGRITKAGNAHLRRVIVEAAWAYRHKPWVGGALLKRQQGLEQAVKDIAWKAQWRLTTRYRKLSARGKNKPQVITAIGRELLGFVWAIAIRTETQHQPATC

SEQ ID NO: 272986 - protein, 409 aa, unidentified
MSEKTPEVVYVGLDRAAAVHAVCVLSAAGKVLTQFVVEHTAEGITTLIGRLARYGEAADIQVGIERPNGRLVDLLLEAGHPVVPVSPNAIKTWREGEVVSGAKSDPGDALVIAEYLRLRHHRLHPVQPYSAQTKALRTVVRTRDDVVEMRVAAANQLSALLDAYWPGAKTVFADIHSPIALAFLRRYPTAAAATHLGVRRLAAFLTKHSYSGRRTATELLARLRQAPPGTTDPVLSEAVHDAVLALVTVLEALGAAGKQLDRSVVAHLEEHPDGPIFTSLPRSGQINAAQVLSEWGDSRAAYDGPDAVAALAGVAPVTKASGRAHAVHFRWTCNKRFRQALTTFADNSRHASPWAAHVYAQARARGHDHPHAIRVLARAWTRIIYRCWHDKQPYDPDLHGRARDLQLAA

SEQ ID NO: 272987 - protein, 316 aa, unidentified
MKKAVEIFVGIDVSKAWLDVAVHEQAETVRVSNDEAGLVTLLKRLKKLKPSLVVLEATGGFELLAVAELSHAKLPVVVSNARRVREFARATGRLAKTDKLDAKVLAHFAAAVRPPVRALRSEEEEQLTALLTRRRQVLDMLTVEKNRLGTVRALMRADLEAHIHWLTKNLRHLDKEIEDFVEGTPVWKEKEALLQSVPGVGPVTSATMLGMLPELGLLNRQEIAALVGVAPVNKDSGRKQGKRRVYGGRADVRNVLYMAALAAKKFNPKIKSFYELLLKHGKEKKIALTACMRKLLVILNAMMRTTQHWRQIPAYH

SEQ ID NO: 272988 - protein, 337 aa, unidentified
MDTSKHFFQLHGVNAAEKVVLRKKLRRKEMVAFFKALAPTVIGIEACGAAHYLARLLGSFGHEVKLIAPQLVKPYVKRGKNDGADAEALCEAMRRPSMRFVPVKTAEQQAALMMVGLRDRLIRNCTQLSNAIRGYAAEFGFSAAKGKAHLVPLLERIQADESVPVLARELFTAQAEEYARLQAQIDAVDAKLLAWHKADESSRRLVKIPGVGPIGAVLLMLKTPAPELFRSGRQFAAWIGLTPKDHSTAGKVRLGGITRAGDEALRSVLVVGATSVIQHVRRGGRGSPWIVNLLKRKPPKLAAVALANKMARVAWKLMVTGERYAAKSVPAALANAT

SEQ ID NO: 272989 - protein, 317 aa, unidentified
MTKTSTWTAGIDTSKAKLDVAVHGLDQRWQIDNDKAGWRRLSRLLSQALVARVGIEATGGYERGVVEYLRAAGFVVFLLQPMQVRTFARLHLRRAKNDALDAVLIAAFAATIDRPNPEPDARLAQLARTLTFVEQIEEDIARLKTRLEQIDEARLRRLVEADIARLKARRKAEMARIVSTLRRHDDLAERLDLVLSIPGIGERTALALLIRMPELGRVSREEAAALAGLAPFDNDSGTHKGQRHIAGGRGRLRRSLFAAALPAAFRWNKALIELYARLLARGKAHNAALVACARKLLIYANTVVQRGTPWVEKAAAT

SEQ ID NO: 272990 - protein, 412 aa, unidentified
MDGVYKVAGIDVHKKMLAVVIANVAELGEYRFERRKFGTGDLESKALADWLTAEGVAEVVMESTAQYWKPVWQMLEGSFKLQLAQAQSNRAPKGRKSDFADAERLVRRLVAGELILSFIPDPEQRLWRMMTRSRYQLARDRARLRNQLEGFLEDCRIKLSSHLSNVLGVSGCKMLRALADGETNAATIAALANGGIRASQPALADSLAAASRLDAPRRQMLNLFLERLDLLSAQMDTLAKMAAASLSEHRDAVKRLSNVPGLGADSAQQIIAEVGPKVATFPSPERLASWVGCCPGREESAEVSKSDASPKGNSTMRRLLSQSANAAIKSKGSVFEETYRRLAPRIGHGKAVWAVAHKLCRIVWKILHDGVDYKELGQQPDPKSIERRVSKLTRQLRALGYQVQIQPAPIAA

SEQ ID NO: 272991 - protein, 316 aa, unidentified
MTQAVFVGIDISKAHLDVAIRPSGERHRVANEETAIRSLVLSLVERSPTLVVLEATGGLEMTLVMALAATRLPVVVINPGRVRHFARAVGKLAKTDRIDAAVIAQFAETVRPPSRSLPDARTQELAALLTRRRQLSEMITAEGNRLGSCRLATVRQNIEASIRWLKQQLKQISAELNDAVDENSCWREHVQLLRTVPGVGPVVATTLLAELPELGQLDRKRIAALVGVAPVNRDSGVLRGRRVVSGGRASVRTTLYMAAIVAARRNHIVRAFYQRLLASGKPKKVALTACIHKLLTILNAMVRSNTPWQANLEPSA

SEQ ID NO: 272992 - protein, 391 aa, unidentified
MSVTTFVGLDIGAEAQGTVVQRAARLAEDAAGYAALDATLARLGAPATVLVVCEATGHYWQNVVAHLWAGGWRVAVVNALRTSRYAAEDLVRTKTDPADALLLAQYGREKRPAPTPVGDEATRELTELVRLRARLAQDFADRVRQLHRAVDLTFPEFTRHVRTLDSELAAGVLARHPTARALAQAAPGKLARLVYDGRHKVGDELARALVAAAKASVGAHHGEAYARQVRYACEDLTTLRARLRELEGELRGLVERHAVGQHLVTIPGVGPITAACVLAEVGDFARSPDAATLASYAGLVPALRHSGKRTPLRAGLYPVGNARLRRGLYMATPRAVRCNPWLRAFYDGLVQRGKPKLLALTAAMRKLLAAMHSVARRGQPFTLPPAPEPAT

SEQ ID NO: 272993 - protein, 321 aa, unidentified
MTLFFLGIDVSKAKLDCALRLPNGKFRCKAVANNAQGHAEIVEWLDRHGATDVHVCMEATGVYWENIAQFLSTRGFTVSVVNPAQIKAYGASRLARTKTDAVDARLIADFCAERNPPAWQPLSDAELALRALVLRLDALQAMRTQESNRLDVSRDAVRQGIQEHLDWLDQQIKSLVKAINGHIDTNPGMKDKRALLDSIPGLGERTIAVLLAFFGDPARFGNSRQAAAFAGLDPSQHESGSSVKGKPRLSKVGHAFLRKALYMPAMVTLYKTDWGKRFRDRLAAAGKPAKLIIGAMMRKLLHVAFGVLKSGKKFDPALHNA

SEQ ID NO: 272994 - protein, 344 aa, unidentified
MKHCKRLSIDLAKGVFQICGLNPNNKTLFNRKTTRAKLLLEVLNIKPNIIIMESCYSAIYWGRLFESHGFKVKLIPAQHVKPFVKGNKNDKHDALAIAEASMRPNIHFVPIKSIEKQDIQCLHRVRQRLISYRTGLTNQIRGLLSDYGVIFAKGHHAILTSLPLLIEDMANNLSFTIRELLNDLLEELKSRNALIDKTEDKIKILSSKQKGFTNLMNMPGIGLINASALVSAIGDAKQFSSARGFAAFLGLVPKHEQSGTMLKSKGISKNGNRYLRTLLVHGARTIVSRYKNTDDPLKQFAIKIKEKRGKHKAYVAVAHKMSRIIWAMLTKDQAYNPNYILTIK

SEQ ID NO: 272995 - protein, 259 aa, unidentified
METTTPTTEVTYVGLDIAKDRLDYTVDGIRCDHVPNTPSGHEKLLGVLAKLRGVRVICEATGGYERAVVAALLLAKHEVCVTNPGRVRAFAHAEGLLATTDRLDALLLRRFGEKVQPRLHAPMDQAAITLRELLDYRRQVSEQLVAVRNRLELAGPVLRARLDGQVTFLEKELTATDQLIQDHIDHDDTLSRKAARLRELKGAGPVLAATMLAYLPELGEIESPQLSALVGVAPFARDSGRSHQARHVRGGRGLVRRVL

SEQ ID NO: 272996 - protein, 325 aa, unidentified
MRQPQSQLKPQTQVGLDVSSQTLDAHIRVDGKAFSVPNTDAGFDQLCEMLSAYDVSMILMEATGGYEDNAACYLQLQGYDVVVINPRHARRFAQSMGRLAKTDRIDAAILAHMAFMIDSGPDRERYIKPVTDEQRKQLSRMSSRRRQIVDLITIEKQRLTHADDYARESINDIISLLNARLKQIESDILRYVKKNFSELASRLLSIPGVGSQAVTVLIADLAELGHVNRRRISALLGVAPFNHDSGKFKGQRRIRDGRQSVRNVLYMGVISATRFNPVIKAFYDSLLLRGKPRKVAIIACMHKLIRIINAMMRTGKPFDMSLHGV

SEQ ID NO: 272997 - protein, 356 aa, unidentified
MRWSLPPSRYYAEDRLSFGELSWKTLRSLVSIWVKTLSIFIARIVAGRLFTVKKFTRPKLIEFLATCPATTIAMEACGGSHFMARKLEELGHSPKLISPQFVRPFVKSNKNDFVDAEAICEAASRPSMRFVQPRTESQQAMRALHRVRESLVQDKVKTTNQMHAFLLEFGISVPRGAAVISRLSTILEDNSLPLYLSQLLLKLQQHYHYLVEQIKDLESQLKRKLDEDEVGQRLLSIPCVGTLTASTISTEIGDGKQYASSRDFAAATGLVPRQYSTGGRTTLLGISKRGNKKIRTLLVQCAGVFIQKLEHQSGKLADWVRDLLCRKSNFVVTCALANKLARIAWALTARQQTYVA

SEQ ID NO: 272998 - protein, 347 aa, unidentified
MKQTFANPPVPSTSTYPREVIGIDLGDRWSRYCALDQAGRVVEEDRVRTTAEALAAKFGKLPPARIVIEVGAHSPWVSRLLQAQGHEVVVANPRKVRLIYESDRKNDQLDARMLARLGRVDVSLLSPVQHRGCEVQADLAVVRSRDALVAARTQLINSVRGMVKSMGGRLPRSTTAAFAGNVKLLIPAELKTALEPLVRCIHSLSEQIRRYDDRVEQLADKKYPETRLLRQVKGVGPLIALTYVLTIEDPNRFQRSRQMGSFLGLRPRQCESGNSAPQLGISKCGNNHLRWLLVQAAHYILSRLAPDSRLRRWGLQLASRGGKNADGELWSLWRASWGAVASLVGDR

SEQ ID NO: 272999 - protein, 346 aa, unidentified
MDQQHYVGLDVSLETTSICVVDQTGAILWRGKCSTEPEAISQTVRTHAPAAVRVGLETGQMSNWLTLQLRKHGLPVVCLDARHAKGALSMQLNKTDANDAHGLAQVVRTGWFREVAIKSMDAQALRMLLMARAQLVSQRQAVANNIRGLLKTFGFVIARGSNGPFAVRVREVIADNATLAVIIEPLLLAWQAIREQVDALDRQVNLRAKTDSAARRLMTVPGVGVIVALAYTAVIDNPSRFKRGTSVGAYLGLTPRRYQSSEVDKAGSISKCGDGLLRSYLFEAANVLLSRHPRSCKLKTWGLALAKRIGMRRAKVAVARKLAIVMHRVWKDDCDFNWGDAPAAAA

SEQ ID NO: 273000 - protein, 357 aa, unidentified
MRRPKAKSNDKLIAGIDLHGNNLVIGVINQDGTRLMHRKLDCRLEQVEEFLRPLKLRLQSMAVESTFNWYWLVDGLRAQGYPIDLANPAKIEQYSGLKHADDKDDAFHLADLQRLNILPKAHVYDPELRPVRDLLRRRTNLVHQHTALLLSLQSLYARTTGQRLDLGEAKKMEPKQAPQLYEHPANQLIAQVQVEHIGALAKSIHRIEKAVLDCAREIPLYEKLLTLPGVGRILGMTITMEVGDISRFKTAGDFASYCRMVDAKRLSNGKCKADNNQKCGNKYLAWAFVEAANFARRYDESCRRWYDRKAAKAGKIIATKALGCKLAKAAWYVMAQQCNYDEQRMFPELANKPMKTN

SEQ ID NO: 273001 - protein, 337 aa, unidentified
MKYSGIDLHSNNSVVVISDEADRVLVRRRVPNDAAAILALLAGHREELVGVVVESTYNWYWLVDALQAAGYRVHLANTAAIKRYEGLKHSGDEDDAAYLAQLLRLEILPSGYICPPAARAVRDLARKRMQLVRSRTAQVLSVENMLSRETGAGMRSRAVQRLTAHAVEGFGFNPEVEQSMCANVAVIKTLNREIDKLEQRLHQCVRLRPEFRLLTSVPGIGQTLATLIMLEVGTIERFAAVGNFASYARCVDSARISNGKKKGQGNVKNGNAYLAWAFVEAANFAHRYCAEARRFYERKKARTNGIVATKALAHKLARACYHMLKENKRFDVKRCFA

SEQ ID NO: 273002 - protein, 457 aa, unidentified
MYRELQPLRQALSVELKADLPPAPPGIEAEHLLQTYLDRLTMYVGCDVADQTFTLLAVDAAGEELGHLSDVPNNPFGFEQAWRWLESLRCQHRLRIIVLAMETSGIYYWAWWDFLAGRPNLARVLYNPRTTEHMTEVLSKRVRNELVDAYALAEQVRLGSTPEVVLMEDTDLLTARLCSRAARDLAQQINDKKNQLRSLLRAYNPALCQVFPQAKLHHRAVYALLQHYVLPDEFIAAGPTPITAILTDHCRTAFGREQAEQLIALCRQTLTHPIGREVIAYRVRQLTQDISTAQEHKQYFLKTGYGLIEDRTETRLLRLVKGAGVSNTLALVSETGDVHRFPDGPHLASFLGLTTSKHISGTTLFQSKHITKQGSPNARYAAVNLAGHLKQYVPKYQQMYQHIKNRKSQGGHFIALVAIARDFVTNVLYDMWRYQRPFFLEVEDYRAYRRAHPRAND

SEQ ID NO: 273003 - protein, 407 aa, unidentified
MDVLHPKCAGLDVHQQTVVACARTGAGKAVTYDVRTFGTTTAELLALSDWLSAHGCTHVAMESSGVYWKPVWHVLEGHFELVLANAMHIRNIPGRKSDVNDATWIADLLAHGLIRGSFVPPEPIQELRDLTRTRKQLVREIAQHTLRIQKTLENANIKLTAVLADVLGSSGRAILRALARGERDPERLAELASDRVKASRAELVAALHGRVTPHHRFMLTLHLTQIEALEAAVREVEARLGDALAPFRAALDRLITMPGVSETVARVIVAEIGFDMTRFPSAGHLVSWAGLCPRLHESAGKRLSNRTRSSNPWLKTTLVQAAWAAARKKDSYCRAQFLRIKSRRGPKKAVLAVAASMLTAAYYMLKHGVDYRDLGADHFDRRDKAKLAKRLIARLHDLGLTVEVRAA

SEQ ID NO: 273004 - protein, 377 aa, unidentified
MHSENIAVYVGLDVHKETLAVAIAAPERLGEVRYYGTINNEAQAVRRLFQKLQELYGNILSCYEVGPCGFGLYHQLTAMNIKCQVIAPSRIPKSPTDRIKNDHRDAISLARLLRAGELTPVWIPDLTHEAMRDLIRARAAAKRDSRVARQRILSMLLRTDKHYAGKHWTGKHRTWLANQSFSQPSQQIAFQHYCQSLEQIEDRILQLDQEISRLLPEWSLCNLVCQLQALKGVGQLIAITLVAELGDFSRFSNPKQLMAFLGLVPGEYSSGNSIRPRGITKVGNSELRRLLYEAAWSYRTPAKVGAWLIYYRPDSVTQYSKDIAWKAQQRLCSRYRSLTAKGKKSQVAITAVARELTGFMWDIALAAQSSFSQQKQN

SEQ ID NO: 273005 - protein, 369 aa, unidentified
MKKTIKNIGLDVHKNSISIGIADEGRDGEVRYFGKIDNSMDQLDKVIRRLVSEGAVLRFAYEAGPCGYGIYRYLTNNDMDCAVVAPSKIPQQNGNRVKNDRRDCLTLARLHRAGELTSVYVPTEADEALRDLVRAREDATRAVRTAKQQLGAFLLRHDIVYSGKSKWTKAHFNWLADMAMPHPAQQIVFQEYIDTVVGCSNRVQRLTEQIRQQSKQSRLHELIKALQSMRGISLIVAATIAAELGDLTRFENPGKLMAFLGLIPSEHSTGERVKKGAITKTGNGHVRRALVEAAHGYRFPARKSRELRKRQEALPQEILDISWKAQCRLCTRYQYLMAKGKKTNIAKTAIAREIAGFSWAIAQALPKVA

SEQ ID NO: 273006 - protein, 429 aa, unidentified
MDGEDRSRIEKFRQVKKVIRGSGEHLVVGVDVGKEKHHAFFGAAAGKTLLRRLVVANDVEGFSKLLTYAEAMKTKTCLEEMVVGLEPTGNYHKPLGEYLVEREVTVVLVSNKAVTSNREMMDNRWDKHDTKDAANIADLVVQGKFMYYDHPVLPLRDLRNLLSLKRRLRKQEHGLRVRIRNHLLAQYFPELDRHYGQSRPLVLSIVRHCLNPAVIGSLDYDEFVRMVAPGPRVNAAQRNRLETIWKTAPHSIGCRAGHMLGFEAAIMGEGLKQVEEAIARLDGKIQEVCLHFPEYSCLLTIPGFGPDVSSRVLAAIGNPFRFDNETQVLKLAGWDLSARRSGKSADAVTPVISKKGKADLRYALYQAALIASTKNQTFINYYTDKLRGREKEKGIHTKMRVKVAAKLLVIAWTLMKKEEPFNPDFLVIG

SEQ ID NO: 273007 - protein, 388 aa, unidentified
MNIIYERCCDMDIHKNTIAACLITGRKKEIRSFSTMTSSLLGLIDWLRSADYQCVAMEATGSYWKPIYNLLEMEEIPTLVVNAQHIKAVPGRKTDVKDSEWIADLLRHGLLNGSFIPKREQRELKELVRYRRSMVAERARELNRIQKVLEGANIKLGSVVSDIDGKSSRRMLDMLIAGCTDVQAMADKALRQMRKKIPQIEEALHGFMGDHQRAMLRLMLKHIDILEEQVLSLDQVIQERMKPVKDQVSLVDSIPGVAERSAQVIIAEIGINMNQFPSDSHLASWAGVCPGNNESAGKRKNGKTRKGSDMLRTTLMECAKVAGHLKNTYFSAQYARIAARRGHNRATVAVAHAILKARITYSKITHPTKNWDQITLINAGKRRSLRNL

SEQ ID NO: 273008 - protein, 375 aa, unidentified
MRQDRAGEVIASYYGIDLHKDQITWHCIHKTGNGETARENGRISTDRILEVLVPMLSVNDSYLIVEASGSSFFFYSLVESHCKKALVVNPVAFRELYMTGKKTDRIDAKKLAERLKYHIECGDTESGFPEVFVPDAEIVKIRKMVTAYELVVKQGTQIKNQAKSVFRSKLMSVAVDIMEKGLEDALKDKRIDEADRSILIMLKRIYDTLMEEKEEIKKQILLLGSFRFREEVKLLMSIPGISLMSATVFMADICTVERFKSEKKMTSYLASVGTVDSSGGITRNGGLSRRGRRTSYRYILQGLEHIVNGNKDFQKFKERHALTRSNKVRAAIVRKTFVSMYFMLKNKEAYRYLNEAIYARKIRDLKKYGIDFKCA

SEQ ID NO: 273009 - protein, 369 aa, unidentified
MAKSITYVGLDVHKDTIAVALAEAGLRGEVREHGKIPNTPTALKALTVKLAPARRELRFCYEAGPCGYGIQRQLTEAGHECAVVAPSLIPRKPSERIKTDRRDAINLAKLHRAGELTPVWVPDQAHEAIRDLVRARQAAVRTLRQARQQLSGFLLRHGRHYHRPAWTQLHRRWLASLKFDQAVHHIVLEDCIAAVEAAMARRDRLEAHIEAVLPEWSLAPVVEALQALRGVRLVAAATLVAELGDITRFTNPRQLMAYLGLVPSEHSSGRTRRQGGITKAGNGAARRMLIEAAWSYRFPARIAREQLLRQERLAKPIRDIAWKAQERLCRRYRKLARTGKQPTVITAAIARELAGFVWAIAKQVQQPIA

SEQ ID NO: 273010 - protein, 381 aa, unidentified
MTTAVTHKTHVHTTEATLFVAFELSEKTWKLGFTMGHGQKPRERNVTARHQERVLDEISLAKHRLGLPETAPVVSCYEAGREGFWLHRFLLAHGITNHVVDSSAIEVSRRQRRAKSDGLDVRKLLSMLIRYEQGEHQVWQVVKVPSVEAEDQRHLHRDLETLKRERASTTTRIQGLLSSQGIQVSTLAKLPEQLDTLRLWDGTAIPPGLRRRVLRVYAHHTFLNEQIAAIEAERRAQLQTSSDASIDQIRQLMMLKGIGINGSWLLVMEFFGWRAFKNRREVGGLAGLTPTPYQSGESAREQGITKSGNPHVRWMITELAWSWLRFQPESALSVWFRERFGAGGKRLRRIGIVAVSRKLLIALWRFLETGVLPEGAVLKEG

SEQ ID NO: 273011 - protein, 456 aa, unidentified
MKQKTTSQSSRTLPIVGEVEPNAAGLDVGARKVYVAVPADRDAQPVRSFDTFTEDLERMADWLLECGITSVAMESTGVYWIPVFDILERKGLRVCLVNAHHVKHVPGRKSDVQDCQWLQYLHSVGLLRGSFHPEDQVRALRAIMRHRDSLIEMAAAHTQHMHKALTQMNLQIHHVLSDITGVSGLAIIDAILKGERNPQVLAGLRDGRVQASEEIIRKSLVGNYRREHLFTLEQSLKAFRQYQALITACDQELAQYVKDFPSPMDGDQPPLAKEPNKHRPRKNELRLELRSELYRLFGTDLTAVPGISTLTWFTLLTELGPEIGKFPSSPAFTSWLCLCPNNRQSGQRILSTQTRRSKNRINHALRVAAQTLHHSNSSLGAFYRRLRARLGAPKAITATAHKLARILFHLITTRQPYDESVFALADQQQQQRHERYLRKQAQAMGFSLVRTEVQPA

SEQ ID NO: 273012 - protein, 350 aa, unidentified
MLIIGADYHPGFQQIAYVDTESGELQERRLQHREEAEKFYRDLAGQGTKVRVGMEASGHARWFERLLSELQFELWIGDAAEIRTKRVRKQKTDRQDAQLILKLMLEDRFPQIWVPSWENRDLRQLLWHRHRMVQARTRIMNQLQAVALNEGLRSKKRLWREAGRAQLAAIRLAPWATRRRQDLLELLDRLNPTIGELTKAVEEEAEKCPEAQRLMTHPGVGPLTALAFVLVIGTAERFGCGKQIASYLGLVPEEDSSGERRRLGHISKQGNSLLRFLLVEAAQVTVRSNQEWRNKFFHLAMRRGRKIAKVAMARRLAIRLYWMWRKKWNYEQLTKFGSHAGQPGNPHGVR

SEQ ID NO: 273013 - protein, 320 aa, unidentified
MVNQNQSSSVSPLFVGIDVSGEFLDVAFHGSTEYFRLANSPEGIADLIARLSPLKPELIVLEATGKLEKAVLEALCKAGLPGVALNPRWVRDFARSTGHLAKTDRIDARVIAHYGAAVKPELRALNDAQTQQLQALILRRSQLMEMLTAEQNRRRRAHKATHASIDELIAFLKKRIKDADDDIDSFLRSNELWRKTEALLRSTPGIGRGTAATLIAFLPELGKLSGKEIASLVGLAPFNVDSGKQQGQRHIKGGRHMVRRALYMACVAAQKANPDIKAFCDRLRDKGKKTKVAFVAGMRKLLIRLNAMMRDATPWSPPKS

SEQ ID NO: 273014 - protein, 347 aa, unidentified
MKHSAGLDVSVKETAICIVDEVGKVVRETKVVTEPEAIIALLNSAGLEYERVGLEAGPLSQWLVNRLAEAGLPVICVETRHMKAVLKAQQVNKSDRNDARGIAQMMRVGLYKPVHVKTLASQQYRMLLTSRKLLRDKLQDMENELRGTLRNFGLKVGVVSPGRFEARIRELVAGHRRLEMIVTPLLAVRRVLREQLAKLHKMVLDEVRGDTLCRRLMTVPGVGPVVALTFRATVDQAQRFVRSKTVGAHFGLAPRRFQSGEVDYDGRVSKCGDAMMRTALYEAAQVLLTRTQKWSWLKAWGMQVARRRGAKKAIVALARRLAVVMHRMWLDGTEFRWRKETDAAAAA

SEQ ID NO: 273015 - protein, 400 aa, unidentified
MNAVGIDVSKGKSMVAIMRPFGEVVATPFEIKHTEIELKKLVCILEKLPGETRIVMEHTGIYWQPIAKALHDAGLWVSVVNALLIHKYGNNSIRKGKTDKLDAVKIANYCLDHWLDLDRFTLIDPIRQELKTCHRQYDQYIKLKVNLKNNLITLLDGTFPGLNTLFKSAPRDVDGHEKWIDFAIKFWHRECVCGCTEKSFTNQYRKWCTKAGYRFNEAKAASIYAHAAAQVNTLPMSDAIKRLVILAASQLNTIIETLSVIQNEMITLASKLPEFPVVMKMFGVGPVLGPQLIAEIGDVRRFHHKQSLVAFAGVDAPPCQSGTFESKNRHISKRGSPRLRKTLFQIMSTIIQHAPADNPVFQFLDRKRQEGKHYYVYMTAAANKFLRIYYGTVRAYLEDT

SEQ ID NO: 273016 - protein, 346 aa, unidentified
MSESYEGKQIVGIDLHRRRSVLVRMTETGETLETVRISNDPEYLRQVMQRAGEAPEVVLEATYGWYWAADCLAELGAIVHLAHPLGVKMFSYRRVKNDQRDAADLADLLRMGRLPEAWIAPPATRELRGWVRHRAKLVGLRSNLKCQVHAVLASAGAQVPMSDLFGASGRDLLAGTRLAPQSRARTDSLLRLIENLDFEVELFAKLVAGRLRGDPGYLVIQLIPGVGPILAAVFVAEIGDINRFSKPAQLASWAGLTPKHHESDTTVHRGRITKQGSRLVRWAAVEAVQRVPAHTRLGQVRDQIGARRGRNIGVVAAARELTTLVFYGLRDGHIRSLSTSTPVPAA

SEQ ID NO: 273017 - protein, 321 aa, unidentified
MKTVLGIDQAKKKFDVALLINGKYKSKVFENNPAGFSALIAWLSQNGVETVHACMEATSTYGEALARFLHEAGHSVSVTNPARIKAFGQSELLRTKNDKTDAKLIARFCETMKPTLWQPAPPEIDYLRGLGRRRDALVSMRTQEFNRQENPNEIVSTSIKTVLECLDKEIEQIGKLIRDHISKHPDLKRKYDLLNSIPGVGPATIEAILSEINAFKGFETVEQVVAYMGLSPKEHTSGTSVKGKSAICKIGNARLRKALYMPALSAILYNPIVKALYDRLKTKSKNGLVIVCACMKKLVHLIYGVIKSNKPLDPAYTLKMA

SEQ ID NO: 273018 - protein, 496 aa, unidentified
MSAFLRRSGQNPHRWATKGMKSKKELLAKKKHIKRKSAKAKHNRVLGIHNPHAAGADIGATEIYIAVPPDRLEMNVRCFGTFTQDLRAIVQWLREYKVTSVAMESTGVYWIPLYELLEQEGFEIYLVNARHVKNVPGRKSDVQDCQWLQYLHSVGLLRGSYRPAQDICAMRAISRYRDNLLHFGAQHLQHMQAALDQMNLRLHHVIADLSGLTGMAIIEAILAGERDPRQLAKLRDPRIKASQETIAKALEGNWRVEHLFVLGQALQSWKQVQQQLGQCDQKLGELSSQLEGKIDLANSPLPPSAKYCGREPRSKNQPNGPWREELYRHFGVDLTEVPGLSLGVVLTLFVELGADLSAFPTPRHFAAWMGLCPDNAITGGKVIRRGTRRNRQRIRLALRLAATSLHHNKTQLGECFRRLRARLGAPKAITAMAHKLARMIWHLVTHRVGYDESIFAEREEQLLRRKQRQLRNLAHSLGFTLVPNPRPAATSNAEVS

SEQ ID NO: 273019 - protein, 346 aa, unidentified
MTTYFGVDFHARQQTICYCDTADGVIHCRELRHDKDDVRGFYSQFTGEVIIGLEASGYSTWFVELLESIGHQVWLGDATEIRRRARRRQKNDRRDAELLLDLLLREEFPQVHRPPFASREILRLLRYRHRLVQMRTKIKNSLQALAFSAGSAKRATLLSQKGRARFLQLPMSGAMDRQRREWLCFVAEFDERIKELDGWLTEQAEQDERVLRLQTHPGVGLLTSLALVHSLEPVSRFEGGRKIAADVGLEPMEYSSGDKQRFGSISKGGSRLLRYLLVEAAQTAVRRDEELKKFYLRLSHRRGAQKAKVAAARKLLIRSYVLLRDKIDYAEFLSRGVEARTARLAT

SEQ ID NO: 273020 - protein, 343 aa, unidentified
MAQQMIIGIDLAKHVFQVCMVTPQGTLKTNTTVARGKLLTLMARQPPALIFMEACGGAHDWARRFCALGHEVRLLAPQYVTPFRRGQKNDPNDALALTEAGQRPNIPTVPMKTIEQQALQALHRVRERLVKNRTAVVNQVRGLLLEYGIVIPQGIARLRKRLPRVLEEADNGLSFQMRDLLQSWQSERCALDTRITDITGQLARLSHEMEACQRLQEMEGIGPLSATALVAALGNGHDFQTGRQVAAWLGLVPRQHSSGGTTRLGGITKGGNSYVRRLLIHGARSVISHVRDKPDAKSAWMRQLVTRIGVNKACVAVANKMARVAWALLHTGAHYRKPAVLSL

SEQ ID NO: 273021 - protein, 351 aa, unidentified
MMLIGVDYHPSFQTVAFFVEETGEYGEQELNHSDGQAEKFYRDLKQRGICVRVGMEATGYSRWFERLLAELGFELWIGDPAEIKAKRVKKQKFDREDARLLLRLLRENNFPQIWVPGPENRDLRQLLWHRHRLVQMRTRITNQLHALAMNEGYRWKKKLFSEQGRAQLEKLALAPWASRRRQELLELLDRMNPTIEELTVAVEREVRNRPEAMRLMTHPGVGPLTALAYVLIIGTPTRFQRGKQIGTYVGMIPCEKSSARKQRLGHISKQGNSLLRFLLVEAAQAAARVNPAWSRRYMHLAMRRHKSIAKVAMGRRLAVRLYWMWRNGCEYSPSLEFGSYAGQLGTGNGVK

SEQ ID NO: 273022 - protein, 341 aa, unidentified
MTMIGIDPHKATHTAVAVDDDEYVVGEFTLRASKVQAERLTGWAEGLGKREWAVESANGLGYLISQQLVACGETVFDVPPVLASRVRLLGSGKSQKNDPNDARSIAIAALRSDRLAIVQPDDHVTVLRLLAKRHRDMARLRNKHCSRLHALLLELVAGGIGVKISVANASGLLDSITVDDEATRHRVLIGREVVDDIARLDQSLKASKKRIGVAVTASTTSLTDIVGIGPVGAATIIGYTKNVSRFPTRGHYATYNATAPIEVSSAGNTRHRLNLRGNRILNHAIHIAAVTQLRHDTTGRVYYQRKVAEGKTPKEAIRALKRRISDAIYNKLTADAARTTN

SEQ ID NO: 273023 - protein, 383 aa, unidentified
MAKRAPANKKYKTTTATAVGHMVGIDPHKLSLSAAVVDERGGVVAVEHFKVSGAGHRAMEAWALSFGLVARWGVEGASGLGRHTATYLVGRGHDVRDCCATRTAERARRRRQGKTDALDAERIARETLADPEMPVAFKRAPGDAGPDETTELMSLWHNARRSLLKSRQHLLNEAEALLLALPEAVRADLPTTKAVRPRLEELARRDRGAAWDALTTVRLQLLDDHTAAVAELDAKEKEVTAKLHALVAEAGSTLDELCGPSTRSAAELLVEVGDPRRFTEGGFARFNGTAPLPASSGEGPGEPVRHRLNRGGNRRVNAVLHRMAVTQRRCDPRAQKLFADAGRGHTKKEAMRILKRHLSNVVWKRMMRDFNTVAAAGSLGVAA

SEQ ID NO: 273024 - protein, 310 aa, unidentified
MDAIVIGIDVSKDKLDVHVLPAAQAFTVARNGAGIEELAARLAALAPAVVAIEATGGFETIVAAGLAGAGLPLVVVNPAQIRAYAKAIKQRAKTDPIDAAVIAKFARATRPEVRPLPDEVTRQLADLVARRRQIVEMMAAEGQRGRRVDHKRVARSIARVRKTLEAELAEVDQEIGDQVRGSPLWREKEDLLVSVPGVGPVVARTLLAELPELGRLERREIAALAGLAPFTRQSGRWRGRSFIGGGRATVRTVLFLAAMTAARHNPTLKAFRDRLVAAGKPKMVALIATARKLLTILNAIIRDNRPWQNA

SEQ ID NO: 273025 - protein, 423 aa, unidentified
MDTMHERVAGLDVHKATIVACVRILAGAKVERECRTFDTTTDGLSALLAWLVDCRCSHVAMEATGVYWMPVWKILSDGAFSLIVANAAHIKNVPGRKTDMNDAMWIADLLACGLIQASFVPQEDVQELRSLMRTRKQLGREQTRHVQRIQKTLTEANIQLDSVLSDIMGASGRRIIEAMISGVRDPRKLAALASVQIKATPKQLYDALHGRLTDHHRFLLKLHLQQWDGLDATIREIDREVEARIARGDKEVKAGEAPFRDLIKLLSTIPGVSILSATTILSEIGRDMSRFPTAGHLVAWAGLCPGQNESAGKVKSTRLRKGAPWLKTMLVQCAWAAKRKKDSYYKAQFFRLQSRRGPQKAICAVAASILTAIYHILKDGTPHRDLGPDHFNRRSTEGQAKRLVVLLTKLGFDVQLQRKAEAA

SEQ ID NO: 273026 - protein, 389 aa, unidentified
MYLIGIDISKYKHDCFIATEAGEIIKDSFSFDNCSKGFSQLLDVLKSLDPSQTKRIGLEATGHYGYNLKVFLDHHGFDYMEFNPYLVRKLATGLSLRKTKTDKADPKLLSMILLSVDYKVYPVKSYHIQELKSLTRYYKTLVKKHSKELVALTNVLDLVFPEFKPFFGNRFSKTAYYLLDHYPTPKKISRISQSGYKKIYSLSRGRFSYARLMKLKDLARNTVVHSSQLLMLQLKSSLNLIRSIDSEINSVKSALLDCAVKLDSPIFSINGVGPISALSIIAEYGNFISFDSPAAMLSFAGLEPSVIQSGTIDKQGHMVKRGSEYLRETLMNVSMFFMINNPTIYEYYLKKRNEGKTHRVALSHVAKKLIRIIFHLVKCNTQFNYLKLR

SEQ ID NO: 273027 - protein, 408 aa, unidentified
MEVLHLKCAGLDVHKDTVVACVRIQGHDERIVETFGTSTSELEKLAAYLAKHEVSHVAMEATGSYWKPVWAVLMADFELLLANAAQVKNLPGRKTDVNDAMWIADLLAHGLIRASFVPEGDVQDLRDLTRTRKQYTRQRGSAVQRIDKVLQTANIKLTSVLSDIMGVSGRAILDAIVSGTTDPNELVRLVNWRVKAPRTKIVNALHGRITEHHRLMLELHLSEIDHLDRLLVRIDAEIGRRLESFREAVEKVKTISGVSELSASVIVSEIGFDMSRFPTSGHLVSWAGLCPRNDETAGKRRSTRLRQGDPWLKTNLVQCAWAAARSKGTYLQSLFFRLRTRRGPRKAIMAVAASILTSIYHMLANNVPYVDLGPQHFNNRERTSMAKRLERKLNDLGYDVTLVDRKVA

SEQ ID NO: 273028 - protein, 401 aa, unidentified
MNYVLVLDVAKGKSMFMLSSDIGEVLLEPTEYIHNKSYFEKIDSYINKLNIKDNLTVVMEATSIYHKSPERFFKENDYHVIVFNPLIGKEITNTIRKTKTDKQDCIKLTNLFWKGSIPDRNYTEDEIYTKLNELSRQYYHLDEGLTRHKNRYKELLHLCFPEFELCFKDGKTYDLTALNFIKEFPHAYIIKDKRVDALAYNMANTNNRHLNYYKRKANIIKEYAFTSYPGVNKNSKDVDNLKQLANIIINLTEQKDEVKNQMIELAKETKNFECINSLFGIGELSASLIIAELKDITRFNNIKQINASCGLDPTIVQSGKSINYHGPISKRGNRYARKILFNCSRNIITLSAKCDKENSIYVYYQKKKQEGKHFYACLTACSTKLIRIIYALCMNNSTKQD

SEQ ID NO: 273029 - protein, 404 aa, unidentified
MWYVGLDWADTHHDVEVLDEAGKRVGVRRFAHSHQGLNELKQFLLNIAPEVEHLACIVETNHGLLITFLLEAGIPVYPVNPKTANQLRKAAGAKTDQIDAHLLAKIGRLELAELRRLEPDSPIVQELKTLTRDQDALIQTQTRLVNQLTACLKEYYPAALHLFAKVQQRSTLVFLQAYPTPQAAQAASVAELTATLRAGKHTNPTKAAPKIFEELHRPQLVASEVIVRAKSRLLLSLVKQLLVVIQEMASYDKAIRSLFLRHDDQELWRSLPGALTRLAPRLLAEWGDERSRYADATSVQTLAGTAPVPFQSGKYAKAHKRFACVKPLRNALYQFAWQSTRQEPWALAYYQRKRAEGKSHSMAVRALANVWVRIMYRMWVTKTSYQTATFEAAKRAHAPRPHAA

SEQ ID NO: 273030 - protein, 335 aa, unidentified
MSKKRNQVGIDVSSQTLVVEMKRASDNGIATGEFDNTTTGHKKLLKFITKNGGTARVCMEATGNYHFELALLLGKSGKVEVMIVNPKAMHHFGTAILQRAKTDSCDAHIILEYLLRMDFKQWQIPSDNKVALNRLARRLAQLKKMMVQEQSRRSAAEFQGKDGKEIIKSISKTITVFEKQIAKLQGLAVKLINDDEELKNTYALLTSAKGIAEVSATQLLAEFIMLPEGLTAAQWVAYAGLDPKPIESGSSVNKPRRISKHGNKYIRAALYMPALVAIRHDPNVKAYYEKLLAAGKNKMQAIVAVMRKLLLAIWGMLNAKKNWDGTKFYKIENIA

SEQ ID NO: 273031 - protein, 418 aa, unidentified
MIHPKMQYTYVGVDSHKETHTAVFLDCFFEKLGHITFGNLPADFAAFLIQAQTFKQAGTTFMFGLEDVSAYGSALARFLRAGNQPVKHVNAYLVARERSNLNADKSDNADAECAARILISKFATLPDVEDDEKYHVLRTLVVRRDFLVRCNLALKTYLHSLLTVDFPNYHKFFAEIGGKTSLAFFTKYPHPGLLKGTTADELAQFLWEHSGGLLGIKRATEILAAIDTTAMHEHSTYESNSKHEIRSKTVHSAIRQLQYNMDELGAVEADLATVYRSFNTTLTSMSGLDIVSASQLLSCIGDVRKFATPAKLARYAGIAPVSNSSGKRDMQFASQRGDRELNSLFYGLAVRLILTFGPGHKAHNPFFYEYYHRKMSEGKTKRQALKCVQRRLVNIVWGMLTHGEDYVNPPMIAVTKHS

SEQ ID NO: 273032 - protein, 415 aa, unidentified
MAKVMEAIFRCCAGLDVHSKTVAACVRRIDDQGKIHAEVRTFGTMTRDLLALCDWLVAEGVSHVAMESTGVFWKPIYNILEGQFQILLVNARHIKNVPGRKTDVKDCEWIAQLLQCGLLKGSFIPPRPQRELRDLTRMRAQLTHEMSSVANRIHKVLEDTNIKLGVVATDILGISGRKMIEALIDGETDTVKMADMARGRLRDKIPLLEQALVGKVTEHHQFILKALMDHLIYLESQIERFNQRIDEAARPFEKAIAALIPMPGYERASAQSVIAEIGPDMNPFLTDAHLCSWAKICCGNNESAGKRKSGATGHGNRWLRAILVQVAWAASHKKGSYFQAQYRRLAGRRGKKRAIVAVAHSILTVTYYILKEQRTYKDLGGDHFDRISRDRICRYHVKRLQDLGYNVELAERPAA

SEQ ID NO: 273033 - protein, 320 aa, unidentified
MTAFTPIGIDIASKKFDAAIWIEGKKYKNKVFANTPTGFHAFLLWLAPYGPCHICMEATGAYSLPLATYLYDAGYPVSVENAARIHAFGQSELIRNKTDKGDAKMIARYCHLHKPPEWKPVPVNERKLQVLINRLNTLKEMKRMEENRALTSETIVQDSIQKVIAALDEEIKEIEQAIKKHIDNDPDLKKNQALLESIPGVGEILSTTLLGYVGDMSRFSSNKALVAYAGLNPMLKESGCWKGSTKLSKKGNALLRKALYMPAITALKYNPVVAALCNRLKEKGKRGKCLVCAAMKKLLQLAYGVLKSGKPFAAEIPLAR

SEQ ID NO: 273034 - protein, 373 aa, unidentified
MTMTKSITVAREQASNFAEKKYTVGLDLGDRWSWYCVLDERGEVVFERKVSTTPKALREVFGAMPHSRVALETGTHSPWISRLMKELGHEVIVAQARKVRLIGESRKKDDRLDARTLARLARIDPELLGPIQHRSARAQADLIMIRARAGLVRARTALVNAARGLTKSYGERLQGCNPRNMNAEKRKGLSAELQLALEPLLRAIEALSQQILDYNERIEQMARDSYPEVARLKQVKGVGTLIALAYVLTLEDPQRFTKSREAGCYVGLQPGRRNSGSSTPQLHISKEGDPYLRTLLVQGAQHILGPFGADSDLRRWGLKLAERGGKNGKKRAVIAVARKLAVLLHRLWVSGEAYEPLRNQLRNQRAIELPTAA

SEQ ID NO: 273035 - protein, 410 aa, unidentified
MSLALPEALFFTGIDWAAETHAVCVLDAAGKIAAEFAIEHSADGIAVLLRRLARFGDPGGLPVAIERPDGRLAGLLLEAGHPVVPVKPNAIKTWRDGEVLPGAKSDAGDAAVIAGYLRLRAHKLTVAVPYSDQTRALRTVVRARGDLAGLRVAATNQLSALLEAHWPGARAIFADVESPVSLEFLTRYPTPAAAGHLGEKRMAAFCVKHGYSGRRTAAQLLARLRAAPAGTGLESLAEALRDAVLAAVAVLQALNASVKALDRSVAAHLGEHPDGAIFTSLPRSGQISAAQVLAEWGDCRQAYERPDSVAALAGVTPVTKESGKHRAVHFRWACNKRFRVAVTTFAGNSRHASPWAAQIYNDARAAGKDHPHAVRILARAWIRVIWRCWQDGVPYDPARHGAASRLAEAA

SEQ ID NO: 273036 - protein, 347 aa, unidentified
MLIIGCDFHTRSQHIAMLDTETGEVVERRLEHENGEARRSYESLKEPALVGMESTGYALWFAGLLAELGHQLVVGEAGKIRAMEPRKQKHDRRDAAHLLNLVVRGDFPRIWLPSVEDWDVRVLIEHRHQLVQLRTRVKNGLQAVALNYRLARRAKLWTARGRKELAALPLREGMARRRSDLLPLLAQLDHWIEELDQRLEREAEQRTAARLLMTHPGVGPLTALGTVLILGPVERFPDARHVTSYVGLIPSEESSGGRQRFGRLSKQGNRLLRFLVVEAAQTASRSDPGLRRVYRRLTFRKGKASAKVAVARKLIIRLYIMLRDQIDYAEFCRRGSHAGMLGQVALA

SEQ ID NO: 273037 - protein, 394 aa, unidentified
MEHFIGIDNSSLDHKVRVIDENGHLNLSFTITNDFDGFEILNHEINQLKESKIGFELPHGPLVDYLHEHGYKLYSLNPLKIKRFKESLKVSGNKNDDIDAVAIAEYLRSNNRYTRELLYNSHEIEKLKNLSIIHTRMVHNRARHINKLHFVVRQYFPLQEALFGDFACTVQLKMLIKYPSFADLNNASDKEINEFLKLNKYRRQDYIDKIIRKIRKYNQLISEDVEFTYRIEAEYLCDLLLMTNHRIKEIETEMKGITDAHSLGKVFKSLPGAGNILSCKLLSIFGDNKDRFDNYNGMQCLFGTAPKNYQSGMYHKVIMRKACSKSARAVLYEFAFSSLRFSKWSRDYYDRQKERGKTHSVAVRALSNKWIRVIYKLWKEEIIYEESKKVTAAA

SEQ ID NO: 273038 - protein, 476 aa, unidentified
MKKHEKTKPKPRAGKPLHEPVPDAAGIDLGAIEIWAAVPPERCQLPIRRFGAFTEDLNALVAWLVKCGIRTVAMEATGVYWIPLYQLLSDAKVEVCLVNARHVKNVPGRKSDVRDCQWLQYLHSVGLLQASYRPDQSVCEVRTIFRCRQNLLKQGAENLQHMQAALDQMNIKLHYVIDDLSGQTGQAIIQAILNGEREPIRLARYRDRRIKASEETVAKSLEGDWRREHLFVLRVAWQNAKHVQEQIKQCDQELMGYTRQLEASTVVAKPVGPIRIVCPNAEPGVPKLNPAAALRPAKPRRKTSKNEPDGPWREELHRFFGVDLTLIPSIGVLSGITLMTELGNDLSAFKTDHHFSSWLCLCPDNQTSASKVLHRSTRRSQNRVRQVLRMAASSLHHDRSYLGDKYRRLRTKLGAPKAITAMAHQLARIIWHLLTHRVPFDISVFAAVEKANQLRRLNRLHSNARQMGFQLTAIPA

SEQ ID NO: 273039 - protein, 357 aa, unidentified
MEQSKEISFKGQNIYVGIDVHLKSWSVTILSETSVLKRMSQGADPDVLHRFLTSHYPYAEYYSAYEAGFCGFWIHDRLTELGIHNIVVNPADVPTMSSEKLRKTDAVDSRKLAVSLRAKQLKGIYTPDSEALEIRSLIRLKNSITKDMTRQKNRIKSQLRYLGIEIPAEFLEPHSNWSKRFLNWLKEVGMRTPSGRQTLDILIMQYEALRKQKAEMTRKLRALSHEDRFKTTLDLLMTVPGIGQTTGLSLMAEIVDITRFSNAEQLAAYVGMIPMCHSSGEHEGVGDITLRKHAILRSNIIEAAWVSIRKDEAMQLCYLNNCKRMVPSKAIVKVARKLVNRIYFVLKRHQSYVNAVA

SEQ ID NO: 273040 - protein, 312 aa, unidentified
MTDQTFVGVDVAKDWLDIHHAGHGATRINNSHAAVRSFAARCAKEGAWVVFEASGGYDHQLRDALESAQVRFSRINPRQARDFARAMGVIGKTDRVDARMLAELGARLTPAPTQPLPPERRALQAQATRRRQLVEMRKQEATRLQQTADPAARADIRGVIAMLDRRIAKIEARMTDLVTADPELAAIERRLRTAPGVGPVVAATLIAELPELGQIDRRSIAALAGLAPIARDSGRRSGPRSIGGGRPIVRTILYLAALQASRRSPQFIHFRERLQAAGKSVKTAIIATARKLVVTLNAMLASGTDYRPIAVV

SEQ ID NO: 273041 - protein, 320 aa, unidentified
MRNAVGLDISKLTFDATAIVGNAEYSAKFDNDSKGLDQFSDRLKSLGCQNLHICMEATGNYYEEVADYFAQYYSVYVVNPLKISKYAESRFKRTKTGKQDAKLIAQYCRSAQESELVKRQKPTDEQYRLLRMTAAYAQIKSECAAMKNRHHAAKDEEAAKAYAQIIKAMNEQLEVLKEKIKEQTEKPNCKEGVKRLETIPAIGRMTAAVLFHHLTSSKFETSNKFAAFAGLSPQQKESGTSVRGKGKLTKFGNRKLRAVLFMPAMVAYRIRAFPGFIKRLEEKKKPKKVIIAALMRKLAVIAYHVHKKGGDYDPSRYKSA

SEQ ID NO: 273042 - protein, 419 aa, unidentified
MKLPSPLFVGIDVGSEANSVCCLTRDDEKRPVSRFTVTNNRPGILEFRDRIAQLVRKHHVEEILFGLEHTGCYSTHAAMYIQRHLDFGVRRKNVYLFNPSLIKEFKKSHYLDSPKNDRVDAWFIAAKLRSGHLPHPFTWSEPLMALQRLTRARYHLMQDLTRESNFLMTNLFLKFSDYTITGPFRRNKLSATSLAVMEEFESTEELAEMSVERLIDFLVKHGKNRFDDPEAVARALQKAARSSYRLPQSMADSVNLAMASSIRVIRTIQEQLKALRKGIEDHLATIPQTLDSVPGIGPILASGILAELDVHQFKSHKEAAKYAGLAWTVHQSGKFTANRTRLIHSGNRYLKYYMVEAANSVRVHDPVFAEYYAKKKAEPKEFAEGRALALTARKLMRVVFYLLKTNRLYAPQGGIRQSV

SEQ ID NO: 273043 - protein, 373 aa, unidentified
MRYYGIDLHSDSMTAAVLELVDGVQKSWTFSCSLHGPAFQSFVRELKSQDLILVEATTLSFWFHRQVASRVHACHILNTHQLQRRGNKTDKIDATRLVKILSYNELMEPDLRSRPYIYVPPKEVQELRALFSTYRLTKKLITQVANRIHSIYKQNGMPFERAKLHSRSFREYLVSELSLPGIWMVQVCSLLNQFETLEAEKKQLRDVICSRGFQLFAEEVKLLLGIHGFSVLTATALMADIVTIQRFSSAKKFCSYLRTAPRVQASNETVHLGKINKQGRTLTCSLLTQSILHFQKIPHYRQFRDRIKAGKKPCIVRMALIRKVLVSAYYVLTRKQPFRWVDQKSYATKLHELNSLVRKFEKTEHSGLLREAS

SEQ ID NO: 273044 - protein, 430 aa, unidentified
MKSNTQNAKIEAITEKTLVLGIDVGSETHYARAFDYRGIEYSKKPFKFSNTEAGFVTFKEWILDLKERHEKDKVIPGMEPTGHYWFNLGKFLQDNEMKPVLVNPHHVKKSKELDDNNPTKNDRKDPKVIAGLVREGRYMIPYLPDGVYADLRTASNIRFQLQAELTRIQNRISRWFNIYFPEYKTVYGKPDAKSGILILKAAPLPEDILTLGIDGVNQIWRDAKLRAVGKARAKTLIEAAERSVGSKEGAVSARMEIRMLLEDYESRNIRLQEVMTLIEGLVKQIPMAEKLLEIKGVGIRTVSGFLAEVGDISRFNNPKELQKLAGLALVENSSGKHKGGTTISRRGRKRLRYLLFEAAMSLVAKNPEFRELHNYYTTRRRNPLKKMQSLMAVATKLIRVFYAMLTKGVDYDPKKMISDIKRPAVYLQAV

SEQ ID NO: 273045 - protein, 332 aa, unidentified
MGSSSCHLEAQDKDGGVVADRKFGTSEANLIGAFGALKGEVWVHLETGELTAWIHRVLKDRVARVVVGHAKSSAWIAKDPLKRDRLDAHKLATLLRMGQVHEVYYAKEEHRTEFKHLVQHYDDVTRQEAKLKTKIKARFRAQGVIPTGTGVYGRQGRTAYLARVSSEVARETIEQLYGLLDQTLEAQKKAGKLLRREAKKYPEIARFDEIPGVGLVTACRVSAYVQTPHRFSSKRKLWRYCRLGITDRTSDGKPLGRQQLDWNGNGRLKEASRNVFNGAMKTREDNQFKRAFRETLQRTHDGTHARLSTRRKILAVMLAMWKGGTRYQDKKG

SEQ ID NO: 273046 - protein, 428 aa, unidentified
MQALVTSERTQAVWEAVIERCCGLDVHQKTVTACILTGALDQQPSELLRTFSTTTKGLLELRDWLEDHDCSHVAIESTGIYWRPVFHILEDTVSVLLVNAYHMKQVPGRKTDLKDAQWIARLLRWGLLKPSLIPPKPIRELRDLCRYRKKLIEHASTEKNRVQKVLEDANIKLASVVANVFGVSGRAMLEALMRGEMSPEETADLAKRKLRSKIPQLVEALEGHVNEHHRFLMQIQMEHLEYLERSIALLQQRIDERIKPYQHEVDLICTTPGIDTVSAQHIFAEIGGDIKVFPSENHLASWVGICPGNNESAGIRKSGRTTKGNRWLKALLVQTAQGASRTKGTYLKAFYHRVASRRGKKRAAIAVAHKQTAIIYHELSEDKPYQDLGENFFDRINQKALEQRLIRRLRNLGYRVDLHPEPVIPQYS

SEQ ID NO: 273047 - protein, 343 aa, unidentified
MQTITTIGLDIAKSVFQVHGVDAEGNVTLRRQLKRRYVLAFFQKLPPCLVGIEACASAHHWSRELQALGHTVRLMPPAYVKPYVKRHKNAATDAEAICEAVTRPNMRFVATKTPEQQSCLTLHRTRHLFIRQQTSVINVIRAHLAEFGIVAPVGRNGVEQLLEVAADASDKRLPEVARACVAALGAQLRMLRAQILQFDRMIMAWHRSSEASRRLDNIPGVGPVLATALVASVADPKMFRSGRHFSAWIGLVPKQNSSGGKDRLGHISKRGDRYLRSLFTTGALAVIRYAKIHGTRHRPWLTALLARRPTKVAAIALANKIARMAWAIMAKGERYKEPAALAA

SEQ ID NO: 273048 - protein, 340 aa, unidentified
MEKKYQEKEFIYFIGIDVSKETIDVSVLEQTKAEIIHYQRFSNDKKGFTGLTKKLNTLPSFNYENTLFCLEHTGLYTRRIVIFLLLNNALVWMESSLQIKRSIGLNRGKNDKIDSLRIAQYAKLHAGNATLSQFTNKTLYKLKDLLSLRKRLINSLKAHTIPLKEIKLIDPIQYKELSRISRSAINGLEKSIKGVDEAMMRTILEDEDLTALFNLATSVKGVGKILTCYLLVYTNGFTRLTDSRKLACYCGIAPFEHSSGSSIRGKPRTSSFANKDLKALLHMAAMTSIVHNPDIKAYYERKVAEGKSKMSVINAARNKLLSYVLAVVKRGEPYRLNYTN

SEQ ID NO: 273049 - protein, 335 aa, unidentified
MNHLAIDLGGRKSYVCIRGEDGQVIREGAVETDKLDRVLRGQAKSRVVVETCAEGFGVADLAMAHGHEVRVVPATLVRALGVGARGIKTDQRDARALSAASCQMDLPSVHVPSQQSRELKSMLGMRSGLVTCRTQLINGVRGYFRARRVRPRKGTTATFPKRVRELVEIPDFVELQLVAIDTLTTQIRAADKKLAALAKASDVCRRLMTVPGVGIIVSLAFVAALDDPHRFDGAHAVQSYLGLVPGENSSSGRLRKTGITKAGNPFARWALVQAAHHARRSRPNDPMVLWSRQVEERRQRPKAVIALARKIVGILWAIWTKTQVYNPARGADSIA

SEQ ID NO: 273050 - protein, 366 aa, unidentified
METIGLDLHKRESQLAIQAEDGTITERRIVTSQERFTAVLGHRPRARILLEASTESEWVACHLEALGHEVIVADPNYAPMYATRSRRVKTDKRDARTLMDACGQGTYRRAHRLSAPRRHLRAELAVRDALVRTRTRYVALAKALVRRDGLRVPSSTAERVGDRVQALALPAPLAAERVGAHLQALPLSPALAGELTPLLTLLPPLNATIAAADQRIAELEQTDPIVALLMTAPGVGAITASALVATLDDITRFPSAHQCEAYLGLVPGERSSGEQRRVGPITKAGNRRTRWLLVEAAWRILRSKDPESAALRTWTLRIAARRGKRIAVVALARRLGGIVYAMWRDGVPYDGTKIRHPSGARVLQTG

SEQ ID NO: 273051 - protein, 350 aa, unidentified
MMIIGCDYHPGFQQIAYVDSETGEFQERRLQHPEQAEKFYRALWEQSVQVRVGMEASGHARCFERLLEELSFELWTGDAAKIRAKRVRKKKTDREDARHILELLVENRFPKIWVPTWQNRDVRQLLWHRHRMVQTRTRIMNQLQAIATNEGVRYKKRLWREAGRKQLESLWLAPWANRRRKDLLEVLDRINPTIAELTQAIEEEAEKCHPARRLMTHPGVGALTAVAFVLIIGEAHRFDCGKQIAAYLGLVPEEDSSGERRRLGHISKQGNSLLRFLLVEAAQATARCDQRWRNQFFHLARRRGRKIAKVAMARRLAVRMYWMWRREWNYEQLQSFGSHAGQPGNPHGVQ

SEQ ID NO: 273052 - protein, 423 aa, unidentified
MKYNQNTKIMQITEKTLIVGVDIAKEIHHARAFDFRGIEYGKRIEFSNDIDGMKRFLKWAADIMNKSNKEHLMVGMEPTGHYWLCFAQFLRDKKHKVVLVNPFHVKRSKEFDDNSPTKNDRKDPKTIAMLVKDGRYVEPNIPEGIYSELRIAVDIREMLTKDLNKIKNRVARWLDIYFPEFNKVFADWEGKAALITLKEFPTPAKILGIGAEEILAAWKKEINRAVGAKRALKLIEAASQSVGKRDGIEMAEVEIKIILEQYEMLVKQLKKIESKIEELFMQVPGANEMLSIKGVGVITAAIFIAEVGDITRYEHPKQIQKLAGYNLVENSSGQHKGQTTISKRGRRRLRSALYKMIMPILANNKEFQELHKYYTTRKENPLKKKQSMIVLCCKLIRVFFVILKKGVKYNGNKMLRDIKKTRD

SEQ ID NO: 273053 - protein, 297 aa, unidentified
MEISTIGLDLAKNVFQAHGADASGAVVFRKQLRRKNVLEFFAKQPVCLVAMEACAGAHYWAREIGKFGHTVRLISPAYVKPFVKRQKNDAADAEAICEAAQRPTMRFVPVKSENAQASAVVFRARDLLVRQRTQVINSLRGHLAEYGFVTAQGPPHVAGLIQCVTDDKNTLPDAARLALALLVDTLRSLEDRIRRLDHEIARRAREDADARRLTTIPGVGPITATALVALAPAAATFKKGRDFAAWLGLTPLQRSTGGKQKLGATSKMGERTLRRLLILGASSVVRQTGRKQEASKV

SEQ ID NO: 273054 - protein, 384 aa, unidentified
MYNNTLIFIGMDTHKEFTEVAYSLDGRDERSQHHGKIPTTKQALSKLARQLQSKYPKATLHFVYEAGPCGYWVYRLLTSLGHCCYVVAPSLIPKKPGQRIKTDKRDALMLTDRLKQNDLTPIYVPEPEDEAIRDLSRARDRAMHDLNDGRYQLKAFLLRNNIRYDGPPNWSLKHLRWLTELILPHPCQQIVLQEYLQTVMERQNRLERLDNELAHQVKSWRYYPVIKAIQALRGVRLRVAVGVISELGDLSRFDHPRKLMAYLGLVPSEYSSGDHQRRGSITKCGNTRARRLLVEGAHSYRYPANISTEMQKRQEGLPKEIIDQAWRSQLRLCRRYQRLMHRGKHRSIVVTAIAREMIAYIWSISNEVVLTPVNPKERLSRVPA

SEQ ID NO: 273055 - protein, 317 aa, unidentified
MTQTSTRTAGIDTSKSKLDVAVHGRTEHWQVANSLAGWRILTTKLAEADVSRIGIEATGGYERGAVEHLRAAGFTVLVLQPIQVKAFGRVHLRRAKNDVLDAVLIAACAAAIEQVRDAPDPRLAELAEHLTFLEQIEDDIKRCKTRLEHIDQPALRRLVLGDIARLKARRLAQIRYLARQLRAHRDLAARLDLVLSIPGIGERTALALLIRMPELGRVSREEAAALAGLAPFDNDSGQHKGQRRITGGRARLRRSLFAAALPAAFRWNKALIVLYTRLTAAGKAHNAALIACARKLLIYANTVIQRGTPWREQASAT

SEQ ID NO: 273056 - protein, 413 aa, unidentified
METGEKGRIQTRKENIIYVGIDLHKETHTAVMLNCWNQKLGEITFENKPSEFHKLTKKVSRFLIEEKTAVYGLENAYGYGRALAVWLLEKGCAVKDVNTALSYAQRKSVPMYQKNDSYDAEAVALVLINMLDKLPDAVPDDAYWTLSQLVNRQDNICSHQQRLKNQLHEQLCVAYPSYKGFFGDISRATALYFWFKYPSPECLQGKTAEELASELRPISHNNCSIKRAEKILELVRTDGQTTREHQASRDAITRSIAGDLEHYREQLGIVETAIEYMMPSFNCTLTTMPGVDVTTAANMLSEIGDINRFPNANKLAKFAGICPINFSSAGKGKDMCPKQGNRRLQAIFYFMAIQMIQVSTNGTPRNKVFREYYLKRVAEGKNKQQALICIARRLVNIVYGMLKNHTEYREPEQ

SEQ ID NO: 273057 - protein, 351 aa, unidentified
MRTSQKTPETISTIGIDVGKNTFHLVGLDKRGAIVLQQKVTRHQLGRRFSNIPRCLIGMEACSGTHFIARQITALGHDVRLIPAQYVKPFLKGHKNDYRDAEAIAEAVQRPTMQFVSIKTPEQMDLLALHRVRSRLVRQRTGVANQIRGFLLERGITVRQGLMPLRKALPEILSAKSDGLSPRMINLISELVQDWRRLDERIAAVSAEIEALAKQDAGCQRLMSIPGVGPIISSAVVAAIGNGAGFKQGRDFAAWLGLIPKQESTGDRTILGKISKRGNKYVRTLFVQAAHVVLERRPRTARQGLWPWIEQASKRLQRNMLAIALANKLARIAWAVLARGHSYQPRIITNA

SEQ ID NO: 273058 - protein, 345 aa, unidentified
MRRVIGMDIHRTFAEVVFWEDGRLRHHGRVDMTRSGLEGFGRGLLTTDEVVVEATGNATAVVRVLSPFVGRVIVANPMQVKEIAHARIKTGKIDAGVLAQLHASGFLPEVWVPDERTERLRPLVARRNQVVRHRTRVKNEVHGILQAHLVPKCPHADLFNKGGRAWLERQMLPDDERAAIARHIREIDRLAEDLAALGRDIAGEAVDDPQVRRLQTITGVNAVVATGIIAAIGNIRRFGELQKLVSYFGLNPRVRQSGLDIAQYGRISKHGRSHARAMLVEAAWAAAKAPGPLRAFFLRFSQIPDSDGVHPQTETRKIADIAPCSAMPPFPSVVHLNASVRIPPA

SEQ ID NO: 273059 - protein, 403 aa, unidentified
MPTASEIRVSIDVGCHRHSVAIGLPTGEVLEEFDLLHRPEGFDLLFAHVERYQRRYGGEVAVAMEGYNGWARPLDTLVRRHGYRLFNINNLKLARFKEIFPAAAKNDRIDARKGLELFQLCDHLPVARGVLQEVAATPLENDQLKRLTRRRRALVEERSRLLCRMQADLQAACPGLLAITQNADNVWFLNLLTHSDDLGKLARLRETTLLGIKGIGRKYAARITAWQKSAHFSHDVAWVGPMVIEDARRILELRASIKALEARCAELVAQSEIAQCIDSIPGFGLVCAAEIAGELGTVARFTNEGSLAVYMGMATLDNSSGQYRGSKNPKHVNTRAKAAMMVGIDRHRKQVAESQRYYEKKRTQGKTHNQAIRALGRHLCRVIFSMLKQGRCYEVREAKIESE

SEQ ID NO: 273060 - protein, 343 aa, unidentified
MYYIGLDVHKKTISYCVKDAAGCVHREGKIGATRRELDGWIRSLPQPRSVALEATIFTGWIYDHLLPHAESVKVAHPLMLRAIAAAKKKNDRIDAAKIADCLRCDFLPECHMVSTEIRDRRRVLRYRNLVVKQMVQMKNRVSGLLMETGVSYNKQRLHKVGYFGELMSTNEEISDAVRPLLNLSRGMIRRSQKLEYDLVSSLERDPLLRERLRRLRTVPGVGSITALTWALEIGDYTRFHSNKQAISYCGLCADERSSADKVMRMPLSKQRNKHIQRVLIEAAKLAPRESPELAMIRARELERGNPNRATLAVARKMVCYMLAVERRKQDFLPAGEVVLAAAV

SEQ ID NO: 273061 - protein, 402 aa, unidentified
MFDTEDVGVFLGLDVGKTAHHGHGLTPAGKKVFDKPMPNSEPKLRAVFDKLTAKFGTVLVIVDQPASIGALPLTVARDAGCKVAYLPGLAMRRIADLYPGEAKTDAKDAAVIADAARTMPHTLRSLELTDEITAELTVLTGFDQDLAAEATRTSNRIRGLLTQFHPSLERVLGPRLDHPAVTWLLERYGSPAALRKAGRRRLVELIRPKAPRMATRLVDDVFDALDEQTVVVPGTGTLDTVVPSLARSLAAVHEQRRALEAQIKALLEDHPLSKVLTSMPGVAVRTAAVLLVTVGDGTSFPTAAHLASYAGLAPTTKSSGTSIHGEHAPRGGNRQLKRAMFLSAFAALHDPASRTYYDKCRARGKTHTQALLRLARHRISVLFAMLRDGTFYEPRVPEAAVA

SEQ ID NO: 273062 - protein, 392 aa, unidentified
MYYIGIDIAKRAHEVCFMDQDGQVLDGNSFKIPNTLSGVDKLQQMLDRYTLTPQNAQVGMEATGHYWLVLYSWLFEKGFDIKVINPIVTDALRNMRIRKVKNDRVDAEIVAKVLMLGEYQETAIADGDTLALRQLCRFRLWQVQTVGDLKRKVIALLDQVFPEYADLFSDVFGMTSKELLLQYTTPEEIASLSARKLTTLLNKSSKGRFGKEKALEVKAVAQGSIGIRIATDAFAFQIRQMVEQLEFVEGQITLLDQQIEAYMAKLDSPVTTIPGVGPVYGAVILSELGDIHRFPSAKQIVSYAGIDAQVHESGEFKGDQTHMSKRGSPYLRRAIWGAAFVASWADPQLKTYYQNLRARGKPHRVAVGAVARKLCYIIFAVLSENRPYEART

SEQ ID NO: 273063 - protein, 377 aa, unidentified
MKKELYLGLDVHKDCIATAVAEAGRRGEVRNTGAISNDLHAVEKWIARLRKAHGRERCLQACYEAGPCGFGLARRLRQLGVECEVVAPSMTPTRSGDRVKTDKRDARKLARLLRAGELTAIYIPEPTDEAIRDLCRARTDAVDDRRRARHRLKGFLLRHGYRYQGKSSWSAAHERYLRELMLPHPAMKVILEEYLQGIAAAGERIARCEAAMSDLLEQWRLVPAVRALMAMKGFQTVAAMILVSELGEVDRFAHPRQVMAYLGLVPTENTSSDKRRQGRITKCGNAHARWLLVECAQHYATPPKVSKELSRRQQGQGQEVRAISWRAQNRLHHRYTRLLGRRLQRNKALVAIARELCGFIWELLRTQSCYHVQATSV

SEQ ID NO: 273064 - protein, 334 aa, unidentified
MQNVTLIGIDLGKNSFHIHCQEKHGNTLLRKRFSRIQLTQFLATCPPCIVAMESCAGAHFMARHISQLGHQVKLISPQFVRPFVKSNKNDFIDAEAICEATSRPSMRFVTPRTEDQQAMSALHRVRDALVRERVKATNQMHAFLLEFGISMPRGIAVIKRLATVPEEHELPPYLVRLLTRLHQHYGYLCEQIEEIERELKNHLADDETAQRLLTIPGIGTITASLLATKLGDGKNYLSSRDFAASTGLVPRQYSTGGKSTLMGISKRGDKNLRRLLVQCARVYMQRLEYQSGRLAEWVNGQLTRHHSNVVACALANKLARIAWVVTTQGTVFSK

SEQ ID NO: 273065 - protein, 315 aa, unidentified
MEEKLYIGIDISLDNLDMASYPTGQNWQYKNNKSGIAKTVAKLKAVKPELIVMEATGGLETLLRDALDDAGLTVAVVNPKRIRDHGRSMGILAKTDKLDARVIAHFAAKIEPPAQPARDKAERELDNLLTRRNQLNDMLTAERNRLKQQLEPDVQSDITEHVLWLEGRVKILDQEVKRKIQQNPIFKAKSDLYQSMKGVGDVFSSTLIAKLPELGRLNQREIAALVGLAPLNKDSGKLRGKRMIQGGRAMVRKVSYMSALSAIRYNPPIKDMYQRLVAKGKLHKVALVACMHKMITILNSMAKNNTPWRYANAVL

SEQ ID NO: 273066 - protein, 346 aa, unidentified
MNQIIRIGMDTSKHFFQLHGVDSAERAVLRRKLRRNQVLAFFAELPPTVIGMEACGAAHYWARELRKLGHEVKLMAPQHVKAYVKRNKNDGRDAEGLCEAMSRPTMQFVPVKTEEQQAALMLAGVREQLIARRTQLCNAIRGYAAEFGLTAAKGLDKIEPLLARMAQDETVPESARELFAFQGRDYARLQIELKAIEARLMAWHRANATSRRLAQIPGVGPIGATALVMKVPDPRLFPSGRHLAAWIGLTPKDHSTAGKTRLGKITRAGDERLRSVLVAGATAVIQQAKIGRGRASPWLLALLKRKAPKHAAVALANKIARIAWKLLVTGESYDGARMPGASAFAA

SEQ ID NO: 273067 - protein, 466 aa, unidentified
MTAGNKLWRNRKERKAWVRRLRSEDPGLEVVHAHAAGIDVGNSAHYAAVRPDRDPEPVRRFECFTADLYRLAEWLQSCGVKTVALQSTGVYWIPLYEILEDRGFEVYLVNARHTKNLPGRKSDVQESQWLLKLHTYGLLNNSFQPPAEIRVLRTYWRQRAEHVSGAATCIQRMQKALTQMNLQLANVISDLSGWTGQAIVRAIIAGERNPQKLAELSHPRIEASREEIAKSLEGNWRPELVFVLRQEVEMYDTYQRRIAECDQQLQKHLASFGDTVLPQSPEAEPRERKAKPTKNAPRFDLGSELKRITGVDLTRIDGIDVMVAQTLLSEVGMDMSRWNTEAHFSSWLGLCPDNRISGDKLLGKGTRRVVNRAATALRLAARNLIRSRSYLGAQYRRLRTKLGAPKAITAMAHRLARLVYRMLKYGQRYVDKGTEYYENRYRQQQIHLLQKKAAKLGLQITVAVQS

SEQ ID NO: 273068 - protein, 446 aa, unidentified
MRWLGLDVHKDFAEVAEALPGGNVRQLGRIRTTPAELRAFAESLRPDDQLALEATINTFAVARLLEEHAGRVVISNPMRTRAIADAKIKTDRVDAGVLAQLLAADYLPAVWQPDETTRVIRRLVARRAHIVRQRTRLKNQVHAILHRNLVTGCTATDLFGIRGRAWLESCSLPDDERDLLGSCLRLFDFLTEELAAADRACAEAATARDDVRRLMTVPGIDFAIALALLAAIGDIQRFPAPQKLVSYFGLDPRVRQSGNQPSASGLRITKVGRAHARAMLVEAAWAVARTPGPLRAFFDRVRARRGPQIAAVALARKLAVLTWHLLTRGEDYLWARPALVAAKYRRLDLRAGAPGRRGQRGAAANYWASAESRERDRALPTAAEAEYRQLTANWRQRARATAADGREGRGRPKGEATVWPAAGRAAEVSSPSSALLHGGRPRPDGG

SEQ ID NO: 273069 - protein, 321 aa, unidentified
MTYVGIDVSKVTFVVAYSSVKTNKTRTFKNTVNGVHEFVQTISASEHNCVLEATGNYSALLVYLLSEAGITISLENPLKIKNFARVMLTVTKTDEIDAHLIALYGEKMQPAPYKLRSDAILVLKQKRTVLRQLKKQLVATRNLKGSMEVLPFFDPKCKKTIEKTITFLEKQIKEMEEELASLAQGEYKKQMDLLTSIKGIGVTLAAALIVATGRFSYFDNAKQLTRYLGLSPTYQQSGTSVNVKGHINRNGDSSLRSQLYVAAFSSLRCNTECKACFDRLRSNGKPGKVVVIAVANKLVRQAFAVVTQGKPYVDGFKSEKP

SEQ ID NO: 273070 - protein, 345 aa, unidentified
MKKNLFFIGLDIAKADFAASIYQTPDQPILTKEAIPNNPEGFEMLLLWLSDYHIDKKNCRICMEATGIYSQAIAYYLLFQGFPVSVEPPLKVKRAFDPVGHKTDPVDSKQIAEYAYRFQDELTSWQPRDEILEKIRQLLSVREQFTKQKVALKNAMQAYSKQRVQVTLIKKAHQETLAQIEKQISRIDKELAKLIKQDPEIFQRTNNLDSIPGCGMLLAAHLLVITENFTKIQNSKRLAAFIGIVPYQHQSGSSVFKRAKIRYFGPGPSRKLLRLAAQSVATHNATFRRYYLRKLDQGKAKPLVLNNIANKLLKVACTIIRNNTRYIKDYRSINPMYLKNAVKSA

SEQ ID NO: 273071 - protein, 388 aa, unidentified
MRKNINKEDVKEQESVSRAGRMLLKKLEIARKKREVASACRQIEYYIGVDLGDRKSYYCILDAAANILAEGSFPTTAAGFDGHFKSLCRSRIALEVGTHSPWASDLLERHGHEVYVANPRKMVGRKNRRKNDRLDAELLARQVRSDPAQLYPIRHRGAKTRRGLVLLRARDAMLNARTKLVNGVRGLVKSTGVRFAKCDSSRLHKVDMAGFPKELQVALQPMLDQIGQLTEKIKLYDEEVKRMSLKEYPETEVLRQIKGVGFLVALAYVLTIENPEFFIKSRDTGPYLGLVPKQYDSGKSTPQLRITKTGDRMMRKLLVQSAHYILGPFGEDSDLRRHGLKIAERGGKNGKRRAVVAVARKLAVLLHRLWLTGEVYEPLYNSNLPKAA

SEQ ID NO: 273072 - protein, 416 aa, unidentified
MTRRTGGRLIFVGDDWAEVHHDVVVLDEQGTVLAKRRFAEGVAAVGALHELLAELTGEPTEVVVGIETDRGLWVASLVAAGYEVYAVNPLAVARYRERHVVSGAKSDPGDAQVLADLVRTDRHHHRPVAGDSELAQATKVLARAHQRAIWDRQRQLNRLRSILREYFPAALEAFGTDLAHPDAVGVLERAPTPALAAKLSASAIGACLRRGGRKRNVESRAQAIQKLLRAPRLDAPAAVAAAYGAQVRSLVAVAAEMTRQIAALEADLERSFESHPDAEIVRSLPGLGAVLGARVLGEFGDDPNRYQDGRARRNYAGTSPITRASGKKRAVLARYVRNRFLADACYQWSFCALTASAGARGFYDEHRAKGETHDGALRVLSNRLVGILDGCLRKRVAYDEAVAWEHRSSDGAEKAA

SEQ ID NO: 273073 - protein, 338 aa, unidentified
MLLYAAIDLRSTNSVMAIHDEADVPVRQRRLPNDLPTIIRELEPFRDEVAGIVVESTYNWYWLVDGLKAHGYTAHLANTAAVPQYAGLKYSGDESDARHLAHLLRLGILPEGYIYPREDRPVRDLLRRRFQLVRMAVGLMLSIQSTWTRHTGQRISANAVRQISGEVIEQTFPDLSVRLGVLTHVQVWRAIQDQVQQVERWIVASRTRCKEQIALRSVPGIGLILGLTIALETGDIHRFASVGDYASYCRMVKSERISNGKKKGQGNRKCGNRYLAWAWIEAANFALRHSPPIRRWYDRKCSKRHKVIAIKAVAHKLARAGYHLLRDGGTFDVHRAFA

SEQ ID NO: 273074 - protein, 387 aa, unidentified
MMVRTVNDLSAATHGETVRCLIAIELSKKSWVVAFNTPLSEKISRRTLTGCKWKKLLELIEDVRVRVSRQMGRSVEVMSCYEAGYDGFWLHRQLEAHGVRNYVIDPASLQVDRRARRVKTDRMDTERLLRSLMAYLRGEPKVWSVVRVPSVAEEDARRLHRERDRLVSERVQHVNRIKGLCALHGIYDYDPLRRRAMAQLEQLRMTEGEALPPRLKSEIKRELQRLELVVEMIATLEAERDAIVEDEASPHVNAKKIQNLHKLKAIGPEFAAVLVGEIFHRDFNNRRQLASYVGLAPSPFQSGNVAHDQGISKSGNRKGRTTGIELAWLWLRYQPDSDLSAWFRARVGITKGRIRRIAIVALARKLLVALWRYLETGLVPRGAVFKG

SEQ ID NO: 273075 - protein, 343 aa, unidentified
MQAVTTIGLDIAKSVFQIHGVDAAGNVIVRRQLKRRYVLPFFQRLPPCLVGIEACASSHHWSRELKALGHTVRLMPPAYVKPYVKRQKNDAADAEAICEAVTRANMRFVETKTPEQQSCLMLHRTRHLFIRQQTAVINAIRAHLAEYGIVAAVGRNGVEELLGVVADPSDKRVPEIARACLAALGAQLRMLKAQILEFDRMITAWHRSNETSKRLDAIPGVGPALATALVASVPDPKAFRSGRNFSAWIGLVPKQHSSGGKDKLGSISKQGDRYLRSLFTAGALAVIRYAKIHGTKHRPWLTALLARRPAKVAAVALANKIARMAWAMMAKGERYKEPVALAV

SEQ ID NO: 273076 - protein, 346 aa, unidentified
MTIVEDRRAVTGGVDTHLDVNVAAALNDIGGLLGVESFSTDAAGHLRLLEWLRSLGTVTRVGVEGTGSYGVGLARALRAADIDVVEVDRPNRLVRRRQGKSDPLDAVEAARAALSGRASGAAKTRDGNVEAIRALLVAKRSGRSTRTQSLNQLRHLGFCAPDQLRQRFHGLTPHELASEAAALRPGRGSDPVVFATKTAMRALGRRVLLLDQEKADLDKLLGELVTATSPELLAVYGVGVDTAAILLVTAGDNPERLRSEAAWAHLCGVAPIEASSGKVTRRRLNRGGDRQANHALWRIALCRMRHDARTRAYVERRTAEGRSKFEIIRMLKRYIAREVYRQLPRS

SEQ ID NO: 273077 - protein, 368 aa, unidentified
MSKTGSKRMCVGVDLHKTQFTVCALDEETGAIELEGEFRTNANGYADFINRMHEIEGESGHVIELAVESTGNARFFKNKMEAEGFSVVVVNTNKFKVITMSTKKNDANDAATLAFYLLKEMLPESHLCDQTSEEIRRMLKTRSILVQAMVKMKNQIHGMMLGYGIETKSSQLQSKKKRQELYQDLADHNFSEFTASSLKVILDSLDDLQKQIKTIEEQLQKMVAENRNVELLQTMPGIGPIGAITIAAYTNDMGRFDGNFKRFASYLGIVPSVHDSNQTVRRGKITKHGPQELRTAFVQVAMGIIRQPQNTSEWKLMIDYYRMKKEKGSGRAIITLTRKIARIVFAMLNNQEEFNPALMIREKTKLTA

SEQ ID NO: 273078 - protein, 392 aa, unidentified
MVYVGIDVAKDKHDCFIVNSDGEVLYDVFTIQNNMDGFEDLLFKIKTAEKNPDKVKVGLEATGHYNCNLLGFLKRKGLPTIVINPLYTNTYRKSLTLRKTKTDKADARAIASMMMSDVSLKPYSDTLYHNEDLKSLSRYRFDKVSERSKLKQSVSRLVNILFPELEALVSTIHAKAVYELLSEFPGAYQLASANLKHLAALLSTASKGHFDREKAVEIREAARRSISTYLPAKSLELKHTIKLIRELDSEILEIETEIKKIMDAIDSPILSIPGISYAIGSMILSEIGDFSRFDSPDKILAFAGCSPTTYQSGQLYSTHATMEKRGSKYLRWALFNAARYVCTWEPTFAAYLAKKRYEGKHYYVALSHATKKLVRLLYHLETSGEKFKSVSV

SEQ ID NO: 273079 - protein, 446 aa, unidentified
MHNYLGIDVSKGYADFALIDEQKQPIVKNFQLDDTPDGHIRLGDFIRELFKQHPDLTVVATAESTGGYKNNWLDCLKKLQRCYAIKVARLNPKGVHHHHKAKLNRAITDAISARLVAEYTLSHQEIIQFDQPDETYSLRKQWTLIKLLSKQKTQLLNQLDNLVYQANPELMIYCRSSWPAWLLELLRSYPTAKELAQANIEQLTKIPYVNTDKARKILHQARQSVASATDPVSGDMVKTIIEEIIHKEKLITTCKKSLIENCSLPDVELLASIIGIGKFSAVGLIIEIGTWLRFASAAKMAAFFGLHPILRQSGDKTWVARMSKQGSSEVRALLFMCAMVAIRHNPVIKDLYAHSLAKGKSKMSAIGICMHKLLRIIYGVLKSGKAFDPAIDQANKTRRPDQRKPIRQEIRHFQPVNDNAPVSARQNKKRKEQSQSQGELVTICEI

SEQ ID NO: 273080 - protein, 344 aa, unidentified
MNSTTIAVDVAKSVFEVAVSEYPGQVRERHRLSRGRFSRFLAEHPPATVVMEACGSAHHWAREAQSRGHRVILVPPHAARPYVLRNKTDRTDAKGLLEAFRNDDLRPVPVKSETQQALAGLHRLRSAWVATRTARLNTLRGILREFGVVIPTGAHHVVPHVRALLEDLDAGVPGLLRVALGEVIREVGELEERIRAIERQLATAAEPALIIRRLRTVPGIGVLTATALVAAVGDVQRFPSGRHFASYLGLTPREHSTGQRRHLGAISKQGDTYLRMLFIHGARSVLHHAKSKTAPTTDRLRTWALQVERLRGHNKAAVALANKLARIAWAVWRSGNDFTAAAAV

SEQ ID NO: 273081 - protein, 320 aa, unidentified
MTATLGIDIAKAKFAIALLTSDGKVRHKTCANTPAGFAELAAWLQRQRVTRVHAGLEATGTYGEALATWLHDAGHVVSVVNPAIIHAYARTQLTRSKTDRIDAALIARFTATQQPPAWTPPALEIRQLQALVRRLDALHGMRTQEANRLAAGVVVAAVRASIDAVLAHLDTQIAHVQQLIRQHLDQHPGLRAQRDLLTTIPGIGEATAAVLIAELFDKRYTSARQAAAFAGLVPRLVQSGTLHGRSRLSKIGPGRVRKALYFPAVAALRWNPTIRAVRARLHAAGKPTMVIIGAAMRKLIHLAYGVLKSGKAYDPTCAHP

SEQ ID NO: 273082 - protein, 351 aa, unidentified
MTIIGCDLHTRYQVVAWREEETGEIRTRRLEHEGEAVRRFYAAWPRGAVVGVEATFPALWFERLLAECGHELWVGDAARIRASEVREQKTDTRDAEHLLDLLRTDRFPRIWVPSLEERDLRQLLVHRLKLVRTRTAVKNQLHALAISQGVCRKRKLWSARGRAELQSLALGPWAARRRQELLELLDQLAGPIAELDRAVEEEAQKRQAAVRLMTHPGVGPVVGLAFVLTLGPVERFANSRKLVSYLGLNPREHSSGGRQRLGAISKQGNTLMRWLLVEAAQTAARFDPELRRTYQRLKFRRVSGVAKVAIARRLTVRLYWMLRARVNYAQLVRMSGSPSSAVVPTGSGSKL

SEQ ID NO: 273083 - protein, 336 aa, unidentified
MRYIGVDLHTTQVTVCYLKTLDEYSFKQYRLDEIEAFLDSLCAGDELAVEATGNSRWLVGLVKERVRRVVVVNPSGFEVIKRSAKKTDKRDALNLARFLAVDMLPEVRVKSELAEAVQRLVETRNKLVGLKTSLLNKIHALAVSRGWKLKKESLASKKGLTKVMEFDWSAIERIELEIIIAHIQALKESLRRLDEAIGENSQKLEGFENLIRITGIGARSAGVLLSVIGVVEDFSSEDKLASYFGIVPRVSNSNERTSHGRITKRGSKTGRTTLVQCALVATRYSPYLKKFYEQVKGRRGHGKAKIAVARKFLGIIYNTLKNNWVFEDFNNFVLAE

SEQ ID NO: 273084 - protein, 387 aa, unidentified
MPSAISPPKAVLGIDVGKSSHWACLVTREGEVALNRRVRNSEGDLDGLFSQVACDTIVVVDQCRNIGLLAISRARLAGLGVAYLPGLAAHQAARLFAGDAKTDERDALVIAKTALGIPDALLPVPEPDEALEAARSLAAQRSHMVTCATRDKNRLRSILLESCPAFEALADLGDRHWLNMLEKLGGPWGCIDAGKPAFGAVTKGANRARMDAAWNAAMASTRPSKRRVDAENPQVRMLARRIREALEEADGIDREITALLAGDGTYECLVTIPGIGPRTASELVIGINIEDFPDHDHLASYCGIAPRNRQSGTSISSVSASRQGNRRLKNLLIFSCNSLVRSENRFGEYYRACRGRGMCHGEALKAVARKRLKVIYAIMRDKVPYSA

SEQ ID NO: 273085 - protein, 415 aa, unidentified
MEWTERNTFVGFDWAKDHHDVVVVNREGRIVEEFRFDDSAEGWQLWVRKLSPYPHAAVVIETSSGATVERLLEGGYAVYPVNPKAAKRYRERKAPSGTKSDRFDAWSLADALRLDGHTWRALKPDDPLTVELRLLCRDEIALIEQRTALVCQLRAALGEYYPLVLEAFDYWTVPSSWSFVEAFPTPEALVKAGKRKWEKFLHVHKLYRRETYEKRLGLFAQAQTFCGSPAMTKAKSMLAVALAGQLRVLQSHLAKFRVRIQELFEQHPDHELFESLPGAGEKIAPRLLAELGDDRERFDSPEAIQCHGGTAPVSYQSGQIKKARFRRACHKVLRHTVHLWTNLSRAKCPWAEAYYRKKREQGQSHACALRCLGQRWFKILWKMWQTRKPYDAELHQRNQVKHGSWVIALMPSPAT

SEQ ID NO: 273086 - protein, 370 aa, unidentified
MLDTTTFVGLDVHARSIKAVSLDVMTGEVRAATFGYDAGAVAGWVRSVDPRARCVYESGVTGFDLQKRLSGLGVDCVVGAVSKMIKPSADRRRKNDRNDAEFLARMLSVGNVVEVWVPDDECEAARDLTRALEDARDDLSRSKQRLSKFLLRHGLAFDERTPTGRRKGNWTRAHWSWIESIRFAERADEEVLAYYVDAVRRAAEEKARLEGLVEAEARKPRWRKRVDSLRCLKGVDTASAADLVFEAGEFSRFGNARSFAAWVGLTPSEHSSGESDRRGAITKAGNKHLRKTLVEAAWHYLTCSGRPKGLAKGQAPDRGARRHAAKGVRRLAERREALLARGVHGNKANVATARELACWVWAVGLMAEEA

SEQ ID NO: 273087 - protein, 410 aa, unidentified
MERVIERGCGLDVHKKTVTACVRIPGAHGEREQQVRTFGTTTAELLALRDWLEAHGVTHVAMESTGVYWKPIYYVLEEGCACVLANAAQIAQVPGRKTDVKDCVWIAQLLEHGLIRGSFVPPVPIRELRDLTRYRKALIQERTREANRLHKVLEDAGIKLASVASDVLGVSGRAMVEALVSGTTDPTVLAELARGTLRKKLPALRQALAGRFRAHHAFLVTQLLAHLDYIDEAIETVSTRVDEVIAPFAAEVTRLDTIHGVNKRTAEVLIAEIGVDMGVFPSAGHLASWAGVCPGNNESAGKHRSGKTRKGNRWLRSALTEAALAAGTRSAKGAFAARYRRVMRHRGHKKAVVAVAHAILVTAYHLLARKTTYQELGSDYYDRRHAERARQHAIQALERQGYRVILEPAA

SEQ ID NO: 273088 - protein, 338 aa, unidentified
MKLYAGIDLHSTNSYIVLLNELGDLKYKKRLPNDMGTILHELNCHANIDSVVVESTYNWYWLVDGLQEAGYAVRLANTTAIQQYNGLKHTNDKTDARWLAELNRLNILPEGYIYPRDERGTRDLLRKRMQLVQQQTTNILSMQTIIERSTSKRLSGNMIHKITEKELREFLTSEDVFLAASSNLAILSSLKNQIKIIEKAILKKIKSNADYRNLLSVPGIGEILGLTITLETGDINRFKNVGNYASYCRCVNSEKLSNEKRKGVNNRKNGNKYLAWAYVEAANFAIRHDETIKKYYQKKTSKKNRTVAIKTIAHKLARACFYIIRDGIKFDVNLAFMK

SEQ ID NO: 273089 - protein, 331 aa, unidentified
MEEVKRFVGIDVAKVALEVFIGSAGGAFSVANDEVGIQELLRQMKPADFVIVEATGGLETPVAGALAAAGIPVAIVNPRQVRDFARATGKLAKTDRLDAEVLARFGEAVRPEARPLADEQAQALEALVTRRRQLIEMLTAEKNRRARAPKVLHRSIDEHIRWLEKRLSGLDAELAELIRETPLWRERDELLRSVPGVGKLLSSTLLAQLPELGMLNRKQIAALAGLAPFNRDSGNMRGSRCIWGGRAQVRRVLYMATVAGVRSNPTIRTFYLRLRTNGKHAKPALIACMRKFLVILNAMLHNKTHWQTPAPTFLTSSLSPLLGAVSEHGCC

SEQ ID NO: 273090 - protein, 370 aa, unidentified
MAKRNMFVGMDVHKESIDVSIAEEGRAGEVRHYGVIPGDLEAVAKVVRALRAPTRRLRFVYEAGPCGFGIQRYLTAQGEDCVVVNPSSMPKRSGDRIKTDRRDGDALARLHRAGELTAIYIPTPEDEALRDLVRAREDAVGLSTQAKHRLKAFLLRQGRRYPGRAGWTRPYRRWLADLSFPLAPQHIALQEYRDTIDETERRVARLTDQLRQLTPAWRWAPVVDALQALRGVSFVTAVGLVTEVGDIRRFTHPRELMAYLGLVPSEYSSGPSTRRGGITKAGNPHARRLLAEAAWAYQGVPRIGRQMLYRQEALPKTICDIAWKAQLRLTGRFRRLVARGKAKPKVATAIARELTGFIWAIAREVPAPPA

SEQ ID NO: 273091 - protein, 424 aa, unidentified
MKVTYQTCCGVDVHKSFLVATIVKTTGGIEPSYQKKRFSTFNNSILEFKQWLLDNHCHDVCMESTGKYWVPVFNLLEDKINVVIANPKWVKAVKGNKDDTKDSKWIGDLFRLGLVKGSYIPCKKVRILREYTRYRYKLVSCRSSEKNRYQNALTVCNVALDSIVSDIFGKSSTSIIDYLLEQSGTSINHEEIASKLLRSLKSKEDAVIESVEGYQMTDAQKYRMRLVRAHMDYITAEINDVDKMIENMISSNPDFENAVQFLCTIPGVKRDSAITIISETGTDMSQFSSSKRLCCWAGLTPGSNESAGKKKSVRITRAGIYLKPALVQCAHAAVKSDKSPYYKKKYESLVKRRGKKRAIIAIARMILTAIYQMLSTGEQWNPSDLYKIDMPVALVEKQKAKAIKQAKKLLQREGILPPDEPLAS

SEQ ID NO: 273092 - protein, 377 aa, unidentified
MKSIVYVGIDVHKDSYTLVCLEPGFGEEDQIYGMTKIQPDYHQVIQYLENMQKRLGPDVEFVCAYEAGCMGYSLYHQLTGKGVKCFILAPTSLIKQRSSKIKTDKRDAVIIAQSLAYGTGKHVHVPSAEDEMVQQYIRMRDGHQKLLKSVKQQILALCLMNGKSYSGRTNWTQAHLEWLRKLKLDWLLRETLDEYLVTYEQLSDKMGVFERRIEELAASDSYRENVSKLCCFIGIRTYSALAILAETGDFARFATADKYAAYLGLVPGEHTSSRNRNARGITKSGNSHLRRILVESSQALCRGKVGHKSKALKARQNGNSSQTIAYADRGNERLRRKYHQMKHKEKARNVCVIAVARELACFIWGMMTDNMQVRKTA

SEQ ID NO: 273093 - protein, 344 aa, unidentified
MLHIGLDLSRTRLDLHVLDERGQTVAVDAVPPDADGLRRLADRFSPLPVRAAIESMNGARFVHDQLELAGWEVEIADAAKTKGLAPLACKTDRIDARVLAELCWRDLVPAIWLPDPEVRGERERARFRLHLVRHRTSLKNRVHATLLTHGKPCPVSDLFGVSGRAMLARLELPEPWAGDVTTSLRLIDQLDQEIDGCEAELRRLGADHRYVPLLTTIPGIAWVLAYTIAAEIGEIARFDSPTKLAGYTGLCPRVYQSGQSDRRGSLSKQGPRYLRWALIEATNHACRHPLYHDRYQRTKKRLGKQRGPKVARVELARTLAHAIWHMLTRDQPFAPASATNPLAA

SEQ ID NO: 273094 - protein, 357 aa, unidentified
MESQEVKYVGVDCGKKSIEVVRINSENSLERRQFSTTESGINNLLQWLTLNDIVGLEAGSQSFRIAKSILNKGVQVIVLNPGNLATIYQSLKKTDKEDSLKIARLIQRHPIEELPTVPIPNDEEEDNRRLCSEHENWTKQLTQGKNRLHSLFTQAGLTQITKKHLRTKVSREASVTLLSDRYQREAERILKVLGLVELNLKLIEEEIQEALKKNKAYVQTIMSMPGIGMITSLAIMSYMGDCKRFSSAKQAAYYAGLVPRVDISGDTVRYGRIINRGCHSIRRVIVQAAWSLVRCQHGGKVKEFYQRLYLKKGAKKSIIATSRKMIEVLYVMIRTGKLFDSMPENILNRKLTQYGLM

SEQ ID NO: 273095 - protein, 427 aa, unidentified
MNDSKYKPTLCVGADVHLDEIVLRAVDKALGHEVVQRFRVTNNLPGAQLAATTIAQTAMDLGYTRVEIGWESTGMLWIPFHRYLSTTSLLQPFELELVCFNPKLVAKFKESLVLRGPKNDERDAFDIAARLRFGELPVSYIPSDFWQGLRRLTRYRYRLSKALSQEKNRFQSYAFLKCSDWKRVKAFSDVFGATSVALLTEFTVAEMVDMTHDRLVDVITHRGRGRFHDPTATARAVRQALRTSYPIDPQMDEMVTAVLAAGWDHIRYLKRAMKRLDRLIARYIDPVPNPIITIKGLGAVITAGILAEIVDVLRFQEEKCLAQFMGLTWRRDASGGFVSQNTRLTKVGNVYLRYYFVLGANLLRQHNLEYKAYYWRKYQEVSKYQHKRALVLTARKLVRLVHALLTKNQPYVRPRTTDPDQEDDGLQ

SEQ ID NO: 273096 - protein, 294 aa, unidentified
MAETANGEAPLLWIGVDVSKKTFTAAAWLPWEEKAAYPKDSADFENNRSGARKLCAWIGELEKTHGGPFGLAMEATGAYSLRLYDNLKKCRPGLHVAICNPLSVSYYMLSLGTNKTDKADAAVIARFAAHRRPARYAELSKDQAELRRLARDRAFLVDSRTEYRNRLESERNSSSRSRMNKGIETINEQIGDIDAEIEKYLSEKASSECQDELKLMQTVPGVGRLSAAIIYGELGTLAGYTRKQLSAMSGVCPATRQSGTSLHKGGLSRRGSKWRRGILYLDSQQKTLRSPALV

SEQ ID NO: 273097 - protein, 364 aa, unidentified
MYRLNNTIELSSPEETRCEFNRGKAVIKLGIDVHQDFYVVVMQVDGSNPKPAQRFAKEAFLHWAARLKQHRAEVHAVYEACGFGFGLQRKLAALSIHCHVVCPQKLDERNKRVKTDGLDAKALCLKLDRFVQGNRSALALVRVPTEEEEQLRAIHRQREQLVKARKQLEAQGRSLMVNHGIEPLKSWWKPRRFATLSVPKWMKELLANTQPILIVLQQKIAALTVQLQAAATPDQPCGLGAMTSVIIDREIGDWTRFANRRQVASYTGLCPGEYSSGNTRLQSCVTKHGNPRLRAALVELAWRLVRFQPNYKPIIKWNRVLRHGALATGAARKKAIVAVARQLTVDLWRIHTGRLSAQQLGLSL

SEQ ID NO: 273098 - protein, 409 aa, unidentified
MGLYCGIDWAENHHDFAILNDLGEVVSRGRVDNDAAGFARLLEAFAEAGDTAEDPIPVGIETDHSLWVAGLRASGRVIYPINPLAASRYRSRHSVSGSKSDSADAVMLANIVRTDAVAHRPLPADTDSALAIRVLARAQQDAVWSRQRFGNETRSLLKEYFPAALTAFQSLEDGLTRPDARSVLAAAPTPTAAAALTRPQLKAALKRAGRSRFLDRDVERLRAIMRAPALRQPPQIEAAMGISLMTLLRQFDAACTAAETLAAHVSVLFSEHPDAKIITSFPGLGPLAGARVLAEIGDDRNRFATARGLKAYAGAAPITRASGKKTFVLHRHVKNRRLAAAGTIWAFSALQASPGARRHFDARRAGGDWNHQAQRHLFNRFLGQLHHCLTTREFFDELHAFPPPIPIAA

SEQ ID NO: 273099 - protein, 405 aa, unidentified
MAVMIGIDPHKGSHTAVAVGAAEEPLGKLRVRACPDQAEKLVGWAQAWPERTWAVEGARGLGNLLAQQLVAAGERVLDVQPKLAARVRLLQTGNTGKNDPNDARSVAVAALRSTTRREVIADDHARVLKVWAKRHRDLSRARNQAVCRLHAVLCELIPGGVPDEITAGQAARLLEQIRPSGAVAQARCELAAELLADIRHLDAQRREARKKLAAAVQASGTSLTEIFGAGPVIAATVIGDVVTVARFPTRNHFAAYNGTAPVEVSSGERKIYRLSLRGNRRLNHAIHMAAITQIRHKHSDGRAYYDRKIAAGKTHKEALRCLKRRISDAIYTRLRADARQATACAKDPGGQPGNHSVSRAAGSHPEHRLFGQATPGPEASLRATAALTLVMPLSEPPAKRTRRAT

SEQ ID NO: 273100 - protein, 352 aa, unidentified
MQHFIGCDVHTRNQVVAWIEEETGEIRKRRLEHEGKEVREFYAQFPRGTVVGIEATFPAYWFERLMGELGHELWVGDAARIRASEVRYQKTDPRDAEGILDLLRTGRFPRIWVPSLEERDLRQLLVHRMKQVRARTQVKNQLHALAISQGVCRKGKLWSVKGRKELESLALLPWAARRRKELLESLDRLDEQVRELDRAVEEAGRARAEVALLRTHPGVGMVVSLAFVLTVGPIERFSNRRKRVSYWGLNPRENSSGGRQRLGSISKQGNTMMRWLLVEAAQTAARLDPQLRRTYQRLKKQKTSAVAKVAVARRLAVRLFWMLRTRHNYTQLVHMSGSPSSAVVPPTAEPNV

SEQ ID NO: 273101 - protein, 403 aa, unidentified
MSDDRPGVIGGVDTHRDAHVAAAVDTAGRLLGVESFPATAAGYRQLVGWLHGWGELGCVGVEGTGSYGAGLARFLAGEGVGTVEVIRPRRRARRGHKSDPADAEAAARAVLSGEASGRPKSADGPVEAIRMLRATRRSAVKARTVAINQLKALLVTAPEQVAAPLRALGTAALVRACSRLRPDTGAGEAVAAAKRSLRCLARRHQALSAEIEQLEAETARLCADANPALMAACGVGADTAAALLVAAGDNPARLRSEASFAALCGAGPIEASSGRTVRHRLNRGGDRQANNALWRIATVRLRCDDRTKAYAARRRAEGKNDREIIRCLKRYIAREVYRLLTNPPPVPDGADLRQQRQLQGATLDAAARALDTWPARISALERGVIHNRDLAERYQQHLAEITT

SEQ ID NO: 273102 - protein, 356 aa, unidentified
MSRKLDNSPAVIGIDIGKNSFHIVGQNQRGAIVLRQKWSRGQVEARLANLPPCRIGMEACVGAHHLSRTLRGLGHDARLMPAKYVRPYSKGQKNDYRDAEAIAEAVQRPTMKFVATKTADQLDLQALHRVRERFVGQRTGIINQIRAFMLERGIAVRQGLRFLRAELPGILATRTDALSPRMLRILEDLSADWRRLDARIADLSGEIEALARQDKGCERLMSVPGIGPIISSAMVAAIGTGDAFSKGRDFGAWLGLVPKQLSTGDRTILGSISKRGNRYLRSLFVQAAWVVLVKIGPKRWDRYGLKSWIEAAKKRLHHNVLAVALANKLARIAWAVLHKGRAFECVKTNEAAYQPA

SEQ ID NO: 273103 - protein, 339 aa, unidentified
MRLYAAIDLHSNNSVLVIIDEDDHILCERRLPNKLPLILAELAPHRGSIEAIAVESTFNWYWLVDGLMENGYVVKLVNTVAVKTYDGLKYTADEHDARHLAHLLRLGILPTGYIYPKQERSVRDLLRKRSHLVHCRTAQILSIQNLIRRNSGQGMQAAGIRNLDEIGIAELCGHDEMRALAVKSNLAVLQCLDGQIQGLERVVLNQAKLKPEFEKLITVVGVGRILAMTIMYEAGDMTRFVKVGRFASYGRCVGSSRWSNGKKKGEGNRKNGNKYLAWAFVEAAHFAVRYNEQIRRFYDRKKRKTNGFVALKAVAHKLARACYHVLKDQEPFDVTRAFA

SEQ ID NO: 273104 - protein, 342 aa, unidentified
MQAVTTIGFDIAKSVFQVHGVDTVGQVIIRRQLKRRQVIGFFQKLPACLVGIEACASSHYWSRELQALGNNVRLMPPAYVRPYVKRQKNDMADAEAICEAVTRANMRFVPTKTAEQQSGLMLHRTRHLFMRQQTSVINAIRAHLAEFGIVAPVGRRGVEELRVVADPSDKRLPEIVRACLAALGSQLLSLKKQILDFDRMIMAWHRSNQTSKRLNCIPGVGPLLSTALVASVADPKTFRSGRNFSAWIGLVPKQNSSGGRDKLGSISKQGDRYLRGLFVAGAFAVIRYAKIHGTKHRPWLTALLARRHTKVAAIALANKLARMAWAMMATGERYNYPASLKV

SEQ ID NO: 273105 - protein, 407 aa, unidentified
MTAVGIDISKGRSTVCAVNASKDVVLTPRDFDHTEVGLERLIYNELLALDGEVKVIMEATGRYHEPVASALHEAGIFVCVLNPLVTHNYGNNTIRKVRSDKADARKIARYGIDHWAELREHTPLDSMRQQLKLVGRQYNFYMKHVVQQQNNLIALSDKVFPGVNEIFTSPMRKDGHQKWVDFFLTFWHADYISRMSQKAFIERYRKWCKRKGYNFSEQKAFDVYVSALGHYITLPKNAYAKLLVTTACNQLITTPKNLAAIKAELLRIATLMPEYEMVLSLYGVGEITAAQLMAEIGDVRRFDNRGSLIAYAGVDPSTSQSGKYLSKSGKVTKRGSSHLRKTLFQIVSTHLKRSPADEAVYQFINKKRAEGKPYFVYMTAGANKFLRIYYGTIKPFLASYQEVSQSS

SEQ ID NO: 273106 - protein, 433 aa, unidentified
MIKINYMSTLFVGIDVSSKSNVVYAMDFDENKYIDASFGNNQPGADELAGKIAACIQKHPHLNTIIVALESTSVYSIHIANFLSSCELLMPYKPYVYCLNPKMTANYRKSYVGMDKTDHMDAFLISDFARVGRTKKCEPWRGSQYLALKRLTRHRLHLAECITREKTYMVSNLYLKFSELQLLNNDSQPFSNIYGATSSAVLTEFMSLQEIIDSPEEELLQFLASKSRNRIADISRTSELLKKAARDSYRLDKCMYEPLNVSLASSFNCIQTYQKEIKLIDQAIEKCINGMNPNAFIILKSIPGIGPVWAAGILSEIGDITAFHSSDALAKYAGLTWLKNDSGDFVSEDNRVSKAGNTYLRYYFGEAANSVRRYVPEYAEFYSRKYAEVTKHQHKRALALTSRKFVRLVFGLLVKNQLYTGEKLDAELNTESE

SEQ ID NO: 273107 - protein, 411 aa, unidentified
MEVIHARCAGLDISKKDAKVCVRVAGAGRRKTVETVTTWGSMTSQILALREHLIAERITCAVMEATGDYWKPFYYLLEGAGFEVLLVNARHVKNLPGRKTDVADATWLAQLGAHGLVRGSLVPPEPIRQLRDLTRARTAITRERSREVQRLEKLLEDAGIKLSAVASDILGVSGRAMLESLIAGNRDPAALADLAKRRLRSKIPALTEALTGRFTDHHAFLARVHLDLIDQHTAAVADITARIEATIKPFHWFRDLICTIPGISTLTADVTIAETGADMTRFPTAAHLASWAGTTPGNNESAGKVKSSRTRPGNPYLQGALGAAAMACAQNPVTYLGARYRRIAARRGPQKANVAIQHSMLIATWHMATNGCLYHDPGADYFNQLHPERAEKRAISQLEAMGYHVTLTRAS

SEQ ID NO: 273108 - protein, 479 aa, unidentified
MSRQPEKPSNVKAKHGLHRKTRRKKMGLENRPVLEPNAAGIDIGAREIFVAVPPGRNTHPVQVFDTFTEDLHRLANWLQACGVTTVAMESTGVYWIPLYDLLEERGLKPCLVNARHMKNVPGRRTDWHECQWLQYLHSVGLLRGAFRPEADVCAMRVLVRHRGELVQAASQHVQHMHKALTQMNVQIQHVISDITGRTGLAIVEAILAGQRDPAELAKLRDSRIRASDDTIRKSLVGNWRKEHLFTLKQSLQLYRIYQQQMVECDQEMEKLLGNFEPRVDPKKKPLPPDRKRNRSDQKRRKKAGYPETGFDLRTEAYRLYGVDVTQIPGVETIALPLFSEVGRDLSRFPTAAHFASWSGLCPDNDISGGRVLWKGVRKVKNRAGQMFRLAAHSLHRNLTPLGNYLRRMKAKLGPSAATTATAHKIAVIFYTIVTKQVEYDDTIWATRDADRQKRFEARLKRQAQLLGYQLVPIDKRPAA

SEQ ID NO: 273109 - protein, 355 aa, unidentified
MNSEKYIGLDVHQATISVAVLDSKGKLVMESILETKAATILEFFAGLRGTLSVTFEEGTWAAWLYDLLKPHVAKLVVCNPRKNALLKQGNKSDKIDARKLADRLRLDDLKPVYHGETGVRTLRELARSYLTIVKDLTRVMNRLKALYRSWAIPCAGRDVYYTRHRDEWLSKIKEAGVRRRAEQLYQQLDMLQHLRQQARRELLAESRKHSITAKLRQIPSLGPIRSALAVALIQTPHRFRSKRQLWAYSGLALETRTSGEYRFVNGQLRRSKKQISIRGLNKDHNHDLKGLFKGAATRASVLPGPFQDFYQRSLAKGIKPTMVRLTLARKIAAITLTLWKKGENFDVEKLKSQAA

SEQ ID NO: 273110 - protein, 351 aa, unidentified
MMIIGVDYHPSFQQIAFLIEETGEYGEQQLNHSDAEAERFYRELQQRGIRVRVGMEATGFSRWFERLLAELGFELWIGDPAEIKAKRVKKRKTDREDARLLLKLMQENRFPRIWVPSPENRDLRQLLWHRHRLVQMRTRIMNQLQALAMNEGKRWKSKLWNEQGRAQLEKLPLGFWASRRRQELLQLLDRMNPTIEELTAAAAQEVKKRPEALRLMTHPGVGPLTALAYVLIIGTPTRFHCGKQIGTYVGLIPSEDSSGGKQRLGHISRQGSSLLRFLLVEAAQAAIRISPEWRRRYIHLAMRRHKSIAKVALGRRLAVRLYWMWRNGYGYSPSLEFGSYAGQPDVRHGGK

SEQ ID NO: 273111 - protein, 355 aa, unidentified
MNQEKYIGMDVHAATISVAVMNAQGKVLMECVLESKAVTILEFIQGLRGTLALTFEEGTMAAWLHDLLKPYVSRLVVCDPRKNALLRDGSQNDRADARNLAELLRTNQVHAVYHGQHGTRALKELGRSYLTLTQDSTRVMNRIKSVYRSWAIPCAGTSVYSRRHRAEWLAQLVEPGVRIRAEHLYQQLDSLQPVRQAARRELLRESRKHAAVKLLRQIPAIGPIRSALLVALLQTPHRFRTKRQLWAYSGFAVQTYDSGEFRFVRGKLQRNRERITVRGLNRNHNHDVKNLLKGAAISALQRPGPLQDFYAALVEKGMRPSMARLTLARKIAAITLTMWKKGVSFDPKQLQRPAA

SEQ ID NO: 273112 - protein, 310 aa, unidentified
MQTICGVDVSKAWLDGWIEGAGHRRFANDPEGVALLGVWSGGKGVSLIVMEASGGIEQPAYLALWRQGCPCAIANPKSVRRFAEAMGRLEKTDRIDAELIAGYAAAKRLKPTPPPSSQQRQLTALATRLRQVSADLGVQRQRLHSTRDPDALASLKEAIAFFARQAKALADRIAALIDTDPLWQALDKSLRSVKGVAGRTVATLLAELPDIGILSNKAVVKLVGLAPIANDSGNRQGPRSIRGGRTAVRTILFLIADIARKYDPSLADFKNRLLAQGKPKMVVRVALARKLLVRLNAKARETRAKLAYAL

SEQ ID NO: 273113 - protein, 369 aa, unidentified
MTDITLFVGLDVHKKTIAVALVDGTAGAEVRFYGTIANTPDSLRTLCKRLSKNGQVLHVCYEAGPCGYGVQRQLTRLGHRCDVVAPALIPRKAGDKVKTDRRDAMMLAQTLRAGQLTAVWIPDEAHEAMRDLVRLRAQAMRDLRKTRQHLLSFLLRHGLDSPYGHWTKMHRRWLGELVFAHPALHLAHEEMLQRIERAEALCDRLKQAILELVPQWSLAPVVQAIQALRGVSLIVAAVIVAEVGCFGRFDSPRPLMAYLGLNPSEHSSGATIRRGSITKTGNALARTCLVEAAWTYRFPARVTQIIRDRLKALPEPIRNVAWKAQVRLSARYRKLIAAGKAAPKVVVAIARELVGFIWAIARMVEPKFT

SEQ ID NO: 273114 - protein, 318 aa, unidentified
MNSHNKTESTNPVRYVPLDVSKRRLDYGVEPGRSLAVANTQEGIATLIRRLEGYPQARVVCESTGGYERALLVALAQAHIPVSRVHPGRVRAFARAEGLRAKTDKIDVELLRRYAVAMQPRVDVMPDPEVEVLRDLMDYRRQLDEQRVLFGNRLETAGPTLRGLIEPQVAHLEQSLKEVETRIREHIRSHEILRTKSERLQQLQGCGPVLAATLLAYLPELGVLEDKQISGLVGVAPHAHDSGETARPRHAHGGRVVVRNVLYMAAVSAAQHNPVLAVFYQRLLEEGKPAKVALGAVMRKMIVVLNRLLKDPNFTLGG

SEQ ID NO: 273115 - protein, 357 aa, unidentified
MGYVGVDIGKDACVATIITNTGRVRGRLEFANRPDGFAELVARLKVRDKLVMEAGTYMYPLHDHLRRRGYKVLVGHPRAIRQITESDKKTDQHDSEVLAQLARVGYLPPAYVPHPDILRNREVLRSRLDMAYQTTRVKTRIRSFLARQGLEPPEDVFLGGRAWLRQAHWHDSRDLVLGVMADELDSLDQRREKVDAVLATLATDSAEVKLLMTIPGINYYLALLIVCEVGDITRFPTRETFRTYAGCAPRMRQSAGRNPAQGTNSNADPRLKRAFGLAAQTAVKLDGPIQDAFNKRERKTKSKLRAYAVARRKMCDLVYAILRSGEPCRWATAAAIERKQSELEVKKDRAERLPLPA

SEQ ID NO: 273116 - protein, 428 aa, unidentified
MKKSSRMSDIHPHAAGVDIGAEFHVVAVPPDADAEPVRTFQSFTGDLHRMSDWLKTCHITTIAMEFTGVYWLPAFEILEAAGFNVILVNARDAKNVSGRKTDVNDAQWLQKLHSFGLLRASFRPEHDISVLRSYLRQRERLTEYRAAHIQHMQKALMQMNVQLHHAVSDITGVTGLSIVRAIVSGERDPSVLIQYRDVRCKKTPRVLQQALTGNWQPEYLFALEQSVAFFDFYQEKIRECADQIETSLLQLSTGTEEPEGVLPSARHRTKQPNQLSYDVRPLLWKITGAELTQIHGFGPYLALKFVAECGTDMNRWPDASHFTSWLCLSPGNKISGGKVLSSKTRRSSSRIAAALRLAATTIGRSDTAMGAFYRRLSSRIGKAKAVTATARKLAILFYNALKYGQKYVDLGTDYYVERYRNRVLDGLK

SEQ ID NO: 273117 - protein, 397 aa, unidentified
MYIVGIDIAKRKHEAAVIDGEGAVIIKPFSFTNNCSGYNRLLAMLTKAKLPLDEVSFAMEATGHYWLALFTRLQKEGFRVQVINPVQTNSIRSFYIRQAKTDPRDALLIAEVIRFGHFSESTLHPENIYELRELCRGRHAIVSMQADVKRKVVALLDQVFPEYETAFTNLFGDTSMAILQTCPTPKELSETPLEELCHLIEVSSHKRFRMAKAQELQALARNSFGFAMAGDVFSTMIRLYAKHLDFLKQQVREMDRKIAEIMETLDTPITTITGIGPTLGAYILSEIGDISRFSSAAKLAAYAGIDPTMRQSGEYNGVRNRMSKRGSPYLRHAIWLAASSAVLHDPALKLYFQKKRDEGKPYMASVGHACRKMVSIIYAVMRDNKAYTPYIPNEISA

SEQ ID NO: 273118 - protein, 465 aa, unidentified
MTPHKDYFLDPRPPAPMLPQSPVLSETLQVCHPHAAGVDIGEAEHWVAVPPGRDPQPVRRFGTFTVDLDALADWLIDCGVTTVAMESTGVYWIPLFELLEARGLQVLLIDPRQAKRAPGRPKTDRLDGQWLQRLHAYGLLAGAFRPDDQVCVLRAYLRHRQMLLTYAAHHIQHMHKALQQMNLKLTQVVSDLTGATGMAIIKAIMAGERNPQHLAKLRNPHCHHDEDDIAKALQGTWRAEHLFALQQAVALYEFYHQQLALCDQQIKTHLETFADKSAGQPLPPKARRHKKTNEPQFDARTPLYRLAGVDLTTIEGIEENTALVILSEIGTDMHRWLSVKHFCSWLGLCPQHKISGGKVLSRRVRPGAHRVTVALRLAARSLHHSQSALGAFFRRMKARLGTPKAITATAHKLARLVYSLLQHGSAYVQQGLDAYEAQYRERKVTAMARHAKALGYTLVPVASQG

SEQ ID NO: 273119 - protein, 461 aa, unidentified
MLGAIKPEFELDPGFLEHLRLSPRAIIGPGARFLEFLYTGPHADDAAQEEGMELLHRRCCGLDVHKETVVACLRLVSNGKVTTEVRTFQTTTAALLRLSAWLAANNCAHVAMEATGVYWKPVWHILDDGEFALVLANAAHVKNVPGRKTDVNDAMWLAELLAHGLIRASFVPDTQTQEMRNLLRTRKQLVREQSSHVLRVQKTLEDANIKLDSVLTDLMGKSGRAMIEALIAGETNPAKLASLADRRVKASPEEFREALRGRATKHHRFLLRLHLNQINALDAAMATLDAQVEANLGPFRTAVEQLMSIPGIKNLGAQVIVSEIGIDMSRFPSDAHLISWACMCPRNDESAGKRRSNRARKGATWLKTTLVQCAWAAVKKKGSYLQAQFHRIKSRRGPKKAIIAVAASILTAIYHMLKDGTVYKDLGYNHFDRRSSDQQKKRLIKRLADLGYAVEIKPLAA

SEQ ID NO: 273120 - protein, 316 aa, unidentified
MEETGVWIGIDVAKAWLDVATAGDEPPWRVDNDAAGIAALVERLAALAPQQIVLEPTGGLETAVTAALLAAGLVVAVVNPAQVRAFAAASGQRAKTDTLDARVLARFAARMQPPARPLPDATTQELRALLTRRRQLREMHTAEQNRRPTLPPGLVPDLETHLRELQAHLAALDAALERVIAASPAWQAKEALLCSIPGIGPVVARTLLAHLPELGTLTRQEAAALVGVAPLNHDSGRSQRPRHIGGGRGGVRAMLYMAALTAARCDPSMHAYAERLAAYGKPTKVVLVACMHKLLTIANAIVRDGVPWRAQGGDVA

SEQ ID NO: 273121 - protein, 355 aa, unidentified
MINTKYIGMDVHTQSISIAVRNSVGKVLMDCVIETKASTILQFIDGLRGDVRVTFEEGTWAAWLYDLLKPHVTQVVVCNPRKNALLKEGSKSDKNDARKLAELLRLNHLQPVYHGENGIRTLKELSRSYLTINKDLTRVMNRLKALYRGWGIACPGNDVYAPRHRAEWLDKIREAGVRRRAEHYYQQLDVLRLLRQEVRRDVLVESKKHRGWKLLRQISGIGPIRAALLIALMQTPHRFRTKRQLWNYSGLGLETHDSAQYRVVKGQLERSNKPVTLRGLNKDYNHDLKDIFKGAALRASIAAGPLHGFYEALLAKGRKPTMARLTLARKIAAITLIIWKKEVRFDANHLKQQAA

SEQ ID NO: 273122 - protein, 312 aa, unidentified
MTSEKFVGIDVSKRWLEVQVHGEAESRKFGNDPDGIRSLLEQMKALQPVLIIFEATGGYERRAAKALSEAGLAVAVVNPTRVRRFAEALGILAKTDKIDAKVIAHFASVVRPAPNGQQSDLEEQLAACVERRRQLLVELAAEKNRLSTSPACVREDIEEHIAWLEEHIDSLEAEIQTCIMQKSEWQARAEIIDSVPGVGPVTATTLIAELPELGQLNRQKIAALAGLAPFNKDSGPKKGKRRIFGGRSGIRRPLFMAALSATKCNPVIRAFYESLLKRGKEKKVALIACMRKLLVIINAMVRKGEAWRVSPA

SEQ ID NO: 273123 - protein, 367 aa, unidentified
MTELTQATASAPSVFVGIDLGVRRSHLCAIHVAGRKLKHGSVASTADGFRSWIASFPGAKAVLETGASSRWVEALLRKAGWDAVTVDAAHVAPELRSRGEKSDRHDAARLAELLRVGSTLLSPVVHKPEQFFADYSTVRARASAVAIRTKLINSLRGLAKAVGEPLKKTDARVFSRAAAPGLRDEYRSATAGILRIIAAVDAEIRLYDEELERVAERHVIVKRLRKVPGVGLITAVTFALVVFRPARFRDADALAAYLGLTPRRAQSGDQDPQCGITKQGNKLLRTYLIQAAHRLINLREDSDLKRWADAYLARGGGKKARKVAVVAVARRLAVVLYTLWKSGAEYDPLYQTKRAAADAEARLRLAG

SEQ ID NO: 273124 - protein, 433 aa, unidentified
MKVKYEDRQKQKVIAITTDTLVVGVDIAKNYQWARFVDFRGIEHDRALKFKNSRGGFETILARIREICKKENFAKAVVGMEPTGHYWKAFANWLEKQDGIKVVLVNPYATKQAKELDDNSQTKSDKKDALTIAKLVKDGRYFELYLPHDVYAELRGLSSTRTGLNKRKNALKNTITAVMDEYFPEYGEVFKCPLSGKASRHILKTCPFPKFILELGEDGVTEEIKKAVKKTVGRKKAAQLTKAAEESIGVDYGEEAAGLKLRLMLEELELLEKQTEELEGQMADALHQTDYADFLLSIKGIGIVTLAACLGELGGPTRFEDSRQMSRMAGYNLVEDSSGKNKSGTKISKRGRKNLRCVLYQMALTMVATNDEMKQLYHYLKTREKAPLRKMQALIVVSKKILALIHTLAKKKENYEPGKVFGHVRREQMKAAA

SEQ ID NO: 273125 - protein, 455 aa, unidentified
MRKKIKKAIPVRYHDGLSQLRPNAGGIDIGASEVWVDVGNKDAEPTRMFETFTADLNRMGDWLKSCGIQTVAMESTGVYWIPVCQILESKGIEVYLVNAKQAKNVSGRKSDMLDCQWLRILHSYGLLPASFRSAKDIGVLRAYMRHRQMLIEYAAAHVQHMQKALTQMNLQLQHVISDITGWTGMKIIRAIVAGERDRRRLAALRDARTKANEETIAKALEGDYRAEHLFALKQSVELFDTYQKQIASCHVQIEQHLKSLATKVDPAELKAARTRKRRYRNQPEFPIREQAFRISGVDLTQIDGIHESAALSLIAEIGVDMNAWRTEKHFSSWLALCPNNKISGGKILRRSTRKTANRAREILQLCAQSLLRSHSALGAYCRRMCGRLGTPKGIVAAAHKLAVLVYRMLKFGHQYTDIGQERYEQQYKQRVLQRLSRKALDFGFQLVPCPEKQVP

SEQ ID NO: 273126 - protein, 374 aa, unidentified
MKKNTIFVGLDVHKDSIDIALANEGRDGDVRFYGTVDGDLDSLHKAIRKIQGTGRGVELRFVYEAGPCGYEIYRSLTGNGFDCVVVAPSKIPRKSGDRIKTDRRDALNLARLHRSGELTAVYVPGAEDEAMRDLTRGREDMVKALRVSRQVLQGFLLRHGHRYSGRSYWSKAHWNWIADIKMPHRAQQITLHEYVHMVQEQVERVQRMTKQIQELIPQWRLAPVVKALQALRGVSLIVAATTCAELGDLARFDSAKQVMAYLGLVPSEHSSGQTIRRGGITKTGNGHVRRVLTEAAHAYSHPARESRVLSARLEGLPPKIKEIAWSAQVRLCGRFKKLLARGKNRNTVVTAIARELAAFMWAIAQIAMPAGQNP

SEQ ID NO: 273127 - protein, 412 aa, unidentified
MDLVMQRCAGVDIGKNEVVACVRTPGEAGRRRKETLTFSTFTSQLEAMAEWFTANGVTQVVMEATGSYWKPVWYLLEERGFELMLVNARHVKVVPGRKTDVADAEWLAELLEHGLLRGSFVPPVAIRELRDLTRYRKRLIQAHTSECQRIHKTLEDAGIKLDSVASDVLGVSGRAMLRALVAGERDPEVLADMSKQRLRKKIPQLREALRGRFRDHHALLVGMCLDHAEYLEARIGDLDAQVDRVIAPFAEARDHLDTVTGVGKRAAECVIAEIGIDMTVFPSSAHLASWAGRCPGNNVTGGKRRSAKTNKGNIWLADVLAECAWAAARSRDTYLSAQFWRLARRIGKKRAAVAVGHSILVICWHLLTNDCDYDDLGGDYFTRRSTTDHHRDHLVRQLQGLGYSVTLAKTAA

SEQ ID NO: 273128 - protein, 369 aa, unidentified
MRKSIMYVGMDQHKESIEIATADEGRNGEVRRYGRIDGELHSLDQVVRKLVSTGKELRFVYEAGPCGYHLYRYLTAQGLACKVVAPSLIPKKSSDRVKTDRRDAVNLARLERAGELTAVYVPQVEDEAMRDLSRAREDAKRAETRARQQLLALLLRHGLKYSGKTAWSQPHLRWLARIKLPQPAQQIAFQEYVDAITEAAARVERLTTQIRMLLPQWRMAPVVEALQALRGVSLVTAVITVAEIGDLTRFTNPRQLMAYLGLVPSEHSSGPHRRLGAITKAGNSHLRRVLVESAWAYRLPARVTPIIRRRQEQLPKPVCEIAWRAQLRLCSRYRRLTLKGKTKQVVVTAIARELVAFMWAIAVTVQSQQ

SEQ ID NO: 273129 - protein, 371 aa, unidentified
MKCDKYIGFDLHQATTVVAILDADGKLVMETIVATEAAAIIRFLKSLSGPLHITFEETTQARWMYDVVRGYVKEVIVCDPRRNKLLGEGSKADKPDARKLAELLRAGLLRAVYHGHEATRELKELVRGYETLSADTQRMMVRIKAIYRAHGIRTAGTAVYQQKQREQWLQQLTAPGSRQRVNWLYEELDHLRPLRKQAKMAMVAEGRKHQAFRLLRTIPQLGPVRCAMLVATIDTPYRFRTKHQLWAYSGLAIVTYMSAEYEIKDNRVVRSRKPVATRGLNRNCNRRLKELFISAAVAGSRSEPYRSYIEGLQQKGMRTEMARLTLARKIAAVALRVWKKGDGMNSSAFRAVSSSYLGEAGVDRPTGWECF

SEQ ID NO: 273130 - protein, 294 aa, unidentified
MRNVRFVGLDVHAQTIAVGVAETGGEVRSLGVIPNRAESINKLIKKLGKPEQLRVCYEAGPTGYVLYWQLAKLGVRCEVVAPTLIPVKPGDRVKTDRRDAEKLARCYRAGDLTAVWVPDAAHEALRDLVRAREAAKSDQLRARNRLGKFLLRQGRRAAEGTKAWTGKYLKWIKEQVHFEQAAQEATLLDYLHEVEHAGERIQRLEKSIDSAIETVPQKMRAVIQALQSLRGIAQVSAVSIVAELGEISRFAKPVQLMGYSGAVSREHTSGERVQRGSISKAGNAHLRRIVVEAA

SEQ ID NO: 273131 - protein, 316 aa, unidentified
MSASSVTVGIDVAKAHVDVCVLGAKSDAQRLNNDAEGHSALVASLLPLGVGLVVMEATGGYEAALACALQAAGVVNPRQARDFAKSMGRLAKTDAVDARMLAELATVLVRREDLGRFLRPLADELQQWLAALVTRRRQLLSMMHSERQRLQITPKKLHASIEAIVAAIKAQLDEIEAQMVGHVREHFDELDRLLQSAAGIGAVASATMIAELPELGRLNRREIAALVGVAPMANDSGASRGRRRVQGGRFEIRRVLYMATLTAIRYNPAIKAFYQRLKAAGKLAKVALVACMRKLLTTLNAMVCTGKHWDKSLHGS

SEQ ID NO: 273132 - protein, 409 aa, unidentified
MKRVYQRCCGLDVHKKTVVACLRSPGSGGRRRAEVRTFGTTTAELLTLAEWLTQNRCQIVAMESTGVYWKPVYNLLEGVFEILLVNAAHIKQVPGRKTDVKDCEWIAQLLEHGLLRGSFIPPRPIRQLRDLTRYRKTLIRQRADETNRVQKVLEDANIKLGDVARDILGASGRAMLQALIAGERDAAKLAELAKGLLRRKREALAAALTGRFSDHHAFLVHQLLTHIDELNRHIATCDARIMEALRPFAAQVERLQTIPGVGQRTTEVILAEIGPDMDPFPTAGHLASWAGLCPGNHESAGKRKTGRTRKGNQWLRAALVEAAWAASHTHRTYLASLFARVARRRGVKKAAVAVAHSILVSAWHILTRDVAYADLGPDHFDHIKMERLTRYHIRRLEQLGLKVTIEKAA

SEQ ID NO: 273133 - protein, 429 aa, unidentified
MSEEKSLELRISVDVGYRRHSVAMGLSSGEVLEEFEIDHRPEGFQEFFSRIEAQRKKRNCAVSVAMEGYNGHARPLDSLVRERGYRLYNLNNLKFARFKEIFPGAAKSDRIDARKGLELFQLSDHLPLAKEVLQEVSGTAPENEILKRLTRRRRRLVNERVRVVNNLQADLQAVCPGLLEITGEASNQWFLNFLLSADTLPQLARLKRSTLLKIPSVGVKSAAIIEHWQKRAHFSQEVEWVSEMIQEDAKRCLELDEKIKRLQAKIAEVAKNSKIAKTLRSIPGFGAVCTSELAGEIGTIERFASEGSLSLYLGMSMLDNSSGKYQGTKAPKHVNTRAKAAMMIGVDRHRKYVPESQRYYEKKRSEGKKHNQAIRALGRHLARIIYKMLKQEREYEIRPEKGDTKAKVGPRSFVKTKIRRPKISSKETK

SEQ ID NO: 273134 - protein, 375 aa, unidentified
MTMVTDPAAVQQVLSVTGGVDTHADVHVAAVIDAVGRELGHREFATTPVGYAALLAWLGSLGPLELVGVEGTGMYGAGLTRVLQAAGVTVVEVDRPDRKARRFQGKSDPIDAFAAARAALSGRASGTPKTRTGTVEMIRTLRVARSGAVKAKAVTWNQLKALIKTVPDELRERLRGLDGAALLDNCAGLRAARGPAPEHGPHAKRRRPGVLVDPSAACKRSLSVLARRIRALEAEVADLDDDLEPLITATAPTLLAMYGVGLDVAGQLLATAGDNPDRLRSEAAFAHLCGAAPIPASSGKTTRHRLNRGGDRHANHALWRIARTRLGYDPQTRAYRDRRAKEQKTNKDIMRCLKRYIAREVHQALLVDLTAPSAA

SEQ ID NO: 273135 - protein, 342 aa, unidentified
MKVTTVGLDLAKNIFHVVCFDERIKELRKRSLRRHQVLLFFANMPVCCVGMEACAGSHYWGRELRRLGHEVKLIPPQHVKAYVRGNKNDYNDARAIAEAANRPGIRGVAVKTVEEQDIQALHRMRSQCLRDRTALVNSTRGLLSEYGIIVPKGIARLRNSIPDLLEDADNGLSIMFRHLLSRRYDQLVELDNHIEFYTDQLERLGRQDEACQRLQTIPGFGPIVASAFRSAIGDGSAYSRGRDAAASLGLVPRQHSTGGKNVLLGISKRGDRYLRSLLVHGARAVVTQAARKSDKLSGWLSRIVKERGWNKAVVAMANKMARMGWAILRHNTSYYDLPVVPA

SEQ ID NO: 273136 - protein, 341 aa, unidentified
MEEYIGLDVSMKETSVSIRRAGERIWRGKCASDPRTIAELIRKRAPAVKRVVFETGPLSIWFYHSLRTEGLPAICIDARHAKAALDMATNKTDANDADGLAQLAEVGFFREVRVKGFDSMLTRTLVGARTRLVRITTELSNQIRGVMKTFGLLVPAGKGSIFEKNVRSLLTDQDGLASIVLPMLEAWRGIRIRAAELGRQLVRDARQNQACRILMSIPGIGAITATAFTTAIERPDNFKKSRSVGAWIGLTTRRYQSGEVDYDGHISRRGDAHLRGLLYEAAAVILTRSSTDSTLRTWGLKLRERIGFKRAAVAVARKLAVIMHTMLKTGELFNPNAGAIA

SEQ ID NO: 273137 - protein, 409 aa, unidentified
MYFVGIDIAKKTHQAAIICSDGKLIGKPFKVSNTVDGFNLFLEKLTAVNTDLSQFEIGMEATGHYWLNLYTWLSDKSFRLHVINPLQSDALRNLYIRKTKTDSVDAKIIADVIRIGQYSETQLADENIIALRDLNRQRFYLVDMAADLKRKIIAMMDRIFPEYQDFFSDMFGKTSVQIMKEYTSPEQILQIPTERLTQLLKKASRGRFTETKAKELKALAANSFAALLSSEMTTLLIRQMLEQLDLLEKQIADIEHIIAAQFTQFNTKLTTIPGIGTTLGATILSEIGDINRFDKPKQLIAYAGMDPSVKQSGNFVGTQSHMSKRGSPYLRRALWLAAVVAVSHDDLFKYLFQQKMNAGKTYAQAMGYICHKLLNTVFAILKTGEEYKPVYPPQIDVSKFADQPINSQL

SEQ ID NO: 273138 - protein, 403 aa, unidentified
MNAVGIDVSKGKSMVTILRPFGEIVSSPFEIKHTSSDIHSLIKLIHSIEGESRVVMEHTGRYYEALAHQLSAADLFVSAVNPKLVKDFNNDSLRKIKSDKADSVKIARYALDKWQSLEPYSITDELRAQLKVMNRQFHFYVKQKTAMKNNLIGLIDQTYPNANTYFNSPTRSDGSQKWVDFVSTYWHVDCIRKMSLNAFVEHYQNWCKRKKYAFNKSKAEEIYTKTKELVPVFPKNEITKHIIRQAIDQLNSTSVTVETIRTLMNETASKLPEYSIVMQFKGIGPSLGPQLMAEISDVTRFTHKGALTAFAGVDPGVNESGSYAQKSVPTSKRGSSNLRKTLFQVMDVLIKTMPQDDPVYQFMDRKRTQGKPYYVYMTAGANKFLRIYYGRVKEYLSVLPDPS

SEQ ID NO: 273139 - protein, 343 aa, unidentified
MDQYIGLDVSLKDTAISIREDGKRIWRGKRASDPKLLAQVIRKHAPHAKRVVFETGPLSTWFYHALMAEGIPAICLEARHAQKILHETLNKTDANDADGLAQMAEAGFYKAVRVKAFDSMLTRTLVAARNQLLSISTQLSNQIRGMMKTFGLIVSNGKGRVFDGKVRELLAGNDALAAIILPLLDAWRGIRKRAADLDRQLLAVARQSQPTKLLMTIPGIGAVTAVSYVAAIEDPENFKTSRSVGAWLGLTTRRYQSGEVDYDGHISRRGDSHLRGLLYEAATVLLTRTRPGNESRLRSWGLKLRERLGFKRTAVAVARKLAVIMHSMLRTGEVFNASAGAAA

SEQ ID NO: 273140 - protein, 371 aa, unidentified
MKEFNKYIGLDVHKETIAVSVAEALGGEVRYVGEITNTPEAMEKLVRQLRKGGANLSFCYEAGPCGYGIHRQLTDLGWECLVVAPSLIPKKAGDRVKTDRRDSLSLARLHRAGELTAVWVPDGAQEALRDLTRAREDMKHLQRQAKQRLLAFLLRHGRRYDGKSHWTQAHYRWLEQTKFEQPVQQIVFQEYIDTVKAMSRRVEALGKQLESAAGESVFWPVIEGLMALRGVSLLTATTIVAEIGDLRRFASAPQLMAYLGVVPSEHSSGGTKSRGGITKTGNSHVRRVLVEAAWTYRHPARKTTVLQRRAERTPEVIQEIAWKAQKRMCGRYRLLESRGKIKVQVTTAIARELAGFIWAIGQALPPPVANA

SEQ ID NO: 273141 - protein, 466 aa, unidentified
MTTGNKLWRNRKERKDWARRLRSEDPGLEVVHPHAAGIDVGNSAHYVAVRPDRDPEPVRRFECFTADLYRLAEWLASCGVKTVALQSTGVYWIPLYEILEDRGFEVYLVNARHTKNLPGRKSDVQESQWLLKLHTYGLLNNSFQPPAEIRVLRTYWRQRAEHVSGAATCIQRMQKALTQMNLQLANVISDLSGLTGQAIVRAIIAGERNPRKLAELSHPRIEASREEIAKSLEGNWRPELLFVLRQEVEMYDTYQRRIAECDQQLQKHLTRFADTALPQSPEAEPRQKKAKPTKNAPRFDLGSELKRITGVDLTRIDGIDVMVAQTLLSEVGMDMSRWNTEAHFSSWLGLCPDNRISGDKLLGKGTRHVVNRAATALRLAARNLIRSRSYLGAQYRRLRTKLGAPKAITAMAHRLARLIYRMLKYGQRYVDKGTEYYENRYRQQQIHLLQKKAAKLGLQITVAVES

SEQ ID NO: 273142 - protein, 416 aa, unidentified
MTFKVVRFICGGMDVHKNLIVATIGTTDRQTLITEYIQQSFSTFYSDLIRLKEWFISHDCYDVCMESTGKYWIPIYNVLETELNICLTHPKYVKAIKGKKTDKRDSKWICDLYKCDLVKHSFIPKKEIREMRKIARYRCKLVYMRSSERNRYQNCLTVSNISLASVVSDPFGKTATNIMKELMQSEVIEDDKILKLIHKNCKDKDKILDSLQGYRIESDQRFKMDTVMNHIEYLDKQIQACEAELIKRAYPLRDYFQHITHIKGISALSAILIVSEIGTDMNQFESDKQLVNWAGLSPANNESANKKKSVRSSKAGQYLKPLLVQCALSSIKDKNSYFGIKYCRIKKRRGHKKAIIAIARMMLVCIYHMILTGEEFNPCDYESLTNPKPKKEPIMTVESALQFLKDSNFDFSSIQL

SEQ ID NO: 273143 - protein, 351 aa, unidentified
MLLIGVDYHPSFQAIAFFEEETGEYGERQLHHSGGEAEQFYRDLQRRGIRVSVGMEATGYSRWFERLLAELGFELWIGDPAEIKAKRVKKQKSDRKDAQLLLRLMREDNFPRIWVPSSENRDLRQLLWHRHRLVQMRTRIMNQLQALAMNEGRRWKTKLWSEQGRTELQKLPLAPWASRRRQELLELLDRLHPTIEELTAAAEQEARKRPEVVRLMTHPGVGPLTALAYVLIIGTPARFHRGKQVGTYVGMIPSEDSSAGKQRLGHISKQGNSLLRFLLVEAAQAAARSSPEWRRRYLHLAMRRHRSIAKVAMGRRLAVRLYWMWRNGCAYSPSLEFGSYVGQLGTGHGVK

SEQ ID NO: 273144 - protein, 351 aa, unidentified
MKECKPVSFKGQTIFVGMDVHKKSWRVTERHAGCELKTYSMSPSVEGLVNRLKTQYPEAEYRTAYEAGFCGFWIHRELNDHGIVNIVVSPADIPTTDKERARKNDVRDSRKLARELEKDDLTAIYIPSPEHLELRDLVRRETQIINNMTRCKNRIKGYLLLYDYPVSGKNWSGSALNRLAQMVAPLHASALISMIAELRWLRQHRLELILAQRRYLERTGRQELQQHLVSIPGIGFRVAMVIMSEIWDINRFRDESHLATYVGLAPQLYGSGAKEQVIGPGQRKHRLLQSMLVESAWRAIGKDMGLRSKFGQLQKRTAKNKALFSIARKLLARIRAVWMQNRPYRLDALNL

SEQ ID NO: 273145 - protein, 422 aa, unidentified
MRAVALDVHRDFCEVAIVAEGRLRSAGRIETRPEALELFGRSLDRRDWVALEVTGNAWEIARIIEPHVARVIVVSPSDTGIRQARAKTDRLDARALAKLLWAGELDGVWTPDERVRAMRRRLARRSQLVRARSRAKNEIHAVLMRCLKDRPPASDLFGVNGRRWLAEQRLPITERETVDSAMRQVEFLDTEIAAVEQLIAAEALSWPEIKRLMTVPGVNVIVAATFMAAVGDIRRFPDRRKLTAYLGLDPRVRQSGAGPATHGHISKQGSTSARHALVEACWTTVRQPGPIAGFYQRIKARRGHSIAIVASARKLACLFWCLLTRGEDYAFAQPSLTKKKMRRLELQAGAPRWQGGRGVWSTNEAMRQAERELALQAQRAYERTINDRQATKVGAGATPGRASHGSSSEHVARQTTGPQSAL

SEQ ID NO: 273146 - protein, 349 aa, unidentified
MTEQRRSYAGECVYVGVDVHQETYTVTCVCHQQIVKTATVQAEPAGLAASVLRWFPGATLYAVYEAGFSACVLHRVLTTAGITHIVVNPASIAVAANDKGKTDRRAAKKLAIDLADGRLRGLSIPTEAEERARLLPRTRAPMVEHRATIARQLKAKLHQFGLIAPSSRRRISNRYLREIAAWSLAPELRVRLTLLAEQWRFATRQLIEIRRLLQEQAAAQAELEPVYRSVPGIGAVVARTLATELGDMTRFANERALCSYTGLTPSAYASGASVRRGPMSRQGSGRVRHWLIETAWRALPRAMVLQEIFDRIAATRGKKRAMVAIARRLTGRIRACFRQGTTYAVGTYA

SEQ ID NO: 273147 - protein, 366 aa, unidentified
MKKGSTAAAKQSSNFSQQKLTIGLDLGDRSSWYCLLDERGELRWEDKLSTTAKAMRDVFGRMPHSRVALETGVHSPWVSRLLSELGHEVIVAHARNVRLIGESRRKDDRLDAQTLARLARIDPRLLCPVKHRSAKAQADLTLIRARAGLVRARTALVNTARGLAKSYGERLRGCNVRNMNPEKAEGLSPELQTALEPLLAGIESLSERIREYNRRIEALAEQSYPEVALLRQIKGVGTLIALTFLLTLEDPHRFRKSRDVGCYLGLQPGRRNSGQREPQMHISKEGDPYLRTLLVQGAQHILGPFGPDCDLRRWGLKLAERGGKNGKKRAIIATARKLAVLLHRLWVSGEVYEPFHNSKLMMVTAA

SEQ ID NO: 273148 - protein, 326 aa, unidentified
MQSILGIDVSKSTLDVILITENGTYYKTIHNTPQGYQQLENWLVDHKAQKTHACLEATGQYGEAVAEYLFECGHQVSVVNPARIKRYGESKLHRNKTDKADAALIAEFCLKEKPALWQPLGPEIKHLRALIRRLEDQKANLRQEINRLKSGERDSWVVSDLQIHIDYLQERIAATEKEIQDFINKTPGLKSQQKLLTTIPGIGDLTANTLLAEIGDISAFDSAPQLAAYAGLNPQGHRSGSSVHKKARISKQGRSELRHCLYMPAVVAMSYNPVIQDLSHRMTERGSLKMEIVVAAMRKLLHIAYGVLKNRLPFDPYYGTQFDFSS

SEQ ID NO: 273149 - protein, 400 aa, unidentified
MNIIGIDVSQGESHATLITEEAEKVAFKFKHNKSGFQILNSYIRSNTIIIFETTGVYSAQLTAYLKSKKVKFYELNPLEAKLRMASLRRNKTDKNDSFKLALLGATQLTEIKNHCNKQSALPYDSLLILSLRYKQLIKCRTRILNFLRSSLELTFPELNQIFKKAYAVLALQVFRMYCHPDFLAGLTLKEMTNRVYQFVSRRIHKDVIQSYCAQVWLAAKDSYPAVPADSLEIEIISEYCDEIESYNKEIAYIQSKLIKTAVGLDDFKVISSIPEAGQLNSALLLGFTGDIARFDNYKQLNAFLGLDLNRYQSGKYGKGDTINRRGSSQGRAVETDMIRSMLRNQGKIQNHLVDYYYKLKKPPFNKHDKVALIACANHLNRTIINLVHTHQLYNYSKAIH

SEQ ID NO: 273150 - protein, 343 aa, unidentified
MNEVITTGVDLAKNVFQIHGVDAAGAVVVRRQLRRAQMLRFFKKQPPCLVGMEACATAHHWAREIAALGHQVRLMPPRYVKPYVKRNKNDMADAEAICEAVTRPTMRFVEIKTPDQQSVLMLHRTRHLFVRQRTMLINALRAHLAEFGIVAGIGRNGLERLLKVIEDGKDERVPSAARDCLLALRAQLEMVKHQILDADRRILAWHRASEVSGRLDDIPGVGPLIATALVASVPDPHAFKSGRDLAAWIGLVPRQNSTGGKERLGRISKAGNRYLRMLLVVGALSVIRRARQTGYRRRPWLAKLLERRSTKIAAIALANKNARTAWAMMAHGTFYKEPASQAA

SEQ ID NO: 273151 - protein, 347 aa, unidentified
MYQQCHYVGLDVSLETTSICVIDDAGAVIWRGKCRSDPDTITAIVRQHAPGAVRVGLETGQLSNWLTLSLRRRGVPVVCMDARHAKAALSLQINKTDANDAFGLAQVVRTGWYREVAVKSMDAHTLRMLLVARSRLVSQRQATANTIRGLLKTFGLVVARGSKGLFPVRVREQIAGNPALIAIIEPLLAVWHAIRDQVAMLDRQMLARARNDQVARRLMTIPGVGVVIALAYTAVIDDPARFRRSVSVGAYLGLTPRRYQSGEVDTTGHISKCGDSLLRGYLYEAAAVLLCRDARASILKSWGLGLAKRIGMRRAKVAVARKLAVIMHRIWSDHGEYRWTAIPPTAA

SEQ ID NO: 273152 - protein, 340 aa, unidentified
MTVIIGVDPHKATHTAVAIDGDEQPLARLDVVADRSQTQRLLAWAAPFAERRWAIESADGLGKLLAQQLLAAGEDVLDVPPTLSARVRLLGSTKAAKNDSNDALSTAIAGLRHCGLRAVRVDDHTAVIRMLVDRYDDLTRLRTQAACRLHATLRELVAGGAPRRLSADRAAKLLRSVRPVGVAEIERKRLAGELLADLRRLDRDIAAARGRVADAVTKSGTALLELHGVGPIVAGFIVGHVGDPARFPTRERFASYNGTAPIEASSGPTKRHRLNPRGNRKLNHAIHMAAVTQVRHDTPGRAYYQRKIAEGKSNKEALRALKRRISDAVWRQLQVDRGRS

SEQ ID NO: 273153 - protein, 397 aa, unidentified
MTKLFIGIDVSKEYSTAQGLDRSAKKLFYLRFSMDAKGFSELMNAIKQSSEEINEITVAMESTGCYHINIFSFLCSEGIRCFVINPLLITNFARLSLRKTKTDKKDAGTIAKFLLANEHSLKSMAVSQNTQDLKDLARERESLTWLISGMKNDIRRLLQTTFPELESLCKPYSETMLHFLYRYPSARLIREAKTREIDKALICPDEKRKRVLITAQEIINAAKRSVASAGVAKELILSEKVSTVLYLQEKNKKITEALIESCESLKIEELDIIRSVDGVDDITGSTFLAALGDFSSFGSYKHVIAFAGLDPSINQSGQHEGKGRISKRGNRHLRRIIFMMTMCSVRGNNVFREYFHRRKKEGLPPMKALMATAHKLIRVIFSMLSNKTFFKKEVAGV

SEQ ID NO: 273154 - protein, 411 aa, unidentified
MDVVKPRCAGLDVHKKTVVACVREPGQRRGERRGETKTFATTMRGLGELRDWLLGHEVTDVAMESTGVYWRPVHAVLEGTVEVVLVNARHVKMVPGRKTDVKDCEWLAQLLECGLLRGSFVPPQPVRDLRDLTRLRKALIRERSHHVNRIAKTLELAQIKLGSVITDIMGKTGRAIVYALSTGIDDPDQLVACAQGNVRKKRATLREAVVGRLTPHYAFLLQQHLSLIEALDTHIATLDTRIEAGMAPFAAELALLQTMPGVAKRAGEAILAETGVDMTQFPTAGHFASWARLCPGNHQSAGTRYNTTTGKGATWLRATLQEAAWAAARSKNSYYRALYHRIKGRRGAKKAIVAVQHAMLVALWHMLKNRVAHHDLGVDYFDRRNTERVRRHHVRRLEHLGYDVVLVQKAA

SEQ ID NO: 273155 - protein, 346 aa, unidentified
MLYAGLDLSRKRLDVHLLDADGATIEVGAAPPDADSLRGLDERLARHGETIRAPIESMNGARFVHDRLEVAGWQVEIADAQKVKGLAPLACKTDRIDAWVLAELARRDLVPAIWLPDPRVRAERERARWRLHLVRHRSSLKQRVHAVLLTHGTPCPVSDLFGVRGRQLLAKLGLPEPWQATIDASLRLINDLDREIGECERELRRLGADHCYVPLLCTVPGISWVLAYTIAAELGDIGRFPTPRKLAGYSGLCPRVYRCGERDLRGPLSKQGPRYLRWALVEVATHACTAPVSRDRYQKTKPRIGKQRGAKVAQIDLTRRLSEAIWHMLSRGEPFAPKGATDALAA

SEQ ID NO: 273156 - protein, 357 aa, unidentified
MSSNMKKYIGLDVHKEAIAIAVLNGAGKLVMESIVETKASTLLDFLHGLRGELHVTLEEGTWAAWLYDVLKAHVEEIVVCNPRRTALLKEGSKSDKVDARKLAELLRGGLLRAVYHGENGLRTLRELARSYLTISKDQARVMSRLKALYRSWGIPCSGTQVYAPRYREQWLSKIAQPGVRRRAELFYQQMDGLSVVRHTVRGELLAESRKHQAVKILRQIPLIGPLRAALLLALMQTPHRFRSKRQLWTYSGLGVETHDSAQHRYVDGQLQRSKKPQQIRGLNQNHNHEMKRIFKSTALSASRCAGPLQDFYAGLLARGMKPEMARLTLARKIAAITLTLWKKGGRFDAEHLKSQAA

SEQ ID NO: 273157 - protein, 342 aa, unidentified
MKQYVGLDVSQKETAVCVIDESGRIVFEGKARSEPGALARLIAKRAPDAVRIGFETGAMASWLWHELKRIDLPVVCIDARHAHAALSVRINKSDPNDARGLAELMRMGWYREVRVKSEESQLVRSLLVARARLVGIRRELENQVRSLLKENGLLFPRAIGRQFRDRVCGLVGEGRPLCTIIDSLLAVHERVGAEQAALDARVRALAKADQTTRRLMTVPGVGVVTALTFRHTIDDPTRFRSATSVGAYLGLTPRRKQSGELDLTGRISRWGDRLLRSYLFEAASVLIHRTKRWSPLAEWGQRLVKRIGLKKAKVAIARKLAVILHCIWIDGTEFDWGKPKMV

SEQ ID NO: 273158 - protein, 329 aa, unidentified
MNLSSPLPVIGIDVSKASLAVCYQVDQHLKHVEVPNTKAGFQQLVQACGTQCVFVLEATGSYYLALAYYLHEQGGQVAVLNPLVIKRFIQMHLGKGKSDRKDAQWLLRYGQQQVVKPWQPEETVLVECRQLEQVSEQLLKQKTMVSNSLEALQQQPVVSQLALKRLQQTWNQLDQQLHDIEVELLRLLEQRYTHEMNLLCSIPGIGRKTAGLLLLFAGGFTCFDNYRQLIAKAGLSPREHSSGTSIRGKVRITKMGGGLIRSKLFMCSFAAKKRNTACQALYDRLVAKGKNGKVALIAVCNKLLKQAFAIVKSGVPYQADFTSKLAPAS

SEQ ID NO: 273159 - protein, 401 aa, unidentified
MKYGVGIDVSKGKSTVSILSVEGEVIEEPFEINHDLSKLNLLNEKLFTFSKEDLKIVLEQTGTYHLPILTYLLDKGYCVIAENPLKIKKYLDRNLRKAKNDKKDSLKLAEYCCDNWYKLKPNTIEEEKYKELRFLSRQYFTFNDIKVKQKNDLSNLCDLVFPGYYQLLNENNFLLGIIIFKKYNNPESVKNIKEEKFYKEIDKIAQKRGQSKAGKTLAINIYKLAKETYSLCPSSKITQPIIDRSVAALILSIETTNEIITNMSELAKSMYEYKIVRNMDGVGEKLAPLLIAEIGDIRRFKNAGSLIAYTGIDAPPYQSGKFEAVNRHISKRGNKYLRRIGYTTMKAVKTFCKSGTELYDYIVQKENEGKSKKSSKIAGLNKFLRQYYGKVRNEYIEIGIW

SEQ ID NO: 273160 - protein, 415 aa, unidentified
MEATVERCAGLDIHQASVVACVLVGPPGCKPRKETRSFGTSTRELEGLRAWLEGLGVTHVGMESTGVYWKPVHAVLEGRFELIVGNAHHIKAVPGRKTDVKDAEWLADLVRHGLIKPSFVPPPPIRELRDLVRLRRSLAEARSTERNRTLELLETANIKLASVASEVFGVSGMAMLRALVEGEAAPAEMAELARGKLRRKRERLTLALEGRLTEHHRYVLAFHLRRLAAIEEDLRALDARIEAEAEPFQAQRRLLQQIPGVDALVAVTIIAEAGVDMSVFGNAKRLAAWAGVCPGNHQSAGKRRSGATRRGNVHLKTALVTAAVSGSRRRGSYYKDKYHRLKARRGRLRAAVAIAHKILVAAYHMLAEGVPFRELGEAFLDQQARQRNVRHLLNRLNHLGYDVLLQPRAVEAAGP

SEQ ID NO: 273161 - protein, 351 aa, unidentified
MQYAQISNQFRYFCGGDIHSDKSYFKVLDQSGKVILKKNLPNNFALLKDFLKPVMGDVAIGVESNYNYYWIADGCAKGDIPFFLGHAYYMKAIAANKNKTDSIDAKTIADLMRANLFPLAYPYPEDMRAVRDLLRRRHYFVRIRSALYTHTQMTMHQQGIHSFKHSLLRDKVERENIINNFENTIVQQSISTDLNFVKYLDNEIDVLEKSILDKVKVQSHKAYALLNTIPGVGLMTALNIIYKTHDISRFKTHQKYASYCRVIKPERISNGVRKKSGNPKMGNPYLKWAFGQILHSARNASENIDKLYLKFERKAGKKKARAIMAHKFNTTAYFMLKNETAFDMDKFLNTK

SEQ ID NO: 273162 - protein, 332 aa, unidentified
MNEITTVAIDLAKNVFQLHGVDVRGGVVLRRQVKRAQLPAVLGRLPRCTIAMEACGGAHHWGRVCQALGHEVRLISPQFVKPFVKGNKTDRNDAEAICVAALQPRMRFVALKNVEQQQILALHRLRSHAVKGRTGLANQLRGLMLEFGIAVPQGIHRLKRALPDILHSDDQRLPPIVRNELRQQRDRLIAFDEEVRRLTDQIEQLVHADARCEALMQRRGVGPLIASAFVAQVSDPQTFKNGRQVSAWLGLVPRQHSSGGKPQLLGISKRGDAYLRTLLIHGARSVVRTAHRHQDALSQWAQHVQARRGVHKATVAVANKMVRQLWAQLAYG

SEQ ID NO: 273163 - protein, 340 aa, unidentified
MNKSLDFDPCGIEVSARTLVVERRRPGQPDAVREFANTAAGHQALLRWLESAGRAVRVCLEATGLYGLDLALTLEAAGVALMVANPRAVRHFAQALMRRSKTDRLDAAVLTEYAARLPFQPWRPPSPSALKLLAVARRLEALTDIMAAEKNRLHAASLSEALPAIIRRDIQRSIQTQQRAVQRLTRAAQEFIAADPPLAERYQLLLSIPGLGPTSALHVLAELLLLGPDLDVRQWVAYAGLDPRQYTSGSSVHKKARISKAGNKHLRRALYMPALVAVRHDPHLRAFYEHLVERGKTKLQALVAVMRKLLHAIYGIFKHHQPYDGAQLFALPSPQEVICP

SEQ ID NO: 273164 - protein, 406 aa, unidentified
MRLFIGDDWAEDHHDVEVMDAGGRVLAKKRLPEGAAGMARLHELIGIQLGEDAQDAEVLVGIETDRGPWVAALVAAGYVVFPVNPLQASRYRERRGVSGAKSDGADAHMLADMVRTDWHQLRPAAGDSAEAGAIKALARMHKTLIWDRTRQLQRLRHQLREYFPGALEAFDDLAAPDALELLAKAPDPARAARLTRAQVSAALKRARRRNIADKTVAIISALRSAQLGQPPAVTSAYAATVRSLIAVITALEEQVTVLQVQVEAHFGQHPDAEIYLSQPGLGSLLGARVLAEFGDDPHRYASSKARKNYAGTSPITRASGKKKTVMARYIRNDRLIDALMAQAFTALNASPGARAFYDQQRAGGAGHNDALRRLANRLVGILHGCLKTRTLYNEAAAWSHRGKLAA

SEQ ID NO: 273165 - protein, 451 aa, unidentified
MTRDVQEIDADGEAELVERVAAIDVAKASGMVCTRVPHASVAGRRVTRVWEVRSTTNAILALADELVDQGIERVVVESTSDYWRPFVYLLEARGLSVWLVNAREVKQVPGRPKTDKLDAVWLAKLNERGMLRPSFVPPAEIRRLRDYTRLRFDLVGERSRHVQRLEKLLEDALIKLSTVATDIMGVSGRAMIDALIAGERDPHVLAELARGRMRVKRAALAEALTGRFDEHHAELAQMLLDQIDALSAKVEALTFRIDQLIAEIPAAQAPVDTGPGGQRGDPHSYPLAVVARLDEIAGIGVRAAQVIVAEVGLDMTQFPTPGHLISWAKLCPRTIQSGPRSRSGKTGKGNPYLKGVLGEAATAAAKTDTFLGERYRRLVRRRGKLKALVAVARSILVIVWHLLADPAARYQDLGADFYTNRVNKNRKTRQLVHQLQALGHHVTLQPIAMAA

SEQ ID NO: 273166 - protein, 344 aa, unidentified
MEHFAGIDVSLKDSSVCVVDAAGRIVREAKVASEPEALVAWFRGLGLKVTGIGLEAGPLSQWLHAGLSEAGLETVLLETRHVQAALSAMVVKTDRKDARGIAQLLRMGWFRPVHRKSADAQEVRALLVGRKLLQSKLRDVELSIRGILRGFGLKVGEISKGRFAARIRELVAGHAMLETVTGAMLAAREALLAEFMRLHRRMLAIVRADAVCRRLMTAPGVGALVSITFRTAVDDPGRFRSSKAVGAHFGLTPKRYQSGETDVIGGISKVGDAMVRTALYEAANAVLSRPTRFSTLKRWAMDVAKRRGLKRAKVALARKLGSVLHRMWIDGTEFRWGKEAPVAA

SEQ ID NO: 273167 - protein, 383 aa, unidentified
MENQSSDYCVQTSVIVSVELSKRTWLVASLTPGAAKISLRTIPAGDSAALIGHLRNLESKTGERIGEPAAIRLCFEIGYDGFWLARLLRANGIDTYVLDPASFLVSRRGKRVKTDRIDAEAMIGILKAYLAGDKSVCRVVDVPTPEEEDARRVMRERGDLVHERTRIISRIRGLLALQGIQSVKAISGGDWSKQLDDMRTGDGRLLPPNLRRQIERCFGRLELLNEQIKSIERDRADVVLDEASTFPCREKAIRLEQLKGIGANSAVMLVAEVFCRNFESRRHVAAFLGLAPAPYASGDVSRDQGISKAGNHGTRVLMVELAWCWLRYQPSSELAVWYRNRFKGNGGRAAKVGIVALARKLLIALWRFVETGLVPQGAELRAV

SEQ ID NO: 273168 - protein, 401 aa, unidentified
MAETGRIWAGVDAGKEHHHVAALDEAGRVVLSRRVANDELALREVIAEVTALGAGRPPRWAIDLRDGYAALVLALLAAGAAEIVYVPGRMVSRMTGAYRGEGKTDAKDARIIADQARMRADLAPLAPADELITELRMLVSRRTDLVTDRTRVINRLRVTMVQISPALERALDFTRTGPLTLISRYATPAAIGGAGQDQLTAWLRERGVRNAPALARRAVTAADAQTVRLPGEDVAAELAADLAREVMALSERIGQVDERIAARFRCHRAAAVITSLPGIGVLLGAEFLVATGGDMTAFHSADHLAGYAGLAPAPRDSGRRTGSLHRPRRYNRMLNRVFYYSAQISIQHCPDSRTFYDRKRAEGKKHNQAVLALARRRVNVMWALLRDHKPYTPSEPVIAAA

SEQ ID NO: 273169 - protein, 344 aa, unidentified
MEMAIGVDPAKGSLAVAAVDVLGRVLDAREFSNDPRGHRALLGWVRERGPNSVIGIECSLSYGASLSRFLLDAGEDVREVPTTLTFQQRRRRHAQGKTDLVDSVAIARIVASGEILPSAHRVEALADLRALVDYRDQLVRARTQVANRAHADLVNIRPGYEREVSNLRAKCHQAKARSLLRGARSVRAELVRRRLGELSRLEREIVAMDRRIEAVVRNVGTTLTDIPGVGSFIAAKILGEVGDPSRVRSKAAFAALSGTAPLPASSGQTHRHRLNRGGNRQLNWALHFVALVQCRITPAAQAYMARQREAGKSHKEAMRCLKRHLSNVVYRQLVADAGRAELAA

SEQ ID NO: 273170 - protein, 339 aa, unidentified
MIYVGLDVSLNSVAVCAVDETGKLIREGTTLADAPSIVLYLEPWADQVERVGLEAGPTSEWLTANLIELGLPAISLEARQVKAALSAMPVKTDRNDARGIAQVVRTGWFKPVHVKSIGSQRARTLAAARKHIVRSIAATEQVIRGLLRPLGLKVGIVSRTLFATRVRELVGDDALLEAIMNPLLAGREALMREYARLHRLVLKTVRSDPACRLLMTMPGIGPVSALTFRSTVDDPRRFLHSQSVGAYLGLTPRRYQSGEVDRVGRLTKVGDGETRTALFEAANVVLRPSTRWSPMKARAVRVAHRQGSKRAKVALARKMAVILHRMWVDGTEFRWTAVA

SEQ ID NO: 273171 - protein, 420 aa, unidentified
MKLSNIEFTAFVGLDWADAKHDICVQAAGCEVREFDRFRHKVAAIDEWAHSMHQRFGGQIAVALELSKGPIVYALQKYDFFVLFPINPSMLAKYRQAFKPSRAKDDPTDAELALDLLVRHRERFQPLRPQSVPMRKLCMLVEQRRRLVGDKTRYTNRLGNALKQYYPQALQWFEQRDTVVFLDFLTRWPTLIQAKRARKATLATFFKVHNVRAERVIEARLCAIKSASPLTHDMAVITAYQLQAEVLVEQLRVTLKAIARYDAEIATTAAKLPDYALLFKPLPGAGLALAPRLLAGFGEDRQRYAGAEQIQQYTGIAPVTERSGNKTWVHWRWQCPSFLRQSIIEWAGQTINKSFWAGVYYRQQRDKGASHQTAVRALAFKWLRILYRCWQSRTPYDESKYLEALRRRGSPLLKHLGETM

SEQ ID NO: 273172 - protein, 410 aa, unidentified
MGYETLIRRAHVMTRKNTLKSLPTDTEFRVVGLDLAKSDVSVAAIPVDDNTPSLVDRMTYADLLDWAGKISPTLFAMEPCNGYSLLCLQLENLGHEIKVISGSTVSMWINTHLSGQKTDLNDAIALARLAVSDAELTPIRHKSITEIRIQTVQAVRQQLMSQRSKSIVSFKALAQQWGIPCAAGHRNLKKLRESIEAKVDLITRPVANAMLFLLDAVKSLDRQIGQLNQTLQELVMSDERGRLLQSVLGVGTQISARVITVVGNIERFNSPRSLVAYVGVAPRNFITGHKNLTKKKHGNCPDLSHKGQGKISRRGDKLLRSLFIQGAACLYMQFCKDQLPECLLKRWILKQLAIQKPYGKLIVSLVAKLIRIVWAVLTYREKFNIQKAGMTRSMWSEMALETPLNKEVPA

SEQ ID NO: 273173 - protein, 321 aa, unidentified
MKNSTNPVAVGIDVAKASLEVSIGTDGSTLQFANDIEGHDRLLAHVRDLAVSLIVLEATGGYEAAIAGALQAAGMPVAVVNPRQARDFAKAMGILAKTDSIDARVLARFAQTLFQRDDLQRFIKPLADEALKALQVQLLRRRQLCSMLIAERQRLSTSHHSTRADIEASIDFLKGRLNKADAELAHLIERDHAELNTLLRGVKGIGPNALATLIAELPELGHLTRREIGAPVGVVPLNRDSGQFRGRQTTWGGRATVRRALHMAALVASRHNPAIRRFYAHLIEQGKAPKLALTACMRKLLTILNAIARDQVPFNPALHQC

SEQ ID NO: 273174 - protein, 350 aa, unidentified
MMIIGCDYHPSMQQIAWLDKESGECGERQLRHSDGEAERFYRELRQQGVCVRVGIEATGHTRWFERLLAELEMELWIGDAAEIKKQQVRKQKTDRRDAQHLLRLLVEDRFPRLWVPAAENRDVRQLLLHRHRLVQMRTRVKNQLQAIALNEGVQRKHRLWSREGRAQLESFALPAWTARRRADLLCLLDQLTPQIEELSQAIEQEAQKRPDVAHLMEHPGVGPITALAFVLVLGTPERFRCGKQVGSYLGLIPCEDSTAGKQRLGHISKQGNTLLRFLLVEAAQSAVRTDAEWRKHFVRLAMRRHSGIAKVAMARKLAVSLYWQWRKYSPPSATADSVRTWSNSSEPHGV

SEQ ID NO: 273175 - protein, 351 aa, unidentified
MLIIGCDYHPSVQQIAWVDTETGETGERRLKHSDREAEGFYRELKEKGFSVRVGMEATGHARWFERLLGELGFELWVGDPGKIRAKQVKKQKNDRRDAEHLLKLLMKDDFPRLWVPTPENRDVRQLVLHRHRLVGMRTRVMNQLQAIAMNEGIRRKRGLWNKQGRALLESLSLPPWTSRRRQELLELLDHLDPSIEQLSQAIEQEAEKWPEVQRLLTHPGVGPITALAYVLVIGTPHRFRCGKQVASYLGLGPSEASSGDRQRLGHISKQGNAMLRHLLGQAAQSVAHCEDQWRGQYVHLALRRNHAIAKVAMARKLAVRLFWMWRKEWDYQQVKNFGSHVGQLVQSHGVE

SEQ ID NO: 273176 - protein, 320 aa, unidentified
MRNAVGLDISKLTFDASAMVGKTEHSAKFDNDSKGLDQFSDRLKSLGCQNLHICMEATGNYYEEVADYFAQYYSVYVVNPLKISKYAESRFKRTKTGKQDAKLIAQYCRSAKESELVKRQKPTDEQYRLSRMIAAYAQIKSECAAMKNRHHAAKDEEAAKAYAQIIKAMNEQLEVLKEKIKEQTEKPNCKEGVKRLETIPAIGRMTAAVLFHHLTSSKFETSNKFAAFAGLSPQQKESGTSVRGKGKLTKFGNRKLRAVLFMLTMVAYRIRAFPDFIKRLEEKKKPKKVIIAALMRKLAVIAYHVHKKGGDYDPSRYKSA

SEQ ID NO: 273177 - protein, 330 aa, unidentified
MRKVTEAGIDVSKDVLDVAVRRDERRLETARFANDATGHRKLIGWLTKGGRTVRVVLESTGTYSLDVALALHRARGVTVMVANPRAIKQFTGALMQRSKTDLTAAVALRDFVIRMPFVAWAPPAAPVLELRGIARRIAALVVERTRERNRLHALHATTETSRIVCNDIEVNVRHLERRIELLSAQAIELIGQRPELQTAFDLLVSVPGIATHSAIQLLPELLVLPETMTVRQWVAHAGLDPRAHQSGTSVDKPARISKVGNAHIRRALYMPALVAVQHDAHVRAFFEKLVARGKTPLQAYVAVMRKLLHAIYGMLTTRTTFVAAKFHAAA

SEQ ID NO: 273178 - protein, 414 aa, unidentified
MESVYRSVAGIDVHKKMLAVVIRRQRGEQAEYEKRKFGTTRAEIQHLQSWLGAQGVSEVVMESTAQYWRPVWHGLEPHFALHLTHPLKTRAPRGRKSDFRDAQRLADRWSAGDLEESFVPSSEQRAWRWLTRSRVQLKKELGVIHNHVEGLLEQGGIKLSAVVSDLFGVSGWAMLEHLARGVTDVEVLAGEARGALRKKNAELKEALAGRLEPVYRLSLRQHMDQVRLLRRQVEEINQALAEAMKEHVAALHRLTKIPGVDLYAAQELVSEIGPQAAAFASAEQFASWVGVCPGSQESAGVNYSHRSAKGNRYLRRLLCQIAWAAIHTKDTFFASLFARLKPRVEGKGAAWAVAHRIAKIVWLVLHQQAEYQEKGSAPPNERTLVRKFRRMLKEFGQLGLDVRALLDQQLPNPV

SEQ ID NO: 273179 - protein, 409 aa, unidentified
MDVVYERCCGIDLHKRSVTACVLTPGGGGWPTKEIRTFDTMTADLLALGDWLAQAGITHVAMESTGVYWKPLWNLLEERFTLLLVNAAHVKVVPGRKRDVGDAEWLADLLRHGLLRASFVPDRPARELRELTRYRSSLVRERTAEVNRLQKTLEGANIKLASVVSDVLGVSARAMLAELVAGQEDAAVLADLAVGQLREKLPALERALTGRMSAHQRFMLTQHLAHIDALDAQVAAVGEQIAERMRPFDAQLRVLDSIPGIGRWSAEVIVAEIGTDMSRFPTAGHLASWAGMCPGHDESAGKRRSGKTRKGSPWLRVTLTEAAYAAGRSKGTFLSARYHRLIGRRGKKKTAIAVGRTILELCYELLTTGQVYDDRQARTPSEHVPMTEEERLVQRLEKLGHRVTLEPAA

SEQ ID NO: 273180 - protein, 336 aa, unidentified
MQRQYVAIDLHRRRSVLVRMSREGEKLETVRIDNDPIAFCLELAKAGPNPDVVIEATYGWYWLVDLLQAEGANVHLAHPSGLNWENRRVKNDELDATELADRLRVNKLPEAWIAPPKVRELRELVRYRAKLVALRSGLKAQIHAVMAKQGILPTLTDMFCPTGQRLLDEMPLDRVYLIRVESLRDLIELYDREIGMLEREIAIWLRDDKGYWAIQALDGVGLTMAAIFVAEIGDVTRFAGPDKLCSWAGLTPKHRESDRTVKRGHITKMGSTLVRWAAIEAVARYRGGEPIRDTYYRLAEKRGRKIARVAAARKLLTLIFYGLRDGEIRCLQREAG

SEQ ID NO: 273181 - protein, 352 aa, unidentified
MHMIAFDSHKRYTVASVQSIDGQIIKETRINHGRGSIVRFLSQWDKGSPVAVETIGNWYWIVEEIEHAQMCPRLVHARKAKLMLGMINKTDKLDARGLNRLQQTGTLPTVWIPPLEIRDKRELPRTRMVFTHQRTRLKNRIHSVIDKYGLQQKFIDISDMFGKQGRKLIKESLALLPEQTRYALGTLLHHLDEVERQVEKIEKRMKKVFHPNEETKLLMTMPGVGFILSVVISLEVGDVERFNGPERLASYSGTVPRVHASGDKVRYGRLRPDTNRYLKWAFSEAGNSVAVNRKKWPYRHVSKVYTRVRHRQGHAKAVGAVARHLAEATYWILTRKEPYWERGVSRVSMTEA

SEQ ID NO: 273182 - protein, 388 aa, unidentified
MEAGDLQGRACLATIYVALELSRSSWLVAIQGSDEGRPSRHKVEAGDAKRILALIEQARRVVARRSGQEAVGVCSCYEAGYEGFWLHRVLVAAGIESRVVDASSLLVDRRARRRKTDRIDVETILRALIRWLRGERDACSMVIVPDADAEDERRLSRERGRLVQERTGHINRIKGLLMTMGIYDFQPTAADRLERLAKLVTGDGRQLPPRLSEEISRELARLAVLEEQIAAVERERDERPAKQDDVAPTDIATPPGRIAQLHKLRAVGRQTAAVLQGEVFFRQFRNRRQIAAYVGLDPSPWASGDTMREQGISKAGNRRARHALVELAWMWLRWQPASELSQWFHKRVGDAKGRLRRTIIVALARKLLIAIWRFLEHGVVPAGAVLRA

SEQ ID NO: 273183 - protein, 350 aa, unidentified
MDHIGIDVHKMHSQICILTEDGELIERRVRTAAEQFAEVLGARSRARIVIESATESEWVARCLEALGHEVIVADPNFAPMYAQRSRKVKTDRRDARALAEAALLGAYRPAHRLSDAQRHVRGRLTVRDALVRTRTGYIAVIRSLLRQHGYRVRSGGAEAFIARVRALPLPGRLLSEIGPLLAVLRPVNQQVAYSDDRIEALTTTDQRVRLLRTVPRVGPVTAAAFVAALDEVSRFRGAHEVEAYLGLVPRELSSGESQHRGRITKAGPSRVRRLLVQAAVSILRLRDPQTVDLHQWALAIAARRGKKIAVVALARRLAGILYAMLRDGTCYEPRRPRRSPRTAAPTPAPA

SEQ ID NO: 273184 - protein, 399 aa, unidentified
MRYCLGVDVAAVDSMYCLVAETGEIIFMPAKSPHTKSGFQWILEKLNGIEQKDIAVIMESTSTYHLKVERFFRENTDCEVIILNPMISKNHKRNLRKTKTDKEDCLNLVDIFFKGEYNCQVRHEEIYAEMQFLSRQIQHLQEGATRTRNRLRQLLSMLNPAYFDAFRNDFMYSETGLRFIAAWPHCDLLNAATAEDIAISLASTHQRSPGYYRRKAERLKTFAANCYPAVSKESVMTDCLAETALRLLAQQQEIEVLKSRLVALGSSTELYDLFISVPGIGPYLASSLIAELKDIRRFENHKKLIAYCGFDPTIIQSGKSIHYNGPISKRGNSTARKILFYTVSIVLVVARKTNRQMPLLLYYEKKRGEGKHHHACLVACCTKLLRILLAMSKQNTPYS

SEQ ID NO: 273185 - protein, 411 aa, unidentified
MEVLFERVAGLDVGKASVTVCVRIPGKRQGSRSSVTRTFKTTTGSLHVMRDWLLENAVTIAAMESTSTYWKPPFYCLEESMEVWLLNAAHMKAVPGRKTDVRDAEWIAQLLEHGLLSPSFVPPPLIRRLRMLTRYRMQLMGDRTREAVRLELMLEDASIKLSAVASSVTTVSGRVMLRAMIDGERDARVLAEMAKGRMRSKIPDLAQALEGHFDGHHARMAGAILDRLELVEHALADLDEAIRAECRPWVHEIELLQTIPGVGERTAQVIVAETGADMSRFGSAAKLAAWAGVAPGIYESAGKRTPTGKRHGNKWLTAMLVEAAGSVGRMHGKNYLAAQHARLTKRRGAGRAQIAVAHSILVAVFHMLTRNEPYRDLGADWLARRNDEAHTRRLVAQLERLGHSVQLDPVA

SEQ ID NO: 273186 - protein, 319 aa, unidentified
MNTTSKIQKKHTQRHVGIDVGKSTLDIYIFEKDEYFQVENNPSGITQLTKKLKRYKLTRVLVEATGGYERAVAEACAEQALPIIIITPIRIRQFARAQGIIAKTDKIDARLIAHFGVVMQPEVRELPTKKVRKVKDLNARKRQLMESRTQELNRQHKAQPYMQSTHRRMIKVLDKEIEWINQQLAKEVDKIDEWKRTQDILLSAPGIGCGVAYTLLGELPELGQLSHRKIAALCGLAPFNHESGSIAKKRRIRGGRAPIRTVLYMAMMSAIQHNPIMKTFFNKLVAQGKHKKVALTACMRKMITILNAMVRNNQEWNMA

SEQ ID NO: 273187 - protein, 391 aa, unidentified
MTILVGIDVAKDKHDCFIMNSEGEVLAKPFTIFNNKEGFDFLYEKIQSVSSSDNIKVGLEATGHYSYNIIGFLLNKGLATFILNPLHTNLYRKSLSLRKTKTDKIDSKTIAMMLLSDVSLKSYSDISYHNEDLKSLTRYRFSKVEERAKLKTSLSRLAQILFPELEKLVPTLHMTSIYQLLEEFPSASAIASVHLTRLTNLLSKASKGHYDRETAIKIRDAAKNSIGSNMPAKSLELKHTIKLIRALTIDIGEIEAEISKMMDKIASPITTIPGIGRNIGAMIISEIGDFSRFSSPDKILAYAGFSPSIYQSGKLDNCYAHMEKRASRYLRYALFHAAKLVCHWDKTFADYLAKKRAEGKHYYVAISHAVKKLVRVIFHIEKTKQAFLKAS

SEQ ID NO: 273188 - protein, 414 aa, unidentified
MEDWPEAPPVFLILPWEVYVMSFFIGVDVSKEKFDACCIGEHEEKIFSLTCTMDREGFEKLALKLPADKSSFLLGMESTASYHIPLFSYLAAQGYPVVIINPLLIASFAKRSLRKTKTDRKDAFTIAQFLLREKEAFGTQTTGHLATELKDLARRREKLVDHVTSLKGDMKRILAVIFPELEHITGVFTKCTLRLLVEYPSAHAIREAGYDAVANLFITRSRGSKPRAGIKTLMTAAASSVGVVSPAKELTLKQEASLLTHIQEQMKETTEVLMNLLNQRMKHDMEILCSIKGIGENTAMNFLIEMGGEVEMYENDKKLIAASGLDPSTYKSGKYEGKSRISKRGNRHLRRVIWLMATKVIINNNLFRSYFYKRRNEGLPYKMAVLATAHKLIRIMFVMLSRKTYFVEGGIKYS

SEQ ID NO: 273189 - protein, 469 aa, unidentified
MLSTGAGLPDSDTNPQLMTQSSLALYVLRSRVKTKSTQMNAQDTTTNIDNQHQTQIPDQFVAWIGFDWGHHSHAFAIQDQSGQRQCGTIPATSEALHNWVGQLQNRFGSRPVALAIETNRSGAISALQDFYWLTIYTVNPSSSASFRKTFKPSGASDDIPDAQILLQLLLSHQDKLRPLIQQDQLTIKLDALTRTRRQLVDHTTKLTCQITSLLRGYFPQALEMFGDIDSPLAIDFLSRWPDLISLKAAKPGSLKRFYYTHNVRNNQLIQKRLESVKQALALTTNQAIVSPSVIKLKAMLGVLRELRKQITILDREIAIAFHQHPNAHLFRNLPGAGDALAPRLCALFGTVQELIPDAPTLQKKIGVAPVLEKSGKSAWTHWRWFAPVFMRQTMIEWAGQTVQYSRWARVYYRRMAAQGKDHWVILRTLAFKWIRVLWKCWATNTIYDEPKYLRQLHSRKSPNAVYDQE

SEQ ID NO: 273190 - protein, 358 aa, unidentified
MKIIGCDYHPSFQQIAMLDLSTGEYCELRLLHAGGEAQRFYEALPGPVRVGVESTGNMLWFERLLQKLGHELWLGDAGVIRAKAPRKQKTDARDARLLLQLLRENNFPRLWVPSVEERDLRQLLKHRHTLVQMRTRVKNQLQHVALNQGMQKKGKLWTRAGQEQLRGLELDRWTGRRRDDLLHLLGYLEKQIAELDQAVQGEAEQRAEVRLLMTHPGVGPVVGLATVLTLGAVGRFPRGREVASYVGLIPSEDSSGQRRRLGAITKQGSSFLRFLLVQAAASAVKGDAEWARTYRRLAHKKHHGVAKVAIARKLVVRLYWMLRTQTQYPEVVRMSGSPSHPVARLQAERLSGHPASRR

SEQ ID NO: 273191 - protein, 415 aa, unidentified
MSDPLYVGIDVSSKNNVICCLTKDDEKRSLSRFTVLNNRPGILELRERINQLVEKHDFSSILFGLEHTGCYSTHAAMYLHQHLDFGCPDVQVYMFNPSLIKEFKKTHFLDAPKNDRVDAWFIASKLKSGYLPHPFTWSEPMMALQRLTRARYHLMKALVRESNFLMTNLYLKCSDYTLVFDNKLSATSLAVMEEFESSEALAEASEDQLVEFLIHHGKNRFEDPQAVVRELQKAARSSYRLPKAMADSVNLAMASSIRVIRTIQDQLKSLKKAIEDHLATIPQTLDSVPGIGPIFAAGILAEIGDIHQFNSHKQLAKLAGLAWTKNQSGDFTASQTRLIRSGNRILRYYLIEAASSVRVHDPVFAEYYAAKFAEPKQYAHKRALALTARKLVRLVFYLLKTNQLYQPKGGNRHLN

SEQ ID NO: 273192 - protein, 359 aa, unidentified
MKTRLSNKQKWFNKIDLTSDDELYVGIDVHKKSYHLAFWLNDAPAIDFVMPPDNKKVAQILQKFRNAIMLIVYEAGPTGYSLARQLKDSNLPVKITAPSMTPRQAAPQSKTDSLDCKKLAKYAAKGILKYVTIPTKQQEADRQLTRLRQQLVAKQRRIKLQIKSFLLQHGIPQPSGLASWSNAAVEKLSKIIISKQLRYCLDIMLEQLHFIKAQISKLEKQLKQYFSKTHLQKKINILQTHPGVGPTIAKQFVTEIFNPKRFNSPTQIAKYLGLAPTVNQSGQTLRGGPISKTGRPVLRSNLTEAAWAWIRKDPIAAKTYKRISQNTGHKNKAITAMARKLTIHLWKMASENKPFIPQY

SEQ ID NO: 273193 - protein, 340 aa, unidentified
MSLYGGIDLHANNSVIVLINEQDEVIYRKRLPNALPTILEQLAPYHMQIKGLVVESTYNWYWLVDGLMEADYRVHLANPAAIQQYSGLKYTDDHSDARWLAHLLRLGVLPEGYIYPKAERAVRDLLRKRAHLVRQHTANVLSVQNILVRNTGARFSVKRLQELTKQELKSLLAEEPQVLAVTSSLAVLDCLRQQIKTLEKTVHKRLHHTPAYEQLLTVDGIGTILAQTITLETGAISRFPTVGNYASYCRCVDSNKISNGKRKGTGNVKNGNPYLAWAYMEAAQFAMRFQPAAQRFYQRKLAKSRNNTVLARKAVAHKLSRACYYIMRDFVPFEAAKAFG

SEQ ID NO: 273194 - protein, 315 aa, unidentified
MKKHAKPDVGVFAGIDVSARQISVARLQRGEENPAFTTFANSASGHTALVAFLLHAGDGLRVCLEASGNYSLDVALMLHAHRQVEVSVINPRRARRFAESLGERSKTDPVDAYVLCQYAARMPWESWQPPSSTALRLRAITRAIESLGVMHTQENNRAHALSSSQALPALVLRERQRHQHYLEHRIKQLRREACRLIARDPELDRYYRLMLTVPGIAQTSALQILGELAVLSETSDARQWVAFSGLDPCHFSSGTSVEKRPRISRGGSRYLRHALYMLSGVIRPFAERTTGQYRMPASVRTRLVTLHCRFIGDPS

SEQ ID NO: 273195 - protein, 341 aa, unidentified
MKDIMIGVDLAKSVFQAHGSSMTGHRHYSKKLSLLQFRKFMAEQPPAVVVMEACGSANYWAREMVHLGHEVKLIAPQYVKPFVKRQKNDAADAEAIVEASLRPNMRFVEPKTEAQQASAVLFRFREKMVKQRTELINSIRSYLFEFGHVIPKGTRHLRRVVELISDETITLPQAVRGICQDLLNEIERKTLHINATLKKINAMSHEQASLRRLQTMPGVGPITAVAVETFAPPMETFRRGRDFAAWLGLVPRQNSTGGKQRLGRTSKMGQRDIRRLLIIGAMSVVNWASRGHDMKNRWVEEMLTRKPRMLVAVALANKMARMIWAMLTNKEDYRLPVTASA

SEQ ID NO: 273196 - protein, 355 aa, unidentified
MSQNLNAAIAVIGIDIGKNSFHIVGQNQRGAIVLRQKWSRGQVEARLANIPPCLIGMEACVGAHHLSRKLASLGHDARLMPAKYVRPYSKGQKNDFNDAEAIAEAVQRPTMKFVATKTAEQLDLQALHRVRERLVSQRTGIINQIRAFMLERGIAVRQGIGFLRTELPTVLATRTDALSPRLLRIIEELAGDWRRLDQRIDGLSGEIEALARQDQACSRLMTVPGIGPIISSAMVAAIGTGDVFSKGRDFGAWLGLVPKQISTGDRTILGKISRRGNRYLRVLFVQAAWVVLVRIKNWERYGLKSWIEAAKRRLHHNVLAIALANKLARIAWAVLAKGRAFELTRTDDAGVVRPA

SEQ ID NO: 273197 - protein, 413 aa, unidentified
MADETIHWFAGVDWGSAKHQVCLLDGAGNVVGEREFAHGGAGLTALCEWVVSMAGDPGTVAVAIEVPHGPVVDALLDRGFAVYAINPKQLDRLRDRISVAGAKDDRRDARVAAAGLRTDRPLFRRVLAGDPSVVELREWSRLAEELQQERVRLGHRVRQQLWRYYPQLLALSDDVTAEWVLALWTLAPTPAQAARLREATLARLLQQHRIRKLDAPAVRGILRQPAITVAPGVTEAAVLHLRSLVARLRLANQEFHQAARKLEALCTALSQTQPGAQDSGPRDAAILSSLPGVDPVTLAALLTEAAGPISRRDYTALRTLSGVAPVTKRSGKSCIVIMRYAAQLRLRNAVFHWARVAVLNDPKCRSRYAALRARGHSYGRALRSVADRLLGIACVLLQRQVLFNPNHGAPTQP

SEQ ID NO: 273198 - protein, 267 aa, unidentified
MAHFVGLDVSVKKTSVCVVDDAGTVLCERKVPTEPDDITVLLTSIGGEYVRVGIEAGPLSQWLVNGLAEAGLPVVCVETRHMKALLTAQQINKSDRNDARGIAQMMRVGLFKPVHVKTLAAQEHRMLLTSRKLIQRKLLDIECDMRGTLRNFGLKVGMVSTIGYEARIRNLVEGFPRLAAIVEPLLTVRRVMRQQLAALHKMLLDTVRHDPVCRRFMTVPGVGPVVALTYRASVDQPQRFLHSRAVGAHVGLTPKRHTTVRTEGSGQ

SEQ ID NO: 273199 - protein, 408 aa, unidentified
MTANPQEGPIHVRGRAVVGIDIGKRKHSATAVSPQGEVLARLASFSNTSEGIDLLESEVLQKVGGPGKTLIAMEATGHYWICMYWELTRRGYCCVVLNPIQTNARMGARIRKTRTDPIDSLGIARFILSGEARATRIPDEKTIELRLLVRHRWRLVQARADMERYAQTLLDRVFPEYESVFSKPLLPSTLALIREIGIDPRQIVSRADEVRNLLRRVSRRKISDDKIDQLLQKASHSIGTQQATTLIAQQLHDIFQYFELIEKQVAQIDEQLEGRILEAGSPLLSLGIGPVLAASIHAESDSIGDFSTPGQYVAYAGLDPSVHDSGDTVRGRSKISKRGSPTLRRALYQAAFIIYRKHDYFLRRYKKYRRKGRSHTEATIIVADRLARVVWRLLTDNRPFKKRPPKKS

SEQ ID NO: 273200 - protein, 318 aa, unidentified
MKNSVWVGIDVSKDRLDVAMRPSGEACSEANTEAAIKTLTKKLKQVQPQLIVLEATGGHEYGVAYSLMIAGLQVAVVNPRQVRDFARAIGKLAKTDPIDARTLAHFAEAVQPTPRPIPDPATEELSQLVTRHRQLIEMIVAERNRGLSFRGAARRDIEVTTRFLRTRLKQIDQRLKELIEVQEEWKHKAELLASVPAVGPVLVSTVIAELPELGQLNRKQVAALVGVAPFNNDSGQMRGKRRIWGGRAHLRSVLYMAVVAGLRFNPIIREYYQRLRKTGKPAKVSLVACMRKLLVILNAIVKSGQHWNLCLGAHEGGR

SEQ ID NO: 273201 - protein, 416 aa, unidentified
MKKHSNSGKKSEPKTNRAKSRGPVQRDTKEVLAELVGKLKEKLDPKKMAATSAGEQHQRGELGPNLDRLTVGVDLGDQWSNYCILGLEGETLAEGQLRTTQEDIAEFFQALNAARVVFEVGTHSAWVQEVISGCGHEVLVANPRLMDGSKRRKRKNDRIDANKLARLGRVDPESLYPIQHRSREVRQDLVMLRARDALVAVRTEIINTTRGLVKSMGTRLPKCSSRSFAHKGEEAVAVEMREALLPLVRLAATLSADIKEYDKKIEELGREKYGHTALLRQVKGVGPITALAYVLTLANPQRFVKSRDVGPYLGLVPKQEDSGESQPQLGISKAGDTMVRKLLVGSAHYILGPFGPDTDLRRYGLGLCERGGKNAKKRAAVAVARKLAVLLHRLWVSGEVYEPLHNAMSAPIAAAA

SEQ ID NO: 273202 - protein, 387 aa, unidentified
MPQPNDSGKSLVALDQDSTLVAVIEMGQASWLVAAIVPGLNRYPLKKIATDAEQLLQVLRRWKKEAETAGRTIQRVAVAYEAGRDGFWLARWLRARGIEAYVIHPSSVPVSREHRRAKTDRLDTELLKRAFLGWLRGEPDHCSMAAIPTLTEEDAKRPGRERENLVGERTRIVNRIKGALARLGIRNFKPVLRNASQRLETLRTPEGAALPPNTLAELQRDMARLSFVKQQIKEVETTRLERLQRAPGEAGNAMVQQLTRVVGVGVETADMLVQEVFSRNLRDRKAVARYAGLTGAPDESGKRRRERGLAKSGNARVRRGMLQIAWGFLVHQKDSALAAWYRARTADARGATRKTMIVALARKLLIALWRLATTGEVPEGLILRAAT

SEQ ID NO: 273203 - protein, 463 aa, unidentified
MSEVQSGKQEPQFAAFVGIDWADQKHVWCLQAAGSEKRESGELVHTPEAVEAWVGQLCQRFANRPIAVAVEQTRGALVFMLSKYEPLHLFPVPSTMAASMRKALYPSGSKDDPRDADLLLDLLLQHRDKLRRLSPDTEATRRVQNLVEERRKLVDEKTAQTNRLTSHLKIYFPQILDWFERLDTELVCALLERWPTLEELQKVPPAKLRTFFRKHHCRDQALIERRMVAIRQAIPAIRDRAVIEAKSTVVKVIVQVIRSLVEGIADLDEKIEEAAAAHPDFFIFDSLPGAGAVMAPRLLAAFGSQRERFANAAEVQSYSGIAPVTERSGKKKWIHFRWACPKFLRQSFHEWASHSMMYSAWARSYYQQQRSKGQDHQAAVRALAFKWIRIAFRCWKDKVAYDESKYLAALARRGSPPGCSRRNSEDFVKSLWILSGQIVEVIEKIQNNCEKVLDRLPQKSEGS

SEQ ID NO: 273204 - protein, 352 aa, unidentified
MTAGLDLGDRYSYLCLIDTENGEVIEEGRLRTTPEAFRRRFASERPLRIAIEAGTHSPWASRVLEECGHEVLVANARKTRLIYANKRKTDEVDAENLARLARVDPKLLYPLKHRGESAQAHMALIRSRQALIGCRTQLVNHVRGAVKSFGARLPKCPARSFHKSASEHIPEALGPALGPILEQIGSLTERIRDYDRQLETIAKEHYPHETDLLRQVEGVGTLTALTFVLTLEDPYRFAKSRSVGAYLGLVPATDQSGDRDPQKRISKEGDEMLRKLLVGSAHYILGPFGHDSDLRRHGEKIASQGGKNAKKRAAVAVARKLSVLLHRLWVTAEVYDPLYNTHHRRQEQKQAA

SEQ ID NO: 273205 - protein, 354 aa, unidentified
MIMIGADYHPAFQQIAFVDTETGELQERRLEQPEGAEKFYRELAAQGKRVRVGMEASGHARWFERLLAELNIELWIGDAGEIRRKREGKQKTDRQDAQHILRLLLKDDFPRIWVPSWENRDLRQLLWHRHRMVQARTRMMNQLQAVALNEGLRCKKKLWREAGRKQLEAFRLAPWASRRRQDLLELLDRLNPTIAALSQAMEQEVEKCPEAQRLMTHPGVGPLTALAFVLIIERADRFQCGKQIASYLGLVPLEDSSGNRRRLGHITKQGNSLLRFLLVEAGQVTVRSLPEWRSKYVHLTMRRGRKIAKVAMARKLAVRLYWMMRQGWDYEQLKKFGSHSGQPGHRHGVKSNIE

SEQ ID NO: 273206 - protein, 379 aa, unidentified
MQLFCGIDVSKSSHKVCMKNEKLETTAGLSITNNLEGFRKVEKRVPKTAIVGMEATGEYHKPLEHWLKERGYKVYVFNPRKTKNFAKVNHSVTKTDKVDAAMLAEFMAMGFHKTQKQRENKYPELRQLTRARLALVNDQTRLKIRVLTKLAVIFPEYESMFSSNFGKTFTELLLKYTSPENFAKLSSKQLTAEIVPMSMGLLRDKKAKEIIETAKNSIGIKNEAYVEDMRISLKYIKELEKDINHLNKKIREKMHPIEQSITDTKGIDVPLAATIITEIGDISQFKSRRALFNFTGMVPMIRESGNYKAGNKHMSKYGNKYLRTAIWLCAISCINHNSEFREYFHKKHKIDKLSKMSAVGAVCRKLTYRIYHIMKNEMN

SEQ ID NO: 273207 - protein, 327 aa, unidentified
MQGKVESTISALAVYAGIDVSKDWLDVHLHPGGQSWRVANTPLGLRRLRGHLDELGVPLERVVLEATGKYHRLAFRTLSAWGYGVVVINPLRARLFAEACGVPAKTDRIDARLLAVMGHSLAPQPHQPVPLQLEQLQELVNAHYAARTEATALGNRLEQATVSFLKTELRRRLTSLKGYAKRLEAKIEQLIKADPGLAARYAILLSIPSIGSITAAALLAGLSELGRCSSKAATLLAGLAPIADDSGRRQGQRHIRGGRMQVRNALYMAALSAARHNPDLKAVYQRLRNAGKPAKVALTAVMRKLVVLANTLLTQNRRWEPNQPKTA

SEQ ID NO: 273208 - protein, 434 aa, unidentified
MSLKIVRFNCCGMDVHKDIIVATVGITDRSTMLTEYFQKTFSSFNSDLYRLCDWLSSYQCSEVCMESTGKYWIPVFNILEERGFTVCLAHPKYTKAIKGQKTDKKDSKWICDLYKHDLVRGSFIPPKEIRELRDISRYYHKLIGMNSSESNRFQNCLTVSNLGIGSIFTDVNGKSAKRVMEVVLAADDPNRISDEDLLKLIHKSCKKKDKLLDAVRGCRIESDQRFKMTEIQKHKEELDQHITNCYVEMFKRATPFFHQFLHITELVGLSVLSAILIISEIGVEMTVWENARQLCAWAGLTPGNNESANKKKSTRITKAGQFLKPLLVQCALAAIKNPDGYFGIKYRRIKKRRGHKKAIIAIARMMLISIYHMILTGESFNPSDYEELMNPKPRKPREFTIESAVDFLKSSGADINTIIASLKEAPPDQAVVLS

SEQ ID NO: 273209 - protein, 349 aa, unidentified
MALTIVKEARPVTGGVDTHAGTHVAAALDPVGGLLGVREFPATAAGYAGLLGWLGGFGTVCLVGIEGTGSYGAGLARHITAAGIRVVEVDRADRQDRRRQGKSDPLDAVSAARAAQSGRARGAPKGRDGAVEAIRTLMVARRSAAGERTRTINQARALVLTGPDDLRTRFARHTPAALITGLASLRPRTGDVAGHATRIALRELGRRAQFLDGQLQRLDELIIPLVTAHAPGLLALYGVGPHTAALLLITAGDHPGRLRSEAAWAHLCAAAPIPASSGKVTRHRLNPGGDRQANHALWRIVFTRLGSDPATRAYAERRTAEGKSKAEIIRCLKRYVAREVYPHLRPAGG

SEQ ID NO: 273210 - protein, 464 aa, unidentified
MKNNRPHRKQPASGPSLLERLNPNAAGVDCGADAHYVAVPPDRDAAPVRSFKTFTTELHRLADWLTACGVTTVAMESTGVYWIPLYEILEARGVDVVLVNARHVKNVPGRKTEVVDCQWIQELHRVGLLRGSFRPTAAIAALRAYLRHRETLVQSAATHVQRMQKALVQMNLQLSIVISDITGVTGLRMLRAIIAGQTDPHALAQHRDSRCQASEAEITAALTGHYRPEHVFVLQQNLELFDAYQRQLTACDAAIEAHVHTLAAQAPAPAVPLPAPRTRKKPRDNEPRVEIRTPLHQLTGVDLTQIDAIGPYSALRLLAEIGTDMSRWPTEKHFTSWLTLAPHNKISGGRLLSSKTLPSANRAAGILRMAAMSLGRTETALGAFYRRLAYRVGKAKAITATARKLAILVYRTLKDGLLYQDPGAAAYDAQHRLRVVRRLRQRAANLGFAFVNRETGELIEGAVS

SEQ ID NO: 273211 - protein, 346 aa, unidentified
MKHYAGIDVSVERSSVCVVNAEGKIVREGRVVTEPAALIVWFSSRGLSLERIGLEAGPLSQWLYAALREAGLAVELLETRHVRDAFKAMPVKTDRNDARGIAQLMRLGWFRPVHCKSMAAQETRAILTARKLVQSKLHDVEMSLRGILRGFGLKVGKTTRSGFASRIAELVAGNPTLQDLAKDLAEGLLTVRAVLLHQFKGFERKVRALAGADTRARLLMSTPGIGIVGAITFVTAIDDPTRFKSSKGVGAHFGMTPKKYQSGETDRTGRISKIGDASVRAVLYEAAHVILTRPLRGCSKLKSWGMRIAKRAGMKKAKVALARKLAVILHRMWIDGTAFDPARAAA

SEQ ID NO: 273212 - protein, 347 aa, unidentified
MRFYTTQHPFYCGIDLHARTMFVCILDQGGNVLVHRNMKTDPEAFLKAIAPYRQGLVVAVECMFTWYWLADLCADQGISFVLGHALYMKAIHGGKAKNDKIDSQKIAQLLRGGMLPQAYVYPAKMRATRDLLRRRMHLTHKRAELLAHVQNTNSQYNLPAIGKKIAYKANRDGVAERFADPAVQKSIEVDLALITYYDELLGNVELSILKTARHHDANTLYLLQTVPGIGKILSLVLLYEIHDINRFPRVQDFLSYGRLVKCSKESAGKRLGTSGAQIGNAHLKWAFSEAAVLFLRDHPAAQTYLARLEKKHDQGKALTILAQKLARAVYYMLKCKMAFDTETFFQR

SEQ ID NO: 273213 - protein, 312 aa, unidentified
MDAIYVGIDVSKDRLDVALRPGGESFAVARNGAGIDDLIARLKARPPRMVAIEATGGFETVVAAGLAGADLPVVVVNPAQVRAFANALGKRAKTDPIDAMVIAHFAEATKPQLRPLPDATTRPLADLVARRRQIVEMIAAESQRARRVSNLRLKKSIARLHKALEKELSELDDDIGDHVRGSPAWAEKEDLLVSVPGIGPTIARSLIAELPELGTLDRRQIAALAGLAPWTRQSGQWRGKSFIGGGRANVRRVLFMGAMVAARFNPQLKLFRDKLVAAGKPKLVAIIALARKLLTILNAILRDKTPWQHQNA

SEQ ID NO: 273214 - protein, 411 aa, unidentified
MRLFVGDDWAEDHHDVEVMSEAGKVLARRRLPEGVAGIAQLHALIGAHLDDDADGAEVVVGIETDRGPWVTAMIAAGYLVFPVNPLQASRYRERHGVSRAKSDAGDAHMLADMVRTDSHQLRPAAGDSPEAEAVKVLARTHKTLIWERTRAVQRLRHQLLGYFPAALEAFEDLDAPDALELLAKAPEPARAARLTRAQVSAALKRARRRDIPDKATAILAALRAEHLGQPAVLTAAYAAAVRSLIAVITTLNEQVKILEEQVREHFGRHPDAEVILSQPGLGPILGARVLAEFGDDPRRYRDGKSRRNYAGTSPVTRASGKKKVVAARFIHNDRLVDALNAQAFAALNASPGARAFYDELRARGIEHNDALRRLANRLVGILHGCLKTRTLYDEATAWGHRENLPQSSAAA

SEQ ID NO: 273215 - protein, 315 aa, unidentified
MTQTNITTAGIDTSKSKLDIAVYGRTERWQVPNTLPGWRLLVSNLAKTGVTRVGIEATGGYERGVVEHLRAAGFMVLVLQPMQVKAFGRVHLRHAKNDALDAILIAACAAAMGPPRIAPDPRLADLAGYLTFLEQIEEDIARFKTRLEHIDEPRLRSLVGSDIRRLKARRKAQIRTIAKLLRGHDDLASRLDLVLSIPGIGERTALALIIRMPELGQVSREEAAALAGLAPFDNDSGLRKGQRHIAGGRGRLRKSLFAAALPAAFRWNKALIALYARLIANGKAHNAALIACARKLLVYANTVVQRGTPWVENAA

SEQ ID NO: 273216 - protein, 350 aa, unidentified
MMIGVDYHPSFQQIAFLMEETGEYSERRLNHGDGEADKFYRDLQRRGVHVRVGMEATGYSRWFERLLAELGFEVWIGDPAEIKAKRVKKQKTDRQDAQLLLKLMREDRFPRIWVPSPENRDVRQLLWHRHRLVQMRTRIMNQLQALAMNEGRRWKSKLWSEQGRAELEKLALAPWASRRRHELLELLDRMNPTIEELTAAAEQEARKRPEALRLMTHPGVGPLTALAYVLIIGTPSRFHRGKQIGNYVGMIPSEDSSGGKQRLGHISKQGNSLLRFLLVEAAQAAVRNNPDWRRRYIHLAMRRDKSIAKVAMGRRLGVRLYWMWRNGCEYSPSMEFGSYAGQLGTGHGVK

SEQ ID NO: 273217 - protein, 386 aa, unidentified
MHHATTLPVSEQSDSRGDNAPLFVSLELSRSTWVATSLALGSRKMSKHTLAGGDGRKLLDLLAGLKSRAERRAASPVKIVAIQEVGLDGFWIHRLLEANGVESHVVDPASIAVPRRHRRAKTDAIDGETLLRTLMAWQRGEPRVCAMTVPPSRSEEDRRRVSRERAMLLRERIRHTNRIRGLLFGQGITNYNPLHKNRRNGLEELRTGDGHLVPPHLKAEILREIDRLELVLRQIDEVEAERDEMLRSAQASSPVALLMRLKGIGAEFAAVLYLEGLFRHFENRRQLAAYAGLAPSPWKSGSVDHEQGISKAGNPRLRTTMIELAWMWVRYQPASALSCWFRQRVGSERGRIRRISIVALARKLLIALSRYVTHGEIPAGAVVKPV

SEQ ID NO: 273218 - protein, 342 aa, unidentified
MDHFAGLDVSVKETSVCIVDDTGKIVREVKVASEPESLLAVLKNPAYRFKRIGLEAGPLSQWLYSALAEAELPVVCVETRHMQAVLKAQINKTDRNDARGIGQMMRVGLYRPVHVKTLRSQKLRMLLTHRKLLQSKAIAIENDLRGTLRNFGLKVGVVGKVRFEARIKELVENLPDLAALVEPLLVVRRVLREQIVILHRRLLAIVRDDEVCRRLMTVPGVGPVVALTYRATVDVPARFRKSKAVGAVFGLTCSKYQSGEIDRSGRISRCGDEMMRVMLYEAAQSMLHSKKWSWLKAWAMQIARRRGIKKAIVALARRLAVILHRIWFDGTEFRWTRKVVAA

SEQ ID NO: 273219 - protein, 364 aa, unidentified
MKGADSGSAGIARSLTIGLDLGDRMSQLCVLDSMGEIVEETRVATTKSGLTRVFDVERLGKCRIAMEVGTHSPWVSRLLREMGHEVLVANSRKLRFIYQNRGKTDRVDARSLARVARMDPALLSPVKHRDEEVAQDLAVLRARDLLVRTRVKLIGHTRGAVKSAGHRLKASSTRSFTAETESMLPEELKETLGAVFSAIDAISEQIRALNQRVREMAKTKYPETGLLRQVHGVGFILSLAYVLTLETPDRFEKSRMVGPYLGLVPARRQSGDSDPQLRITKEGDGFMRSLLVQGSQYILGPFGPDCDLRRFGLALEGRGGKYAKKRAVIAVARKLAVLLHKLWRSGEVYEADRRLALLPEPAKA

SEQ ID NO: 273220 - protein, 412 aa, unidentified
MQAVLKSCCGLDVHKALIVACLMTEDENGKVTKESRQFATMTEDILEMKLWLLKNECFHVAMESTSVFWKPNFNILEDTLSVMVVNARLIKNVPGRKTDLNDSEWIATLLRYGLLRNSFIPLRDIRDLRDLTRYRVKLVQNATSEKNRLQKIIEDANIKISSVLSKTFTVSRIEMIQVIIKGDSTPEQIADLARRRLRSKIPELIKALRGHVTDHHRFMLTEVFDHLNYLGERIAELERMIEDKLELYRNIFDLLITRPGISNHCAASIIAEIGVDMSIFQTPKRLASWAGVCPGNNESAGKRLSGKTRKGDNWLRVTLTEAAWAVSKTKKNYLSEKFRRLSYRRGQKRAFTAIAHKILCITFHVIEKKEPYKDLGPDYLEKIHNNNSKRNAVNRLKSLGYEVILTPVNAVS

SEQ ID NO: 273221 - protein, 370 aa, unidentified
MKKQTKTTPSVVLTSPAAVVSGFTLGLDLGDRSHHVCVLDAAGQIIREGALSNTRPALAKLLADFPRATVAMEAGTHSPWISRYLTGLGAHVLVANPRKLHAITRNERKCDRRDAQMLARLARVDPALLHPIEHGTAQAQHDLLGLKLRDALVRARVNLINAVRFTLKSLGHSVRNPSCESFHKTVLADIPADCLTVVQPLIAVLAQVTEQIKGMEHDLVQRGKKDYPVTQRLQQISGVGPLTALCFVLKIGDPQRFGRSRDVGAYLGLCPRRDQSGGTDKQLRISKCGDGLMRRLLVSAAHYVLGPFGPPCALREHGQRLSGTGSAREKKRAVVAVARKLAVLLLSLWKHGTDYEPRATLAPALVMTPA

SEQ ID NO: 273222 - protein, 409 aa, unidentified
MVVGIDIGSTTQYARAFDWRGIELGKVFPFSNSREGFESFKAWMQHLQDKYKKLDAIVGIEPTGHYWFDLGAYLEDEGILLVMVNPYAVKQTKELDDNSQSKNDRKDPKVIAKLVTEGRYSAPYTPDGVYADLRIMVANRKRLIREMTQIKNRFARWFAIYFPEYTDVFGDYEAQSSMLLLKKVCTPEAIVELGAEKINQIWRDAKLRAVGMKRATTLCETAKRSIGLKKGSSAARYEMKLLLEDYEYKKAQMDAVMEEIEKLCRKIPESEQMLAIKGIGVITVAGFLAEVGDVRRFESPRQIQKLAGLSLRENSSGKHKGQTTISKRGRSKLRAVLFNAAIPLIAKNPEFKSLHEYYTTRANNPLKKKQSVIAISCKLIRVFYAILAKGVTYDAQKLISDIHRQPQVA

SEQ ID NO: 273223 - protein, 430 aa, unidentified
MKSNTQNAKIEAITEKTLVLGIDVGSEMHYARAFDYRGIEYSKKPFKFSNTEAGFVTFKEWILDLKERHEKDKVIPGMEPTGHYWFNLGKFLQDNEMKPVLVNPHHVKKSKELDDNNPTKNDRKDPKVIAGLVREGRYMIPYLPDGVYADLRTASNIRFQLQAELTRIQNRISRWFNIYFPEYKTVYGKPDAKSGMLILKAAPLPEDILTLGIDGVNQIWRDAKLRAVGKARAKILIEAAEHSVGSKEGAVSARMEIRMLLEDYESRNTRLQEVMVLIEELIRKIPMAEKLLEIKGVGIRTVSGFLAEVGDISRFNNPKELQKLAGLALVENSSGKHKGETTISRRGRKRLRYLLFEVAMSLVSKNQEFRGLHNYYTTRRLNPLKKMQSLMAIAAKLIRVFYAMLTKGVDYDPKKMVSDIKRPAVYLQAA

SEQ ID NO: 273224 - protein, 459 aa, unidentified
MVQKLGLTAKRQSKKQKSKGVQLHVLQANAAGIDVGASEIYIAVPEDRSDKPVRRFETFTDDLHQAAKWLKKCGIKSIAMESTGVYWIPVFQILDAYGFDVVLVNARHVKNVPGRKTDVQDCQWLQYLHSVGLLRGSFRPAQEICAVRSLFRHRDAMIKSSSSHIQHIQKSLTQMNLQIHNVISNIVGVTGMAIIDAILGGERNPETLAQLKDRRIKADHQTIAKSLTGDYRAEHLFTLKQSVQAYRNYRQMIQDCDAEIERHLKEFESRINPDKPTGPPSKPARKKIRQNEPSFDLKTHMHRILGTDLTQIDGISDLTAHVYFTEVGPDLSKFKTDGHFCSWLGLCPNNKISGGKILSANTRPVSNRLAQALRISANSLWNSKSYLGNFFRRMRARHGAPKAITATAHKLARIIYHLVKNQKAFDESVFAQEEKNHQDRLKKRLISQAKSLGLQVVPA

SEQ ID NO: 273225 - protein, 341 aa, unidentified
MSQQQTSMKRTIVGGVDTHKELHVAAVVDEHDRILGSASFPTTRHGYKSMLGWMRVFGTVDRIGVECTGTYGAGLLRYLQHANITTLEVTAPDKTARRKRGKDDTIDAENAAHAAFAGIRTVTPKTRDGMTESLRVLKVCRKSAVAARRVALQMIQMQVVSAPEALRDLLRNMTRMQLIRTLAAWRPDLTGFRDVTTAYRIALKSLARRYLELHDEIADLDVMIAAIVDELAPDLIARCAVGYESAAQLLITAGDNPERLRSEASFAALCGVSPIPASSGKTQRHRLNRGGDRAANSALHIIAIGRLRLDAITQDYVQRRLTEGHSKLEALRCLKRYIARE

SEQ ID NO: 273226 - protein, 386 aa, unidentified
MEAIVRTRPVLGVDVGKQSHWCCLVTADGEVALNAPVANRERDIDELLASLPGGTLVVVDQVRNIGSLVLKRAEAAGLERAYLPGIAMHGASKLFAGDTKTDERDALVIAKTAIGIPDSLLPVPKANAATDAARAMASQRDFLVTCATRDKNRLRSILLESCPAFESLVDLSEPHCLRMLAELGGPWQILDAGKASLGAVTRGANRASVDALWESIPTSTRPDGLRIEAEGASVRLLAKRISEATAECARLDAAISALLESDATYRCLLTVPGIGPRTASELVIGVDIAEFDGHDKLASYCGLAPRNRQSGTSISSVTASRQGNKRLKNLLIFSCNSLARSDNRFGDFYRKCRDRGMPHGKALKAVARKRLKVIYAIMRDQVPYAV

SEQ ID NO: 273227 - protein, 415 aa, unidentified
MWGATTSSAGQNNEALRRPLHVLCAGWTCRNRRFPLVLIQEPDELGRKGGDTATKAPALVTSPERVAHAPKERIYVGLDIGYREHVAAASPLSVFNVGRNPDGWKRVKPIHFASDAAGFGRFQRYLDRHSPDPRDFLILLEPTGSYGLTVLLYLLGKGYRVLQVENRAVKDYREKIFGSETKTDDTDARLMARMGFLHELVGEEFSIQPVLLMNPDAAALRGMVHDLAKLQKEITRRRNQLQQMAALTFPELKTFFKGSTAAPAARALLEYFATPQELATASTEHVAEVLRSAHAYSHATRAAELQALARATAGVPTLTHHQWRQAWLIKQLSVVERARQELVEEVALATATHPYTRVIESLPVKSPIWTATLIGAIGDVDRFSNVNQFKAYLGWSPQLTRSGSSVDHRLRPSDM

SEQ ID NO: 273228 - protein, 324 aa, unidentified
MIDAILGIDVSKNTLDVSISSCTKVRTKSFANSSDGWHHLLDWLIAQKIQRVHACLESTGRYSLGIACSLYEAGHVVSIINPAQIRDFVRTKLGRNKTDGIDASRIREYCELFKPSPWAPPSEAHRRLGELQTIRAGIIAGLTEWKNRKNSGIVDTEAQALADATILHFTSQLGAVDKAIALTIDNDSDLRSKRDLLLSINGVGDTLAGVVLAELPGPDVLRSSGEVVAYAGLNPRQHQSGTSVDRATRISKIGNAILRAALYMPALSAMRYNPVIVALVTRLKSRGRLKPKQIVVAAMRKLLVLCFGVLKTGKPFDPAIAMGC

SEQ ID NO: 273229 - protein, 370 aa, unidentified
MRKTTKIVALDQHMESMTVALLGSRQKMPVIYGDIANRPEAVAKLARRLDDGKTRLRFCYEAGPCGYGVYRQVTQMGHECAVVAPSMIPRRPGERIKTDRRDAASLARLHRLGDLTPVWVPGEEQEAIRDLVRCREDAKHAERRVRQRLNSFLLRHGRVHSGRSRWTQAHFRWLEQQAFDHSAQQIAFEEYVDAVKDAGQRVAQLQTEMVRALEGWSLEPVVRGLRALRGVDLIVAMTVMCELGDLTRFDSPAQLMAYVGLVPSEHSTGRSRRQGAITRTGNAHVRRVLAQSAWCYNHPARKTTALQRKAEQTSPAVQEIAWKAQKRLCHRFHSMTARGKASCKVATAVSRELLGFIWAIACETMPRQGA

SEQ ID NO: 273230 - protein, 423 aa, unidentified
MKYALVTFLPGVPPGGVCAGIDWADSGHAVCVVDLGGRVRDRFTVAHDRAGIAALIARLGENRAAEVAIERGDGVLVDALLAAGLTVVVIGSRQVRNLRSRYGSSGAKDDRFDAFVLADTLRTDRARLRPLVPDTAATLALRAAVRARKDLVTHRVAACNQLRAHLQVAFPGAVGLFHVLDSRLSLEFLAAFGSCRAAAGLDEQAITAWLAGVPRRGRTAPPAVLAARLAAAPPGCGDDAAQAAVTAQLAGAVAGLAARIKALEEHIAAQLAAHPDAHVFTSLPRAGTVRAARLLAETGDCRARYPDPWSLAGIAGIAPVTRRSGSYLSHHFRWNVNRHLRDAICDFAGDSRHASPWAAAIYTAARDRGKDHPHAVRITARAWIYVIWRCWQDHTPYDPAKHTALQAILTRQDTTQHNTASKP

SEQ ID NO: 273231 - protein, 355 aa, unidentified
MLYLGIDQHARQITISLRDESGDVLLARQVSTQPPKINEFFLQLTRETLRNDERFIAVLEVCGFNDWLIRMLYDYRCHKVILIQPEERKNRKTDRRDAATLSELLWVNRDRFLQGKPIRGLRQVDISSTADRENRRLTTLRKNAGRVRTRIINTLRHILRRHNLQWEMPTKTFPTRLAIAWLKKLVLPEIDRLELDLLLADLEHMERRVEKLENVIGQRCCSREDVVILSSIPGVAAFTATSLACRVGRVERFPRSRSLANYWGLTPGCRNSGENDQRLGHITKAGSSMARWLLAQVTQKVLRKDARMREWFKRIKRRRGVSVARVAVMRKLCTIIWHMLTKRKTYAQCRALAAA

SEQ ID NO: 273232 - protein, 417 aa, unidentified
MNQISENSFTAFVGIDWADTKHDICIQAADSLHREFGRLPHQVDDIEQWAQSLHQRFPGLIAVAIELSKGPIVYALQKYDYFVIFPINPSTLAKYREAFQPSRAKDDPRDAELALELLLTHPEHFEPLQPQSVEIRALTTLVEHRRTLVNERVRITNRLRNTLKQYYPQSLEWFSRIDTLLFCDFIERWPTLTQVKRARRSTLEGFFNSRNARREDLLEMRIKAIKSARPLTLDEAVILPNKLQALVLVEMLRLLLNSIKKYDKEIAELAAAHADFYLFSSLPGAGPSLAPRLLVAFGEQRNRFSSAADLQKYSGVAPVTERSGKKHWVHWRWQCPTFIRQTFVEWAAQTINKSYWAGEYYQQQRGKGCTHQAAVRSLAYKWIRILYRCWQTRTPYNEAVYLKALERRGSTLLKTAA

SEQ ID NO: 273233 - protein, 353 aa, unidentified
MEKQLLKYSLGIDVGKDQLDCCLSVIDTTQQVTIKGKRKFTNTLSGHKELHQWTQKQYKQSGIPLHVCMEATGVYHERCALFLESQGMRISVVLPNRARSYLKSLGLKSKNDKIDAIGLSQMGAEQQLDPWSALAKEFYQLRCLTRQHEDIQESITAHKNQLHAASYGMFKMPEIEKQYRKIIKELTAVLEKIREAILSLISNNDTLKQKVDLLTSIKGVGTLTAATVIGETGGFETFENIRQLVSYAGYDVVENQSGNRQGKTKISKKGNAHIRRILYLPALSAVTCQIKPFYDLHQRVFERSRITMKGYVAVQRKLLCMMYTLYKKHQYFDAEYQPCLLVDCQQTSHSTVA

SEQ ID NO: 273234 - protein, 315 aa, unidentified
MEKTTPAPEATYVGLDIAKDRLDYTVDGQRCDHVPNTASGHERLLAALAPLRGVRVICEATGGYERAVVAALLLAKLEVCVVNPGRVRAFAHAEGLLAKTDRLDAQLLRRFGAKVRPRLHAPMDQAAITLRELLDYRRQVSDQLVAARNRRELAGPVLRARLDGQVAFLEKELAATDRLIGDHIDHDDTLRRKAARLRELKGAGPVLAATLLAYLPELGEIESPQLSALVGVAPFARDSGRSRKARHVRGGRGVVRHVLYMAAVAATQHNPVLRAHYTRLVAAGKPKLVALVAVMRKMLHVLNRLLADPHFVLVR

SEQ ID NO: 273235 - protein, 417 aa, unidentified
MRFLKLTLKGFIMFYVGIDVAKEKHYVCILDNDAEFAIKPFWIYADILGLQELEKRLASVSLNRDDFIIGIESTGAFSENFYGHFTDSGYKVILLNSYQTAKYRDFSTMKKIKNDAIDAYVIAELLSTGKYKSSHISNDDYHSLKVLGRLKSSLYKKIKTIKREISTVMATVNPEITKVFPNLFSKTALEIIKAYPTATQLQKATPKKLTKLFRHIKGNNFSEEKAKLLIELAKSSVYTGRACEARALMIQTNITILELLSQEKSKVESQINELISNQIDNSPCSIIENLKTIDGVAIKTIAVLLGECGDISRFKSSKSFIGYLGLYPTQYQSGNSLSVGRLAKRGIPIAKHALFMAAVASVRHNMQLNKLFHDKVSAGKSKKEALIIVAKKLATIIYSICKYNKPYEPSRVFLPRK

SEQ ID NO: 273236 - protein, 347 aa, unidentified
MSISMIGLDTAKSVFQIHGVNETGKVEIKRKLRRSELIAFFEKQESCTVVMEACGAAHHWARMLTGLGHTVKLIAAEAVKPFVKKGKKNDAADAAAICEAASRPDAKFVPAKTVQQQGILALHAARSLLVKQQTMLANAMRGLATEFGITVPKGIRKLDELMTLVDADEVIPKQAKQAITGLHDHCNDLSEGIETFEAEIVVHARHDDTARRLATIPGIGPITASLIAATVADISLFKTARQFAAWLGLVPRQNSTGGKTRLGRITKTGNREIRKLLVLGATSMVYRADGWNSAVGGWLRNILERRPVRLVTVALANKMARIAWAVMTRKEVYRPKGGVAVAAQAAA

SEQ ID NO: 273237 - protein, 320 aa, unidentified
MNKHSMIFIGLDTHKEFHEVAYCEEQRGATAVHYGRIPSSKISLKKLIRQFESKYPGATLHFVYEAGPCGYWIYRLITSLGHCCYVVAPSLIPKKPGERIKTDRRDSLKLVRLLKSEDLTPIYVPEPADEAVRDLSRARETAMKDLKEAKYQLKALLLRNNIRYEGTHLRWLTELILPHPAQHIVLQEQLQTINERTRRLERLDNELTHHVHQWRYYPVVKAIQTMRGVRLLVAVGVVAELGDLQRFDHPRKLMAYLGLVPSEHSSGGKRHLGAITKCGNGRARRLLIEGAHSYRYPANVSTELQLRQEGLPKDIVDIAW

SEQ ID NO: 273238 - protein, 410 aa, unidentified
MRLFVGDDWAEDHHDVEVMNEAGKVLAKKRLPEGAAGMAGLHELIGRQLGDDDAAEVIIGTETDHGPWVGALVAAGYQVFAVNPLQASRYRERHGVSGAKSDSADAHMLTDMVRTDSHQLRAVAGDSAEAEGLKIVARTHKTLIWERTRQVQRLRHQLLDYFPAALEAFDDLDAPDTLELLARAPEPARAAKLTRAQVSAVLKRAGRRKITERATVILTALRGERLDQPPAVTAAYAVTVRSLIAVITTLNHEVKTLQGQVEADFGRHPDAEAYRSQPGMGAVLGARVLGEFGDDPHRYADGKARRNYAGTSPLTRASGKKKVVAARFICNDRLIDALMAQAFSALNASPGARSLYDELRARGIEHNDALRRLANRLVGILHGCLKTRTLYDEATAWGHRQNLPQPSVAA

SEQ ID NO: 273239 - protein, 365 aa, unidentified
MDTIYIGVDFHARQQTICYLKIETGELVTCELKHQDKEQVRAFYKQFQGHVIIGLEASGYSPWFEAMLEQLGCEVWLGHATEIRRRARWRQKNDRRDAELILDLMLHHEFPRLHRPPVQSREVLRMLRYRQKLIKLRTMSKNSLQAIALQAGLAKGSGLFTKAGQQELSTAEMTPVMQWQREHWLQLLKPLNQQLLETMVWFKAQSKGDISITRLRTHPGIGLLTSLCILHTLQPVNRFRNTRKVAAYAGFDPVERSSAERKCFLGISKAGSRILRYLLVEAAQTAVRKDEDLKRFYKRLAERRGRPKAKVAAARKLLIRAYIMLRDEIDYAEFRRRAVAARLARRGHRPNVPEVLIGQPASPVQ

SEQ ID NO: 273240 - protein, 396 aa, unidentified
MTVVVAIDVGKNEFAVSVTDAARRRLLKPRLGCPMTAPSVREVVGRISRLLPTGAVVKVGIEAAGHYHLPLLAAAVWPTGWELLELNPAHVTEQRKVLGKRTIKTDVIDLEAMTELLLAGRGLPVTATEAVLVELTAWSAHRTRRIQIRSGLKNQLLGQLDRSFPGLTLALPDVLGTKVGRLVAAEFADPTRLVALGSSRLIRFGATRGVQIRKPIADKLLDAARDALPMPDAAIARQVLAADLALASDLDRQVAQAEVELARLLPLSPFRTLTSVPGWAVVRAGNYAGALGDPARFSNPRQVYRSAGLNPIQYESAGKRHDTRISREGSVELRRALIDLGMGLWLNEPAATARAVELRARGKKGGVIACAMAHRANRIAFAMVRDQAVYDPSRWT

SEQ ID NO: 273241 - protein, 337 aa, unidentified
MAYYIGLDVSVESTAVCVIDAAGCVKKEFSARSHPEGLANALDPFSDEIAGIGLEAGPMSGFLVEGLKQRGLDSVLMETRRVHAALSAIPVKTDRRDARGIAELLRMGWFQPVYLKTPAARDLRLMLSARDSLGRRIRELDNSVRGLLRGFGLRVPTGARGRFCDLVRDLIAGNPVLEAAIFPLLSARDKMAAEFAKLDKLVRDQSRNDDVCRRLMTIPGVGAVVAMTFRAAIDDPTRFRSSKSVGACFGLTPRRYQSGETDRVTSITKAGDASVRAALFEAAHVMLVRTTRWTPLRAWAMRVAARRGAKRAKIALARKLAVIMHRMWIDGTEFKTA

SEQ ID NO: 273242 - protein, 366 aa, unidentified
MSGHRTSVGLDVHARSVVAAALDGATGQVWQARFGGPHEVDPLLAWLGELPGPVATVYESGPTGFGLYRALTAAGVTASVAASSKLLRAPGDRVKTDRRDALLLARMLHLGEVTQVVVPSVAVEDARELVRAREDVRGVLQAGRQRLSKMLLRQGLLYPGATTWTLAHDLWLRQQWREFQRSGGPGLAAAFEDAYTGMMQAKQRRDALDVRIRQAALEGEFSDLVTRLCCLRGIDLITGLALVVEIGDWDRLTGARIGSYLGLVPSEYSSGASRAQGGITKTGNSHARRLLVEAAWHHKKPYRPGPALQARWAKAPGPVVARADQANRRLNGRWAAFEARKKKRTTAVVAVARELAGHAWALAVMD

SEQ ID NO: 273243 - protein, 420 aa, unidentified
MRNAGIHANSLLEVRRMYNAVGIDVSKSKSTVAVLQPGGTVIRKPFDISHTSQNLNELADYLSSLDGTTKIVMECTGRYHEPMVKALSEAGLFISIVNPHLIKNFGNNSLRKVKSDPADARKIARYTLDNWTELRQYSGMDNTRTQLKTLNSQFSFFMKQKVAAKANLIALLDNTYPGVNKLFESPTREDGSEKWVDYAYSFWHADCVRKIGLKAFTERYMSFCKKHHYIFQQDKPEKLFNASKELVAVFPKEKTYKLLIQQSIQQLNLASEHVERLRREMNELASTLPEYSTVMGIYGVGKTYGPQLIAEIGDVSRFTHREALTAFAGVDPGVDESGQHKSKSNRASKVGSARLRKTLFQIMTTLLQNAPEADPVYCFLNKKRSQGKPYYVYMTAGANKFLRIYYGKVKECLRNLEQTE

SEQ ID NO: 273244 - protein, 348 aa, unidentified
MYPFYLGIDLHLKRTYVVLIDAEGEIIDQRRLLNTEIPEYLDQHVPHETYAVLEATRNWPFMYDLLSDHVDRVELAHPKEVKAIANAAVKTDRIDAGVLAHLARLNYLPTAYAAPKEYRDLRLYTRHRSWVIKHRTQAKNRVQAVLAGYNLISPVGDLFGVNGREFLYEVTRDLRPAAQKVIADNLILIDQLNVQISDLEREIPMTKEQAKKIKLLMTMPGIGKVSAMTVIAEIGQISRFKSAKSLCNWAGLTPRVRKSDAIVRHGKISKQGSAYLRSAMGQAAMVASRFSPRWYRVHERLVKTCGKRGAKVAVARRLLTVIYHMLKKSETYQEDYPGEPVELQGAQT

SEQ ID NO: 273245 - protein, 358 aa, unidentified
MAGKVTETAVVGGVDTHKDLHVAAVVDQNNKVLGTQFFSTTRQGYRQMLAWMTSFGALKRIGVECTGTYGSGLLRYLQNAGLEVLEVTAPDRMERRKRGKSDTIDAECAAHAAFSGIRTVTPKTRNGMIESLRVLKTCRKTAISARRVALQIIHSNIISAPDELREQLRNMTRMQLIRTLGSWRPDASEYCNVTNVYRISLKSLARRYLELHDEIADLDVMIAAIVDELAPELIKRNAIGYESASQLLITAGDNPQRLRSESGFAALCGVSPVPVSSGKTNRYRLNRGGDRAANSALHIIAIGRLRTDDKTKEYVARRVAEGHTKMEAIRCLKRYISREVYTLLRNQNRQINSIPITA

SEQ ID NO: 273246 - protein, 410 aa, unidentified
MAERFVGIDVALREHRIAVLDRDGEAVGQSFTIAASKDGVATLLRTLDARDATAAQTLIGLEASGHLWENLEAALVSTGYRVIVLNPLQTRRYRDVVRRKAKTDDIDAHVIAGLLRSGAAQASYVPDEQIQSLRELARLRARLMADRQDYLRQLVAQLDVVLPEHRAVLGDLLTARARGILAQFPTAQHLATANPRAIRRAAEDAGARGFSLDDATGVRDSARRSLYSGKAAAARAHVVRTLVSQLERLTSAIDEVDRAATALLPPSEPGTGPSDAELLQTIPGIGPQTAATLLGELGALTRFTDARALVAYVGFYPVINQSGDRAATPRLSRVGSRLARHSLYLAAVNAVRRSGEWRTIYLRKKSQGKTGKQALVVVAVKLLHAVYAMLKHRQPYNPSRLLVASATIGT

SEQ ID NO: 273247 - protein, 313 aa, unidentified
MKASPVYIGIDASAASLEVAAHPGGEIWTVSNDGAGISEMVERLQAMKPALVVLESSGGVELAVTGGLATAGLPVVVVNPRQVRDFARATGKLAKTDAIDARILARFAAAVQPEVRPLPDESAQELNALAARRRQLVEMVVAEKNRLRTARARVAKQIREHIRWLEHCLEEVDRDLGDLIQASPIWRAKDDLLQSAPGVGPVLSITLLASLPELGELDRRQIAALVGIAPLNRDSGAFRGRRTVWGGRGHVRSALYMGTLVATRLNPVIRTFYLRLLAAGKPKKVALTACMRKFLSILNAMVRRQEAWTPRLT

SEQ ID NO: 273248 - protein, 356 aa, unidentified
MSYDVKYIGMDVHKEAIVIAVLNEGGKLVMESVIETKASSILQFIHGLRGELHVTWEEGAWAAWLYDLLQPQVQHIVVCNPRRNALLKEGSKSDKVDARKLADLLRTGMLRPVYHGENGLRTLRELGRSYQTISKDLTRVMNRLKALYRGWGIPCAGTQVYGPRYREQWLNKIPQAGVRRRAELLYQQLDGLQALRRHLRPEFLAESQKHKASKLLRQIPCIGPIRAARLIALMQTPHRFRSKRQLWTYSGLGIETHDSAQFRFVSGQLQRSRKPQQIRGLNRNHNHEMKEIFKSAATRASWGRGPFHDFYAGLLAKGMKPEMARLTLARKIAAITLTLWKKEERFDAEQLKTQAA

SEQ ID NO: 273249 - protein, 343 aa, unidentified
MQTVSTIGLDIAKSVFQVHGIDAEGKVMLRRQLKRRYVLAFFQKLPPCLIGIEACASSHYWSRELQALGHSVRLMPPAYVKPYVKRQKNDMADAEAICEAVTRANMRFVPIKTPEQQSGLMLHRTRHLFIRQQTSVINAIRAHLAEFGVTAPVGRKGIEELLRVIADPSDKRVPDVVRACLAALGSQLISLKKQILDFDRMIMAWHRCDQTSKRLNCIPGVGPLLATALVASVADPKVFRSGRNFSAWIGLVPKQHSSGGRARLGSISKKGDRYLRSLFVAGAFAVIRYAKLHGTKYRPWVAALLARRPTKVAAIALANKLARMAWAMMATGERYNYPASLRV

SEQ ID NO: 273250 - protein, 320 aa, unidentified
MMAHSEVVVVGIDVAKDKVDACIRSQSPIRTFPSTSEGRRQLTSWLRGCKVGKAVMEASGGYERDWARTLRKAGIDVRIVDPKRVRSFARSAGRLAKNDAIDAQMIAWFAETFTDAPGQVCDAEREKLAQIVNARLHLIDLQTSLQNSSEHSSPDVVQKMQARLLKKIALEIARLEAAAAAMIKANPQFAECAEIIESVPGLAGTSSAGLIAIMPELGEVNGKIASALLGAAPYDDDSGKRRGERHIKGGRRRIRNLFYMACLGAATRHNPVLKAFYQRLLAKGKEKKVALVACMRKLIVILNVMLARRQKWNPALHALG

SEQ ID NO: 273251 - protein, 386 aa, unidentified
MRQPNDLSKSLVALKQDATVIAVIEMGQSSWLVAGIVPGVERQPLKKLAVNEAALLQLLHRWRKEATQAGRTIKRMTVAYEAGRDGFWLARWLRAHQIEAYVIHPSSVPVSREHRRAKTDRLDTELLKRAFLGWLRGEPNHCSMAAIPTREDEDAKRPSRERASLVSECTRIVNRLRANLARLGIRGFKLTLARAMDQLTALRTPEGIPLPANTLAEMRRDLARLCFLREQIKEIERARAERLEQQPAHHSTERVRLLSRVVGVGIETADMLVHEVFCRKLRDRKAVARYAGLTGAPNESGQKRRERGLSRAGNARVRRGMIHIAWGFLVHQKDSPLAMWYRARTAGGRAGLRKTMIVALARKLLIALWRFVTTGEIPAGLALRPV

SEQ ID NO: 273252 - protein, 375 aa, unidentified
MKEHSEAFVGFDTSKLRNAVAIADGGRGGEVRFFGEIENTAEATAKLVRKLAGQYERLTFCYEAGPTGYGLYRQITGLGHECNVVAPSLIPKKPGDRVKTNRRDAVSLAKLLRAGELTAVWVPDEGHEAMRDLRRAREAAVNDLRAKRQQVSAFRLRLGRHYPHQRKTWTKAHLNWLASQKFAYPQQRFVFEEMMLAMRQAKERLTRLEEAIGGAVPEWSLAAVATALMAMRGIDLISAATLLAEIGDLSRFRTPHELMGYLGLVPSEDSTGDTVRRGSITKAGNGRARRMLVECSWSYQHPPRVGAHKQHKVDAAPPAVREIAWKAQCRLHKRYRALIRRGKLKTVAITAVARELAGFIWAINRQITTACGAAR

SEQ ID NO: 273253 - protein, 361 aa, unidentified
MSTIADDDVRVIAGVDTHKDFHVVVVLDELGRKLDTASFATTTRGYRDLTAWVTSFGEVLALGVEGTGSWGAGLCRHLRARGLNVIEVNQPDRHRRRRRGKSDRIDAEMAARAVLAGDATAQPKAGDGPVEALRQLRLARAGAMKARTAAANQLHSVCDTAPEPVRSQLRGLTTRRKVKLAARFRPGDPLTPIGGAKRALVTIARRWLTLDAEITDLNHAIKQILDAIAAPLLEHHGVGYETAGALLCTAGDNPDRLTTESSFAALCGTAPVPISTGNSQRRRLNRAGDRRANSALWTIVMVRLRSRHAPTLAYLERRVSDGHSKRDAIRCLKRFLARELYTDIQAITRANINQSALENAA

SEQ ID NO: 273254 - protein, 375 aa, unidentified
MSKKLSRLGCGIDTSKKDFYACFGGSRLDGSFVVKGSRKFDNNSSGIKQFIEWLNKKLAKHNTDSDLPFQIIMEPTGVYHEDLLAKCYEESLPVCLVLAQRVKFYLLSMGQISKTDKVDAKGICKMACQSKQKQWQPSSPNIMKLRSALRHRKSLLDSQTRYKNQLHARKHSSWSGYSEEESLQRMIAIIDEELAAIEKIIKKLYKEDKVLRGRLQKIIDSVHGVGLITVLTVVAETNGFTEVRSQKQLTRFAGYDIIQNQSGQREGRTKISKRGNSRIRAVMHMSSLTAIQKQGPLRNMFLRIFRRNPKAKMKAYVAVQRKLLLLIYSLYKKDEAYDPNYHKILQKEMGGEQKSSPHLKSGLHGIDVEKSTLPI

SEQ ID NO: 273255 - protein, 346 aa, unidentified
MRILALDLGKYKTVACEYEAESGRHRFATVLTTPKALHDLIVDREPQRVVIEICSIAGWVSDLVRSLGIELQVANTSDERWQWRKVKQKNDRRDALKAAQLSAVNQLCPVHVPELTMRQWRALIAYRYKLVQRRTKVKNHIRDLLLREGQLLPRGRAAWTQAGMATLAAIAQPFTTVDSDQLWRGELGIELAQLTQMQLQIQEVEAKLDELAAADVRVQLLRTIPGVGPRLAEAIVTMFDDVTRFTTAGQVGAYLGMVPKQFDSGERERSGRITRHGNRLVRSLLVEIAWASLRHNPWARQTFQRISGGKKSRRKIAIVAVGRKLLVRCWGMLRHQTPWDWQTSGA

SEQ ID NO: 273256 - protein, 400 aa, unidentified
MDYLYVGVDLHKKKHVAVLCNCVFDKIATFKIENTPSKFPEFINKLEQYTNGQNVIFGLEDVSFYGRSFAKFLIQQDYIVKEVNSSYTKKKRKSGTNRNKTDEIDALAICKNLITEYENLPFANPKDIYWTIKQTLSIRNNYVQMMANIKVSLHNLLVHNYPNYKSFFKDFDSKTSRGFFDTFPNPDLLMEMDNEELLKILKQFNKSTPAKKAEEILVVVKEHGCWENGYKEERNNVIRSYISSLNYFEDKVLKLEQQLDTLIEETGYPLKTIPGIDTIVAATLIAYIGDVNRFSNSGKLAKFAGIAPVVHSSGDTSKKFSNTRDNRELNTAFYSLALTQIRQEVNPIMHEYYQKKRKEGRKKKQAMVYVERRLVNIVFSIMKNKRPYVQPEPKENKEIA

SEQ ID NO: 273257 - protein, 373 aa, unidentified
MKKAKYYGSIDVDDSNFNVALIKTVGEELLHFKCSSNVSAMIKKIKQKNIHLKDIQLCYEATYLGYTLQRELKSKGIMCEVIAPSLIPKTPGNKVKTDRLDCIKLAKYYLKGMLTPVHIPDEEDETVRDLIRSRKLLVDQVKKIKTHIISLCKRMGLDYRKQRGISNAAYWTQIHYKWLEKEINQLPKDSPLRLNLSSLLSTCHNIETFISTYDEQISVIAERPKYKDKVKALNCFRGLKTLSSLTLTTELGDIRRFPHPSKVTAYSGLSIREYSSGGKELRFGITKQGNRILRTVVIEACQFSFKPPKVSNILKERRIGADPEYINIADRCMHRLSKKSIRMFMNKKHRNKIKVACAREMLCFVWEALHKAA

SEQ ID NO: 273258 - protein, 349 aa, unidentified
MIIIGVDFHPEFQQIALIDTDTGELEERRLQHPKEAESFYRELMSQSIQVRVGMEASGHGRWFERLLGELQIELWIGDAAEIRTKRVRKQKTDRQDAQLILKLLLEDRFPRIWVPSWENRDLRQLLWHRHRMVQARTRIMNQLQAVALNEGLRCKKRLWRTERPRLESFQLAPWASRRRRDLLELLDRLNPTIAELSQAVEQEVEKCPEAQRLATHPGVGPLTAMAFVLIIGEAERFQCGKQVASYLGLVPLEDSSGNRRRLGHITKQGSSILRFLLVEAAQVTVRSLPEWRSRYFHLMMRRGRKIAKVAMARRLAVCLYWMMRQGWDYQQWNEFGSHAGQPVHRHGVQ

SEQ ID NO: 273259 - protein, 479 aa, unidentified
MEKRKLANQKHQNSKVKRTYWGVDVANGFIILNNGNPCTFYLYIDAPNITPKTPANKLKACKKRTKTIKIEDLAEIIKPNDVVILEQTGNYGIRYAQLFAQLGATVMLADSKMFAFFRKGRNVHKNDKVDAYLLRQMFFDIEFKHYIHKFIPEKHHLRQLIKSNQKIEKERTRLINRLKNLLAVALPKENYHHLETQKFVRKIAEIKEKIALTPHPYTETIYLSLEILENYEKLLKAQTAEIESIIKNHPDYELLSTIKGFGTKTIATLIAYYWDIKRFKTLNQFKGYMLKGTIIEQSGQTINRIKNLKSRPEVKKVLYLLWKQTARRKNNPLRHLVKLSYEINKKKAWIKFADKLLELVYYMLKYRLTFAEAVEYSVKNKEKEIKNLTKQLSKKLKEEQKQEYFKKLVKLQHLIKNWVAYQDTALELKEGATELCHPTPKTLLKQTLSLLEPNELKTLAINLQLLDSELTNPLKETLQ

SEQ ID NO: 273260 - protein, 322 aa, unidentified
MVEAVVGVDIAKKKFDVALFMNGKFKHKTCVNTRQGFEELSQWLKRQGVERVRVCMEATGTYGDDLATYMHDAGHTVSIVNPARIKGFAQSELLRTKNDKVDAALIARFCVAMNPEAWTPPPPEIRRLQSLVKRADALIVMRTQEQNRLGTAHETVESSVREHIGYLDQEIEKLKRQIAEHINRDPNLRTKRDLLRSIPGIGEATIAVILSALHIFEGVDRVQKTVAFIGLAPREMISGSSIKGKPRICKIGHARLRKALFMPALVSLRYNPVLIDFGNRLRKKGKNGKVIVCAVMRKLIHVIYGVLKSKKPFDPNYKPNFA

SEQ ID NO: 273261 - protein, 306 aa, unidentified
MIIGIDVSKEKLDICAGKKHWQSPNLGDYQALIDRLRALPESVEWVILEPTGGYELSVAQALTHAGLRVARPHVGRMSHHARSRKLLSKTDKLDAEALAHFGQSHPDQLKPFVLDEAQEALRQLWQRRQQLVEMKVMEENRRQHLLNPRVLHSHQVMVETIEKEIEALDVELRGKIDQERSLKGKKDLLLGVKGIGEKTAHTLLAMLPELGRISHKALGALVGVVPVLRQSGHSQQQPHIAGGRKAIRHALYLPTLSACRSSGVIRDYYLHLIEMKKAPKQAIIACMHKLLRIANAMLRDQKPFAA

SEQ ID NO: 273262 - protein, 392 aa, unidentified
MAFKRSRHSSKSGAAEFLQQPNGVVHARVQKVGPEHFGIISVDCAKARSKWMLADFYGNILIPPTEVAHNRVELAAAVKQVRTGLVKHHLRDCLVAVERTGRYHHPVKNAFRKADFETRVVHPFTTKQFRQPADPDNKTDDTDLKAIHRAAVNGFALLEAAPVESWRQLQLFIRHRRDLVRKSSALACQIREHLDAALPGYAACFDKLWESNVAFRLVQQFGSAQGMLEAGETALGEFLYQQKVRFQQRTLVTVLTWAKRAAAPDVAADLHRQIALAYHDDHARKSLEIIRLEREIAHRLAQTPYILLLSCPGINVVSAADFAGEMGPIENYANSRSITGRAGLFPARHQSDRVDHTGHLARRSNRALRAAILGIADNLILCNAHFHNLANL

SEQ ID NO: 273263 - protein, 429 aa, unidentified
MNYTQNAKIEQVTETTLVIGVDIGSQTHYARAFDYRGVELTRKVFTFANDLEGFNSFNQWAERIKTETAKTNVLIGCEPTGHYWFALAKYVRDHQMTLVMVNPFSVKKIKELDDNSPKKTDAKDPKTIAKLVVDGRYSVSYVPEGVYAEIRDLVYSRDRIVKQHNISANRIQRWLAIHFPEYLGIYTRFDATSGLAVLEEAPLPKDIIALGVGGIRKIWHNKKLRGRGVTEDRAKTLVEAAHNSIGLEGGAGTRSELYMLLEEHKLWISQLEAVDKVIAETILKVDHVENLLAIKGVGSITIAGFLAEVGDIRRFKSPKQIQKYAGLELVENSSGKHKGRSRISKRGRRKLRKILYQVMIPLLASNKEFREIYDYYVSRVKNPLKRRQAMIAVSCKLIRVFYAVLTKGKDYDRFKMMSDIHRDSSVLAA

SEQ ID NO: 273264 - protein, 408 aa, unidentified
MICIGIDWADDKHDVCIRDARDRRILAEFTITHDVEGIEQLDQTVAALGFQPADCLVAVETPHGLLVGYLLQTGYIVYAIPPRAVDRYRDRHRCSGAKSDKIDARTLSDILCVDREYHRPIPEDSPLAQEIKLVSRQRQKLVQEQTRFKNQLTACLKAYYPAALGLFSGLDCAIAWAFLRAYPNAKAAAQASLAELKGFFKQHGYTCKRKIPEIYAQLQASVIPVAEWQMRVSQRHMLLVDLMATLTPQIKAYERELTRLLDQHADAFIFRSLPNAGDVTAAWLLGEMGDCRDKFEDASAAQALAGSCPVTIQSNKRRYIKFRVACCKSFRNALQQFARLSARGKKGSPWAKGYLSDQLARGHSVSRATRALGNRWLAIIFRLRQDRVAYDEEIHLRNRALRGHRVAA

SEQ ID NO: 273265 - protein, 351 aa, unidentified
MMLIGVDYHPSFQTIAFLVEETGEYGEQELNHSDGEAEKFYRELKQRGISVRVGMEATGYSRWFERLLAELGFEVWIGDAAEIKTKRVRKKKTDREDARLLLKLLLENRFPRVWVPSPENRDLRQLLWHRHRLVQMRTRIMNQLQAVAMNEGYRWKKKLFSARGRAKLEKLSLAPWASRRRKELLELLDQLDPKTAELTAAVEQEAKKRPDVVQLMTHPGVGPITGLAYVLIIGTPERFPCGKQIGSYVGLIPCEDSSAGRQRLGHISKQGNTLLRFLLVEAAQAAARCNPDWRRRYQHLMMRREKRIAKVAMARKLAVRLYWMWRNGWDYSQLVEFGSHAGKLGTGHGAK

SEQ ID NO: 273266 - protein, 358 aa, unidentified
MNNITRVGVDLAKNVIQVCAVDVTGKVVLNKPLPRDKFLTWCAELPKGCLIAMEACSGSHHWARELNKLGLNAKIIAASHVSPYRMEGKGGKNDANDAAAVCEAASRPNMRFVPVKTSNQQGILCVHRMREGFKEERTGCINRIRGLIAEFGIVVSKSPNKLREKLQDILEDAENGLDWLARLAIQELYTHWCAIDEKIDWCDKRINAHISDDMQAQSAKQLIGVGALTASAAIATVVDFKQFKNGAQFGAWLGLTPKQSSSGGKTKLGKITKRGDTYLRTLLIQGAKAAVMSAHMRHDPISKWLFQLKEKSGWQKAAVAMANKNARILWAVMTKGVNFDPAYVSVKPGGSIGVAIAV

SEQ ID NO: 273267 - protein, 494 aa, unidentified
MPRACDRTGPGYLSAPRTVASFLREVEHARQPLELRVSRQPQRGGRCGLDSVFTRCAGLDVHKKSIPAGRMVPDPTGQEGEGIAELKTFGTMTRDLLALADGLTEASLTPVAMESTGEDWKPGYNLREDTLTVLLVNATQVKNVPGRKTDQAAARWVAKLMRFGLRQASFIPPTGQRDLRALTRYRTTLVQERVREGNRVQGVLERATIKLASVISDIMGVSGRAMLEALIAGRADPATMAALAQRRRRSTMPVLEPALTGIVHAHPRQLLARQLAPIDVRDEQIEALTRAMVTALKALRAPEPPQEDQPALPAVGSAPSVTVSPPLTLTPAVELLDTSPGIDQRGAEVIVAESGIARSRFETAPRLAAWAGVAPGHDDRAGKQRSGKTRQGNRPLRAILTQLAHAAVQTTGTDLSAWSQRLAARRGKKRAIIAVAHAIMVSVFHLLSRQEPYHELGGHYFDERRRQFTVDRLTRRIERLGYRVHLEPVAVPAV

SEQ ID NO: 273268 - protein, 348 aa, unidentified
MTMVCGLDLHRRQITFDALEVESGQVWTGRVWQPDRERFRRWLRDDVAERAHGGPVSIAVEGCTGWRYVVEEVVAAGFEAHLAEPADTQAARGRKRRAKTDRSDCRLMRELLQDGRLPASWIPPTIVLEWRERARLYKTLVDQRSTWVQRIHAELYQHGVTLPETSIRWVKTRELLEDDGLEISPAGRQRVLTAYRMIDTITIESRPLKADLQRFGRLQPGCRALVDSQYGIGGLLAVVMWSELGDCQRFARSEQVVRHSGLDVTVDQSDRRRAGGFISRQGPQTLRWALYEAAKNASHQRSPDHDYYRDVKEHLNGKLATISMARKLARRCFHVLRAVDPDEVYATP

SEQ ID NO: 273269 - protein, 405 aa, unidentified
MKVIIERACGMDVHKDSITACIITPERKEIQTFSTKTVFLLKLIDWIKEQGCTHVAMESTGVFWKPIVNLLEAESIEFLVVNATHMKAVPGRKTDVKDAEWIAELLRHGLLTASYIPNRNQRELRELVRYRRSIIEERARQHNRIQKVLEGANIKLSSVVSDILGVSSRDMLHAIADGEEDPEKLASFARRTMKRKKDELELALRGYVNPHQRLMIKTILIHIEFLNEQVEKLDREVSQRVISFQEDIERLDSIPGIATRMAEQILSEIGTDIEKQFPSAAHLCSWAGLVPGHNESAGKRKSSKTKKGNKYLKSSLTEAAHSIRGSKNYLGALYRRTAARKGKKRAAISVAHAMLRISYYLLTRKEMYVDLGEDYFEKQKQQFIVRHSVQRLEKLGYTVTITEAS

SEQ ID NO: 273270 - protein, 346 aa, unidentified
MSHYVGLDVSVKSVSICVLDAGGAVLARGETTSDPDEIAAFIAERAPGPERVVHESGILAIWLTRELEKRGLPIICIDARLAHKALSGRINKSDPGDAEGLAHLARTGWFTPVHIRSEASERVRVLIGTRERLIRMRKDLEAHVRGVLKIFGICMGAVRRTDMRRGFRDQLAEAGEIDLAISVMVDMFNPIHKALCAATEAMDDELKIIARESGLARRLMTVPGVGPVVALSFIATLDDAGRFKRSRDVGAFLGLTPRRHQSGDMDWSGRISKCGDRDLRRLLYSAATTLITQVRKPSPLRTWAIRLKERKGFKKTAVATARKLAVVMMCIWRDGTIFEPNKEASA

SEQ ID NO: 273271 - protein, 323 aa, unidentified
MSYLHFFGIDVSKDHIDVAQYETKAQKAAKPKRYSNSGEGFAAFFADNKKVLLEGFVVLEATGGYETALLNALCERGIAVHRATPLQAKHFIRSLGKIAKTDKLDALALARYGFERHATLPLFVPKSPEMQALSDLLMRRADYIAMRKAEMNRVQHPRYASTKDDVEKHLAYVNEQIRLIEKQVKALVKDSPELKKKLDTLTEVKGIGEQTAFVLLGLMPELGDLTRRQAASLAGCAPHARDSGKMRGYRQVWGGRHTIKTALFMASLSACRSNPLLSAFYKRLVLDGKKKMVALGAVMRKLIVILNAKLRDGKNLLPAEQTW

SEQ ID NO: 273272 - protein, 382 aa, unidentified
MTKIIRIGIDTSKSVFVLHGVDAAEQPVLRRKLRRSQVLEFFRKLEPTKIGMEACGGAHYWARELQALGHEVVLLPPQYVKPYVKRNKNDAADAEAICEAMSRPTMRFVPVKTSEQQAALMLAGTRDGLIGRRTQLSNTMRGYAAEFGLTTAKGLDKIEPLLARIAAGADLPTLAKELFAAYGREYAQLQRQIIKIEARLMAWHKDNELSRRLVEVPSIGPIGATLLAMKVTNPHAFRCGRDFSAWIGLTPKDHSTAGKTRLGVITRAGDEALRSVLVAGATAVIQQAQKGRGYAPPWLVELLKRKPPKLAAVALANKMARVAWKLMVSGERYNPARTAAQSAAREGRGAALRGGSAPRPSLASRITPLGGGCHDRGVMSSA

SEQ ID NO: 273273 - protein, 344 aa, unidentified
MHIASIGIDLGKTTFRLVALGERNKILLRRKFSRSQLLAYTANLPSSLIGLEACAGSHFLGTVLREQGHQVRLIPAQFVKPYRKTNKNDFIDAEAIAEAVTKQNMRFVQIKSQEQLDIQAMHRVRDRLVQRRTALINEIRGFLLDRGLTFAARPIHLRKNLPSVIEDVEQNLSSRLRWLLDRMWQEWKQIEVDIKAITEAIERIGNENALCRRLRQIPGFGPLVSTATVAAIGNGAAFRRGRDFAAWLGVVPRQYSTGGKQKLFGMSKRGNTYLRRMLIHGARAVLLRVKYDTEGFGQWVHRLAQRAPHNKVVVAIANKLARIAWAVLSSGRDYQHQRLQSVAA

SEQ ID NO: 273274 - protein, 456 aa, unidentified
MIPSKNQPISCVCPNASQNAYVNVHAQVISICPYQAMSNMNTENEIVCGADIHRDFLVATMISRKGLKLQERFSMNQDGLLEFKSWILNHKCQRVAVESTGSYWYPIFYTLEGYVEFILANAFQIRNIEGKKTDKLDSERIAVYCLNDLIKPSRIYPKDYRDLRSITRSREALVNARSKLKNQIHQLLATCCIKLSSVISDSFGKSGRYILDRLLEGKSIDQIISGIPSKRVRNKEDELRNAIRNGLDPVQLLLIKTNLDAIDDLSEKIKILDDEISIKVKPFEEDLNILLSVPGIGLTSAATILAEMGDYRDFASADKMAMYFGIVPSVYQSAGKLRTGKITKRGSKHMRRILVEVAKAISKTKKNSNLKRFFMRVYKRSGKKNVAAIALARKVLCIIYHLLMNREDYQEPEIKKTKPKISICGSPISAMDIDEMISTLSRAGYLVEKGFKEGCG

SEQ ID NO: 273275 - protein, 412 aa, unidentified
MDAIVECCAGLDVHQETVVACVVKGALEGRPRGQLRTFGTTVAGLLELSDWLQEQAVTAVAMESTGIFWRPVWNILEGQEFELLLANARKVKNVPGRKTDQRDAEWLAQLLRCGLIERSYVPAVEQRDLRDLTRRRRRLLQTLAAEKNRVHKTLQDANVKLTTSVSDIFGVSGRALVQALRSGQKLDSEEVLALLKGKLRQKAPEVAAALEGRVRPHHLEMIEFSMDHIDFLERQVQVIEERIEATLAPPFREARDLICSIPGIERASATEILAEIGIDMSVFHSEAHLASWAGVSPGNFESAGKSKSGRTGRGDRYLKTVLVQAGWAASKTKATRLSGRYQRLARRLGRDGKKKAVVATAHTLLRIVYFVLTTRRPYQEYGAEYGVASAEARTRRVIAQLQRQGYTVTKAA

SEQ ID NO: 273276 - protein, 402 aa, unidentified
MEILYKVCCGVDVHKKVLVACLNVSGKRELKSFGTTTKEIHQLCDWLKDSSCEIIAMESTGPYWKPLYNLLESKGIPAIVVNAAHMKALPGRKTDVKDAEWISDLLRHGLLRASFIPDRDQREMRELVRYRKSIIEERAREFNRLQKILEGANIKLSSCVAEINGVSARKLLDELVLGVIHTEEKVKDTVHRTLHGKATEIAEAMNGILTRLQVEMLRMVLSHIDDMTTRIAEIDKVVAEYSQKKERTLQLLDEIPGIGNRCAEVVVAEIGTDMSKFPTHAHLCSWAGLSPGNNMSAGKSYSGRTNKGNVTLKATLVQAAWSAVRVKNSFFHSQYSRISVRRGKKRAIVAVAHSILIAIYHVIKKDTHYQDLGSDYYNKYNRERKIAGHLKKLNQLGWQIPA

SEQ ID NO: 273277 - protein, 412 aa, unidentified
MKLFVGIDVSSKDLKVCMMNGEGDTLQSFTVDNNLEGASHLRDQIVAVADKLPSKEIHIGLEATSVYSWHLAMFLHEDEALQKRKAKVFTINPKLITKFKEAYVDLDKNDHIDAWLIADRLRFGRLPMTMVMQEQYIALQRLTRMRFHLVHNLTREKQYFLTNLFYKCSAFTSEVDSSVFGHAITELLLEKYSLDEIVAMDVADLADYLKDHGKNRFPDPERVAKCIQKAARASYRLSKVVEDSIDLILGTSIQSIRSIQAQIKELDQAIERILSGIPNTLQTIPGIGPVYAAGILSEIGDITRFDDQAALAKYAGLVWRKHQSGAFDAEDTKRIKSGNRFLRYYLVEAANSVKNRDPEFGDYYRKKYKEVPKHQHKRALVLTARKLVRLVDVLLRNDQIYTPRRKVNAAKD

SEQ ID NO: 273278 - protein, 335 aa, unidentified
MWHVGIDLHRVTVVCAAVNDVGEVMDPVTIRCSDTAAILHTARTLGAFRAVIEATGTYRWLYDLLRPYGTVLLAHPMRLRAMIQRRTKTDKLDSQLLANLLRINQIPLAYIPPEPYQQLRDLTRCRGRLGRQLAEVKTQLWALLARQNRQSPYRTPFGPRGLSWFRGQDFGLVENMVRDELLERFRHYANQMALFDKRLEEVRLAFPQVEALLDIRGIGLYSALLIVAELGEVERFRTAKQVGAYTGLTSRVHQSGGHCYRGSITRQGSPWLRWILVQAAMKAVHGDDAALKNFYLRIRKRSGAKIARVAAARKLAEICWKRLRQWHRQQAGQAA

SEQ ID NO: 273279 - protein, 347 aa, unidentified
MLADQLDYIVGVDPHRDSHALAVVHVQSGAVVFESTVAADSDGYAEALKLAEEHAPGRRAFAVEGTGSFGAGLTRFLSSRGERVLEVGRLRRERRSGGKTDALDAVLAARSVLANGRPATPRAGGERQALRALVAAREGAVNARRAGLCQLRDLLITPEPLRSELRPLTRARLLQRLAATRPHGRQDAELRGSKLALRSIARRLLQLTAEERELAGEIETLTRKLAPQLLDQQGVGPHAAAQLVLSWSHQGRISSEAAFARLAGAAPIPASSGQTIRYRLDRSGDRKLNRALHMILVTRKRSHPATIAYIQRRIEEGKTRREANRCLKRYLARSLYRLLEHGPPLAT

SEQ ID NO: 273280 - protein, 346 aa, unidentified
MDKFDPCGIEVSAQELIVALSRDERAERLRSFPTTAEGHAAICRFLGSGSQRVRVALESTGLYGLDLAYALHRDARIEVMVANPRAARHFASALMQRSKNDRLDAGVLREFAARMPFQAWVAPSAHCFALCAVTRRLETLTEQCTAEKNRQHAASLSVAFPAAVRRDLQRSVRSIQRAIARLTREAQRIVQADPLLNCSYHLLLTAKGIGPTSALRLLAETALLSEDLDVRQWVAYAGLDPREYQSGSSVHKKVRISKTGNRHLRRALYMPALVAVRHEPHLRAFYQHLLAQGKCKMQALVAAMRKLLHAVYAMLKHRQPYDGAKLYRLIENLPASSSATCSAEAA

SEQ ID NO: 273281 - protein, 354 aa, unidentified
MTRTTKYVALDVHQATTLASVRAETGRVIARSVLPTEPAALVAFVRGMRGTMHVAFEEGTQAQWLHDLLVPLVHRVVVCDRHGEKRRGNKGDRVDADQLSARLWRGDLRAVYHGSADRATLKELTRAYRNLVDDATRVMLRLKALFRARAIPAPGTRIYQRRDRATWLAKLSERGARFRAEALYAELDVLRELRPQAKTIMLAEARRDPAWSVLRGIPFLGPVRVALLLATLQTPWRFRTKRHLWAYAGLAVVTHSSADHEIQHGRPVRRRRAPLTRGLNPNHNRVLKDVVKGAATAATARPGPLQDFYHGMLARGMREEMARVTLTRKLAALTLRLWKKGAHFDPTQLTQQAH

SEQ ID NO: 273282 - protein, 416 aa, unidentified
MNPSPQAIPFERYLAIDAHKRYVMVGGLNAQQEPILLARKIGVDDYPKWAKANLKPGDAVVIEATTNTWNLYDATAPLVGKVVVAHPFEVKQIANARVKTDKLDVYRLARLLAADLVPEVWVPPIEVRELRTLIAHRRKLVKLRTMTKNRLHSLVHRNNLVPPEGGPFADKNRSWWEGLSLSSVEKLRIRQDLALLDHLEPQISEVDQELARLSTLSPWEAYTPYLLQLPGFGLIYTMTTLSAIGDITRFPHAKKLVGYAGLGSSVHDSGQTHRSGHITKQGRRELRWALVEAAWVAVDTHPHWKEQFQKLTRRMKSNKAIVAIARKLLVVIWHVMTERVADRKADPDMVAFKLMTWSWKLNDFQRGGLTARQFVRYCLMQLQLGENLTHVRRAGQRPIASVEEVLALRPNLRSSV

SEQ ID NO: 273283 - protein, 331 aa, unidentified
MSMHVGLDVGSRTTAMGWRNDGRFAGACNIDQTPAGRKAAVTKLLELKPLSVVMEATGIYYLDLAMELTAAGLPVSVINPKSFHNFAKLMLKNSKTDAIDAQLLAEYGERMSPKLWTPPTTIQLELRAIGRHINRLTCHRTRAKNELHALKATQTTVKMLIEDEEEAIEAFDKRIERFRLAGRALIDNCPTLSAQFGHMIAAPGMGEISVFAALAELTTLPVTLKSAQVSRHAGLDVRLTQSGTSIDKPGRISKGGNAYLRSAMYMPALTAIRCDGNVKAFYEALIGRGKRKMQAIVAVMRKYLTGLWACMQAGEDFDTAKLFSAKDLAKA

SEQ ID NO: 273284 - protein, 343 aa, unidentified
MATKYIGADVHVTTTELAVDRSGKVLDRYRVPTTIPSLREVLMRISGSCVLVIEEGPMAGWLYRNLREHVEKMIVCDPRRNHHIARDGDKDDPIDAAKLAALARGGYLREVYHTDDESREAFKQWVSLYHDRIGDRVRQANKIHGRARLYGARIPTVVLKQPQRREPFLSSLHHPELASQLRVLWMGYDATVAQAAEALKQFRRRSRSYPIVQYWRELPGVGPVRAATLLAYLDTPWRFRRKNRLWKYCGLGLQRTASGSDRHGRPNPAHLHLAWQVNRRLKDAIVGATMNAIVGDNVFGHQYRRLLDHGLIPSNARHTVARTMLTVMWGMWKRTARFDASLL

SEQ ID NO: 273285 - protein, 355 aa, unidentified
MSQPIEVIGGIDTHTDVHQAAVIDTIGRHLGTKGFPTTPAGYWDLLEWLHSHGRVLVVGMEGAGSFGAELGRHLRANQIAVIEVDRPDRRARRASGKSDSIDAYAAATAVLAGRATGTPKSRDGAVEAIRGLRVVVRASAVKSRTQTINQIKSLIITAPAAVREALRSLATPELVRRLAASRPGADLADPGTAVRIALKRLAKRYLHLSEEIADADADLRVLISRTAPGLLALLGVGTETAGQLLVTAGGNPDRLASEASFAHLCAAAHGPASSGRTDRHRLNRGGDRQANRALHTIVLVRMRHDPRTRDYVARRTLEGLKTKDIFRCLKRFVAREVYHHLTSEFSGATDPSPTA

SEQ ID NO: 273286 - protein, 410 aa, unidentified
MTYKVAGIDVHKKVLMVVVADAAAEELRFESRRFGTAASERQHLVAWLLEQGVREVVMESTAQYWKPIWLDLEPHFQLHLAQAHSNRAPKGRKHDFADAQRLVRRLIAGELILSFVPDAEQRGWRTITRAKVQLVRDRVRLQNQLEALLEEMRIKLSSVISELLGLSGRRILRALAEGESNPAELAKLGDFRLRCSKEELADALSGQCQPLHRQMLRLCLERLELLDRHSQQLDQLAAEAMRPYEDAVIRLAEAPGFGPDSAQQTIAEVGAQAKSFDSAAQFASWAGVCPGREESAEHNRSSRSPKGNKFLRRILTQAAQAAVKKKGSHFQTVFRRWIPKLGYQAAIWAIAHKLARLVWKILHDRVHYIERGQESDPVVQRRRANNMLRALRRMGYKVDISSLNPQLAPG

SEQ ID NO: 273287 - protein, 324 aa, unidentified
MSDFILGIDVSKETLDAYCARGQRKQGRSFANSPDGWKLVRAWLKAMGSKQAHVCMEATGRHSLGVALALHEAGHVVSVVNPAQIRDFARTKLGRNKTDKVDAALICEYAGLFKPEPWTPPSPAMRRLCELQTMRAGIIRSRAEWKNRIGSGLGDSTATKLAAATIDHFTSQLEAIDRAIGETIKQDAELRGRCDLLLSVIGVGETLAASLMAEMPEPGVLRRSGEMVAYAGLNPSHHRSGTSIDRPTRISKIGNATLRSSLYMPALSAMRFNPAVAILVARLKSAGRLKPKQIVVAAMRKLLVLCFGVLKTGKRFDLAIAMPA

SEQ ID NO: 273288 - protein, 416 aa, unidentified
MNNESPVVAGMDVHKKMLAVVVAKVDGNRIEYLSERFGTTRQDLDQLAHWLHQQQVTEVAMESTAQYWMPVWLALEEQFTLYLAQPRSTAAPKGRKSDWADAQRIVRRLLAQDLTLSYVPGREQREWRTMTRTRVEMSAQQVRLRNQREGLLEQAQIKLSSVLSDLLGVSGRRILREMVKGETNPACLASLADKAVKASEKTLQEALGGKLTATHRLLLKMYLEQWDLLASQIDQLNTRMAQALSQHQAAVHRLVEIPGVSLTAAQQIIAEVGPEARAFAAPQKLASWVGVCPGQHQSAGTEYSHRSPKGNRMMRRVLVQCAWASVKVKGSIFHQKFRALVPRLGPRQAIWAIAHRLLRIIWKLLHDQVNYVERGLDTNPAAVQLRIKRHLKELQRLGYAVNLSALAAIRPQEASV

SEQ ID NO: 273289 - protein, 425 aa, unidentified
MESTEEAAELVERVAALDIGKATLMACIRAPHEHSAGRRRQEVAEYPTTTGALLRLADRLREFEVTRVAMEATSDYWKPVFYLLEAEGFECWLLNASHVKNVPGRPKTDKLDAVWLAKVVERGMCAPSFVPPKPIRRLRDLTRYRRSLIRDRTREKQRLEKLLEDAQIKLSVVASDMFGVSGRAILAALIAGQRDPQVLAELARGRLRSKITQLREALTGHFDDHHALLCAKMLQRVDALTADIAELSTVIETVISPYAAQAAQLDEVTGIGATCAQELIAELGVDMTVFPTAAHLASWARFAPRANQSAGKTKPATTGKGNPWLASTLGEITAVLARSDTFLGERYRRLSRRRGKLRAIVATGNSVLTVVWHLLADPTARYHDLGADFHDTRYHQRLQHNLIHQLERVTGQQVTLSARVETAAA

SEQ ID NO: 273290 - protein, 406 aa, unidentified
MEIEAINRRVIGLDIHQAQITACALVEDERGGLRKEHRQFGAFKRDRRALADWCAAIDPAEIVMESTGIYWKSPYAALEKVGIRAKVVNARHVKNVPGRKTDIGDAEWLAMLSRAGLLRGSFVPEADHRELRLVSRQRQKLVGILASEKNRLHKVLTDSGIRLGVVVSDLHGQSARAMVKAFIEGKPPEEVIQLASRRLKASRDEMMDALHGDLSPPHRFVLDELMQHIEDIEERIRRFDQKLLEGLSGAGDALMVLQTIPGVDLIGAAMLLVEIGTDMSVWENEERLSSWVGICPGNNESAGKRKSGRMRKGNPYVRRLLCEFAHAASRTESTFKAKFQGLLVRRGRKRAIVAIAHKLLRTIFFMLKRGQHYRDTTVNYEEMSVKRNAARWIKKLTEFGFLPKPA

SEQ ID NO: 273291 - protein, 339 aa, unidentified
MKYTPVGVDIAKYLMQIHFVDEYTGEIIDKQLRRRDFLTFFSNREPCLIGMEACGGAHYWARELKKLGHEVHLLQAKFVKAFRLGNKNDVMDARAIWMAVQQPGKPVAIKNEEQQTLLSVHRMRNQLVKFRTAQINALHGLLLEFGETVHKGRASLNKAIPEVLERLRITLSPFLISLIEEQYYRLSELDNEIDGLEKQLTEWAKQNADCQRIMKIPGVGVLIATAAIATMGDPTAFRSGREFSAYLGLVPRQTGTGGRVKLLGISKRGDTYLRTLFIHGARVATLCTKTPPLWVSELKKRRPVSVAIVGMANKLARTVWALIAHQREYEKDYVSVRPY

SEQ ID NO: 273292 - protein, 308 aa, unidentified
MSNHSEAFVGFDTSKLRNAVAIADGGRTGEVRFFGEIDNMEAATAKLVKKLAAKYQCVTFCYEAGPTGYGLYRQIKSLGHECIVAAPSLIPKRPGDKVKTNRRDAVSLAKLLRAGELTAVWVPDRHHEAMRDLVRAREAAMLDLRCKRQRVSAFLLRQGRPYAGRTAWTKAHMSWLASQTFDYPEQRIAFEEMMLAIRQAQERLDRLEHAIRGAVPDWSLAEVATALMAMRGIDLIAATTFLAEIGDLSRFRTPHELMAYLGLVPSEASTGNTIKRGPITKAGNRRARRMLVGTQKAAESRRRVASGA

SEQ ID NO: 273293 - protein, 407 aa, unidentified
MQVFFGIDWSHTHHDACFLEARGQVLSRLTVKHTTEGLAQLDRAREQLGVTRAECQVGLETAHTLLIDFLWDQGYPNVFVIPPGAIKGARRRYRQTNAHTDQSDAWVIADVLRTDPATLHPWRPDGLIVRQLRAKVSLLHFLTKEIRRLSNRLGAVLARYYPAALYVFRDPASPISLLFLQAFPTPEAATALTRLAFGEFARARRYRQSDAVLSAAYARLQATYPVASTITVAAYREEAVWLAQHLLAAIEHKKGEIARLQELFHQHPDRALFASLPGTGDFLAPALLAKFGEDRERFPQPSSLQALAGTCPVTEQSGKGRRVHFRQACDHEFRQIAQQWAKASVAQSSWATTYWHNVREHSRSNSHAYRCLANRWLAIAWKCWQSRQPYDEAVHLQNRARRLATRA

SEQ ID NO: 273294 - protein, 366 aa, unidentified
MDAIYIGVDFHARQQTICYLKIETGELVITELKHQDKEQVRAFYQQFQGLVIVGLEASGYSPWFETMLEQLGHQVWLGHATEIRRRARWRHKNDRRDAELIWELMVHNEFPRLQRPALESREVLRMLRYRQKLIKVRTMAKNSLQAIALQAGLAKGKQLFTRAGQEQFQNAAMSPMLQWQREHWFALLQPLNQQLLETMVWFKAQSKDDVCIQRLRTHPGIGLLTALCIQHTLQPVARFRNARKVAAYAGFDPVERSSAERQHFLGISKAGSRLLRYLLVEAVQTAVRYDEDLKRFYKRLAERRGRPKAKVAAARKLLVRAYIMLRDEIDYAEFRRRAVTVRLARGGQGPTNVPEVLIGQPTSPGV

SEQ ID NO: 273295 - protein, 337 aa, unidentified
MQHTIAVDLSKTIFQVAEAGVRPGGVARNRRFTRRQFERYVSERPPSRFILEACGSAHYWGRQLLAQGHEVKLLPPHRSRVYRTGDKTDRADTKSLLEAERNEEILPVPVKSEDQQCLASLHRLRSGYVRSRTARLNAIRGLLREYGISIAVGARHVVPAVYTLKPEEIPAPLRAGLDDAVQEIRALEERIESIELNLEALVRQTPLAQRLLTVPGIGLVTATALTGLVGDFRRFASGRCFASYLGLVPKEHSSGAKRRLGHISKRGDTYLRMLLIHGARMVLNWAHRKETLSGLEQWALRVEARRGRNIATVALANKIARIAWVVATEERDFRRIA

SEQ ID NO: 273296 - protein, 344 aa, unidentified
MSNLDTCGIEVSAKEFVVRLRRQEDWEPWRNFTNTPEGHAMMLRYLRRVGRVVRVCLESTGLYGLDLALALSGQEGIEVMVANPRAVRHFAHALMQRSKNDPIDAGVLEQFAARMPFRPWQRPSPTALALHALARRLRELVEMQTAEKNRQHAAGLSQAIPAVVRRDLARSLRAQHRAIQRLTLQARQLIAQDPQMTERFELLDSVPGIGETSAVQLLAELSVLAPDLEARQWVAYAGLDPRQYTSGTSVHKKPRISKAGNKYLRHALFMPALVAVQHDPHLGAFYQHLLAKGKFKMQALVAVMRKLLHALHAMFKTHQPYDGSKLFRLSSAPAQEVTRALVAS

SEQ ID NO: 273297 - protein, 412 aa, unidentified
MLFVGDDWAEDHHDVEILDETGRVLARRRLPEGLQGVTRLHGLVAEQLPEGWADLDPVEAAAGVKVGIETDRGSWVAALVAAGYEVFAINPMSVARYRERHSTSGAKSDAADAHLLAEIVRLDRAHHRPVAADTDAGEAIKLTARTHQSLIWDRTRHVLRLRSTLREYFPAALRAFPDLDAPDALELLARAPDPDQAARLSTAVITAALKTARRRHVEDRTRKLQAILRAPELRQSPVLQDAYAAVVTSEVAIIGALNTQIDRLGAVVGDHFGRHRDAEIYASLPGLGVILSARILGEFGDAPDRYLDAKARKNYAGTSPITRASGTKKVVLARYARNRRLGDALQQWAFCSMRGSPGARAYYMQLRARKIGHQAALRQLANRLVGILHGCLKTQTLYNENTAWGHHLAAAS

SEQ ID NO: 273298 - protein, 325 aa, unidentified
MDPDDKHGISEKMSNGVPQTIGIDISKASLDCHAYPAGAERQFANTAKGHKALIAWLRQWPVERIAFEATATYHRALEAALADWPCVKLNPERARRFAQATGTLAKTDRIDAMLLARMAATLQPPIRPTRSPQQVQMAELINARDGLVRDRTALKNREKNLTITLLKRQCRQRLEQIDRHIEALDAEIASLIAADAALARRHQILTSIAGVGTLTANQLIATMPELGSLENKQAAALAGLAPIARQSGQWKGKRFITGGRANVRQALYMPALVAARYNPDLQAEYQQLVTAGKPAKIAITAVMRKLLVTANALLKADQCCQQSLA

SEQ ID NO: 273299 - protein, 420 aa, unidentified
MEVAQDDQEIIARVAALDIGKAEVVCCVRVPGQGPRARRMQEVRTYTTMTRSLLAMADWLTELGVTRVVMEATSDYWKPPFYLLENTFETWLVNARDVKHLPGRPKTDRLDAVWLCKVAERQMLRPSFVPPPAFRELRDLTRYRVDLITTRTSEKQRVEKLLEDSMIKLSVVASDIFGVSGRDMMAALVAGERDPKVLADMARGSMRGKTARLEEAFTGRFTDHHAFLLRTMLARIDGITADMDIVQDRIDEQIAPFAAAVTRLDEIPGVGVTTAQAIIAEIGLDMTRFPTPAHLASWARFAPGISESAGRKKGNSGTGKGNRYLARALGEAAVGVRRTDTFLGERYRRIAHRRGKKKAIVAVGRSILMIVWHLLSDDDARFVDLGSDYYESRVNLNRRTRNHVRELQALGYKVTLEPAA

SEQ ID NO: 273300 - protein, 363 aa, unidentified
MDVVHERAVGIDISKRDAKVCVRVPAKRKGQFTSTVTTWGSTTNEILRLCQFIVSTQASVVVMEATSDYWKPFYYLLEDALPVMLVNAKHARNIPGRKTDVSDATWLAQLAAYGLLRPSFVPPAPIRELRDLTRARAAAVGDRTREVLRLEKMLEGSGIKLSGAVASLTGVSSRAMLDALIRGERDPLVLAQYAQRRMRSKIPELVEALTGRFSEHHAFLAQLFLAEIDTHTRTIEALTERIEGAIRPFQAAREALVTIPGVSTLVADVIIAETGADMAVFQDAGHLASWAGVCPSSNESAGRIKSSKTMPGNRYLKAALGIAALAASHQRNSYLAAKYRRIAARRGPVKAVVALEHTILNAV

SEQ ID NO: 273301 - protein, 480 aa, unidentified
MAYPTKNPPDLQVVPMLKYESLYVGIDVGKQRHVAGFVSTTLLERHQRFEACPALAFEQSREGFRSLMERIRSYVPLEQVSVLLEQTGHYHRTLVQYLQEFDIPVYIMPVQKRPPGMLKTDKRDALSLANHLFNQLERGIQLADKTHLVRRLLTPTETALQLQGWMRHRYELVQECTRRKNKLTAICDELFPELTQVLKDPNLPTALALREHFPTPHALATAPFSALIALRAKSRPTLGQLEHLQQVASQSIGTKEMTRQRGLVLEQSQLIRELRMLQEHIEQLDTEIRRSIEQSREGKILTSIPGIGSIQAAAIIAAMGNVLNFERASRLKAYFGWAPQEERSGTSLDRVHLTHRGTRSMKQMLFLCVASAIQLDCEWARLYNRLVPKKCPYDERTQRYRGKVKVMGRIAGQMIEMIYALLKQDAEILSQLAPGETPPDPILYDPEVHKRHRNGEYGPIKNVPSQRKVIRLPERVLPKQ

SEQ ID NO: 273302 - protein, 321 aa, unidentified
MSLFHLGIDVSKAKLDCALRLPNGKFRSKVIANSAVGFAQLTDWLASHQVASAHVCMEATGIYWEEVAQFLATAGFTVSVVNPAQIKAYGTSRLTRSKTDAVDARLIADFCAERQPMAWQAPSEAEIVLRALVLRLEALQTMRTQESNRLDVARNAVQSDILQHLDWLDNAVKQLVNTINEHIDQHPDLKQKRALLNSIPGIGERTSAIFLAFYADTERFANSRQAAAFAGLDPRQYESGSSVKGKPRLSKIGHAFLRKALYMPAMVTLYKTAWGKRFKDRLTGNGKPAKLIIGAMMRKLVHVAFGVLKSGQAFDPTLHGA

SEQ ID NO: 273303 - protein, 434 aa, unidentified
MNERLQAGIDFSQKRADFCLLAPSGLIIERHRRFSNSRPGYEEAKAMLLKVLTRQHFQGLDVAGEATNVYWLPFFWELARDPELAVHDVQLFLLNPRWVKYYKQCFAPDHKSDADDPFYIADRLRTRHPTVAWSAQLDTQPLRLYTRLRFHLIQNLAREKCYLAGYLFLRASAYSSYRPFSDPFGMTSRRLLREDWNLERLATLSVEELAQHLDELSEHHLPDPLANARKLCAVAHQSFRVPQTLNLPLQRLTDLILQEIAFLETQITQADSWITAEAQQHPGVHLLDTIPGIGPVFASGILAEIGSVERFLQGPKWDPKHKTYRARNLRDAEDAVAKIAGLWWPRNSSGDFDAEDRRLSKSGNRYLRYYLIEAADRMRQNIPEYQRFYASKYAEALKHQHKRALVLTARKSVGLIVGLLHRHESYRSKEVDST

SEQ ID NO: 273304 - protein, 341 aa, unidentified
MSKFIRIAIDLGKNYFQVHGLESEGGRSISRKVKRSKMHEVYSQIEPCRVGMEACGSAHYWARQLTAMGHEVVLIPPAYIKPYVKRGKNDVVDAAAICEAMSRPDMRFVPIKSADQQAVLMLHKTRELLVKQRTMAVNALRGHLAEFGIVAAKGIGRVDELLALAKADAALPPIAGAAVACMARHLEGLDLSIETVDEEIARAHRQNPISRLLDEIPGIGTLIASATAASVPDPGVFKSGRDFAAWLGLTPRQNSSGGKEKLGAITKQGNRYIRKMLVTGATSVLRVAGKRKGALADWINALRARKPERLVAVALANKLARICWAIMTTGEGFRTDTYAKA

SEQ ID NO: 273305 - protein, 405 aa, unidentified
MEELLVGVDWSQSHYDIAVVAPSGALLSQFRIAKTAPEFSLLAEKIDKFGVPAGNCHIGLETAHNILIDFLWSRQYAAYVIAPSIVKSSRGRFGNSGAYNDAKDAHLIADLLRTDRERFAPWRPDSELLTRIKTKLGHVDYLTKLTTSHTNRLRSILLRVYPQVLQAFNDVHVCLALHLLVAYPTAATLAGLSYADFAAFCRQQRCHRLDWITTWYSRLQQPQPSVQASMAAAYQDEIVFIAQQLLWQIQEKKQALKQVQVLYQQHPDHPLFDSLPGAGDMLQPKLLVMFGEDRARFPSPQDIRALAGTCPVTKQSGKRRHIQFRRACNHGFRETAQQYAVASVQQVDWAAAYFTSALSRGLRKNHAYRCVANRWLGIIWKMWQTHQPYDETYHLKQIHHQRRPT

SEQ ID NO: 273306 - protein, 316 aa, unidentified
MGAEKVNIGIDVSKGYLDVAVRPSGERFRFTNDEEGIGALRKMLTERHPERIVLEPTGGYESGVVQALATAKLPAVVVNARQVRDFAKAMGRLAKTDRIDADVLAHFGEALKPEIRALPDEAQRELEALVNRRRQLVDIRSAEAKRKHTAPLVVHPSIDGLIEFLDRQIDDVDKDLHRLIRSTPAWREADDLLQSVPGVGPVLSSTLTALVPELGKLNRRQIAALVGVAPYNNDSGKGERTRRTWGGRASVRAVLYMAAAVACRFNSAVRAFHDRLAASGKPAKLVLVACMRKLLTILNALARDRRPWNPQIALVG

SEQ ID NO: 273307 - protein, 568 aa, unidentified
MTPRFHPSAPAPDSDFATKPRPDPPPNPDQQAAGEYRQRKARTLAKMQDKQRVRVNAMPVLRAHAAGIDAGQSRHWVCIGFTDDPDNDHQLVREYQTHTDSLRQLVGWLKENQVTSAAVESTSFYAEVLVEMLEQAGIEVFLVDPSYTKQLQGRPKTDKRDAQWIFRLHSVGLLGSAFRPQEQTRVLRNYLRHRARVVRQAVRHIHHMQMALELMNLKLRCVLDDITGSTGLKIIKAILSGVRDPHRLAALRHTQCKHSEKEMVQALDGNYKDEHLFTLKLAYESWEFHQRQLDSIDQEVAKQLEKMKRDGALPALPRRKNNPKKANSARFDVRTALYYVVGIDLTEMEGIDELTALTIVSEIGTELSKFKTVGHFCSWLGLCPNPNESGKQKRPSRTRPGVNRTAQALRMGASSLHSSHSALGAYLRRMKSRMGAPAAVTATAHKLARLVYYALKHGMPYVRKTQEEYEAQIREQRIKSLQKKARQLGFTLIENPVRTGGDTPVPVVVTEKEEPAQEPEREKVKEPEPAQKLEKKPSKGAGTKKKAEVAGAAQAKKKTKKAAAATKP

SEQ ID NO: 273308 - protein, 348 aa, unidentified
MLADRLDYVVGVDPHRDEHALAIIEVRTGGVVFEASVTASSGGYARALELADEHAPGQRAFAIEGTGSFGAGLTRFLSGEGERVLEVGRLRRERRSGGKSDALDAIRAARSVLGQKRAAEPRAGGEREALRALMAAREGAVNARRAGLCQLRDLLITTPEPLRSELRPLSRAQLLRRLAAVRPERRQDQELRGTLLALRALARRVKTLTVEERELAAEIETLTRKLAPQLLEQPGVGPLAAAQILISWSHPGRIRSEASFARLAGCAPIPASSGQTIRYRLDRSGDRRLNRTLHMILVTRRRAHPPTIAYIERRIREGKSRREATRCLKRYLARNLYRLLEHGAPLAT

SEQ ID NO: 273309 - protein, 389 aa, unidentified
MKSFVPVAGVDVSKRFSDLCVLSPDNNVLLRQKIYHDMGSMNLAEKKLHEIELECGARPVVVMESTSHYHLILFQFFTDAGFEVVVVNPIQSGALKNINVRKVKNDRVDAYRIAMLYRLKVLRPSQIPTSSLRGLRLLTRQRSELKGDVARFKNRLTAYLDQIFPGYGEVFSDVGGSASRAVLHMCPTPEKLLNADGSLLAKAICEAGNKGPKFGAEKAAKLREAAGSAQVIGVRSASNASLIKNVLDIIEGLLAAIQRIEGEIKELVTLDTRLDEDVKLLCSIPGIGFSSAVVIAAEMGNISLFRKPKQLAAYFGLDPGERQSGTFKGRKNKLSKRGSPQVRAALHMAAVSSVSRNRDGTYRNPVLAEYYERKCAEKPCKVGTGSSNA

SEQ ID NO: 273310 - protein, 341 aa, unidentified
MQVTTIGLDLAKNVFQVHGIDATEKVVVRKQLRRGQVMTFFEALAPCLIGMEACATAHHWARELTKLGHEVRLMPAKDVKAYVKRNKNDAADAEAICEAVRRPTMRFVAVKSAEQQGRLMQHRVRDLLMRQRTQLINALRAHLAELGMAAAQGREGIKELLAIVAQNGDSRLPVDAHASLIVLSAQLQAVQTMIGSIEKRIVSQHRSNADSKRLETIPGIGVIGATTIAAVVPDPKVFRSGRDFAAWIGLVPRQDSTGGKQKLGPISKQGDRYLRRILVVGACAVLKQARRQPEKYPWLTQLLARRPFKVVAVALANKMARIAWALLAKGGTYRTPQLTAV

SEQ ID NO: 273311 - protein, 410 aa, unidentified
MEVVYAHCAGLDVHKATVVACVRHMEGAKVSRSVKSFASTTGELMALSEWLSGEGVTHIAMEATGVYWKPVWHILSDGEFELVLANAAHVKNVPGRKTDVNDATWLADLMAHGLIKPSFVPDEPTQQMRDLLRTRKQFVRERAGQVQRIQKRLEDANIKLDSAISDVAGVSGRRMLGALIKGETDARALAALAHERIRATAAELEAALRGRVTAHHRFLLQLHLDHLDAVEAAIARIDREVSANGEPFRAGVELLSTIPGIGTLAAEVIVSEIGTDMSRFATAGHLVSWAGLCPRNDESAGKRRITRLKKGAPWLKTTLMQCAWAATRVKGSYLQAQYHRLRSRRGAKKAVGAVAASILTSVYHMLKHGTLYQDLGAGHFDARAKTRQALRLVTRLKAMGYEVAITAMAA

SEQ ID NO: 273312 - protein, 343 aa, unidentified
MQIRSVGIDLGKTTFHLVALGDNGKVLLKKKFTQRQLIAFTANLQTCLIGMEACSGAHFLGRTLRQQGHDVKLIPAQFVKPFVKSNKNDFIDAEAIAEAVDRENMRFVPIKTDDQLDLQALHRVRDRLIARRTSVINQLRAFLLERGLVFAKSPARLRERMPEILENADEDLTPRMRNLLALLWNEWKDLEQQLVDLNQEVERIASSDAACTRLRQIPGIGPLVATAIVAAIGNGAAFRKGREFAAWMGLVPKQYSTGGKAKLAGISKRGNHYLRKILIHGARAVVLRSKRDRIAMGQWMTALEARAPRNVLIVAMANKLARIAWAVLSSGQDYRAVQEPVAA

SEQ ID NO: 273313 - protein, 420 aa, unidentified
MTRKNNNKIISVVHPICCGLDVHKDMVSACIIITEADGEESFVVKEFSTFTDDLYRLKAWLLRHACKVIAMESTSVYWRPVHNVLEDSLEVILVNAKHVKNVPGRKTDISDSMWLASLLRIGVLKASFIPEKRIRQIRELVTLRKSYIKSLADYKRRVHKLFATANIKIGSVVSDLFGKTGRNLIAKLIATDIELKIEHVEQCAQGSLKQKVAELLRAIQGFFEDHHRFQLKMMMHTIEHLESEIEAITKRLDQILIPNHELMEQLDEVPGIDKKTAQSIIGHIGDTLTAFRSDKALASWGGLCPGNNQSAGKRKSGKSPVRKHPFKELMIEIAWAAVRTKGSYYKDKYYRLKSRRGAKRAIVAIAHRITKAIYHIIKHGRSFVDLGEAYLMSKSKEKRLKALKIKARHLGFSLVPVATN

SEQ ID NO: 273314 - protein, 345 aa, unidentified
MKYIGIDYHKQYFVATMMNEQGEVIRRDKASTDRASVRQYFQKADLSGGVKAVMEACYGWEYFYDEASELVDEIIMAHPLKTRLIAEARIKTDTIDSETLAHLLRADLIPQAYAPDSETRSKKNLLRYRSSLVGMKVRIKNIIHSILTRNHIEDQRFTSLSDKFGKQGLSYLRAVSLKGNDTVILHDYLDLLEETGRKIKEAEKRIQAVCREDKICTLLSSIPGIGPILAVTIRYEIDDIERFISAGKLCSYAGLVPSTYSSGNRTYQGKITKQGNKWLRWAMIEAAQQAPAKDLWLRGFYQRISKNGKKIARVAVARKLLEIVYRIWKEEKPYYKKGTVALPFV

SEQ ID NO: 273315 - protein, 350 aa, unidentified
MLYVGLDVHSRQSSLCILNASGGTVNQIQLKGPRAAVVDRLRQLDQPFSICYEASCGYGHLYEALRPLAHHIAVAHPGKLRLIYGSKRKNDRVDAQKLAKLLLLDMVPPVHVPSIDVRAWRSLIILRQRVMSQVVRCKNQIRGVLRENDIAGAKWLWSRRQLAWLQSLELHPVARLRLELAVEEFQTLDARIKRIERELQTYADRHPAVTVLMTIPGVGIRTAETFVAWVDDVTRFRNNRQIGSYFGLVPCQRAVPRRVGRQEPPGPHHPRRAAAGDAEADLRGGVDGDQEGQDLPRAYFEQVMGGKPERKKIALVATMHRMIKVMGAMLRSGEPYHGETLKRRCAAVLE

SEQ ID NO: 273316 - protein, 339 aa, unidentified
MTVKTVGLDLAKDVFQVHGISENGRVIFNKAIKRAKLLAFFEALPPCRIGMEACGSSHHWGRQLRKLGHEVKLMPAGYVKPYVTRGKTDAVDAEAICEAVRRPTMRFVEIKTEEQQAILSIHRTRDLAVRQRTQMANMIRSLLREFGHILPIGIEAVTAFAKRHLGGDHPDMPEIANGLLGIQCYQFIGLNERIEGYSKMIEQHAPVNADARRLMRMPGIGPITASAIVATIGDAKQFQTGRDLAAWLGLTPLNKSSGGKERLGKITKQGDRYIRKLLVVGMTSRAVMAKRSPEKVDLWTAKIIADKPFRLATTAMANKAARSIWAMLTRKQEYRQPAF

SEQ ID NO: 273317 - protein, 456 aa, unidentified
MPKTTTDNRPEFKPVNFGAAAIDIGSKMHMAAVNPACTDVAVRSFGTFTQDLHDLADWFKACGVTSVAMESTGVYWIPVYEILEQRGFDVILVNARFAKNVPGRKTDVSDAAWLRQLHSYGLLRGSFRPDAEIATLRAYLRQRERLVEYAAAHIQHMQKALMEMNLQLHHVVSDITGATGMRIIRAIVAGERNPDVLATYRDVRCHSSAETIRAALVGNDREEHVFALNQSLELYDVYQAKMLDCDRKLEVLIAALSSKGAKPVGKLSKPRIKTKQVNTPTFDVRTALFSVLGVDLTEIHGLGPSLALKLVGECGTDLRAWPSAKHFTSWLCLAPGNKISGGKVLSSRTRRSSSRAAALLRLAATTVGRSETALGAFYRRLATRAGKSKAVTATARKIAVLFYNTLRHGMSYKDPGADQYEQQYRSRVLSNLQRRAKSLGFVLQAIPGEDANPAVS

SEQ ID NO: 273318 - protein, 436 aa, unidentified
MTLINFVAANQKYYAFNLLSVFIMVFWSVQYLLQHLLVQTQVSHQLLQPLILILQLPQTPQFRHARPGKFFLPVNGMDYFLPLRLTVRNVLTRRITMNIVFLGIDLAKNVFQLCGLNQAGKPVYTKRTGRKELLQTLANIPACLIGIEASTGAFYWQREFEKLGHKVKVISPQYVRPFVRGQKNDGNDAQAITVALMQPTMQFVPPKSPEQQDIQALHRARQRIVNHRTATVCQIRGLLLDRGIPIGSAVSRARRAIPLILEDAENGLSSRMRRTIAELYDLFNDLGRRIHFFDKEIETVFRQSEACPRIAKVKGIGPKTATAVVAAIGKGTEFKNGRHFAAWLGLVPRQHSSGDRQVLMNMTKKGDKHLRTLFIHGARAVVRVATNNNDGHMNQWVNQLKERRGFNKTTVAVANKNARIIWSMLRNDTGYQVVCN

SEQ ID NO: 273319 - protein, 442 aa, unidentified
MAMRKREDSPEVFPNAAGIDIGGSSHWVAVPAAAAEEPVREFGTMTDDLHAMADWLLACGVDTVALESTGVYWIPVYEVLERRGLTVWLVDTRQMKYVPGRKSDVMDCQWLQKLMSLGLLRAAWRPGDAVCVVRAVARQREVLLAEQGGWVQRMQKALVQMNLQLTEVLTDVMGMTGQAIVRAIVAGERDPKALAQHRHGRVKASAAEIERALTGNWREEHLFVLAQALAMFDSLAQRILECDAKIEALLVPLGRHEAELAGPGKRLGKNAPQFDARAALARWAGVDLTRINGLSVTTVMTILSEIGPDLSRFASIKHFCSWLGLCPGTKISGGKVLSARTRRSANRVRQALKLAAMSLSRNDSALGAFYRRLCARMDKPRANTAVAHKLARMVYFMLTRGEAFVDQGQQHYEEQQRQRSIAALRRRASALGFQITPDTKTA

SEQ ID NO: 273320 - protein, 465 aa, unidentified
MSKLRKRNRARSSQGETRPFEGMRQVNPHAAGVDIGAHELVACVPDGDDQQIVRTFGTDTVDLQTLADWFVDRGIQTVAMASTGVSWIPLCEEREARGLPCCLISAQSIKRVPGRKSDVLDCQWIQTLHSYGLRAASCRPAADLVALRTLLRHRAQLLEHRAPHVLHMQQALLQMHSQLSHALRDITGATGQRLIRAMVAGARAPQHWAALRNDRCKKDAHEIAMALTGTWREEHLFVLTQALALFDFSTTQLSACDAQVEHAFAVITPHFESTAAASVPARAAVPPRRKPHSHSKNAPEGNTRAHILRITGVDLVAVHGMSDSLAQTILAEIGTDMSKWPDDKHFCSWLGLAPNNDLSGGKVLKSRTMKNRNRAAQAFRMAAQSVIRSHCAFGAFYRRLTGRLGPAQALVATAHKIARTVYHMLKHRVPYYDIGAAEYNKRFREREMHYLQKKAAKLGYKLSPV

SEQ ID NO: 273321 - protein, 347 aa, unidentified
MRFYTQSHRYYCGIDLHARWMYLCVLDPQGEVLLHRNLRACPEAFLKAVEPYRRDLVVAVECIFSWYWLADLCAQHGIEFVLGHALYMKAIHGGKAKNDRIDSQKIAVLLRGGMIPVAYVYPPEMRSTRDLLRRRTYLMRQRAALLVHIQHTNSQYNLPEIGKKIAYRANRCGVAQRFSDPAVQTSIAADLSLIDFYDSLLNQLELFITRQAKQQDHHSFYLLRSVPGIGKILALTMLYEIHNIARFPRVQQFVSYCRLVKCSRQSAGKNYGFSGKKIGNVHLKWAFSEAAVLFLRNNPEGQKLLARLERKHGKAKALTILAHKLARAVYFILRREKAFDLTQFLAA

SEQ ID NO: 273322 - protein, 441 aa, unidentified
MSKVVNPNAAGIDISTKEHYVAVPEGRSDEDVRCFQSFTRDLHELANWLKECGVETIAMESTGVYWYHLYTVLLDYGFEVYLVNAYHVKNVPGRKSDVSDARWLQQLHSFGLLRGCFQPDNQTRSLRNYVRQRKQIITQISREVQRMQKALEQMNIKLNNVIRDLQGKTGMAIISSILEGERDPQVLAQYRDPRIKASKEKLIKSLEGNWREEQLFNLKQAHDHYFFLQGQLTECDKECKRLVKDMSDDDIPKKEIISGTRQKNSPDFNVSQHLYDALGVDVTQIYGMKAITALAVFSETGPGLKDKFPSEKQFLSWLNVVPDNKITGGKVIYSRVKRKKNKAGLAFRDAANSLWKAKNPLGEYIRRKKAISGGRQAIVATARKIASIYYKMVTEVVEFDPQVLEIKTQEYLEKKLQRLERNIEKTKALLIVRQEVGELVI

SEQ ID NO: 273323 - protein, 417 aa, unidentified
MKCFVGLDVSSTKLDVCIMLNDTSTPVTASLSNDLSGATEIKNHILDLNHTYHFERIVIGIEATSLYSFHPAMFFHEDSQLKELHVEIMVEQPNKIKKYRDAFEENKNDTIDAFYIADYFRIERFSPSFLKEEKYMALQHLTRTRLQIIEQLTRTKQHFIENIYYKCNTLAYQFKKEELSTNLWSSTMMTLITDEMTLDELANMPLQELADWLQQLGKGHFKDSEKLAQTIQAAIRGSYRLSKLQQDSVNVILGLLAREIRNLEKMIKEIDKAIEDMVETIPEYQCLTSIPGVGKVYAAGIIAEIGQIERFKDHPQVAKFAGLNWREKQSGNSNSQHTSLVNRGNRYLRCYLVEAANSVRRYDDEYKDFYKKKYHEVPKHQHKRAIVLTARKFVRLVVVLLRNHQLYTPPRRLMEDK

SEQ ID NO: 273324 - protein, 338 aa, unidentified
MITNYIGIDIAARSFVSARPTPTASYQIQRWDYQTPQQIARFIESLNPQTDQCVLEATGNYHLRLTYALLEAGISVSVVNPLSVKRYGQMLASITKTDQRDAVLLARYGQQQRPAPYRQPDQHLQYLRQRRMVLSQLQQQRQALANQQHALCVHPQPDAFSQQILDQQLVYIEQAIADLQAQINQLVADHYQQSRQLLASIPGFGTVSTAVFLEALAGFEGWQQPGASKAFVKYIGLAPTLHQSGRSVRGGSHINRSAVPWLRQKLWLPACTLAMRLKTDTVFQRLYIRLRQGGESFKEAIIAVMHKWVRVALAVLQSGKPFDPGLNLTTEENLANAL

SEQ ID NO: 273325 - protein, 371 aa, unidentified
MGKHRLAFVAFDSAKNKHAVAIADGGRGAEVRYLGEIDNSPDAVRKLVAKLTRQYERLHFCYEAGPTGYGLHRQLTELGHVCDVVAPTMIPKRSGDRVKTNRRDSVALVKLLRAGELRAIWVPDNVHEAVRDLTRARETAMVDLKTKRQQLLSFLLRHGRSFPDGRNWTKTYERWLAKQTFAHPAQQIVFQDQLEAITTAQARLAALEQQLREIVPTWTMAPVVAAYQALRGVSFLVAITFVAEVGDVRRFATPQQLMAFLGLVPSERTSGDTVRRGSITKTGNRRARRVLIEGAWTYRFSARVGETLRTRLKDLPLSVRAIAWKAQVRLCARYRRLIARGKKAPVVTTAIARELSAFLWAIGQQVAPQTG

SEQ ID NO: 273326 - protein, 338 aa, unidentified
MVYGAIDLHMRYSQIRIVDEDGAVVRDLRVVTSRERLTQAFANHGPIRILLETGTESEWVAHALETAGHEVIVADPNYAPMYGELRRKVKTDRRDAAALAEANRRGWYRPAHRASAPQRETKQMLRSRRFLVQTRSGAVSLLRSLLRQSGHRLGTGSCETVPTRVSRLAVAPELGETLAPLCRQIATLTTEIHALDARLQTRTATDAIVARLRSVPGIGLIVATTFRAFVDRHERFGHAGQVSAAIGLVPREDSSAERRHRGHITKAGPREVRSMLIQAAWVCWRHPGSATLRGWTDRLAARRGRRIAVVALARRLSRILFALWRDETTFDGRTLAAA

SEQ ID NO: 273327 - protein, 345 aa, unidentified
MQPMYYIGLDVHKQKISYCVKDSAGKIHDEGWIPATRFDLDRWMKRLPQPWNAALEATMFSGWIYDHLKPHAAALKVAHPLMLRAIAAAKKKNDRIDANKICDCLRCDFLPECYMAPTAIRERRRTLRYRNLLVRQMVQMKIKISTLLMEAGVSYNKQKLHKAGYFRELLATNPDIPEGLRPLLRLSREMVVRLGKTESALIHSLQQDRLLAERVERLMSIPAIGPITALTWALEIGEVQRFSSIKKAISYCGLCGDEKRSANSVQRTPISKQRNKHLQTTLIEAAKMAPRYSPTLALLYDRETQKGNANRATLAVARKLVAYLMAVDRGQCRFLVIDQETRTAA

SEQ ID NO: 273328 - protein, 350 aa, unidentified
MMIIGCDLHTRYQQIAMLDTETGEEVERRLEHENGEARAFYCALQGPVRVGIEATGHTHWFEAMLAELGHELWMGDAAKIRASVIRKQKTDARDAEHLLNLLRQDRFPQIWRPSPAERDLRQLVWHRQKLVWMRGAVKNQLHALAMGEGVCRKKKLFTAKGRKELEGLALGPWASYRRQELLRMFDELAAATAQLDLAVEQAAKNQPLAVRLMTHPGVGPVTSLAFVLIIGPVERFERSKQVVSYLGLNPQEHSSGGKQRLGAISKQGNPMMRSLLVEAGHTAARFDPVLKRMYQRLKFRRGASVAKVAVARKLAVRMYWMLRSTADYAQLVRMQGSPWATLVENSSSLG

SEQ ID NO: 273329 - protein, 436 aa, unidentified
MDIVHPRVAGIDVHKKVIWVAVRLPGKAPGHREVTVRRFKTFWRSLQEMAAWLAELGVTDAAMESTGVYWWPVYHALAGAGIEVCVCNAAHMRNVPGRKTDLRDCQWIAELHEYGLLRASFIPAAEVAALRQRTRYRKKLIGQRSSELQRLSKVLEDGGVKIDSVASTLTTASARDMIEALIAGQRDPAVLAQLARGVMRKKIPELQMACDGRFTDSHAQMCRLHLDAYDHLAAKIAELDLLVATAAEPFAAVITHLITIPGIGQRTAQVIVAETGADMARFASPARLAAWAGLAPGDNESAGKRKKAAARQGNRHLRAAMVEAAWTVSRTATRPGARFRRLARRFGRGNEKKAAVAVAHTLTCIAWAVMRYDRDYAEAGADYYDHRDARNRDHLVRHYQQALARLGYQVTLTPPGDGHSPAAATTTPTTPPGQAA

SEQ ID NO: 273330 - protein, 429 aa, unidentified
MSYRIAGIDVHKKMLAVVVSDVEVDGEYRFERRKFGSNPEQLRSLAAWLLEQEAEEVVMESTAQYWKPVWGALERYWKLIREKRDGASRRSGTLHLAQAQSNRGRRGRKRDFPDAERLVKRLVARELILSFVPDADQRLWRTVTRRKYQLTRDRVRLQNQMESLLEEAHIKLSSLVTDLLGVSARRMLKALAEGETNPAALAALADERLRATPEQLCDALGACTELNAVYRRLLKMALEELRLIEEQIGELDKEMASLLSDHQDAVQRLAEVPGLGVDSAQQIIAEVGPTAATFPSGKCLSSWVGACPGDDESAGVNYSHRSPKGNRHMRRLLNQAANAAARTKGSIFEIVYRRSVPRLGHNQAIGAIAHRQCRLIWLILHQGVRYEERGPAVTKQSKQKRTARMIRQLRSLGYRIETPNPQPSQAQAQ

SEQ ID NO: 273331 - protein, 430 aa, unidentified
MTKLSSTPADAVLVAIDMSKHRQEVLIERPEGGRRRRMTVMATKTDYDRLASDLADIGRPIVVGFEATGNYHRTLAHRLLTAGFELRLISSVALARTREALHNGWDKNDSKDAQVILHMLRIGATQRYVDPLAAGINDLQEMSKTHEAISKAKTQTWHRILTHYLPLYFPEIERFAGNSRSDWFLALLERFPTPGSMTALGQEAFTREAWSLVGRKVSKARLINDIYETACASVALPVDEDSVAIAMFRMVIAQARSLIRQRDEIERAAHAMLSENRDYQLLRMIPGIGPINALTILAEAGDLRRFAHHRQFLKFCGLDLATCQSGTFRGRTKLSKYGNARLRRTFWMAAQVAARQRDNSFRDKLGRYMEGHANDPDRRRKAMTALTAKMARVAHAVIKTGTEYRPFLERADTRWKDPSLLCREGATATL

SEQ ID NO: 273332 - protein, 392 aa, unidentified
MIYVGIDVAKEKHDCCILGPDGEELKDSFTFANDRKGFNELLAAILNVLQDGPSDQVCAGLESTGHYCTNLVAFLRANGFEPVVLNPLSVNLFRKSQTLRKTKTDKADARFIAAMLLTSDSNPRTSVSYHIEELKVLTRSRSRLVGYRGKLKLSLTRLLDVVFPELANFVWSTNQKSVYCMLLELPNTYAIAHCRIDRLTNILSSGSHGKYDREKALEIRQAATDSIGSNSPSLAFELQQTIRLIQNVQIELDLLDSRIKEVVKSTETPLLTIPGIGHTLAGIILAEIGAIERFRTPAQLLAFAGMEPSTFQSGKFNANQTPMVKRGSTYLRWAVLQAARLVAMRDQTFRDYLLKKRCEGKHFNVALSHVGKKLIRVIFHMLQNNRAFVPQS

SEQ ID NO: 273333 - protein, 377 aa, unidentified
MSNVRFIGLDVHAETIAVAVAEPDGDVRSLGVIPNRPESIQKLVKKLGPTEPLRVCYEAGPTGYVVYWQLIALNVACEVVAPTLVPVKPGDRVKTDRRDALKLARSYRAGDLTPVWVPDAAHEALRDLVRAREAAKKDQLRARHRLGKFLLRHGRRPPTATKAWTQAHLTWVKSAVHFAHAAQEATLLDYLHEVDHAAGRIERIDRAIDDAVTTAPVPMRAVIAALQALRGIAQVSAVTIVAEVGELSRFAKPRQLMGYSGAVASEDSSGPRIRRGAITKTGNAHLRRIIIEAAWAYRHRPSVGATLRKRHERLDKEVIAIAWKAQHRLHARYRSLTARGKSKQSAVTAVGRELLGFIWAIGMAVKIQQLDAQPVVA

SEQ ID NO: 273334 - protein, 332 aa, unidentified
MLHVGMDMHKRFSVVTVIDDEGKEVVVGQKLENQEADLLAFFKGLDEEVRVVLEAGPNLMWMCDLLDDCGIDNLLCHPSKTKAITAARIKTGKLDSKILSHLLRADFIPEAYKPDAGTKATRELLRYRAFLMRERTRTKNAIHALLTRGNIPNPYSDLFGKAGLSYLEGLRLLAVRRAALDGYLSLLSRLGEEIAAAEQRVRGKFKNSPQARLLSTIPGVGPLLSLTILSEIGEISRFGAARQLSSYAGLVPSTSQSGGVTRHGRITRQGSRWLRWALVEAAIHAASRPGPLRDFHLKLKKSKGNEVARVAVARKLSTYASICLSRKRASMR

SEQ ID NO: 273335 - protein, 337 aa, unidentified
MSVYVGIDVHRKRSQVAVVTEDGTVQLNKNVVNGSEPMLRLIGELPSGTPVAFEAAFGWSWLAELLEDYGFEAHMVHPLRCRAIASARLKNDRVDAAILAQLLRADLLPEAWIAPAKVRQLRALLRHRISLVRLATQARNRIHAVAADHGYDRSASYWTGPGRGWLAELDLPAASREIITDCLAVIDGLAPVIDRIDGELHAHAKADPRVKVLRTLPGVGEFTALVMVAEIGDVSRFGSARKLASWAGLTPTVRGSDLHVRHGHISKQGSVWLRWAMNQAAQTAKRSPEFAASYAAIARRRGKKIATIAIARKLLTRAWHLLSEVQAADAGTPPRRP

SEQ ID NO: 273336 - protein, 428 aa, unidentified
MKKISTVAMRGNEIFRELKLTIGLDLGDRSSHYCILDEAGEVILEHGLPTTPKGIQQVFSRIPRSRIALETGTHSPWVSRQLTQLGHEVIVAHARNVRLIGESSRKDDQLDARTLARLARIDPALLGPVRHRSAQAQIHLTVIRARAALVSTRTALVNAARGLTKSYGQRLRKCGTGQMNREIAKGLSQELRDALEPLLGEIESLNERIAEYDGRIEQVAKEVHPEVALLKQVKGVGTLIALTYVLTLDDPHRFRRSRDAGCFLGLRPGRRNSGMSEPQLHISKEGDRYLRTLMVQGAHYILGPFGQDSDLRRWGLKLAERGGKNAKKRAVVAVARKLAVLLHKLWVSGEVYEPLRNNHKVVSAVACTERKSLKKECGWKDGDRGGSAQTQKTPIGRKKKNQLDSHRPSHGRTYRRINSSREKCIESP

SEQ ID NO: 273337 - protein, 409 aa, unidentified
MRLFVGLDVSSFDMKVCFLNGEGERLDSFSVSNDLPGAQVLKERLLQCTTNQEVETLKIGLESTSVYSFHPSMFLHHDEDLKRFGTKVFLLNPKQVANFKKSYSDMNKTDEIDAFVIADYLRFGRNQMSIVKESQYVALQQLTRSRYQLVRMLTKEKQHFLQHLSYKCNTFSPEVDSSIFGNAMMELFLEKFSLEELADMPLEELAEFLQEKSKNRFGDPKCVASTIQKAVRTSYRLDKVVEDSIDILLGTSIEIIRTYQRQIKELEKSIKRIMAGLTQTLESIPGIGPIYAAGIIAEIGQIERFDDETKIAKYAGLYWRTYQSGRFTAENTSLSRNGNHYLRYYLVEAANSVRKHVLEYQEYYAKKYNEVPKHQHKRALVLTARKFVRLVDALLRNHQLFTPERCVNV

SEQ ID NO: 273338 - protein, 455 aa, unidentified
MQQPVEVQVDEHEPIVERVAAIDVAKASGMVCLRIPHETIPDRRVTKVWPVAATTAALVELGDHLRCERVTRVVLESTSDYWRPFYYLLEAAGLIVWLVNAAQVKNVPGRPKTDKIDAVWLAKLAERSMLSPSLVPAEPMRQVRDLARARFDLVEDRTRVKQRIEKLLEDALIKISSVLTDVLGVSGRAMIEALIAGQRSPKVLAELARGRARTRRADLERALHGRFTDHHAQLAGLLLGQLDELTARIEEVTGLLDAAINALPTPTPATGCGQTDRTQGDASADRPAQGGYDSAVARLCAVPGGGPDSVRAVLGEIGLDMSVFGTPQRLCSWARVAPRTVQSGRKAGRARTGKGNPYLKSALAQMATGAAKTDTFLGERYRRLIKRMPKAKALVALQRSILVVIFHLLADPTAEFTDLGSDFYTRRIDRARRASHLMRQLHALGYQVQLTEAAA

SEQ ID NO: 273339 - protein, 478 aa, unidentified
MIYSVGIDVHKGRHRVYCLDEKAQVCDAFSFQTTPEGLATLGERIFRDGSNPIVVFEPAGLSWLMVAAYLRSQHPECRLVKAKGQKVAALRRYLRTSAKSDRIDALTLAKMPFIDPERLDELYLAPAETHALLRLTRQRKRLEDQITSHKKRIGSIVDGYLPGVRQAFSHCWSIRARAFFHSQINLFKVVREGEEALCHFLAQAKPRDREVKAESYLIYRACQNALAVVQLCQAAGSLDEEFYSDLQDEIDRELRLMEAAEAEIEALDRRIEELYQRLHPSDNLRTIPGVGEHTAPVFVACIGDPSRFPSQSAFANWTGVVPSAKQSSETESKGLRMTKAGPAIMKWALYQTGQIGRQWDPQLAAVYYCQMVYHGKTHKQAMGAVMSHIGARVFTVLREDRPYELKDTGGRPISKMAARALILAKYQVPEDIRKERRRSKGRKASAIAARKKEGMLVSSIHEAARAPQAAMTKSYPST

SEQ ID NO: 273340 - protein, 342 aa, unidentified
MQITTIGLDIAKNVFQIHGIDAKEKVVVRKQLRRSQVIAFFAALPPCLVGMEACATAHYWARELRKLGHEVRLMPAKDVKAYLKRNKNDAADAEAICEAVRRPTMRFVQIKSAEQQGQLMQHRTRDVLIRQRTQIINALRAHLAELGIVAAQGDAGVSELRAIVADDRDERLPIDARASVIVLAAQLEALQTLIGSIEKRIKMQHRSNEASQRVETIPGIGVLGATAIVATVADPMIFRSGRDFAAWIGLVPRQDSTGGKQKLGPISKQGDRYLRRILVVGAIAVLRRARENPGKYPWLTQLLARRPFKVVAVALANKMARTAWALMAHGGTYRAPELAEAA

SEQ ID NO: 273341 - protein, 351 aa, unidentified
MATILGIDLGKFKSVFCVFCEETGEIRYSTLATSEKMFREFLIRETPSMTLFEVSTAAGWVYDLCRELGLACQVANPLGEAWQWKKVKRKTDRDDAHKLIRLYLLNELPTVHMPDAEVRGDRAVVGFRQRLIERRTAICNHIRALFQAQGLELPAGHEAWTKDALRQWRKTFARPLFKCGPCDLWRGLLHTELMLLEDLQKQIALVDKTLDAKGKANERVRLLRTIPGVGPRTAEVVAAYMDDPHRFANARQVSAYAGLVPRQFQSGTIDHKGRITKRGPAYLRKILVECAWMMRRYNSWAAGVVERISRGQKGRLKSAVVALARKLLVRCWAMLRKGQPWAVPEIAPAAA

SEQ ID NO: 273342 - protein, 339 aa, unidentified
MNEVTTVGIDLAKNVFQVHGVDARGVVVIRKAIRRVQVLRFFETLPRCLVGMEACATAHYWARAIAALGHEVRLMPPQYVKAYVKRNKNDAADAEAICEAVRRPSMRFVPVKSAEQQAVLTMHRARELLIRQRTMLVNALRAHLAEFGIVGAQGIHRVCDLVAIVADEGDDRVPAIARGVLRIVADQIAVLQTGIAEIDGRILAWHRTSEVSLRLAAMPGVGPIIASAIAASVPDASVFRSGREFAAWLGLVPKQSGTGGKTWLGRISKRGDGYVRRLLITGALTALTRSRAVKAMPWIIGMKERAKRPMVIAVALANKMARTAWAMMVRATAYRASAA

SEQ ID NO: 273343 - protein, 410 aa, unidentified
MEVIFPRCAGLDVHSKTVVVCRRIIGPDGKLEKEVRTFATTTAQLNTLAQWLEEGSVTHVAMESTGVFWKPVWNILEARFQLLLVNARHVKQVPGRKTDVKDCEWIAQLLQHGLLRASFVPPPAIRELRDLTRHRAKLVSQHTAVANRIHKTLEDANIKLGTVATDILGVSGRAMLAAIVSGREDPAELADLARQRLRAKIPALREALHGHVTEHHRFLLETLLEQLRFLESQILRLDKRVAETSRPFEAACAELDTIPGVARRSAENIVAEIGSDMRVFPSAAHLASWAAICPGNDESAGKRRSGKTPNGNRWLRRALTEAAWAAARTKNTYLSAQYRRIAARRGKRRAIIAVAHSILVAAYHILTRAQPYRDLGADHFDRLDPERLTRQLVRRLEKLGHKVTLAPVAA

SEQ ID NO: 273344 - protein, 368 aa, unidentified
MKEETVTSNGSSQANVVNKGNRVLKLGLDTHYRQVTVAMQEDGGRIKAAGKMRHADFLNWVYKKLEESWEIYSCYEAGAGGYWLHRQLEQMGVKNLVVVPKAMGQGGKKQKTDKRDSGELCDSLDRYLRGQDKALSIVAVPTEDQEQKRALIRYHRQIMADRGRCEARGKGLLCAQGIEVHGRWWQGDGWIEVQHNPRLKDWMKEQLIGWRNKILSADEEQSGLRERIAALAPAILPKGVGAYSAAVLEFEMRGFERFKNRRQVGSMTGLCPGIHLSDGRGKEGSINRCGIGIVRWTLVEMVWRLMKWQPQYPPVRRLALGLVKSKRAKKRLAVQAALRLAIDLWRLTTEQTTPEKLGLIMHCTHPEK

SEQ ID NO: 273345 - protein, 443 aa, unidentified
MRKKRFSHLRGERGQEFADLIRGIPSEQILCVSLDISKYFHAVMIHNGLGEIAKPTFEIDFYQSGFDQLCKAIEQAEDRTQAQVVLVGMEPTSHYFENLARHLLQRSQPVTLINSFAVKQNRDQQMMHREKTDPIDCAAIGDLLRRGEGTPYKPATGIYLRLQQLDRVRLGKVKIETMLKNHIIAHLDRIIPGLVILGKPAQERYSPLFKVDFWQCKTLQHLIRVCPDPHQLAKLTPEQLVQAFKAEHYQLGCKTAAKIIARAQQVLLPEPELVAIRCELLQHDLDLLDTVQAHIHKLEQRLTTLVAQTPFQVWTKLKGISVVQVASLAAAIGDPTNYSHAGQIFRRSGLVSGRNDSGSRQRKGKGNRVLKVGDVYLRRALMNTVTTLLLHQPVLNRYYRELCRSKPAGVARVATARKTTGILWATLRDQYPVTLITCKGANM

SEQ ID NO: 273346 - protein, 384 aa, unidentified
MNEHILYVGLDTGKNHIDVAVAEPLPGGDVRYWGKVANEGAAVDRLIRRLQREGRQLKICYEAGPCGYGIHRRLNAKQGVSCEVIAPSLTPRRPGVRVKTNRRDCLTLVKLLRAEELTAAWVPDAAHEAMRDLIRTRSAAVEDLVRCRQRIGGFLLRQEIRYAGKPWSKKHRVWLGRLELAAPAHRLMFGELLEALDQAQARRDRLTDHIAELVPSWSLAWLVEALQALRGYRLINAASLVAEIGDPRRFASPRALMGYLGMVPSEHSTGETVQRGGLTKTGNRRARKVLIEAAWTYARRAKVASTRAGRHPSAVRAIAEKARHRLSGRYRRLTARGKLGVVAIAAVARESLGFIWAIAQAAGPADIIERRRPARGAGRGSDSR

SEQ ID NO: 273347 - protein, 346 aa, unidentified
MHYIGMDCHITTLEFAVVNEAGRLVKASRVATSVNGFMEFVKTVPLPRTIYTEEGTLAAWALETCVRFREKLVITDAKKNHWIGSSGQKDDSIDALKLAQLARGGYIKEIHHPVGQRRRFRELMIAYHDAVRSTTRIKNKIKAKFRQNGIQCTGITVYSETHREEWRGKLPQETTLLLILDGLWRQLEQSEQTEKELLAAARAQAKHYPEIKHFEALPGIGFISAATISAILENPNRFADKRKVWMYAGLGIMTRSSGGKTYSEKLSTDYNRLLKYSIKQAAEAAIQAKDNPFRRKYLDMTLLRGIAPHRAKLTIARDMLATMWAMWRKGEKYNPEIREKAACKQG

SEQ ID NO: 273348 - protein, 491 aa, unidentified
MKAAGTKKQEKAEKPAKKAAKEGLGSAKQQHLPARNRRKQRRELARKIQTQDVSLEVKHPDAAGIDIGNTAHYVAVPPARDSEPVRRFGCVTAELKEMARWLKQCGIRTVAMQSTGVYWLPVYDVLEEEGLEVYLVNARETKNLPGKKTDVLESQWLMQLHTYGLLRNSFRPAQEIRELRNYWRQRNDWIRSAVRHMQRIQKTLTQMNVQLANVISDLSGVTGQAILQAILGGERDGQKLAALRDGRIKASEEEIARSLEGNWREDLLFVLKQEQEGYEFCQKQITACDLRLHEYLTRRPDRSAGADLPEETRKSRRKKKRGNAPQIPMREGMFRMTGVDLTRIDGIDVMTAATVVSEVGWDMSKWPTESHFVSWLRLCPDNRISGDRVIGKGRLATNNRLTVALKMAASGLKESDTYLGAQFRRLRMRLGAPVAIKAMAAKLARLIYRMMRYGMEYVDRGAEFYEKEHRQRQIQSVKRKAASLGLKIVAA

SEQ ID NO: 273349 - protein, 404 aa, unidentified
MKVYLGIDWSENEHQAVWLNEAGVMVAHFKLSHSPEGLVKLETSRQQLGLAAKDCPVAIETVHHLLVDFLWARGYEQLYVIPPSVIKSNRGRFGNSGAKDDLRDAQLIAEVLRTDRGRLQPWRPDQPLTQQIRAKVNQLQFLTKQKVRYGNRLRALLLRYYPTALEVFGKWSSLISLNFIEHYPTPQAAAALSLAEFEAFAQDQAYPQGRIAACYARLKQPQVQACAEAVLAYQAEAAWLAAALKQVIQTKSQVLKELTSLFERHPDHQLFASLPGTGPLLAPALLSKFGDDRARFPSPASVQALAGTCPVTEQSGKHRLIKFRFGCDRQFRYIVQQWAHASLRESVWANAYWQQVQPRCASEHQALRCLANRWLAVAWKLWQTGRSYDQAYHLQQRALRAKAR

SEQ ID NO: 273350 - protein, 379 aa, unidentified
MTQFAVSTPTEQTIYAALELSKNSWLLAIQVAGRDKPSLHPIKGGNAEGLMAKLDAARDRVAKVTGRTPPVVLCYEAGYDGFWLARLLAARGIECLVIEPASLQVNRRARRVKTDRIDVENILHTLIAWCRGERHVCSLVVIPSVEEEDLRRSHRERDRLVRERTAHINRIKGLLFGQGIRGINVKARYKSLVPAALVTGDGRALPDRLGREIAREIERLAQVQAQIVEIERERDSAPTPCGATERKRCDLLRLNGIGPALSAILAREVYYRRFANRRQVASYIGLTPSPYDSGEGRRSQGISKAGNGRARYALIQAAWLWLRHQPNSALTQWFHHRTEGQSKRVRCIMIVALARKLAIALWRYVEHGLIPQGATLSAR

SEQ ID NO: 273351 - protein, 344 aa, unidentified
MEHFAGLDVSVKESSVCIVDETGKIVREVRVASEPEALLAVLKNPAYHFKRIGLEAGPLSQWLYSALAEAGLPVICVETRHMRAVLKAQINKTDRNDARGMAQMMRVGLYRPVHVKTLRSQKLRMLLTHRQLLMSKAIAVENDLRGTLRNFGLKVGMVGKVRFEARIRELVENLPDLAVLVEPMLIVRRVLREQIVILHRRVLAIVRDDEVCQRLMTTPGVGPVVSLTYRATVDIPARFRKSKSVGAVFGLTCAKYQSGEVDWDGRISRCGDEMMRTMLYEAAQAMMRSKKWSWLKAWAMQIARRRGMKKAIVALARRLAVIMHRIWVDGTEFRWTREQATATA

SEQ ID NO: 273352 - protein, 460 aa, unidentified
MNEYFIGIDASKGYSDFVMINAKKQTVIENFQLDDTFQGHTRLYELLHGFNQDYPEATIYAAVESTGGYENNWFQSLLKFQASLPIKTAHLNPLGVSHNSKADLKRNNTDKISAKNVAEYMIAHPEKVSYQHQDSLASLRKQWGFVTMLTKQSTQLLNQLESLVYNANPEILIYCKGDTPQWVLNLLTSYPTALRLSRAKVKVLARIPYISLDRAKQLIATAKKSVASASDKVTEQLIVATVKQIVHLKKTIKVQSEVLANECQIPEVALLKTFTGIGDYSAIGLMLQIQSVNRFLTSKKLASFFGIHPEYKKSGDGTYKYRMSKKGRKEGRRVLFIVAMSAIQSNPLIRDVYQQAVERGMEKMSAMGLCMHKILRIVYGMLKHNKAFDPQVDLKNRQKKPSRQRKVGQDKDRRYQNFDSNAPISRRQKMKRKERKQSQNVINVEYGISEASVPSTQLAN

SEQ ID NO: 273353 - protein, 416 aa, unidentified
MPLGRAVPVDPRVEPEDDGGEEKPRGHRPTRHATRVLSSTDQLFFRHPYLWQPHDLVRCSGEQRTIVIPGLQKTVSEHGTLPLVAFSPEQLTGRPLARRSRRIRPGVMTIAPCTVGIDVSKQWLDCFLHPTGRRYRFSNDTKGHEALITLVGTQESFCVLEATGPYDRGLCHRLHEAGQAFHRANPRKARQFAKAAGFLAKTDRVDAVMLARYGAALALPAEIPPEPDRERLRDLMDRRDQLVEMRKSERIRLAQPHADWLEESLLQVIDALDRQIEVLEARMEALLACAPSLEAQKAIVCSAPGVGPVTAKVLLAYLPELGKRDRRAISALAGLAPIACDSGTMRAKRCIWGGRKRVRDALYMAALAACRSGPFKAVSQAMRDKGKPAKLVIIAIARRLLVALNAAVRDNKAFLS

SEQ ID NO: 273354 - protein, 439 aa, unidentified
MDDEDYQLRHERVAGIDIAKAKADVRTRLPPPREGGRRRSRVEEVPATARDILDLGTRLLADRVELVVMESTSDYWRIWYYLLESLGLAVQLVNASQARQLAGRPKTDRLDCQWIARLAEMGLLRPSFVPPAEIRALRDLTRARLQLVRDRTRERQRLEKLPEGALIKLSSVVSSLAAAKSAHKILEAIAGGETSPQALAALAHGNVKGGRAAVERALEGMRPEAHHLMLIRLHLDRIKDLDRRAAALEDEAGAALDAIPAARVTADGEPAPGTAVLSAAERLAEIPGVTPELAIAIIAEAGLDMTRFPTAARLASWAGLAPAARQSGPRTRKPRKGQGNDYLKGYCTQAALGTANTATFLGERYRRLARRTGGVRAQCAVARSILTIIWHLLSDPAARFTDLGPDWHTRKADRDRKIRTHLRQLEALGLDVTITPRAA

SEQ ID NO: 273355 - protein, 317 aa, unidentified
MAVASEVFVGIDVSKAELEVCWVPQADRLQVARDEAGLGRLVERLQALGPALVVLEASGGYEMPVVMALAGAGLPCVVVNARQVRDFAKASGKLAKTDRIDAQVIAEFAQAIRPQVRALPDEAAAHLIALVARRRQLVEMLVAEQNRLALSHAAVREDLKQNIAWLKSRLQDLDGELSRAVRESPLWRESDKLLQQVPGVGRVVSAVLLALLPELGRLSPKQIAALVGVCPFNRDSGSWRGKRSIFGGRAPVRSVLYMAIVSAIRWNPLIKVFYQRLLAAGKPKKLAMTACMRKLLVILNAMMRDRSDWNPNGALAT

SEQ ID NO: 273356 - protein, 421 aa, unidentified
MRKADTGKVKNVSDNTLIVAVDIGMEMNRGYCTTPDGRDIKPFKFDNTRAGMDTLWDMIITNKNRFKCNEVIVGYESTGPYGEPFLHYLLKKNVKIVQVNPMHTKRVKEINDNSPLKTDDKDPRVIADIIKLGRALSIVIPEGDAAYLRRLNNSRERHVRERTALLNQLQQLIFLLFPEFKKVFKNIKCMTPLYLLKNYPTPEAISVLDKHDLGEEIRKQSMGKFNECHADILINLAMNTIGIKEGVSGLSMDIRHILVQLEMLKDLIDEIESEMETTIERIPYSSKLLSIKGLGVVSVAGIIGEIGDFSKFQTRSEIMKLAGLDLYEISSGKMKGQRRISKRGRSLLRKILYYVAIQTIRKNGIMHDYYTRLTERGMKRMKALVAVSRKLLGIIYAIVRDDSEYLVNFESVKRQVIKKAA

SEQ ID NO: 273357 - protein, 362 aa, unidentified
MRIIGCDLHAGQQTVAMLDTTTGEIVNMTLLHEGNNVREFYSTLPGPVRVGIEATGSMQWFVNLMEELGIECLVGHPAEVRAAEPRKQKHDRRDADLILKLLVENRFPAIWLPSKELQDLRSLLRHRHQWVRMRTRIQNALQAIALANGLRRGPSLWSQTGQHTIASLPLAPHTAYRRSELQAVYAKFEVEIEKLNQRVEEQACGRAGARLLMTHPGVGPITALATEVFLGDPARFADSKALASYVGMIPREYSSGGRQRLGGLSKQGNPLLRFLWGEAGMHAVRRDPELKRFYHRKLIQKGLGKARVAVARKLGIRMWIMLRDQIEYNEFCRRGQKQQKSGDACAGMPETRNGAKSHRPVD

SEQ ID NO: 273358 - protein, 360 aa, unidentified
MLAELIDAVVGVDTHRDTHEVELALPTGTPIGIRKISNDNSGFAELLAWIGDHAPGPRVVVSIEGTRSFGVGLARAVAAAGLTVIECEQPNHKARRGKGKSDPIDAHLAVLAALRLDADRLPVPRADGDREALRILLGTRHELTVVTTAQTNRLRALLLGGQDTERDLARATLTDPVLLALVRRREPPQASREQAVRHGEIRRLAHAIRAGRHALAANRAQLQTIVDQMAPGLTERRGIGAVTAAQAIVSFSHPGRCRSDAAFAALSGTSPLQASSGKTVRHRLNRGGDRALNSAIHTIAITRIRCCPTTKNYVARRTAEGKSSREIQRCLKRYIARQLYRALNTSTTLTAQISAAPAAA

SEQ ID NO: 273359 - protein, 375 aa, unidentified
MIATTHPEMSVSEPTLYVAFELGKKDWKLAMTSGFGVMAFLRTVASGDLDGVERALRQGRQRLGLPAHAPVVSCYEAGRDGFWIHRALTQRGIGNRVVDSASIEISRRARRAKTDRLDALKLVQMLVRVCLGERHVWHEVRVPTVADEAARQVSRERTDLVQAQTRVINQMRGWLATWGASLPSRRRGDWWTTVRDWAGAPLAREVQTRLARAEARLEMIAGQIGELDAQQEAAVTTAAPASALRQLVQLKGVAPTSASVLLDEGLVWRAFRNRRQIGGLLGLAPTPYDSGESTQEQGISGAGNKRLQSISIELAWNWVRWQPLSALTQWYRARFGTGKRARRIGIVAVARRLLIALWRYVTTGVIPAGAILKIA

SEQ ID NO: 273360 - protein, 384 aa, unidentified
MKKTQETLRIKDSIKEAILYTAFELSLKKWKLAFSNGEKMRTVTIDARNLAQLHEEIDKAKQRFVLGDNIRMMSCYEAGRDGFWLHRYLLSCGIDNVVVDSASIEVNRRKRRAKTDRIDVRKLMHMLLRYHGGEQLVWSVVNVPSEEAEDGRQLHRELEVLKKERTMHRNRLKGLLIQQGIVMSNPSSRKFLIELETLRTWDGKELPADFKSRIIREHGRLRMVEEQIYTLGKEREKRVAAADTDAMQQIEQLMTLVGIGMNSSWKFVMEFFGWREFKNGKQIGQLSGLAPTPYDSGAGQREQGISKAGNVRVRTLAVEMAWVWLRFQPQSKLSQWYLQRFAEGGKRMRRIGIVAMARRLLIDLWRYLEHGVVPEGARLVNVVK

SEQ ID NO: 273361 - protein, 432 aa, unidentified
MEEVEDEPLFCERVAGIDIGKKMIMVTIRVPSDTRKGGRAQETREFGTTRKELLALADWLRCWQVEKVGMESTSDYWKPVYFLLEREGFDCTLYRASQVKALPGRPKTDKLDSAWLARITERGSLAGSFVPPEDIRRLRTHTRYRRKLVQMRTAQKERCEKLLEDGHLKLSSVISDIHGVSGRDMLGAIAAGEHNPKVLADKARGVMRGKIARLEEALDCSFFTPEHAFVLQMMLDSIDQLTAQIQVLDGKIADMCQPYEQQIEQLDGIPGFGITTAQDLIAEIGVDMSAFPTAGHLASWARTAPRVSESAGKRKGKNATGRGNPYIGGTLGEASISTGRTQTFLGAQYRRMCKRMPKMKAQGAIMRKQLVIAHALLSDPEARYEDLGPDYHERRKDTHRRARSHLRELERLGYKVTIQAIDPATGEFLPAS

SEQ ID NO: 273362 - protein, 406 aa, unidentified
MEEIIIDKGCGLDVHKETVVGCVMGSGIKKEIRTFSTMTGDLFRLKGWLSEKGITHVAMESTGPYWKPVFNVLEDSFEVILVNARHIKNVPGRKTDVKDSEWICKLLRSGLLAASFVPPQGIRELRDLTRYRRKLTQTISSEKNRIQKVLEDANVKISSVLSDTFGVSGMEMIEAIMEGNLSVEQISELAKGRLKSKKAEIKESLVGNFRDHHRFMIQASLGQIGSLEKTIADLDQEIDRKLEGYHQEYELLQTIPGVKEQGAASIIAEIGVDMDTFPSEGHLSSWAGMSPGNNESAGKKKSGKTTHGNKNLRAILTQCAWAASKTKNTYLSAKYHSLVGRRGKKRALIAVGHKILIMAYHILKNGVPYKELGKHYLIHRREDKIVKSHVKRLQDIGYEVELKMVA

SEQ ID NO: 273363 - protein, 424 aa, unidentified
MTAETAKTEEFAAYIGLDWADRTHVISLWDTENKKVERSELVHKPEVLAGWISELQRRFRGQRVAVALEQSRGAVIHALMGYDFLVLFPVNPKTLAKYREAFTPSGAKDDPSDADLLLELVSLHRAKLRAWVPDDELTRTISLLVQYRRQLVDTQTGLTNQLSGLLKLYYPQALEWAGDLATVQACDFLQRWPTLGKVQRTTAAKLRQFYSRHGCRKAGLIEQRLQAIEIAQPLTRDLAVITASTIMVQATINQLRPLLAAIAQLDKQVAGLFAQHEDHHLFSSFPGAGAALAPRLLAAMGTDRNRFLAASEIQQLSGIAPVMERSGKSCWVHRRWACPKFLRQSFHEYAGQSIRWSAWARAFYHQQRQRGNDHHAAVRSLAFRWIRIIYRCWQTRTPYSEERYQQALHRRGSPLLKASAPQLT

SEQ ID NO: 273364 - protein, 422 aa, unidentified
MLAKTQDEEQIIARVAACDIGKAELVCCVRVPDEDRPGRRLQEVETYATMTRPLLGLADRLRCLGVTRVVMEATSDYWKPVFYLLEAHGFETWLVNARDVKHLPGRPKTDKLDAVWLAKVAERQMIRPSFVPPPQIRKLRDLTRYRADLVAARTAEKQRVEKLLEDAQIKLSVVVSDIFGVSGRQMLAALIGGQRDPKALAQLARGVMRRKITVLQEAFTGYFTAHHAFLLATMLARVDAIDADIAALDERIEQMAAPFTAEVRRLQQIPGISFTAACAILAEIGISMGRFPTAAHLVSWAKFAPGIKESAGKKKGKGTTGHGNRYLARVLGNAAASIARTDTFLGERYRRIARRRGSQKAVVAVGRSLLIIIWHLLNGPDACYADLGSDFYDTRIDPERRKRNHIRQLEALGYKVSLEPAA

SEQ ID NO: 273365 - protein, 389 aa, unidentified
MIYVGIDVAAEKHACCILAESGKVLKQFTFSNDMPGFEKFHKALLTPSETKIGLESTGVYGNNLAEFLRRNGYETHIFNPLLVKKSIQATTLRKTKTDKSDAKHIAQYTKEHSQPNLEPSYHISELKSLSRGRFSLVRERSKVKTQAKGLLVQLFPEFSQAFSDVFGAAANAVLRQLPSARMIAQCPVDVLTNLLRTASHGRLGKVKAELLIDLAEHSVGIQSMALELQMQMLLQQIDLFTLQINRYEAAIKSEMETIQSPITTIPGIGCVLGAAILSEIGDIHRFTTPAKLQAYAGVDPSVGESGTSVSTPGRMVKHGSHYLRWALCQAARCVSLYDPIFAVYMKAKRDEGKHYCVVCSHVAKKLTRVIYSILKNNTAYSLTYSQIGT

SEQ ID NO: 273366 - protein, 417 aa, unidentified
MKDGEKSSTCRYIALDIHKHYSVVAGVDRDGQEILPPCRVEHLNLEDWLAKHLLPTDQVVIESTTNAWHVYDLLEPLVSQVLVANPIKVKQIACARVKTDNRDTLILARLLAANLVPVVWVPPKHVRELRQFISHRRRLANMHTQVVNRMHSVAHRHHLNHPKGKDFQPKNTTWQQDASLSKMEKMQLELDMATRAHLEEQIERMTRELGRMSHEEPWASDMLYLMQVPGCGVVTGMTILAAIGDITRFEVPKALASYSGLTPGLEQSGVKVRGKGITKEGRKELRWALVEVAWRAVKADPHWKRHFEELKRRMHTNQAIVTIAHHLLVVVWYVLTKREPYRHYSPERIAYKYLTWSWALDEEQRGGMTRPQFARYYLMRLGIGDELKRVALNPEFPYKLASVEEVLALRPELLPPE

SEQ ID NO: 273367 - protein, 324 aa, unidentified
MEQAYIGIDVAKDSFVAATRVEGNLTTSLHNNDRKGISDLLKGLPDSCWCIMEATGVYSLQLAMALYEKGIKVSVVNPLQIKRFAQTKLKRTKTDKVDTALIAEYGERMQPKLYEPPAPFMRKLQQQRMSLKLLVKSKRSFLNQLHALTQLDKADKAAVKACKTVLASIEKQIVDLERQMQQTAEENCQELFTFLQTIPCISKKSAIELLVVSGGFRSFTSARQFSAFIGISPCINESGTSIRGYRGISRIGDKNIRATLYMCAMAAKVYNKACRELYERMVTAGKAKKVALVAVMNKLIKQVFGKVRSGEVYSAECQAQQLKK

SEQ ID NO: 273368 - protein, 360 aa, unidentified
MRKRLSKKESWFKENNFTAEDEIYVGVDVHKVHYHISIWHNGRIGCVYSMLSDNNKLLRDLKRIRGSLKNIVYEAGPTGFALVRLLRSANLPAEVVAVSKTPRMADTSAKTDSLDCQQLAEYAAKGLLTFVAIPTEQQEADRQVVRLRDQLTSKRKRIMHQVKSFLLQHSISWPGGNWSKILIERLRQLDISSELRFTLAQYLDEYEFFCSKITETEAKLRHIFSSKRHSAAIEIFKSHPGVGNIVAWEYRAEMFNITRFSESKQISKYTGLCPRVSQSGKTCHQGPITKTGRRQLRAMLVQAAWAWYRRDPHARQIYNRLLHNTGNGKKAIVGLAKRIAIHLWRMLCDGCLYDANIVKV

SEQ ID NO: 273369 - protein, 391 aa, unidentified
MPEDAPRPAQAAIRTDLGAIFVSLELSRRAWLITSLSPGGGEKMSRHSVPAGEVSGLLRRFAELRRKAVARTGRDFPIIVIQEAGLDGFWIHRVLQSEGIESHVVDAASILTSRRRRRAKTDRIDGETLVRTLMAFKRGEPRVCSMARAPTPQEEDRRRVCRERRTLVGERVTHVNRIKGLLFAQGVFGYEPLRKRRRERLEDLRTGDGRPLPVHLKAQIIRELDRLEVLLEQLKTVEAERDALLKPASDEAASPATMLARLKGIGPETAAVLWSEGLFRQFDNRRQVAAYAGLAPTPWQSGSIDHEQGVSKAGNPRLRTTMVELAWLWLQNQPTSALSLWFHERVRRLGGRMRKTTIVALARKLLIALWRYTTAGVVIEGAVMKAAPATI

SEQ ID NO: 273370 - protein, 383 aa, unidentified
MTQALGTVIDYERTLILAIELSNTSWVLAAQIPGLPGVKAKRSIDPTPEALMAAIENYRARAEKAGRNVDRVIAVYEAGWSGFWLVRWLAKHGVEEAHVIQPSSVPVDRRARRAKSDGIDAELLLRTLLAWLRGEPRVCSMVPIPAEADEDARRRVRERAELISERVGLVNRIGAVLATLGAGEYNPLRRDRRQRLDELQTALGDSLPTNAHAKIARMLDRLELLLIQITELEQSRDAVLEDESPDRASSMIQQLAKLRGIGVQSATVLVREGFVREFANGKALGSYAGLTATPYSSGGIEREQGIGKAGNARLRTVMVELAWLWQRYQPGSAQVRWFRERGGTGRRVRKVMVVALARKLLIALWRFATQGVVPEGAVMKPAS

SEQ ID NO: 273371 - protein, 355 aa, unidentified
MKRTTKYVGLDVHQATTVTSVRDRSGRVIARAILPTEGAALTDFFQGMRGAVNVAFEEGTQAQWLHDLLAPVTHSVTVCNLRGEPRRPGNKADIKDADTVSGRLLKGDLRSVYHGSANRALLQDYSRAYLNAVEDATRAMLRLKALYRARGITASGEQVYSAEHRTEWLSRLSHPGARLRAELLMEQVDLLRQLRLRARLAMIREARRDPTYEILRSIPFLGPVRVSLLMATMKTPWRFRTKRNLWGYAGLAVVTENSAEYTYVHGSPVRRRRQPLTRGLNKNYNRFLKNVLKSAAAAAIGRPGPFRDIYDRMISGGMRADMARLTLARKFAAVALRLWKRGERFAPTLLTVQAT

SEQ ID NO: 273372 - protein, 342 aa, unidentified
MELSVLGVDLAKHVFELYGIDARGKAVLSKRLTRKKLLSFVAQLPACLVVMEACGASHYWAREMAKLGHRVKLLKARDVKAYVQGNKDDRHDAAALAEAGTRGHLREVMINSVEQQDMQSLHRIRELLVGQRTALASQLRGLLAEYGVVMGKGLGVLRRRIPEVLEEAENGLTAGFRACVAEMYERLRGFDERVSDYDRRIGGAARADERCRRVLEVEGLGPMSASALVAAVGDARQFDSGRQLAACIGVAPAHTGTGGKNRVLGLSKSRGNRYVRTLLIHGARSVVRHAANKTDPRSRWINRLVARSGANVAAVAVANKNARIAWALLTRAERYQPAKAAA

SEQ ID NO: 273373 - protein, 390 aa, unidentified
MSQSFDASRSLTAFEQDSTLVAVIEMSQSKWLVAAVVPGIARQPLKKLDADADALLKLLQRWREEARKAGREVKRIVCAYEAGRDGFWLARWLQAQAIETYVIHAASIAVSREHRRAKSDRIDTELLMRSFLGWLRGEKRHCSMVAIPTMAEEDARRPGRERESLMGEQTRIINRVKAILALFGIGGFNPRLRKAAQKLETLCTADGTSLPENTLAELRRDLERLRMVRDQIRAIEGERLRRLALAPAAASGPHAMVRLIARVFGVGIETADMLVNEALARNLRDRRAVARYAGLTGAPDESGQRRREKGLARAGNGRVRRGMIQLAWRCLIFQKDSRLVQWFRERTADGRRTTRKTMIVALARKLLIALWRLVTTGEMTEGLKLRPAGT

SEQ ID NO: 273374 - protein, 416 aa, unidentified
MKIVRPICCGMDVHKNIIVATIGITNKKTRITEYIQETFSTLNHDLLNLKQWLINHKCFDACMESTGKYWIPIFNILEDEINIYLTHPKYVKAIKGKKTDKKDSKWICDLFKHDLIKFSFIPPKEIRALREISRYRYKLVGMRSSERNRYQNCMTVSNIGIGSVFSDPFGKSAQAIMKEVLESDIIEDEKILKCIHGSCKNKDKILDSIKHCNIETDQRFKMNESMTHMEELQVHINNCEIEIMKRAAPMFDRFMHITQLPGISTLSAILIISEIGVDMKQFESDKQLTCWAGLAPANNESANKKKSVRISKAGQYLKPLLVQCALGAIKDKEGYFGIKYSRIKKRRGHKKAIIAIARMMLVSIYHMILTGETFNPSDYESFRNPKPPIKQQDLTEESAIEFLKKLGFDVSKLTKL

SEQ ID NO: 273375 - protein, 342 aa, unidentified
MDEYDVRQFVGIDLHRQRSVIVRQSESGDQLSAVRIVNDPVALRLELERAGTDPEVVLEATYGWYWAVDVLRDCGAQVHLAHPLGVKGFRYRRVKNDVRDAGDLADLLRMGRLPEAWIAPPQTRELRELVRYRVKLVAIRSGLKAQVHAVLAKAGVLITVSDLFGVGGRQRLAKVPLGAAYAERVRSLLELIDVLDGHEARFAGLIAKRLCNHRGYQALQQVPGIGPVLAAVFVAEIGDVHRFTSPAHLCSWAGLTPKHRESDTVVHRGHITKQGSKLVRWAAVEAIQRYPTTSKIALDRTRIESRRGKNIAKIAAARKLLTLVYYGLRDGHIRALDRPRAA

SEQ ID NO: 273376 - protein, 354 aa, unidentified
MSQKLNTAIAIVGIDIGKNSFHVVGLDKRGAIVLRQKWSRGQVEARFANMPPCLIGMEACVGAHHLSRKLKCLGHDARLMPAKYVRPYSKGQKNDFRDAEAIAEAVQRPTMRFVATKTVEQLDLQALHRVRERLVSQRTGLINQIRAFLLERGIAVRQGLRFLRAELPGILATRTDVLSPRMVHVIEGLAGDWRRLDERIEGLSTEIGALACQDPACDRLMTVPGIGPIISSAMVAAIGNGAAFAKGRDFGAWLGLVPQQISTGDRTILGKISRRGNRYLRVLFVQAAWVVLIRPKSWERYGLKPWIEAAKKRLHHNVLAIALANKLARIAWAVLNKERKFECIRTNKMSPRAA

SEQ ID NO: 273377 - protein, 346 aa, unidentified
MERLDHTQGGRTMYYIGMDIHKKNTQACMKNEDGKVLLAGRFPSRAKDLNAFIDKVEEAGGPASFVIESTGFSIPIYDVIAGRGHEIKVAHPLKIKALTTGRAKTDKNDAEMLAELLRVKAIPASYIPPAELRQLRELTRFRQMLVRNTTQIKNEIHAFLAYRGIETPAALRSPFSAKHQEWLRSLHLSQVDDLLDILVTLRTKIEKTETDIERASQKKEEVELLKTIPGVGDVIANELMAEICDIERFSSAENLYSYAGMVSSAHQSGEKGWTGPITKQGNASIRHIMVEAAFSHVRYCRDSKLTLFFERKKAQKGTKKAIVATARKMLGIIYHMLKEREEFHAH

SEQ ID NO: 273378 - protein, 362 aa, unidentified
MKIHAIGIDLSKTTFHVVGLDEKGAVVLRRKQSRKQLLIYTANLPSALIGMEACGGAHYLGRALEAQGHQVRLMPAQYVKPFVKTNKNDYLDAEAIAEAVQRPTMRFVPIKSDEQLDLQALHRVRDRWVARRTAVMNQIRGFLMDRGLTVRRGPNYLREVLVPVLDDSNALFSGRIRWLLRELQAEWNELETRIEEVTGQIEAIAKENEECQRLMEIPGFGPLVSTALTAAVGNAATFYKGRDLAAWLGLVPRQHSTGGKTRLLGISKCGSEYLRRMMLHGARSVVMHVARKKSALGAWVEQLSARTHRNVAVVALANKMARIPWVILHKSESSSPGIAQPCRCNVTRYGSEDTTFALSDRL

SEQ ID NO: 273379 - protein, 482 aa, unidentified
MKKQNIYQNRSQELYALFENAGNNSKVMCIPVDYAKKHHLAMFCNGYGDIIRKPFPVKNSPEGLNYLVDQVKRSCSHRNIQLQHVFFGGEDVSSYSESFTHSLRSMGWLVASVNAHEAKKQRENLQASTDRLDLMGIATMLISHRANTCPAQSGIYKNLRTIVRHRKKLVKIKTEVKNRIHALVDQLFPGFLDETRSGIMPFSKSSLYLMSDRFSTRQIKRRKCQSLTKKLNRFGTKNPDKTATKLQSYAANAFSAPKPHMHTLQLSLSCHVKHYLCLVENIKYLEKETALVLSQTQGAFLTSIKGIGIILAAGICSEIGDPFIQKSATNLSSYAGVVPRVKQSGGPDSAPRTGSVSKRNNHILKDYLVQASNHIGRHGPEDLNQDFKRRKCQGQNAEFGMARRLMRITMCMMKTWQIYLPDNLRTERADKKDRACYYLSIWPYITKKWSKLTALDKVFAKEQPLGQWRDVVQKIYKVNLDL

SEQ ID NO: 273380 - protein, 363 aa, unidentified
MAISVGVDLHKTQFTYCCRGPESMFGKCLTTPAGYAQFLNEMQRLGAGGERVQLAVESTGNTRFFKSQMTAAGLAVTVINPLKFKVINESVKKTDRHDAATIAEFLEKDMLPEAWLCSEESETIRRLLKSRQVLVRTEVAVKNQIHGLLTSLGMEDKKSSLQSKRGRKEILSTLEGAQNGLVVHTLFTTIEMIEGQVKALEKDLEELVKDDKVVSLLRTMPGCGLITASLIRAYTDDIRRFRTFKQYSAYAGLAPWVQCSNETSHYGSITKRGPEQLRTAMVQLVLGMVRMKKKTLRYRLMERYQIMKQEKGSGKSIIATARKLSKVIYFMLVTGREFDPSLMIDKKLSEKADAMQASFKQSA

SEQ ID NO: 273381 - protein, 519 aa, unidentified
MTTSVRRRRSKTSKVGFVQKPQGRFSERVQVVGPEHFGIVCIDCAKARSRYMLADFYGNYLLEPTTLIHSRGHFAAAVDRIRQAQTEHDLRDLIVVIERTGEYHRPVQRAFRAAGWEVRLMHPYATKQYRQPADPGNKTDDTDLSAIFRGAVNGFGLMETPWPDAYQQLQALRRHRRDLVRKASRLRCQIREVLHAMMPGYAELFGHLWEHASALFLARHTGSAAAVQQLGFEGLASLVRKADLPYRPKALEQILLWADNAPPGHSQPACLGGILADLDDDRLEKTRKIKALEPSLAHLVVRSPYLLLLAIPGINIVSTADLAGELGPIENYANPNAITGRAALMPCRYQSDQVDCQGPLRRSGNRRLRGALMQIAENLSKKNHYFNARAATWLRAGKDPRWIRVKIAKSFSRLGFAMVAGRQMSSHPCCRERHYILAKLMEFHTSHGSLPQTMRDDLEAAIPQLPAKTRREEIKPLEEHLEELKNRRGPQPLAKIIPLVLAKLGLHQVQLTPEGEGPG

SEQ ID NO: 273382 - protein, 338 aa, unidentified
MKLYCGIDLHSNNSVVVILDETDKVIYQKKLTNDLFSILQQLSVYKDEITAIAIESTFNWYWLVDGLMDAGYTVKLVNTAAVQTYAGLKHTDDKDDARWLAHLLRLGILPTGFIYPKEERAVRDLLRKRSQLVRQSTTNILSLQNILARNTAQSLSSYRIKKLDDDQAEKLINDPNITLSLKSNLNVIRCLQSTISDIEAAVLKQSRLRTEFKKILSITGIGEILGLTIMLESGDMDRFPKVGNFSSYSRCVKSERLSNGKKKGEGNRKNGNKYLAWAFIEAANFAIRYNDQVKSFYQKKKSKTNGIIATKAVANKLARACYHVLKDQVTFDVNKSFS

SEQ ID NO: 273383 - protein, 444 aa, unidentified
MLRFVGCDVHKRTAVFTILLSDGTLFGTYTVPVTREGLAAFAERQLAREDRLAMEATTNTWAVAGVLRPFVKEIVIGNPLKVRAIAEAKIKTDKVDSRVLAELLRCDYLPMVWQPDQETQRLRRLTHRRAALVSDRTRLKNRLHSILHHTLVPLPDCDLFSKRGIAWLRQVPLAQEEALARESDLRLLELTELEIAQLDDLLVREAWQDEKVRLVMSIPGIDYTVAQTCLAAIGDISRFANAKKLSAYLGLNPSTRQSGAHCYHGPITKQGNAHARWLLVQAAQHLGQYRGPLGQTMRKSVKRKNRNVAVVACARKLAVLLWHVLSSGEPFRYAQPKTLQAKFSRLRIRATGQRRRGGVAKGTPRSPQYGHGRTRALPSLPQVLAENGLPEIAPLAKGERVMLERKRLDTFYRELQTTSRIQANTPTPQVEETEEDLKSELTQS

SEQ ID NO: 273384 - protein, 412 aa, unidentified
MTAINQFAAHVGLDWADKKHDVCVQFKNGERIFQVVEHTPEALDIWLNELHQKVKGRIAIALELKKGPVVYALQKYPFVTVFPVHALSLARYRQTFWPSGAKDDPQDAELALELMLRYPQKIKAIEPDNGDIRLLQQLVEQRRLLVEDKRRFVNRIINTLKQYYPQPLEWFSHRGSLLLCELIIRWPSLQQLKRARRDTIRNFLNAKGGRAMALTEQRVASIDNAIPLTTDPSVIEANALMATALATQIKVVSEIIKTYDERIETLFDTLPDAGLFKSLPGMGPCMGPRMLAALGDNRDRFNSAEEIQNYAGIAPVTERSGQKSWVHWRWQCAKFVRQTFVEWAAKTVNSSYWAKLYYQGQREKGKSHQSAIRALAFKWLRIIYRCWKTRTRYDEAKYLLALEERKSPLLMP

SEQ ID NO: 273385 - protein, 461 aa, unidentified
MSKRQDIEKAEKRIPLQGLPVIRLRVAGIDLGSERHWVCAPTVDGKDREIASFGATTPELLRMAAWLKARQVESVAMESTGVYWIAPHEVLEGQGLQVLLVNTRQLAQVPGRNKKSDPTDCEWIQRLHSCGLLQGSFRPAESVCMLRTLVRDKANLVAERGDWMRRMQKSLDQMNVRVHRAVSDIDGVTGMAILRAIVEGERDAQKLAKLRDPRCSQTEQEIAEQLSGHWREDHLFSLQQALKMYEAIEERIAAYEKEILRKLGELEQEQTRGQTPPPLKNANKARMIKQRGQEAKREALFRMSGVDITQIDAVGVETVEVVLSEYGTDLSRFPTEKQFVSHISLAPRVAQSGGKPLPKKKRNSASTRVAGVLRMAVLSLRHSQTALGAYYRRIARRIGGDVAVFATARKVATIIYRLLRWGQPYVDEGVAAFEARYQHQRLGRLTATAKELGYQLTPVQA

SEQ ID NO: 273386 - protein, 377 aa, unidentified
MATTRTVLRGQLTAKPGDLYMSLELGDKHWHISIGGERRSVSHYIVEAGHTEEVADCIAKAAARLHTARVHSCYEAGRDGWWLHRWLTELGVDNIVVDPASIEVNRRARRAKTDRLDADKLLAMLVRHHRGERVWSVLREPSPSDEDARRAHRELQRLTHERIAHTNRISSLLVLHNLRPRIVIGGRDWPVWWNAHREQVPPTLRAELEREAVRLKVVKEQVRAIEAARARELAEGKQPLVAQLVRLRAIGAKGAWVLVKEVFGWRHFANRRELAGSLSLVPTPYASGDSEIEQGISKAGNRRVRALLVELAWSWSRLQPGSALTQWFNRRFAGAGKRMRRVGIVALARRLAIALWRYLQTGEIPIGARLKPAGSGI

SEQ ID NO: 273387 - protein, 461 aa, unidentified
MQNKSEGHTGGERRKALEGLPSIRPLVAGIDLASERHWVCAPTPDGTGREVADFGATTPELNRLAQWLKERKVECVAMESTGVYWIAPHEVLEAHGFEVLLVDTRQLARVPGRDKKSDPTDCEWIQRLHSCGLLRGSFRPPEEVCMLRTLVRDKGNLVAESGDWVRRMQKSLDQMNVRVHRAVSDIDGVTGMAILRAIAGGERDARKLAKLRDPRCRKTEEEIAEQLSGHWREDHLFSLQQALKMYEAIEQRISDYDREILRQLAAMQREDTRDQPPPAVKNPQKAKAIKKRGEEPMRQALYRMSGVDMTSIDALGVETVQVVLSEYGPDLSRFATEKEFVSHVTLAPRRPTSGGKPVKKKRRNTASTRVAGALRMAALSLRNSATALGAYYRKIARRIGGDVAVFATARKLATLVYRLLRWGQPYLDEGAEAFEKRYQAMRITALKAKAKELGFELVQSA

SEQ ID NO: 273388 - protein, 351 aa, unidentified
MTSQAYFVGIDLHKELIQVCVLDGRGEKIAEYRFPGGSLEQGLAVVSVLRQWKDGARYAVEAIGMNRWLVNAMREQGMDVVVVDAVKLNLRMLGKKTDRRDAYEIARRLWLGDIDRNAKTYYPSEGEYGCRKLLRTRHKLVQIRQQLVNQVRGLLNAYRVAAPKGELSSKKNLEWLARIELSGNLLTECLRGLQQSLRSVQGSIDVLTLRIEEAASSEAATCLHKNLEGVGPQTALTLVHELGDVSRFTSTRAVAIYAGLAPRVANSADKAHHGKITKRGNSELRWILSEWAVRLLARNPLVQRWAAPLLRRMHKNKVRIALARRLLIGVYFMLRRGEAFSLERCLATRAT

SEQ ID NO: 273389 - protein, 435 aa, unidentified
MLRPVSAPPIRLIGVGIDTARYGHHITFLRDDRQPATNSLSISESRAGYEELRCSLQQLRERHPEAHFHVRIDAAGQYATNLEQFLRGLCLPLSISLGEPNRNKSYREAHFPKRKSDATDSHANARFAVVEQPAATPGTSSEVRTLCELVEHLDSQSKETTRLINQLHNLLARVFPELALLAPDVAARSILKLLKQYPTPAKISTAQLASLTAIPYLSADKAKKIQEAARTSIGSFQGDIAGQLVRDRVIQIQASQAQEKRLAALLTRAFALLPPGGHNHLCSIPGVGQTTAAVLAAKIVQIDRFPTPMHLVSYFGIFPEERSSGVNKAGRPLPVGASRMSPKGNDLVRKYLWHAARTGILYNPAIRTLYARQRVRGKRGDVALGHCMRKLLHLVFAVWKTAKPFDASRYASPDELAPRQEKEAAGCNQAKSAPG

SEQ ID NO: 273390 - protein, 343 aa, unidentified
MTQYVGLDVSQKTTAICVVDAAGRRLWRGQCASVPERIEQTVRRQAGDDARIGIETGPMTPWLVHELRGRGLEVACLDARHARAALKMQLNKTDQNDAEGLAQIMRTGWYRSVHVKSMEAHRARALLGARTQLVGMTTRLSNHIRGVLKTFGMLPGTMRGLPFERRVEALLADRSDVAPIVRPMLAAWRQLREQIATFDKVVRVLVRASPTCRLLMSVPGIGAVSVLAYVSTAEDPGRFARSRTIGAHLGLTPRQYQSGEVDRSGRISRCGDTLARTLLYEAAVVILHRVKRASSLKDWALAIAKRSGMGKARVALARKLSVILHSVWRSGEPFRWSEQAAIA

SEQ ID NO: 273391 - protein, 406 aa, unidentified
MELVALHKRVIGLDVHQAQITACAILEEADGTTRIEQRQFGAFKRDRGALAAWAASLAPDEVVMESTGIYWKSPYAALEAVGIRGQVVNARHVKNVPGRKTDVGDAQWLATLARAGLLRGSFVPPMQLRELRLISRQRQKLVGLLSSEKNRLHKVLTDGGIRLGVVVSDLHGQSARAMVKAIILGQAPHEVLQFASRRLKASREEIFDALQGELTDSHRFVLDELMRHIEEIEARIARFDTRLLDGLKDERNTLALLQTLPGVDLIGAAMLLVEIGSDMAAFGTADRLASWVGICPGNNESAGKRKSGRVRKGNLYVRRLLCEFAHAASRTKSVFQSKFKSLIVRRGHKRSIVALAHKILRTIFFMIKRREHYRDSATDYEALSVQRNAPRWIKALTRFGFMTLTE

SEQ ID NO: 273392 - protein, 347 aa, unidentified
MKFYTKTHQHYCGIDLHTKNLYVCIIDHDGEILVHKNIRANPDALMRLIKPYLEGLVIAVECMFSWYWIADFCEDNGIDFVLGHALYMKAIHGGKAKNDRIDSLKIATLLRGGMFPLAYVYPRAMRPTRDLMRRRMHMMRKRAELLAHIQNTNSQYNLPKIGKNLRYAFNREGIAERFEHPSSQKSIELDLNLIGFYDEQLSKVEGHINRCAKEVDYQSLMILKSVPGIGPILSLVILYEIHDIERFPRVQDFISYCRLVKCKKESAGKSYGTSGAKIGNAYLKWAFSEAAVLFLRKNSEARAWLEKMANRHNKAKALSILAQKLARAVYFMLKRNTVFNPKQFLNA

SEQ ID NO: 273393 - protein, 346 aa, unidentified
MVLIGCDFHPSWQQVSWISRETGEVGDQKLVHEPGAVEKFYRRFPVGARIGMEATGNCQWFLEWMAKLGHEVWIGDAAKIRASDARQQKHDKRDAQLLVKLLEEDRFPRIWVPSREQKDLRQLLIHRYKLVRIRAQVKNGLQHLAMNQGLQKKKRLWSAAGQQALRALPLAPWASRRREDLLKMMSELDGKIDALDRAVVEAAEKDARARLLMTQPGVGPITSMAFVLTIGEVSRFPRGKQVASYLGLIPREYSSGGHQRLGSISKQGNTFLRMLLVEAAQGAVRYDAGFRKEYLHRCHNKPKGVAKVAAARKLAIRLYWMLRTNTAYPEVVRIESSSRVPLVGAS

SEQ ID NO: 273394 - protein, 326 aa, unidentified
MATIGIDVSKKKLDLCWLHDAQAGKVKTRVFPNAHDHYPALLAWLLKQTGASPGELQVYLEATGIYHEPLAHWLHQAGVTVYVLNPARVRYYARSLGDQGKSDKKDSKRIAHFALANPELTPWQPEPEEVRTLKQLAKRLETVQKDIQREQNRLEKAQFNRDAQAERSITHVLALLRREAKRLIKEVDDHIDRHDGLKRDRRLLESIPGIGEVLSVHLLVALRSRRFKSGRQVAAFMGLVPVESTSGSSVRHAPRLSKNGDPALRQKLYMGAVVAMRHNPSIRRQYQRLCAAGKRKMSALGAAMRKLVHIAYGVLAHQKEYEPQPV

SEQ ID NO: 273395 - protein, 340 aa, unidentified
MQVTTIGVDLAKNVFQVHGISATEEVVFNKQLRRAQFLPFFAKLEPCLIGMESCSSAHHWARELTALGHDVRLIPPMYVKPYVKRGKSDAIDAQAICEAVTRPTMRFVAIKTVEQQSLLSLHRARDLLVRQRTQLINNLRGLVAEFGIYIPRGLARVIGFAEDITLGEVLDLPDIANEVIRNLSEQLMALHKRVRWYEERLKQVAKEDARVRLLRTIPGVGAVTASAIIASIGDGHQFRNGREFAAWLGLTPANKSSGGKEKLGRITKMGDQYLRQLLVVGMTSLVRQTRSHPERASQWLTSLLERKPARVATVAMANKTARIVWAVLTRDEPYSTRAAT

SEQ ID NO: 273396 - protein, 338 aa, unidentified
MAIVCVGIDLAKNVFALHGVDEAGKPALVRPAVPRAKLLEAHAALPPCRVAMEACSGAHHWARQFQQLGHTVKLIAPKFVIPYRLSGQHGKNDAADAAAICEAAQRPSMRFVPAKRLEQQGQLCLHRVRQGFVEQRTALINRIRGLLSEFGIVLPLKAATVRREALLHLEDLPGWANLAVGDCLSEVGRLDERIREYDRHLSQLARQSEAARRLMRLSGIGETTATALMAAIGHGHDFACGRQFAAWLGLVPGQYSSGGKTRLGRITKAGDAYLRSLLVLGARAVLAAAKNKADPISRWAVSLQERRGDWKAVVAMAAKNARLAWAVLAKGEDFKLPA

SEQ ID NO: 273397 - protein, 346 aa, unidentified
MNDHRVYVIGIDLGKNWFHLVANDERGTELFRKKLNRGQLAEFAVTAPRCLIAMEACPGSQFWGRRFQQAGHELRIIPAQFVKPYLKSNKNDFNDAQIAEAASRGSMRCVPLKTTDQIELQALHRVRQRFIVERTAVVNQMRALLLEHGIVIPVGRALFARRLPAVLADPQSGLSPRLSQIISRLRQRWLALDEEIDTASAEITQIARESELCRRACTVPGVGPVVSTALIAAVGNGAAFKRARDMSAWLGLVPKQYSTGGKSNLGGISKRGNAYLRMMVIQGARALMIHMKRDQSRMGLWLREVEQRSHPHVALIALANKIVRICWKVLTSQQSYRPFVEVPATD

SEQ ID NO: 273398 - protein, 445 aa, unidentified
MIATLDKIYPGVAAIDIGATAFWVAVADRPVEHFGTFTCDVRRVAAYLREHGVQRVAMEATGVYWIPLHDHLDSEGFEVTVFNGAYARNMPGRKTDVQDCQWHAMLHSHGLLSPCFIPPADIRTMRSYYRQREGHVEAKARCNLQMQKALDLMNVRLHYVISQLAGASGLRVVEAILGGERDPKKLVLLCDEQIRKHKTEDVIASLEGTWDVHHLFALRQALEGYRFYERQMESCDGEIDRLLQKMIEGKPPANPKGAARTRSKARHNAPKIDKLHEKMMTLCDGQDTAALPGISPLTMMKLVAEMGTDLSAWKSVKHFTSWLGLAPGSHSSGKMRKRVRRRKTKAGQIFKEAVMSIAGSKNPALGAFYKRVKAKKGAAVANTATARKLAEMYYRAMTQGLEYVEQGVEKYNERCREQRLRWMQKNAIAEGYNLVPFGDAAHATT

SEQ ID NO: 273399 - protein, 349 aa, unidentified
MVIIGADTHKRSHTVVAVDANGRSLGERTVAATPAGHLELRRWAERFVERGWALEDCRNLSRRLEADLLRAGERVVRVPPKLMAGARVGGRAPGKSDPIDALAVARAALREPDLPTAQLDGPEREVRLLVDHREDLVAERTRIQNRLRWHLHELLPGSEPAPRSLDRRVVLDDLERRLSVESGTIARLAMELLGRVRELTAAINRLEREIAALVRPLAPSLLELTGCGSLTAAKLVGETAGASRFHSRAAFARHNGTAPVPVWSGNVTRHRLSRGGNRQLNAGIHRIAITQLQRPGAGRDYVEHRRAAGDTKTEAIRALRRRISDEVFRRLRHDEHESNRQPAGLLAAA

SEQ ID NO: 273400 - protein, 341 aa, unidentified
MEQATIIGIDLAKRSFQVHGARPDGSVAFRKKLSRGKVLDFVASQPRCVVAMEACASSHHWARAFGDLGHEAKLIPPVYVKPFVKRQKNDAADAEAICEAASRPTMRFVAVKTREQQARCMLFRTRDLLVRQRTQTINALRGHFAEFGVIVPRGPAHVEQLAEAVEDADSGLPDPVRELGALLLVQIADLDEKIGELDNDLRQQAREDEQTKRLMSVPGIGTVCAMAIQAFAPPMESFRSGRDFAAWLGLVPRQNSTGGKAQLGKISKMGQRDLRRLLITGAMSTVSWAVRRGATKDPWLARMLARKPRMLVAVALANRMARIAWALLTKNEYYRGPQPTA

SEQ ID NO: 273401 - protein, 431 aa, unidentified
MCFAPAFGDPEESMGKINERCGGIDVGKRFLLCCVLSGAAHEEPRSQTRRFDATVSDLARLREWLAAERITHVVMESTGSYWVPVFNILEGHFIIVLANPEEVKNRKGHKKDRKDAEHLADLLRHDHIRASFIPPKPIRDLRDLTRRRLQLIQEATRERNPVEKLLEHVNVKMGNVLSDVFGVSGQSMLLALLDEKTTAEQIAHLARGQAKRKIPQLTEALEGHGMRDHERFLIRSCLRHLACLEEEVEQMDCEILQRMQESPFQGAFQRLQTIPGVGQLAAASILAETGVDLTTFSTAEKMASWAGLCPGNRESAGIKKGSQTTLGNSYLRTTLVQCAWSATRKTGCIFQTRFRELSPRRGQKRAIVAIAHQMLTVLHFMLKNNVPFNGAANAPTQRRRQRRAHHHLRCLRRLGISVQIVEPTEFAPQTG

SEQ ID NO: 273402 - protein, 346 aa, unidentified
MNQIIRIGMDTSKHIFQLHGVDGAEQPVLRKRLRRKEVLAFFIKLPPTVIGIEACGASHYWARELEQLGHEVKLLAPQLVKPYVKRNKNDGRDAEALCEAMSRPSMRFVPVKTAEQQAALMLAGIRERLVARRTRLSNAIRGYAAEFGVTAAKGLDKIEPLLAQVAEDESVPMLARELFAMQGHEYAQLQVELKAIEVRLMAWHRANTCSRRLAQIPGIGPIGATMLVMKTPDPGAFPSGRHFAAWLGLTPKDHSTAGKTRLGKITRAGDEVLRSLLVTGATAVIQQVRHGRGRLSPWLVALLKRKPPKLAAVALANKIARIAWKLMTTGESYDGACMPGASAFAA

SEQ ID NO: 273403 - protein, 319 aa, unidentified
MTAPLLFVGIDVAKAECVVAVRPTGATWTVPQTEAGWTALATRLQALAPTLVLCEATGGLELPMARVLAAAGLPLAIVNPRQGRDFAKAKGLLAKTDALDAAVLAHFAEALRPLPRPVPDATTQTLAALVTRRRQLVEMRTAEENRLGSAPAPLRVGLQRHIRWLQRQLVALDTDLDRTIRTHPAWRVQDDLLQSAPGVGPILSVTLLGSLPELGTLSRGAVAALVGVAPWARDSGRARGPRRCWGGRADIRAVLYMATLAAVRCNPVLRAFYQRLLAAGKLKKVALVACMRKLLTILNAMVKTQTPWTPRLASVAALA

SEQ ID NO: 273404 - protein, 415 aa, unidentified
MSYKIAGIDVHKKVLMVVVMDASAPNCKPELRRFATMPSDLRRLSSWLREQEVKEAVMESTAQYWRSVWLELEPYMRLQLAQAFSNRAPRGRKHDFKDAERLVRRLIADELILSFVPKGEQRTWRNMTRMKTQLTRDRVRLQSQMECLLEEMRIKLSSVVSDLLGVSGLRILWAVARGESDPKKLAALGEERLRCSEEQLIDALTGSPQPMHRELLSLQLQRLQLIDEQIAKLNGMIAEALKPHQETVMRLAEVPGFGVDSAQQVIAEVGVKASTFPSAAQFTSWVGTCPGKDESAEENHSSRSAKGNKYLRRVLSQAAHAAVKKNGSHFQAVFRRLLPRLGYQSAIWAIAHRLCRVLWKILHDGVRFIEQGSEPDPQAKKQRARLLARALRKLGYNVAISPMNPPTAESVTPTQ

SEQ ID NO: 273405 - protein, 373 aa, unidentified
MNNNNTLYVGLDVHKESITVAYAINSEPVELMGKIGTSPTDIQNLCKRLRSKSSQVSIVYEAGPCGYGLYRRLVKSGFDCMVCAPSLIPKKPGERVKTDRRDAIRLVRSLRAGDLSAVYVPGIEDEAFRDLARASARDDLRHARQRLKSFLLVHGVHYVGRADWGPAHRRWLSKYSFENPWRQLAFDEHRRTIEDRQAQCERLESALKEAVTEWRLYPVVEALQAMRGIQFITAVGLISELGDLTRFEHPRQLMSWFGITPSEYSSGGSRHQGSITKAGNSYARKLLVEAAWSYRHPARISPAIQKRQENLPRPVIDRAWDAQLRLCKRYRKLQAKGKNVNITIVAVARELAGFIWDMGRIAMSVAQQPQCHK

SEQ ID NO: 273406 - protein, 344 aa, unidentified
MSMVRMIVGGVDTHADVHVAAAIDANGGIVGVESFPADQAGFEALFGWLVSHGEVARVGVEGTGSWGVGLSRFLHDLEITVVEVDRPNRQTRRRVGKSDPTDAVSAARAALSGTATVTPKRRNGPVEQMRILLIARRSARQQRIQTLNQLRHVIFTGPEPVRARFKDRYKTGLVSEVAKLRPRNGSDPILYTTLVTMRGLARRIEMLNTDVRDLDRMLTELVNDTAPSLVALYGAGVDTAASLLVTAGDNPDRIGTEASWAHLCGVTPIPASSGRTTRYRLNRGGDRQADAALYRIVLTRMSSDPRTRDYVQRRRAEGLSNREIMRCLKRYVARETFKHLPSTT

SEQ ID NO: 273407 - protein, 412 aa, unidentified
MTVTNQFAAHVGLDWADKKHDVCVQFKNGERVFHVIEHTAEALDVWLTELHQKVKGRIAIALELKKGPVVYALQKYPFITVFPVHALSLARYRQAFSPSGAKDDPQDAELALELMLRYPQKIKAIEPNNADIRLLQQLVEQRRQLVEDKRRFVNRIINTLKQYYPQPLEWFSHRGSLLLCELIIRWPSLQQLKRARRDTIRNFLNAKGGRAMALTEQRVVSIDNAIPLTTDPSVIEANALMATALATQIKVVSEIIKTYDERIETLFDTLPDAGLFKSLPGMGPCMGPRMLAALGDNRDRFNSAEEVQNYAGIAPVTERSGQKSWIHWRWQCAKFVRQTFVEWTAKTVNSSYWARLYYQGQREKGKSHQSAIRALAFKWIRIIYRCWKTKTRYDEAKYLLALEARKSPLLKP

SEQ ID NO: 273408 - protein, 339 aa, unidentified
MQVTTVGLDLAKNIFQVHGLTADGTVAFNQALRRAQLLAFFEKLPPCLVGMEACGSSHYWARELSKLGHDVRLIPAMYVKPYVKRGKSDAVDAAAICEAVTRPTMRFVAIKTEEQQGVLFVHRARDLIVRQRTQLSNMLRGLLGEFGIVIAQGIGSAIKFAKGVLDGDKPNIPEIAIDVLSNLSNQLVALHLRVRWYEMRMLLQAKQDPRVMLLRSIPGVGPVTASAIVATAGDASQFKNGREFAAWLGLTPLNRSSGGKERLGRISKMGDRYIRRLLVTGMTSRPRQVKTHPERVDPWARALLERKPTRLATVAMANKTARIIWAVLTKNQHYRPNAA

SEQ ID NO: 273409 - protein, 442 aa, unidentified
MAHANQLSRGDVRRNARLDRLRGVVSRDRAVLAVDLADDKQVVVVCDHDSRVLARRTWRCRPWQLDKALGWGLAVACRQGFAGVVVACEPTGHRWRVVVEQASRLGLEAVCVQPLLVRRAREAEDFTRDKSDDKDALLIARLTTQLHCYLPERPTAAWARLRHLGNRRVEQLTLATAAQQRLRDLLECGWPAALEVTRHPLDSLTWRAAMTVGRCDPARIRRLGLARFARAVARELPRWGGRRRHLGILRALYAATGDARGVTAQRAGALERAALVLADFKQALAALAEVEGRMAKVLEELGLAELVTSIRGVSVVGAAAILAETGDPARFDDAKAVVKHAGLCPRDNASGAFAGKTTISGRGRPLLRLAAWRAVWGALPHNPVFAARYTHLTSRQRNRLSDGQARTAVAAALLRQLWVVCVNRIPWELAVAGGTPARLLRR

SEQ ID NO: 273410 - protein, 450 aa, unidentified
MNVERNEHGNYNLLRIIFAENKNTLTGGVKAMRKNDNRQVEKRQRITEATLIVGMDIGCEFNAMCLMNKEGTVLGRYPKIYNSRKGFDYFHTIIEKTKKKNTLSTVLIGMEPTGHYWRKVAFFAMDKDYKVRFVRTTALKHQRELDESSSSKNDVRDAYTIANIVREGKYIDTVIEDGVFRQLRSLAHTRERIQRISTGAKHALKGVLEDYFPELKNIFWSMKAKGLRALLTRCPFPEDVLTITPDTLTEIIAKSTRRKTKAREKAKQIYEAARQSVGLKSIGEADRYRVTTYLSEITYSEAQLKEIELHMKTLLQKIPLAEYILSIPGIGVITCGVFLGELGNPSHFTDPKQIVKYAGYDPQEHDSGQRTGRKTISKKGRWLLRKYLYFMAMRAVHRSPFFKEYYENKQKTMKKKEALCAVAIKLIKVIFALLRDKRMFTEKSCLAQAA

SEQ ID NO: 273411 - protein, 365 aa, unidentified
MKDCITWWVGLDDSADRIDVAIFRNQEEEPREEIGFATDDRSLGRLIKKFKLLPGKVRCVYEAGVCGYELQRLLSRRGIECDVAAPSLTPRRPGDRVKTNRRDARKLAKLHRAGELTTILVPNEHQEALRDLMRAREDVLEDVTRRRHRLTKFLLRHGHKYRLGRAWSRGHWQWMASIRFAEPSLQTVLDHYRLSLDQGLEQLKTFDQEVEALAQQPEFARLINCLMGFRGIKAITAMTILTEAIDLRRYVSAPALMAAIGLVPSEHSTGAKERRGSITKTGNAHMRRVVVEASWHYRHSPIAGKAVKQRRRELPGEVLKLVQRADQRLHKKFRKIVNKGKRSTVAAVAVARELAGFIWAVGQAA

SEQ ID NO: 273412 - protein, 313 aa, unidentified
MKHVPSNVFIGVDVSKDRLDVAVAPSGESMRFANSEDGIALLADFLKPRNPELVLFEATGGWEMNAVNHLAAQRLPLVVLNPRQLRDFAKATGQLAKTDAIDARILARFGQAVRPEVRSLKPLELRKLDALNTRRRQIVEMLTAEQNRLVSAPEWVRPDIEELIAILKKRLAAINRDLNKLIRKSPLWREKDKILQSFPGVGPITASTIIAALPELGTLTRRQVAALVGVAPLNCDSGTHKGKRKIWGGRADIRSVLYMCAMTAARCNPVIRPFYQKLLRAGKPNKVARTACMRRVLVILNAMMRSNTCWQPT

SEQ ID NO: 273413 - protein, 331 aa, unidentified
MAVKIKHFIGVDVSKNKLDLVILNGNNFIGHDVIANNVEDIKTYLKAFTDRKGFTLKNSVFCMEETGIYTTFLLRTLEKKSANIVIENAYHIKNSLGLKREKSDKMDAHSIALYAYKNREELKLYQGQRPVMESLKLLESLRTRMITLRVALNNTLNEQKIYLRVNLFAEQEELTKECKDALIKSTDLIENKIQNIFLNDEHIDRLMTVVTSVTGIGPVTARHIILTTNEFKKISDPRKYACYAGVAPFKRSSGNIESKARISRIANIKIKSLLTMCAINAIKTDDTLKAYYLRKTKVEGKNKMCVINAIRYKLILRVFACVKQNRIYIKS

SEQ ID NO: 273414 - protein, 430 aa, unidentified
MTILKHTPADSILVAIDVSRQRNDVLIEVPGISRHHRLVVLNTRAEHDRFIDRLRDIGRPVLVGFEATGNYHRPLAYRLLKAGFELRLVSSVALARTREALHNGWDKNDSKDAQVILHMLKIGATQVYCDPICSGINDIQELSKTHEVISKAKTELWHRLLTHYLPLYFPEIARFAGNSRSDWFLAFLEQFPMPASITALSKEQFINQAWDVVGRKVSKARLLGDIYETARSSIGLPVTMDSPAITMFRLVIAEGRSLIRQRDAIEQQAHAALADSRDYQRLRQIPGIGPIVAMTVLAEAGDLRRFRHHRQFLKFCGLDLATHQSGQFRGQTKLSKFGNARLRRAFWLAAQVAIRQRDNGFRAKYERYISRDRDNADLKRKALTAITAKMARTTHAVIKTGSDYRPFFEGPMPSGRTSLSRCREGATATL

SEQ ID NO: 273415 - protein, 449 aa, unidentified
MAKRRNKQTSLQVKNPDAAGIDIGSTEHWVAVPADSAERTVRSFRTFTSDLEQLADWLKECGIRTVAMESTGVYWIPLYELLEERGFEVLLVNAAHARNVPGRKSDVLDCQWLQQLHTFGLVRASFRPEGRIVELRTYARQRQTLVEEAARQIQRIQKSLDQMNVQLHHVVSDIAGKTGMTIVRQIAAGNHDPAMLAKHRDARCRATEETIREALRGHYKTENLFTLQQSLALYDAYEEHIRACDQRLEAVLRELATQLPEIDGPAKPPKFTPTGHQIAIDVRNPLERILGGVDVLSIVGIGPLTALNLLAETGQDMTRWRTEKHFTSWLNFAPGTHISGGRRLSSRRRPGRNRAGLLLRQAASSVGRTQTALGAFYRRIAARRSKAVAIVATARKLACAYYRLLRYGGEFVERGAAAADHDYQQRRVKYLRRQAKFLGYDLIQAPPAT

SEQ ID NO: 273416 - protein, 414 aa, unidentified
MNTVQEDQTYWVGIDWGAQKHAVAVCDDQRSIVSFFETETTLEGLNMLVKRLHEFKRIAGVAIETPRDPVVVRLLEEGYAVYPINPKLSHNWRKCTSVAGVKSDEYDAGMLALELSRRHESLTAVRPKEASAQEFLGLCDTLRSLIDQRTSHLQRLRAVLRRYYPAALDFWEDITAPSAWAFIKQCSTPAVLAKTRKDTLIKFLRAHRIGLRPCWLERIDKSRQAAAWPASPTTTGDELMALACVAQLQALEPRIKMLEKEIAEKGKGFEALNLIESLPGAGKSLAPAITAIVVNLEEGNDTGKQLRCMAGVAPVKEESGKRVKTVIRRRCNKRWRNIFHLFAWCSIRRSTWANAFYKLCRERGDSYATALRKLADKWIRIITCMIREKRPYDEKEYIESLRKGGSPIYERLCG

SEQ ID NO: 273417 - protein, 407 aa, unidentified
MTITCGIDWAEAHHDVAVMDGDGTVLGRRKIDTGIVGFGELMSLLAEHCEDPTVVPIAIETDKNLIVVALQTAGLTVFPINPRAVARYRERHGQSGKKSDPGDAALLADVLRTDRHQHRPLPMISNGGRAVKALARQHQEAIWSLHQTTSRLRSVLLEFYPQALQAFPNLKHKAALTILAAANTPELGSKMTARKIVALLHRCGRRNDPALVDQILTDLKTAALRQPAVVESALGLTVAGLLGIITAMHSAVEQLEAALAVEFDQHPLTPVLRSAPGLGPVLAARVLAEIGDDDTRFTSAGGLRAFAGTAPVTRASGRSRHVSARRVRNKRLGDACHWWAFAALTKSPGARAHYDRRRAAGDHHNAALRNLSNKLVGRMWWCLHNNQVWDENAAWSLPPSGDTQLAA

SEQ ID NO: 273418 - protein, 389 aa, unidentified
MRFAGIDIGSETHVVAIVDEEGQVLVKATQVAESAEGYAKLLEVLGTPGDCKVAMEATGHYWQNLFAALAAAGFEVALLNPLRTNRFAQEDLARTKTDAIDAVGIARFTQQKRPVATRLPDSATQELRELVRLRDRVVQDMGDATRRLHRLVDLGFPEFTRYVKNLASELATTILSEYPTAAAFPLATRPLAKMVYDGRHKVGSELAGQLVEAAKTSVGRHHGDAYRVQVRYACEDIALARRRLRDLERRIETTLDAHEVGKLLTTIDGIGPQTAARLVAEIGDFERFANPGKLAAYVGSIPGIKHSGKSKPNGAMSFGHARLRRALWMPLLTAVRKNAWLRAYYQRLVARGKLRKVALVASMRKLLHAIYSVAINRRAFEPRLPEVAS

SEQ ID NO: 273419 - protein, 402 aa, unidentified
MNCVGIDVSKGKSMIAVMRPFGEVVVSPFEVRHTANELSELAGLLKSLDGETRVVMESTGNYHAPVAWLLHDAGLYVSVVNAMLVHDYGNNSLRRAKTDKKDAVKLANYGLDHWLTLPRYIPEEDTRLMLKICYRQYQQYSKVQTMLKNNLISLLDTTFPDANRLFTSPPRADGSEKWVDFVATFWHCECVCGRSEKAFTTQYQKWCRKHGYNFSEDKALDIYASACRHFGVIPKTDTAKLLVEQAISQLQTTSSALAALKQEMQSLAASLPEYPVVMGMFGVGPTLGPQLLAEIGDVRRFHSKKALVAFAGIDAPPYQSGQIDVRSRSISKRGSASLRRTLFLVMSVILQCAPIDEPVYQFMDKKRSEGKPYRVYMIASANKFLRIYYASVKAYLDSLEHD

SEQ ID NO: 273420 - protein, 406 aa, unidentified
MTVYIGIDWSQDKHDVCFLNEAGAAIARVVLAHSPEGFARLESHRQQLGVSPAACLVGIETAHNLIIDYLWGHGYPQVYVMPPSQVNGTRSRYGQSGARSDPGDAFVLADMLRTDRGRLQVWHPDHVLTRQLRSRVSWIMHLTRQVVRLSNRLRAVLWRYYPAALAAFSGLESQISLEFVRLYPTPQTAAELTLAEFKAFAQRQRYTHPRELPQCFARLQAPQPEADLDTVLVFKDEAVELATLLLSVVRAKQAALNNLQHLFGQHPDAPLFASLPGVGEFLAPALLVKFGDDRQRFTSAASVQALAGTCPVTDRSGKRHVIRFRKACDREFRTIAQMWAKASLSDSAWASAYWQQVYARGRSKSHAYRCLANRWLAILWKLWQTRQPYDEAYHLQQRAARSKPRA

SEQ ID NO: 273421 - protein, 368 aa, unidentified
MFEHTFIGLDVHAVNIVAHALNPDTGEIKGHSMAADPAVVLEWVRRFEPPVKVVYESGPTGFVLARQLQAAGITCVVAASSKLLRAPGDRVKTDRRDARVLAQMLAVGSVTEVRIPEPDEEALRDLSRLRSGTARDLAHARQRVNSLLLRHGIRYPENTRWTQEHRRWLRRQHFDEPALQFTYDADVEQAELLAGRLAHIDKQVTATAATCRYTPVINALMCLRGIQMTTAFGLAVEIGDWTRFTGSSIGSYLGLVPSEESSGQSRHQGPITKAGNTYARKLLIEAAWVHRRPYARPGERLLHQLKLVTPATRIRALEGNHRLHRKWEHFDERHKMSVKANTAIARELAGWCWSLAAPLQQGERLDAV

SEQ ID NO: 273422 - protein, 409 aa, unidentified
MDVVSMRCAGLEVHQATVVATGRSPDGQGGLRSVTETFGTMRADLLTLRDWLQAYGVTQVALESTGVYWKPVYYVLEEAFSLLLVDMHALKRVPGRKTDVIDSEWLAQLLECGLLKASFVPPPAIRELRDLTRYRVQQVRDRSQEVNRLCKVLEDAGLKLSTVASDIMGASGRAMLTALVHGTTDPTVLAELARGRLRKKLPELRRALQGRFRPHHAFLIEQIFAKIDFLDETLDRLTAELDRRLVPFEPMLKALDTIPGVDRIGAISIVAETGGDMSRFPTAGHLCSWAAMCPGNNESAGKRRSGKTRKGNRYLRETLIQAALGASHKNGSALQARYHRVKRHRGHKKAVVAVGHQILEISFFLMRDGVTYNELGADYFDRRHAERAVRRHIKQLEALGFRVTIEKAA

SEQ ID NO: 273423 - protein, 353 aa, unidentified
MATNFLRYGVGIDMSSETFHVCLKGLTGDEREKVLGTRKFSNTAQGFGLFCTWLKSKVKDSTIPLRLLMEVTGVYHENLLYHLHALGYEVSLELGKRTKRYLESKGYDSKNDKEDAKGLASMILERKLKLWQPVSEHLYEIRQLLRYRKALTENKVSYQNQLHALDHAHRSSAFICSSIKSTIATLNKQIKELEQEAKKLLEADDQLWQRAKTIVDSLPGIGWLTMMEILAETDGFVMFSSVKQLTKYAGYDIIERQSGKRYGRTAISKNGNARLRSAMFMPAATHIRTCQNSALTQLYRRLIKRNGGIHKKAATAVQRKMLCLIFTLWKSGEKYNPEHLNQNKGQKKRIALA

SEQ ID NO: 273424 - protein, 430 aa, unidentified
MTNLKVTPSESILVAIDVSKSRNDILIDIPGAGRHQRLVVLNTRSEHDRLIERLLAFGRPVIAGFEATGNYHRPLAFRLLQAGFALRLVSSVALARTREALHNGWDKNDPKDAQVILHMLKIGATQAYCDPICSGVNDIQELSKTHEVISKAKTELWHRLLTHYLPLYFPEIARFAGNSRSDWFLAFLEQFPTPASIMTYSKEEFIDKAWDVVGRKVSKARLLGDIHETARLSIGLPAAIDSPAISMFRLVLAEGRSLIRWRDAIEQQAHAVLASNDDYHRLRQIPGVGPITALTILAEAGDLRRFHHHRQFLKFCGLDLATHQSGQFRGQTKLSKFGNARLRRALWVAGQVAIRQRDNSFRAKYERYIARDRDNSDLKRKALTAITAKMARTAHAIIKAGSDYRPFFEGPMPSGRTSLSRCREGASATL

SEQ ID NO: 273425 - protein, 360 aa, unidentified
MIKYIAFDIDCNKTVCCIIQQEKNERYQTIPSTIAHMREFLRREKADGCKIHLVFEISGQAGFLYDSLINCADSITVANPIKMTWIYRTTKKNDRFDARKMAVLLSIGEIPAVHMPSRAVRQWRQTILHRKKIVVKVTQVKNRIRALLKSVGINRPYERGSWWKMANRAWMRRISQQPIDSENLFVMHLDNLLEEMDVLESQLKRVTKYLDDYLANKAQSELLLSIPGVGPRTTEAVLAYTDDVARFGSLRQYGSYFGLTPRLDESGTSRRLGHISKHGPSVVRWVLCESSWKVIRKSKSLRAFYERVMCGQASRKKIAIIAVCRKLLSIMRAMLRDGKHFSEELAARECSEHKQVKDVA

SEQ ID NO: 273426 - protein, 443 aa, unidentified
MTRRCIGLDVHREFAQVAIWQDGHVRQAGRIAATPEGLRLFADSLAPTDEVAIEATCNTHAIAKLLEGRVARVVISNPQKTRAIAEARVKTDKVDAAVLAQLLAADYLPAVWFADEATHALRRQVARRAHIVRQRTRLKNQVQAVLHRNLIPRCPAADLFGRKGRRWLAAQPLPGDELRAVEALLRQLDFHGQELRIIDAELGRVALASPHVRRLMTIPGLDATVALSIVAAVGDFERFRSPEKLVSYLGLNPRVRQSGGQPASHGRITKQGRAHARGMLVEAAWAASKTPGPLRAFYERVRARRGMQIAVVATARKLAVLCWHLVIKGEDYAFARPSLTAQKLRRLELRAGRPSRRGQKGTAAAYSLKEVRARERALTEQAEHAYRQLVADWQAKRPARGEGVAAANGARLSRPSNGATAARQDSAPDPALRSGVDHAHNAA

SEQ ID NO: 273427 - protein, 412 aa, unidentified
MRRVIGMDIHRTFGEVVIWEEGKLRHAGRVDMTRTALEGFGKGLQPTDEVVIEATGNCMAVSRVLSPFVTRVVIANPLQVKAIAHARVKTDKIDAGTLASLHAARYLPEIWTPDAATERMRRLVARRNQVVRHRTRIKNEVHAILHSHLIPPCPHADMFSGIGRSWLGRQALPDDEGAAIERHMRELDRLGSDLDDLDQEIAKSSLDDAAIARLITITGVNLTVAAGLMAAIGDIRRFSSPQKLVSYVGLNPRVRQSGLGLAQHGRISKAGRSHARAMLVEAAWAAAKAPGPLHAFFVRIRAKRGHQVAAVAVARKLTVLCWHLLTKEADYRWARPALVATKRRAIELRAGQPQKKGNKPGPTHAYNVKALRDQETQIARQAEQAYEHFVAQWKTRPPKDKVRGRLRPAGLE

SEQ ID NO: 273428 - protein, 350 aa, unidentified
MPTLARRVTGGVDTHLEVHVAAALDEQGRLLGTESFETTAAGYRKLVSWLEGFGPVALVGVEGTGSYGAGLTRHLHAEQIGVVEVDRPNRQRRRRKGKSDPEDAISAAHAAHSGDAVGLAKTRDGDVESMRVLRVARTSARNSRTQALNQMRSIISTAPEVIRDELRSLNVYHLLERASSYRPGTKRDVVSLTKFTLRTLARRAIELQDEIDEIDSILTSLVKQTAPELVAQLGVGTDAASALLVAAGDNPRRLRNEAAFAHLCGTSPIDASSGKQERHRLNRSGDRQANSALWHIVLTRMVYDPRTIEYFERRTKEGKTKKEAMRCLKRYVAREVFALLPKETIGLDSP

SEQ ID NO: 273429 - protein, 307 aa, unidentified
MTAVGIDVGKAALDVAIFGEPKVHRLANTAAGIRRLIRWLQDREEVRIVVEATGGYEEAVLVACAESGLWITRVNPRQARHFARAIGQLAKTDNLDARMLAEMVQAFHTRLRAHVPLEPWQTELRGWLRRRHQITEAIQRTRQQLAMTLPTIRPLMKKTLIALQREQTLIDTAMKQLLQAHATPAMRSSKGLGPMFQASVLALLPELGQLRRQQIAKLVGVAPLNRDSGQSQGKRRIYGGRAEVRVALYMATLSAVRWEPAMKAHYQQLRARGKVAKVALVACMRKLLTIINARRRDELRAEVPMIA

SEQ ID NO: 273430 - protein, 420 aa, unidentified
MFMIIPSQFPYQATVGLDWADQKHDVFVRFANGDSYRRKIDSRPEAIQEWLLELRSTCGEGKIALALEQRRGALFFQLCTHLSWIDLYPINPHSLASFRQTFFSSRAKDDPVDSQLLEELLRTHPERLRPYQPEPTTERKLEQYCRHRRRLLDLATKTELKLISTLKQYFPLAVHLFNDVGMKSDIALSFLSRWPTLDELQRAKAHTVRSFFYAHNSRSQSLIEKRLQQIAQAHPVTDDLALIEPLLLTTKCLVAQLRRFNQAINEFDRKIRELFKSNPDHFLFESLPGAGEQLAPRLLSLFGSDRSRWADATDIQKYSGIAPVVERSGKSLWVHRRLARPIFICQTFHEFAQQSIQYSSWAEQFYRRQRQRGKSHHSAIRALAFKWIRIIYACWKANKPYDESFYVQTLEKRNFSVSST

SEQ ID NO: 273431 - protein, 402 aa, unidentified
MNAVGIDVSKGKSMVAIMRPFGEIVSAPFEIKHTAGDIHSLVELINSVEGESRIVMEHTGRYYEVLAHQLSEANLFVSAINPKLIKDFDNDSLRKVKSDKADAVKIARYALDKWQNLKQYNVMDELRNQLKTMNRQFGFYMKHKTAMKNNLIGILDQTYPGVNTYFDSPARSDGSQKWVDFASTYWHVDCVRKMSLNAFIDHYQNWCKRKKYNFSQSKAEEIYGKAKELVPVLPKDAITKLIIKQAVDQLNSASTTVESLRTLMNETASKLPEYPVVMAMKGVGTSLGPQLMAEIGDVSRFTHKSAITAFAGVDPGVNESGSYEQKSVPTSKRGSSDLRKTLFQVMDVLIKTHPQDDPVYQFLDKKRAQGKPYYVYMTAGANKFLRIYYGRVKEYLSSLPES

SEQ ID NO: 273432 - protein, 421 aa, unidentified
MNQLTDTGYTAYVGIDWAAAKHDICVQAAAGGRREFARISSQPEGIEAWAQDLYRRFGGPIAVALELNKGPIVSALQKYDFMVLYPINPSTLAKYRETFTPSGAKDDPTDAQLAVDLITRHPERFSPLKPQSVSMRKLIALVEQRDKFLGDRGRLVNRLGHALIQYYPQVLEWFNEHHTVVFCDFLSRWPTLTQVKRARKASLERFFRSHHVHSAQLIEKRITAIKTAMPLTSDPAVIEPHRLQVEVLIEQLRITIRALKRFDDEIAATAQKLPDYDLLFSPLPGAAKVLAPRLLAAFGEDRQRYPHADSLQMYSGIAPVTKRSGKKTWVHWRWQCPTFVRQTFVDWASQTINKSAWAGAYYRQQRAKGCTYQVAVRALAFKWIRILHRCWQDRTPYDESKYLETLRRKGSPLLKYLAEPV

SEQ ID NO: 273433 - protein, 310 aa, unidentified
MDGLIVGIDVSKDRLDVHVLPSGEAFSVARDGEGLAALIERLGGLPVRLIGVEATGGFETIVAAGLTGAGLPVVVVNPAQVRAFAQALGKRAKTDPIDAAVIARFLEATRPELRPIPDEATQLLAELVSRRRQIVQMIGAERQRQKRLKERRVQRSIVRLVVALEKELADLDREIDDQVRGTPAWRAAEDLLQSVPGVGPVVARTLLAELPELGTLSRREIAALAGLNPWTRQSGKWRGKSFIGGGRPAVRTVLFVAALVAGRYNPALKAFRQRLIDAGKPKMVATIAVARKLLTILNAILRDKKLWQTA

SEQ ID NO: 273434 - protein, 376 aa, unidentified
MSQDMLYVGLDTDKKHIDVAVAEALPGGEVRYWGKIANEASAVSRLVKRLQAGGRRLEICYEAGPCGYGLHRLLNIKSGVRCRVVAPSMTPRRPGDRVKTNRRDSIALARLLRAGELTAIWVPDATHEAMRDLVRARGAATADLLRCRQRIAGFLLRQDIGYTGKSWTKKHRVWLGQLAPALPLPAHRLVIGEALQALDEATARRDRLTDHIAELMADWSLAWLVEALQALRGFALINAATLVVEIGDPRRFAKPSQLMAYLGLVPSEHSTGDSVRRGGLTKTGNGRTRKALIEAAWTYSRPARAPRDASPHAPAVTAIATKAGHRLSRRYRQLTTRGKRPVIAVAAIARELSGFVWAIAQVAGPPAATPESSVPR

SEQ ID NO: 273435 - protein, 423 aa, unidentified
MNFNTQNAKIASITEKTLIVGIDVGSDTHFARAFDWRNYEYTKKPLEFSNTEAGFQMFKAWVEDIAEKQGKTAVIPGMEPTDHYWFALGKFLQDSGMKPVHVNPHHVKKSKELDDNNPNKNDRKDPKTIAALVNEGRFSYPYIPTGIYAEIRSLSNLRFQTQEELTRIKNRIARWFAIYFPEYKDVYGDLMAVSGRMILKEAPLPEDIRMLGVNGVNQIWRNAKLRGAGMKRAKTLVSAAEHSVGSKEAPETARIELKNLLNDMDVYATRLEEILQNIEGKLKTIPYVDKLMEIKGIGLVTVSGFIAEVGDIRRFDNPKQLQKLAGYAIVANDSGKHNGESRINYRGRKRLRYVLYEAAISLVGKNAEFKEIHEYYRTRKENPLKKMQSVVAVACKVLRVFYAILTKGVDYDPLKLISDIKRP

SEQ ID NO: 273436 - protein, 370 aa, unidentified
MSVRRILAKTINTDLEYEAIGIDLAKNCVSVALLTTDGEVVCIDRLDYSELEKSAQVLCPTTFAMEPCTEMNYLVQKLEAWGHRCLVIGGKNVQNYVENHYSGQKTDLNDAQALAFLAQDTQLRTIKAKDMEQQKYASLTTLREQYIKQYRQTIVSLKGICQAWGLNISKGISGKARLKDLIENHAAFPEELKESLVDMVTHAQTAQKALNKITKTLEELAKSDKVCQLIQTIPGLGSICSCRLRATVGDIKRFKSPKDFPAYYGLVPRSIATGHNEKKGKITHRGDKTMRSLMVQGAGSVINMATKGKLKSKQLTKWILKKQKEKMPWGKLVCAVAAKLLRIVRAVLISNKPYNSKIAGVAKCSLPKGS

SEQ ID NO: 273437 - protein, 397 aa, unidentified
MYIVGIDIAKRKHEAAVIDGEGTVIIKPFSFTNNCSGYNRLLAMLTKAKLPLDEVSFAMEATGHYWLALFTRLQKEGFRVQVINPVQTNSIRSFYIRQAKTDPRDALLIAEVIRFGHFSESTLHPENIYELRELCRGRHAIVSMQADVKRKVVALLDQVFPEYETAFTNLFGDTSMAILQTCPTPKELSEMPFEELCHLIEVSSHKRFRMAKAQELQALARNSFGFAMAGDVFSTMIRLYAKHLDFLKQQVQEMDRKIAEIMDTLDTPITTITGIGPTLGAYILSEIGDINRFSSSAKLAAYAGIDPTMRQSGEYNGVRNRMSKRGSPYLRHAIWLAASSAVLHDPALKLYFQKKRDEGKPYMASVGHACRKMVSIIYAVMRDNKAYTPCIPNEISA

SEQ ID NO: 273438 - protein, 341 aa, unidentified
MSIVTVGIDLAKNIFAVHGVDENGKAVLIKPKVTRDQLLPLIVQMPPCLIGIEACSGAHHWARLFRSYGHTVKLMAPKFVTPYRLSGKRGKNDAADAAAICEAVTRPHMRFVPIKEEHQQIILTLHRTRQGFVEERTATYNRIRGLIAEFGIVLPQKVAGLRQNIGAHLEDLPGYANQCVGDLLAHADQLDVRIEEYDKLIAKAAREDARSRRLMQRPGIGPVTASALLASLGNGHDFRNGRQVAAWIGLVPGQYSSGGKSRLGRITKAGDRYLRSLLVMGARSILSGLGEKQDGFSRWARSLQERRGYWKAVVAIAAKNARLAWAVLKYGEEFRLNKSAA

SEQ ID NO: 273439 - protein, 433 aa, unidentified
MQDVHDEPLFAERVAGLDIAKAEVEVTIRVPSDTQPGRRQQEIRTFATTRRELDALADWLRSWGVTKAGMEATGDYWKPVFFLLESRGLDCDLYNAAQVKALPGRPKTDRADSIWLAKITERGMISSSFVPPEPIRRLRTCTRYRRHLTQARTAEKQRVEKLLEDGHLKLSSVISDIHGVSGRDMLDAIAAGQRDPRALAQLARGTMRGKIRRLEEALDCSFFTDEHAAVLAMMLTTIDYYTAQIEQLTAKIEVLIEPCLHQAGQLDEIDGIGAICAQDIIAEIGTDMTVFPTASHLVSWARWSPQVKQSAGKRKGSNATGRGNPYLGAALGESTASAGRTQSFLGAKYRRLSRRMPKKKALVATGNSMLTIMHALLSDPDVRYTDLGADYYEARTHTRRQARNHVKSLERLGYQVTIQALNPDTGEPLAAAT

SEQ ID NO: 273440 - protein, 411 aa, unidentified
MNAVGIDVSKRKSTVTIQQPGDKVILAPRDYRHTQSSINELIATIKSLDGETKVCMEHTGRYYEAVASWLSAAGIFVSAVNPWLIKDFGNDSIRAPKTDKADAKKIARFTLDRWAKLRQYSRMDELRNQLKTMNRQFGFYMDQKTAMKNNLIALLDQTFPGANSFFDSPARPDGSQKWVDFVYTYWHVDCVRGKSLAAFTEHYKSWCKRKGYNFSASKAEEVYYAASDLIAVFPKDDNTKMLIRQAVSVLNITSETVETLRVKMDQTASQLPEYDVVMSMDGVGPTLGPQLIAEIGDVTRFEHRGALTAFAGVDPRKKESGDFERKSNPTTKKGSPHLRKTLFQIMDGLILRSPMDNPVYVFMDKKRAEGKPYFVYMTAGANKFLRIYYGKVNAFLASKEEEEAAQIDAEP

SEQ ID NO: 273441 - protein, 342 aa, unidentified
MNLPVRIGMDTSKSVFQLHGVDENEVVVVRRQFRRAEMIRYFERLPPVLVAIESCGSSHHWARLLQSFGHEVKLIPPQYVKAYVKPGKNDAADAEALCEAVTRPSMRFVPVKSKERQAACMLMTVRERLVSVKSQLSNAFRSYAAEFGIVGPAGRQNVTALIKRVLEDDSLPEMARDLFRLQAEEYAAVQARLAKIEAKLMKWHREDDVSRRIATIPGVGPIGSAMLSMKAPPPETFRSGRDFAAWLGLTPKDHSTGGRQRHGGITKAGDSALRSTLIVGATALLRHIRRGRHKPTPWLASLLERKPPKLVAVALANKFARIAWRLMISGGVYNRPIAAMPV

SEQ ID NO: 273442 - protein, 365 aa, unidentified
MQTIHRSQMLFVGVDVHKDTHTAVGLSPFGEKVFEMTIGNETEDFISLVEKTKVEAEKSGLIPSFGLEDVNSWGERLSSFLVDEGLPVRAVAPILVDHRRSKMTHPEKSDSLDAHGVAEVMIQRIDSLPLYKLTDEAQKSKQIRELSLEREWLVKERARLKNQLHILLHRIHNTGYRAKFKDPFSKKALRYWMRSVPKNTDAILEQRMKRAVRRLLDLREEIQEIEDELEATMKDNGITLSTASGCGTVIAAEIIGEIGDIARFHSPGALAKYAGCAPREHSSGKTIRWRKTRSGNRRLNRAFHRMALSQISRSGNEAARAYFKRKVSEGKTKAQALVCLRRQLVNVVWMMLKHRTEYRYPQKND

SEQ ID NO: 273443 - protein, 410 aa, unidentified
MQTLVERGCGLDVHQATVVACLLIVLESGKAHKQVRTFGTATRDLVSLREWLLSESCTHVAMESTGVYWKPVYAILEGAFEIVVANAQHVKKVPGRKTDVKDAEWIADLLCHGLLRASFVPPKPIRELRDLTRYRRKLVESRSAERNRLLKVLETANIKLASVVSDAFGASGLLMLQALAEGKATAPQMAQLAKKQLRKKIPELQLALEGRVEEHHRFLLRVQLHRLRAVENDLGIVEQRIQEKLKPYATEVTLLDEIPGVDATLAGAIIAELGVDMSVFESVSQLASWAGVCPGNNESAGKRRSSRIPKGNVYLKTALVEAANAAAKAKGTYLRDKFYRLKARRGYKRAAVAIAHKILVAIYHMLSHRVCYNELGDLYLDKLNKHHLTRNLVHRLERLGYTVTLEQKAA

SEQ ID NO: 273444 - protein, 338 aa, unidentified
MEQEVVTAGLDLAKNVFQVHAIGADGAVLIRRKLRRTEVIRFFAELPRCLVGMEACASAHHWARELMAIGHEVRLMPPAYVKPYVKRGKTDAADAEAICEAVTRPTMRFVAVKSVEQQAVLMLHKSRDLMVRQRTMLINALRGHLAEYGIVTGLGAAGVVASLKALHEEQDRFPAHARSALHGIAAQLRALASEIERLEAQILDWHRNDETSRRLATIPGIGPITASAIAAAVPDASLFRSGRQFAAWLGLTPRANSSGGKERLGGITKQGDGYLRRLLVVGSTAVMRMTRKSPARQPWMAGLLERKPTKIATVALANKTARIAWAVMTRKEVYAPAA

SEQ ID NO: 273445 - protein, 526 aa, unidentified
MVTGSKKRKSTGSKKRFIGKPTGQIQERVQAVGPEHFGIVAVDCAKRRSKWMLCDFYGKVIIEPTSVEHTAGALRVMTQRVTEACKTEGLTDSIAAVEMTGIYHKPIYRAFRKAKFDTRIVHPFASNHYRQPLHPDEKTDDKDLEAIFHAAIKGYGLATLPVGEVYQSLQAVSRHRHNLVRQRARLMVQIRRLLHQTMPGFADLFEDDKLYRKSIAMPVALQFSSAEAIRCAGVDGIAKHLKETKVRFQARTIERIVSWSSTATESSELATMHTRQWQQLNEVRQLFGEQILAAEQEMAGFLVKTPYILLLSVTGINVVSAARLAGEAGPIEHYASARAINGRAGLFPSRYQSDEVDHADGSLVRQCNRKLRGAAMLVAENLIKCHPYYRGLSALWKQQKVDPRDRRCRIANRAMRMVYQLVGGRQVWRGKGIDREYLLAKLQEFHRVHKTPIDQSLRDMNEAFAWLPQSAYAAEAKPLAELARKKHRGVKRIGDLMIPLLLRLGVAIEEEPKEVESNTSEARSSD

SEQ ID NO: 273446 - protein, 380 aa, unidentified
MEKDIRYVGLDVDSERVAVAVADSAVTEVRSLGMIPNAAESVRRLVKKLEPVHRLRFCYEAGPHGYGLYWQLTRLGAHCDVVAPTLIPVKSGDRVKTNRRDAEKLARLYRSGELTAVWVPDAAHEALRDLVRAREAAKKDQLRAKHRLGKFLLRRGLKAAVGVKSWTLKHLAWIKTLHFEHPAQEATFLDYLHEVEHASARIARLEGALDQAIETAPSTMRALIDGLQALRGVSSLSAATIVAEVGPLSRFARPKQLMGYSGMVSSENSTGNSVRRGAITKTGNAHLRRVIGEAAWAYQRRPSMYRALEKRQEGLSEEVKQIAWKAQHRLSGKYRRLLAKGKLHQKAVIAVGRELLGFVWAIGIQVEKEQRARASYGRVA

SEQ ID NO: 273447 - protein, 325 aa, unidentified
MDHFAGLDVSVKQTSICIVDDTGRIVREVKVASEPEALQKVLGNPAYRFKRIGLEAGPLSQWLFSALAEAGLPVVCVETRHMKAVLKAQINKTDRNDARGVAQMIRAGLYRPVHVKTLRSQKLRMLLTHRKLLQSKAIAIENDLRGTLRNFGLKVGMVGTVRFEARIQELVENFPDLAALVEPLLIVRRALREQIVILHRRLLAIVRDDEVCRRLMTTPGVGPVVALTFRATVDVPARFRKSKSVGAVFGLTCSRYQSGEIDWSGRISRCGDEMMRVMLYEAAQSMLRRGMKKAIVALARRLAVIMHRIWVDGTEFRWTRETTAA

SEQ ID NO: 273448 - protein, 470 aa, unidentified
MGKGSGGSGMTRGDRRRNARRERLRAMLPRDGVVIGIDLAEDKQAIAVVDHDGRVLARKTVKVKAFRLGGALDWAVGQARVRMFAHVTVACEPTGPRWLQVQRLCAERGLPLVCIQPLVSHISREQQDYTTHKTDESDCVMIARLAIELHCYVPEELDEAWAHLRHLGRRRAQLITAATASVQRVRDFLSVAWPTVTETCAQPFISVTWLAALGVVTGRCGGDPGRLTALGLEEFTALVRAAVPGWGGQRPCRPICARIFAALASTEGVVVSCRRGLLRRVADELGDLARTRAQLQAAEADMRAVLGELGLSRLGDIPGLSATGAAAILAETGDPRRYDSSSSLVKHAGLAPAENASGAFAGQARISRRGRPGLRLTVWRAVWPMLLFNPVMAAKYQAMTRAADAAGQAAAAHDGAGTRPAAAAARTRRARARVACAASLLRWIYSMVVHGTSWDPAAAAGGQHALTEAA

SEQ ID NO: 273449 - protein, 424 aa, unidentified
MRNRAYSATHVNQVNVQELIKGRDGQAVWIGTDVGKYELKMVVHWGERQFERPWNVPNPFGIPQVMDLLKELKAGRSLVLAMEPSGTYGDALRQAAADAGLVVQRIHPKAAHDYAEVFDGAPSQHDGKDAAVLAELARVGKGAAWAYATGDRTRQQLEYWVDRMDVHRRLLSVWSGRLEGALARHWPEVGQVLKVNSPTLLKVLIEHGTPGALGADPQAEAKLRRWSRWLLSDPTIAKVIESARGTVGVRMGELDIRRLRDNAQEAQSARREISLCKRRLAQGAAGQVSIAAMGQVVGLATACVLWVYLGEARDYHCGEAYVKAMGLNLVERSSGTYRGRLKISKRGYGMVRYWMWLAAMRWVKDGGVRRWYEATKKRDGGYGGRALVGVMRRLGMALWHVGCGEVFEAWRMFPGLVRGQKKGR

SEQ ID NO: 273450 - protein, 337 aa, unidentified
MTTTYLVAIDLAKRHFQVCATDFSGKVLFNRAFSRQKLMVFLSGQPRCIVAMEACSTSHYWGRLAEGAGHEVRLIPPIYVKPFVKRQKNDAADAEAISEAARRPNLHFVAVKSAEHQARAVTFRTHQCFVRQRTQLINALRGHLAEFGIVAPVGATNVTRLEEAIGAEDDDLPPVVREMAGFYLEQIKALTVRIDGLVQRLQSASRTDAFLRRLCTLPGVGPVTAGALAAFAPDLRTFSDGRNFAAWLGLVPKQLSSGGKSRLGGMSRMGQDDIRRLLIIGAMSRIRWICRRGATPDNWLGRLLLRKPRMVAAVALANKMARTLWAMVIRQQDYRTA

SEQ ID NO: 273451 - protein, 343 aa, unidentified
MSILTDAAAFVGLDYHSAFVQVCVLDREGKMLVNDRCENNARAIAAMVRAPVGEQTRVFAAIEACCGAANLADELVSRCGWSVDQAHPGYVNRLKQSPDKTDFSDARMLADLERVGYLPKVWTAPHEVRELRRVVRYRQQLVQERRATKLRIAAALREARLKPPTSVNPWTKAWLAWLDRAELSEQARWVVSRQLERLKFLKAEIQEADQRLEQLTQDDVLARRLRELPGIGLITAATIRAEIGRFDRFRTGKQLARFCGLSPRNASSGQKQADAGLIKAGNSNLRAVIIEAAQRLVRLDDRWTKQYCQLWKRGKPKCVALAAVANRWMRWLFHQVQPATPAA

SEQ ID NO: 273452 - protein, 321 aa, unidentified
MAKAKLDCCLLLDEASGKHKTKVVKNTQSGIVDLLAWIAKQNVSPEVLHIVMEATGVYHEQAAMALADAGVMVSIINPAQIKDFGRGLAVRTKTDGVDSVVLARYGALLKPKAWVPPPQEARVLQALLVRREAIAQDLQRERNRLEKADATDTPELIHKSLEKSIKFLVKQLAQLQKDIDEHIDKHSNLQKDRALLQSIPAVGPQVGSNLLSVMHNHDFGSAEQLAAYLGLVPVERQSGSSVLGRARISKAGPARIRAVLYMAAVVGTRHNPHVKAVYERLVARGKSKMSSLGAAMRKLVHLCFGVLKTQQPYQHDYLKNA

SEQ ID NO: 273453 - protein, 345 aa, unidentified
MQAEYDGRQIVGIDLHRRRTVIVRMTEAGDQLGCVRIDNDPLTLAAEIAKAGEHPEVVLEATYGWYWAVDVLQEAGAQVHLAHPLGVKGFAYRRVKNDQRDATDLADLLRMNRLPQAYVAPPAVRELRELVRHRAKLVALRSGLKAGVHAVLAKQGLHIPVTDLFGVGGRQLLQTTGLDGPYRARVHAQLRLIDAFDFEIDTVSGQLRARLCQHHGYLEIQRIPGVGPLLAAVFVAEIGETDRFGDAAHLVSWAGLTPKHRESDTTVRRGPITKQGSGLVRWAAVEAAQKIPASAGWLVSSRARIAERRGRNIATVATARKLLTLVYYGLRDGRIRALAPAEAAA

SEQ ID NO: 273454 - protein, 318 aa, unidentified
MPEPIVVGVDIAKKTFDAAIGCTGDILSLPNDDAGHEALIAALIDRTVALIVMEATGGLERHLACALQAAGFAIAVVNPRQARDFAKAMGRLAKTDRIDARSLAEFAQVLNRHADRHKFIKQLPTAQHQELQALVARRRQLIAMLVAERHRLSTSHSVARKSIEAIIEAIRNQLDTVETDLSTHIEQHHAELSRQLTSVRGIGPVSVTTMIAEVPELGILSRREISALIGVAPFNRDSGQMRGKRIIFGGRADVRRVLYMATLAAIRFNQVIQRFYERLVAAGKPKKVAIVACMRKLLTILNAMVKSQKKWDESLHLT

SEQ ID NO: 273455 - protein, 338 aa, unidentified
MKVHILGIDLAKNVFQLHGVDRKGRLVLVRRVRREQLLTVLGELEPCLIGIEASTGAFYWQRQFEKLGHAVKIMAPQYVKPFVRRQKNDTNDAEAICTAVQQRNMRFVPKKTLEQQDIQALHRARQRLVNHRTALISQMRGLLLDRGIAIAVSATRARRLIPKILAAPSAELTELMREIVSSLYAFMLQIDERIKAFDRKIDAIFKASDVCQRIAKIRGIGPKTATAMIAAIGDGSDFKNGRHLAAWLGLVPRQHSSGDRKVMMGITKRGSQHLRTLLVHGARAVVRTAVRKTDSRSMWVNELRQRRGYNRATVAVANKNARVIWAVLTSGEPYRAAA

SEQ ID NO: 273456 - protein, 404 aa, unidentified
MNAVGIDVSKGKSMVAVMRPFGEVVLSPFEVPHSSSELSKLARLLKSLDGESRVVLESTGNYHTPVAKMLHDAGLYVSVVNAMLVHDYGNNSLRRAKTDKKDAVKLANYGLDHWLSLPGYVPEEDTRLLLKNCYRQYQQYAKVQTMMKNNLLSLLDMIFPAVNRLFSSPVRTDGSEKWVDFIDAFWHVQCVSGLSANAFSAKYLKWCRKHGYNFSEEKALEIHRTARDHVAVMPKTDTTKLLVKQAVAQLRTVSSAKAALQNEMDALAASLPEYPVVMDMFGVGPKLGPQLMAEIGDVRRFHSKKALVAYAGIDAPPYQSGQLNVHSRSISKRGSPALRRTLFLVMSFYLQCSPADEPVYQYMAMKRAEGKPYLVYMMASANKFLRRYYAAVKAYLNALEQADL

SEQ ID NO: 273457 - protein, 414 aa, unidentified
MEQKLIYLGIDWADDHHDIVITDDSAKTLNQFQIDHTPDGFAQLHANIANYQKSPADVLIAIETNRGLLVHELIRTGYTVYAINPKAVNRYKDRHVLSKAKSDILDAQALAHLLRTDRHRFKALVPLPEDYRLLDRFCGDLRKLIDEKSRIVNQIISCLKEFYPKALELFSLNSQIFIDFLKAFPDHDTLRACKKKTFLSFIKKHRYPYPGKIEELWETIQSSTLQADTVTARAGKLRLLMLLDQLENLKIHCTHYEQEIQKILDTLPESNSIQSLPGVGDRMAPELVAALGPNGKDTHHRFHSAEEIAKLSGCVPIIKQSGKWEKVSIRHACIRSLRRTFHDWAFTSLKSSTWARAYYDYHKARNQSHFTILRNLGKKWIKILFAVWSKGTTYDEALHIQNLKARNIPWAMAL

SEQ ID NO: 273458 - protein, 416 aa, unidentified
MPFALPDALFFTGIDWAAETHAVCVTDTAGKIAAAFTIEHSADGIAALIRRLARYGEAGGMPVAIERPDGRLVDLLLEAGHPVVPVSPNAIKAWRDGEVLSGAKSDAGDAAVIAEYLRLRAHKLTVAAPYSDETRALRAVVRTRGDLVEMRVAATNQLSALLDAHWPGARAIFADVESPVSLEFLTRYPTPAAAAHLGEKRMAAFLVKHGYSGRRTAAELLARLRAAPAGTSRESLTEALRDAVLAAVGVLTALNASVKSLDRSVAAHLGEHPDGAIFTSLPRSGQVNAAQVLAEWGDCREAYAAPDSVAALAGVTPVTTQSGKYRSVHFRWACNKRFRAAVTTFADNSRHASPWAAKIYDDARASGKDHPHATRILARAWIRVIYRCWRDGVPYDPAAHGAAAALARKTSEQTAA

SEQ ID NO: 273459 - protein, 414 aa, unidentified
MLGQSNQRTYCPTDFDIFLGMDVDKKSIDFTCADSQKLLRSVHIPNHLEPLVRYVQKHCPNQRVLFAYEAGPTGYGLYDGLTAVGFSCLVSPPSMIPTAPGQRVKTNRLDSKKITEALRAGQLKSIHVPSLPYRHLRHLVKVRDLVVRQIGGTKCRIKGLLLFEGIPFPEARAKSPFWSRSVVVQLQKLSCSGGVRFRLDRLLEALEFQRQQYLKITREIRNFCRQDPELKRSLSYLVSIPGIGQIVAPHLLARIGPGQNLQEHRVHELAAFLGLVPTERSTGDRVRRGSITRGGDGRLRSKLIQSAWTAIRQDPELREFYRSVYRRHPQPVAARKAIVAVARKLTTRIFAVLKEQRPFILRPQVHSRPLLPGEIGPRERLDDKQKEEDRDLPSFVPETEVPGPTPKRGASKPV

SEQ ID NO: 273460 - protein, 519 aa, unidentified
MPQPATWLSQGRLHLQNHLSPSPRTTQPHGGVPWERPSNASRWFNQDETVSPLAVHFLQVYPCSEDPSLALLSLLCTGLEEHMAKKGKKHTPTPEDMPLVHPHAAGIDVGAEEHWVCVPADRDAQPIQKFSAFPCDLHRLADWLKACGITTVAMESTGVYGMPLFQLLETRGFAVALVKARHVKNVPGRPKTDRFDCRWLQKLQSDGLLAPSFRPPEDVCRLRSLLRHRDTLVHLSVKHIQHMQKSLEQMNLHLHHVISDVTGVTGMRIMRAIVAGERDPRTFATFRDSRITSSADTIAKALEGDDRPAHICTLTQSLALYDFTQQQIAACDQEMERVLDTFASLIAPETPPLPPPTTAHRQPQRNEPAFALRTHLYRSTGVDLTPVPGVQALTIHTVLSEIGLEMRQWPTDKHFASWLGRCPENQMSGGKVLSTGRRRVQNRASRALRMAAQSLRTSPSYLGAFSRRMRSTLGPAKATTATAHTLAKILDHMLQEKTPYRVQSAEAYLQKDHARRLRQ

SEQ ID NO: 273461 - protein, 400 aa, unidentified
MRFIGLDIGRDFAHVAVVEGSGAARRLPRLAMGDDFRAFAATLGPEDVVALEASTNTWALADLVGAHAGRVVVSNPLRTRAIASAKRKTDDIDAATLAELLAADYLPPVWQPDETTRRLRRLTSHRTGLVHDRTAVRNRVAAVLSRHLVRAPMTDVFGVRGRAWLAALELPPDERLTLAAALALDAVLCEQVAAAERAIAEAVVDDQRARRLLTIPGIGLVTAAAILAVVGDIDRFDRPAKLVSYLGLDPRVRQSGDRPAMRGHISRAGQAHARGLLCEAAHSAVRSPGPLAGFHARLKARRGAGVAIVATARKLAVLVWHLLTKDEDCRFAPVERTAFKHRSLDRMAGRAGTRSPQRGATGSSHDQGRARLRGGHDPHDPALRQAMDRVHTDTTPPSGA

SEQ ID NO: 273462 - protein, 413 aa, unidentified
MQPLYRGLAGIDVHKKMLAVVVRWEREGHTEYQQRSFGTTQREIRHLTAWLQQLQVSEVVMESTAQYWRPVWYGLEAHVRLHLSHPLATRAPRGRKTDFRDARRLVDRLWAGDLEESFVPEAEQRSWRWLTRTRVELKRKIGMVRSQVEGLLEEGGVKLAAVVSDVFGVSGWAMLEQMAQGETDAATIAAQARGSLRHKREPLQEALAGGLSPVGRFLLKQSLEQVRLLQQQIAEIGAALAVAMREHTAVLSRLARVPGVQVAAAQELLAEVGPGAAAFASAAQFASWVGVCPGQQESAGVSYSSRSPKGNRYLRRLLCQLGWAALRTKGTFFAGLFARLTPKLGAKAAAWAVAHRMSRVIWVLLRRGVDYLERGPAPQSPQRLMRKFRRLLLELSRAGLDASALLPPTRATS

SEQ ID NO: 273463 - protein, 461 aa, unidentified
MTFSPCRTHGLGGGVTGSGGIDRPLIRGMTTGLFAGREALRNVDVAIGAVGRPGGDNRRKHVIDVSDIGVFLGLDVGKGEHHATAVTPAGKKAFDKRLPNSEPKLREVFGKLQAKHGNVLVVVDQPASIGALPLAVARDMGCPVAYLPGLAMRRIADLYPGEAKTDARDAFVIADAARVMPHTLRSVELEDETTAELEMIVGFDDDLAGEATRISNRLRGLLTQIHPSLERVLGPRVQHPAVLKLLDQFGSPAQIRKAGRRRLVTLMRPKAPRMAERLVEDIFTALDEQTVVVPGTDAAALIVPSLAGSLQAVLDQRKLLATRIEELLESHPLSKVLTSMPGIGVRTGARILIDVGDGSSFPSAAHLAAYAGLAPATRSSGTSIRGEQPSRRGNKQLKRAFFLSAFAALADPVSRAYYDKKISQGKHHTQALLCLARRRADVLFAMLRDGTFYEPQPTPTG

SEQ ID NO: 273464 - protein, 317 aa, unidentified
MEQSKSTTKIAGVDVGKQRLDAATHGSGETIAVANDAAGISELIAWLKAREVGRVGLEATGGYERALRSALEQAGLEVVVHQPLEVKLFARLKRWRAKNDQRDAVLIAAATAQVDAVKAAQDQRLVELGERLSAYEQVTDQAAELKGFLESVRLKDVASLIRGQIRALERLKAKLLADIIGRIKAQPDLLARLQLLLSLPGIGPVVAATLVVRMPELGAMKRGQAACLLGVAPFDRESGQWKGLRFIAGGRRRPRRMLYLAALAAKRADPSLRAFAEQLRNRGKPPKVAVVAVMRKLIEAANLVLQRGQPWVRHAMT

SEQ ID NO: 273465 - protein, 416 aa, unidentified
MLTNSPLIVGVDVHRKTNTYCLMTQAGREVVPRFTLGNNRPGTQALLEKVRQIMETDGFTELRLAAEATGWYWFHLFESWQSDPGLQAWPSALFLLNPRLTANFKKSYVDLDKSDPIDAYVIADRLRWGRDITTPFDYDVQLLGLRFLTRYRYHVVHQLASEKAYCTAILYLKASEYSNEDKQAFSNLFGAASRAVLQEFASMEEVAAMPFDDLAAWLDEQGKHRFADPLENAKRLQCIARDSYHLPEPLQPAINLVLSLSLKNISHFEGLLKRLDTAIAEQMGTLPNTLKTIPGFGPVLAAGIMAEIGGVQRFNCDEAKVAKFAGFKWRKSGSAEFQAEETHLTRTGNSYLRYYFCEAAFSVQRSDSEYGAYFQRKFKEARTHRHKRATVLTARKLVRLVVRLLATNQPYQPRRL

SEQ ID NO: 273466 - protein, 344 aa, unidentified
MSTTRVVGIDIAKSVFQVCVWMVDGSVAWNKKISRSKLLDTIRQFEPGTLVAMEACATSHFWGRTFASMGYCVRLIPAQHVKAFVRSQKNDANDALAICETAFRPGIHFVSVKTTEQQDIKALRNTRQLMVEQRTKLVGQRRSLLAEYGFTIPVGILRLQQQLPELIEDASNSLTFTLRRLLSSLREDMQALNERITSLDSEIAALSSQQIAYRHLLTIPGVGPLIAAAFISEVDATQFSSGRELSAWCGLVPRQHSSGGKQRLSSVTKNGNRSLRTLIIHGARSVMRCVKKRDDSLSIWLQRLEARQGFLKTTVALANKLTRIIWRVLTDGIDFNMQEAVAIN

SEQ ID NO: 273467 - protein, 386 aa, unidentified
MMIIGVDPHKSTHTATAVDPQTNRTVASVRIDASLAEYRWLLRWARQFDSRRWAVENAEGLGRHLSSWLLARGEEVVDVPPAATARVRQLSRGGGRKNDQIDAAAAACAAALQGDGRPLQPEDITDALALLDESRMNLAQSRVRLVNQLHALLRDLLAGGAPTDLTATTAAALLRQVRPAGDAERVRKQIAICLVSQIRSVDSLLKANAKQISELVATSGSTLTSTVGIGAITAGRLIGRTGRAGRFPTAAAFANYAGAAPVEVASADKARHRLSRSGDRQLNAALHTVAITQIRTRGSRGHTYYTAKLAEGKTPREARRCLKRRLANHIWRTMITDEQRQAANPGGHLGTTLKSSAAGSTPTTSSSDKSLPGLANHDSTTAQPAA

SEQ ID NO: 273468 - protein, 374 aa, unidentified
MTQDIEVYVGFDSSKLRHAVAIAQSGRCGELRYFGEIENNATSVAKLVRKLSSKYARLRFCYEAGPTGYGLYRQITSLGHECMVVAPSLIPKKAGDRVKTNRRDALNLAKLLRNDELTSVWVPDERHEAMRDLTRARGAAVEDVRAKRQHVSAFLLRQGLHYAGKKTWSQAHRRWLCGLKLAHVEQRVVFEEMLLAVRQAEERVVRLEEAIRAAVPDWSLREVLTALMAMRGVDLVSGSAFLAEIGDLSRFRTPRELMAYLGLVPSEDSTGDKIKRGPITKAGNCRARRILVECSWSYQHPPRVSRDKQAKVDAAPPAAREIAWKAQSRLCRRYRALIKRGKRKTVAITAVARELAGFIWSVSRHVTAVTVASS

SEQ ID NO: 273469 - protein, 343 aa, unidentified
MKQYVGLEVSLEQTAVCIVDEQGKALWRGKCASTPEAIAAVVKVRAPHVERIGLESGPLSTWQWHELKKRGLPVICLDARHAKAALSLQVNKTDPNDALGLAQIVRTGWYREVTVKSLDSQVIRSFLSSRARLVEVRVDLINQIHGMLKPFGLVAGKGGRQPFIDRVRELVADGPLKDAVEALLSALQEVSRQIGILSRRLMGLARQDQAARRLMTAPGVGSLVTLAYISVIDTPDRFSSLSSVGAYLGPTPRRYQSGEIDRSGRISKCGDPLLRTYLFEAAGILLNRVSRWSALKAWGTRLAKKVGGKKATVAVARKLAVILHRMWRDNTDFRWSRQEGQPA

SEQ ID NO: 273470 - protein, 394 aa, unidentified
MKLIGIDIEKNKHFFCVMDQQTGEIISQPVSFSNDKEGFDFLVQKIKSYPKDSILIGMEDTGHYHFALLKYLLDLQYTVALINPKTTDFNRKMQGGITKNDKLDTINICDVLDTPERKKQYRITKVNSFDLYEQKQLTRHHHNLKEEENVYKNRLQKCIDIVFPEFNKLFNSKYGTVYMNILKTFGSAENIANTDIRTIRKCFEIEGRGNRISLTPERLKECAISSIGISSLAEVSQIKHLTAQIELIEEQLTEIDKKIEEFSIQNNSPILSIPGISHFSGTSILAELGDISNYSKPSQIIKFAGVAPLHYESSQFNAQHTAITKKGSKYLRKTLYQIILPVIRHNPVFNKYYQLKISQGKGHRCAQGHCVRKLLRIIYHLLKTNQQFNPQLLR

SEQ ID NO: 273471 - protein, 451 aa, unidentified
MASKKTTRTRRKKGNPTPKTTNPDAAGIDLGATVHYVAVPADRDAQPVRHFGTLTGDLNELADWLKDRGITTVAMEATGVYWIPLFQILEDRGFEVCLVNARHVKNVPGRKSDVQDCQWLQYLHSVGLLNASFRPPAAICAVRSLMRHREGLMRAACQHLLRVQKALDQMNVQLHHAVTDITGQTGLAILDAILAGERDPEALARLRHFRCKKSEAEIARSLRGDWREEHLFTLRQSLEAWRFHQSQMAECDKRIAEHLDALDDRGEGSAPPSPKQGANAPDEPMRQELYEKFGVDLTAVEGVSIQTVLAFLGEVGTDVEKFPSAEHFASWLGLCPDNRITGGRTHAAHTRKVNNRLATALRMAAQSLHRSKSGLGDWFRRLKSKLGTKAAVTAAAHKLARILWAMVKHRRPYDPKRLGNPELARARKERYLRRQAEQLGFALTPVEGEVS

SEQ ID NO: 273472 - protein, 343 aa, unidentified
MECYVGLDVSLKQTSICVVNQAGSVVREGVVDSDPEAIAAFVRSKAPGAVRIGLETGPTATWLWTELKQLGLPVICIDARHAKAVLKMQINKSDRNDAAGIARIMQTGWFKEVRVKGLDNHSVRALLASRALLVKIKRDLENQIRGLLKNVGLVIGRAKFNVFTVRAEELIADRPELIAVVGPLLKARQAIEQQTDDLDRKVLKLARYDAQVRRFMTVPGVGPITALCFKATIDDPTRFKRSRSVGAYVGLTTRRHASGEVDWTGRISKCGDAMLRSYLFEAAGVLLTRVPKWSALKAWGIRLAKRSGLRKAKVAVARKLAVILHRMWIDGTEFNWSTKKAAA

SEQ ID NO: 273473 - protein, 339 aa, unidentified
MHLNAAGIDVGATEHWVAVPEDRDEEPVRRFGAFTADLYVLAEWLRQCQMETVVMESTGVYWIALFEVLAERGGDVKLVDAHDARQVPGRKTDVKDCQWLQELHTYGLLRGAFRPEDQICVLRSYLRQRSMLVAMASRAVQHMQKALEQMNLKLPEVVSDMNGKTGMEIIHAILAGERDPQRLASHRDRRCKHDQATIAKALEGHWRAEHLFALQQALEQYEFLQQQLQACETQIEGCLQTFVTHVEVAPPQPTPARQRRARPRQAPSFDVHGYLHAMTGVDLTQIDGIDALTALKVISEIGLDMTRWPTGKHFASWLGLCPGNQLSGGNRSPVKVSPP

SEQ ID NO: 273474 - protein, 359 aa, unidentified
MGNGTFVGLDVHARSVVAGLIDERTGEARVLRVPHATDELVGWLRGLPRPVRTTYEAGPTGYGLARALEGVGIDCLVAAPSRIPRASGERVKNDARDAERLARLLRAGELVGVAVPTRADEAARDLVRAREDARADLMRARHRLSKLLLRYGRVYDKGAWSAAHDLWLRRQRLDEPAAQATLVDYYDAVLQARLRRDRLDVAIHELAGRPDLAPLVRRLACLRGVSTLTAVGLAVEIGDWRRLSGATIGAYLGLVPSESQSGARHTRGPITKTGNGHARRLLVEAAWHHRRPHRRSRALERRREGAHPQVRARAEAAGVRLHRRWASLEARRGLRSTIVAVAVARELAGWCWSLAVMDD

SEQ ID NO: 273475 - protein, 414 aa, unidentified
MSKAKKRIIVNYQGIVIGIDIGKDQHIAVALAPDGRFSKPVKIRNNREGYENLLYWITQWKKEYTADEVIIGMESTGHYWEVPARWLAAKGIQVVQVNALHTKRAKEIEDNTPGKTDPKDARIIAQLVRYGKYLSYILPEGSVAELRELVRIRQHLVTELTEKRNYLRRLLDSVFPEIFSVFKKSWGKTFLHLLHEYPLPEDMISAGLSTVTARLKERCRNIMAKKLQNVYILTWTTVGVPVAHGAYRIGSINTVERIMDLQEKKSEVEKQMESLLVEIPEAAFLLSVKGIGVISVAVILGETGGLSRYAHAEEVIKLAGLNLFEISSGKHKGKVRISKRGRPLLRHILFLLATIQAKKGMPLYREYEQLIERNMASVKALIALSRKLVRVLFALVRDKRFYSSEEPVLLKMAA

SEQ ID NO: 273476 - protein, 337 aa, unidentified
MNEIITIGIDLAKSVFQLHAVDTEGRPSLRRQLRRSQMHEFFQRQPACLIGMEACASAHYWARELTKLGHDVRLMQPSYVKGYVKRGKTDQADAEAICEAVSRPSMRFVPVKSEDTQALLMTHKAREFLVRQQTQIVNAMRAHLGEFGIVVPKGIHNVERLIAACDGADLPAPARKALNLLADQLVDTQRKIEELTADIRADARANEDAQRLQTIPGIGPITASALVSALPDISDFKSGRDLSAWIGLTPRPHSTGGKERLGRISKMGNRYLRRLLYLGAIAQVSARRRGEPGDDWLWKIIQRKKPKQAAIALANRMARTAYALMKNQTEYQVATTA

SEQ ID NO: 273477 - protein, 349 aa, unidentified
MEHYAGIDVSMEQSSLCVIDEKGEIVLETVVDTHPDVIADALSPYEATLKRVGQETGALSPWIHKHLRAHGLPIVCMEAGHTRAALKSMRNKTDRNDARGLAQILRTGWFQPVYIKSDEAYRMRLLLTARRNLKRKFLDLENAVRHSLKAFGIRLGRVARKDFEGKVREYLQADPVMTGMVEGLLTARAVLWKEYLKLHNLVVRVVGRDELMRRFTGVPGVGPITAMSFRAAVDDPNRFAKSRIVGAHFGLTPRRYQSGTSVDYGGRISKMGDENVRHALYEAANALLTLKRGKDPIKSWGARIAKKRGHKAACCAVARKFAIILHAMWRDGTDYGAPKKRTDLLQIAA

SEQ ID NO: 273478 - protein, 405 aa, unidentified
MEIIIEKGCGLDVHKGTVVACIMGTGIKKEIRTYRTVTNDLLRLKEWIQEAGITHVAMESTGVYWKPVFNILEDHFEVILVNARHVKNVPGRKTDVQDSEWLCRLLRSGLVSGSFIPPRDIRELRDLTRHKRKLIQAITAEKQRVEKVLEDANIKLASIASDTFGASGKRIIEELIKGELEPGGMAELSKGRLRQKRGDLKEALVGQVREHHKFMIKVSLKHIRAMEKILSDIERRIQEKIDYHYKEEYALLQTIPGVKGEASTLIAEMGVDMGRFPSEDHLSSWAGMSPGNNESGGKKKPGSTTYGNKCLKTMLTEFAWVASKTKGTYLRSKYHSLVGRRGKKKALVALGHKILIMCYHILKYRCAYKELGVDYLDQRRKDKIARSYIKRLNHLGYEVILQEAA

SEQ ID NO: 273479 - protein, 359 aa, unidentified
MVLERTSVGLDVHARSIVAGVLDTGTGELWSQRLPVATEAVVGWVGSLPGPVVVAYEAGPTGFGLARVLEAAGVRCVVVAPSKLERPPGDRVKTDRRDAERLARLLVIGELPAVRVPTVAEEAARDLVRAREDARSDLMRARHRLSKLLLRQGLVFEGAAWTRAHDRWLGQLRWDQAGLRVAYDEAYGTVLAIQARRDRLEGAIAELAATPAWAPLVGRLGCLRGVGVLTAFGLAVEVGDWHRFTGARIGAYLGLVPAEHSSGAHRVQGSITKTGNTHARRLLVESAWHHRKPYRPSQPLQRRQQGQPAAVRGRAERANHRLHHRWRRLDARGKRSTISVVAVARELAGWCWSLAVMDP

SEQ ID NO: 273480 - protein, 375 aa, unidentified
MDEITRAQIARVGVDLAKQVIQVHAVDASGRRVVARAFKRDQFFAWCTQLPAGCVVAMEACSSAHHWARKLSAQGLNPRLIAAHFVTPYRMEGKGGKNDATDAAAICEAASRPSMRFVPVKTCEQQGVMSLHRVREGLKEERTACINQIRGVLTEFGLVFGKSPKVLRAVLADVIEDASNELSTTARLVIQRAFEHWRELDEHLRWCDRQVGQHVRASPAAKRAAKVIGIGELGASALTAGVGDFTQFKSGHQFGAWLGVVPRQASSGGTIRLGRITKRGDDYLRTLLIQGAKAAVMSADKRDDPISRWLVQLTARVGWQKACVAMANKNARILWAVMTREDGFDSKHVSVKPQAKQQDRHPVVDPPSISAACVA

SEQ ID NO: 273481 - protein, 457 aa, unidentified
MEQALAQRNYRLNRKPGSSRQALTITHPNAAGIDIGSASHYVAVPPDRDDEPVREFPSFTADLHRLADWLDGCGVDTVAMESTGVYWIPLYELLDGRGFTVLLVNARHVKNVSGRKSDVLDCQWLQQLMSYGLLRGAFRPANEVCALRSLWRQREMLLRSQARHVQHMQKALTQMNIQLANVISDVAGETGQKILRAIVSGELDSYALAAMKNVRIRASAEEIAKSLQGTWRDEHLFALKQALALFDFYATQLTECDCEIEQQLQRLQVHDGEPAKGQKRGRSRNAPKFDLRERLFKMCGVDLTRIDGIEVTTALTVIAETGADMSKFPSVKHFTSWLGLCPGTKITGGKLLSGKTQRSANRAAQALRLAAAALRTSKSALGAYFRRLCARMDKPKAVTAAAHKLARLIYTMLTKGEAYTDQGQHYYEERYRERVLRHLSQRAAKLGMKLIANQQPA

SEQ ID NO: 273482 - protein, 326 aa, unidentified
MSVFKNYVGIDVSSKKLNINIVGDSNHGDYEIPNDKKSLREFINKQGISPDTYSVGAESTSRFHLICQETFVLSGFEFRLLNPILTGKKISSSIRKKKTDISDARIIADLLMRGEGNIITKKQLETDKRTVLRTRKTVVNHKTSVKILLKNIELIDHKNNIRIKETINSLTKLISKMEKTISELECVAENCACDVTDEALIKSIPGFATNLAAVVSTEVGDFNRFPSSTQFKAYVGIDPKVTQSGDKLKNGHITKRGNAYLRNAFYLAAQVARCHDPELKAFYEKKKGEGKPTRVAICAVSRKLCERVYAVVTKKTPYEIRQLSFS

SEQ ID NO: 273483 - protein, 309 aa, unidentified
MKKEKVYVGIDVAKAHLDLAFEQVRGQLSNDARGHRALVERLAQLSASAHVICEASGGYERGLVLALGRAQIDCTVVQASRVRQYARACGLLAKTDAIDAQLLARFGHAIAPRPTKALPPAQEQLRELEGQRRHLVRLLVAEQNRRAQLSDKTLLRLSTSLIALLKKQSAQIEALLGRLIEQSAELSAKARKLTQVVGVGSRTATLLLAQMPELGQLNRREAAALAGLAPFNRDSGSAHGKRTIFGGRRAVRCGLYMAALVAAHRNPILAPFYQRLRRAGKPPKLALTATMRKLLIVLNSLLKTDPIPA

SEQ ID NO: 273484 - protein, 424 aa, unidentified
MNNCNKQNEKIELIDEKTLIVGVDIGSNDEYARLFTWRKIELSKKAFHFTNDITGFESFHAWVVKVMKSNNMDKIIVGMEPTSIYWEPLATYCKNNGMIVVHVNPAAVKKSKELDDNDPSKNDRKDPKVIAGLVTEGRYQFPFMPEEQYAALRELSNLRLRTKKSLCQASNRLERWYARYFPEFKTAYKDSNAKTAMLILEDHPLPSDIVALGEEGILKIWREHKVRGAGKTRARKLYEAAERSVGRTEAPYVARMEFRTIMEDIKRYQQRLDEIEQAVDQILPTVKNAEKLLEIPGVGKATVVTFLAEVGDISRFRSAKEIQKLAGLAIVTNESCKHKGATCISYRGRKRLRWILYEAALSLVGRNKEFNQIHQYYTTREKNPLKGIQSVVAVACKVIRIFYKILTTGVSYDGTKMTMDIVRA

SEQ ID NO: 273485 - protein, 343 aa, unidentified
MQAVTTIGLDIAKSVFQIHGVDAAGNVIIRRQLKRRYVLPFFQKLSPCLVGIEACASSHHWSRELQALGHTVRLMPPAYVKPYVKRHKNDAADAEAICEAVTRANMRFVPTKTLEQQSCLMLHRTRHLFIRQQTAVINAIRAHLAEFGIVAPVGRNGVEQLLDVVADASDKRLPEIARACLLALGAQLRSLKVQILNFDRQIMAWHRSNEASKRLDEIPGVGPALATALVASVADPNAFRSGRNFSAWIGLVPKQRSSGGKDKLGSISKQGDRYLRSLFTAGALAVIRYAKIHGTKHRPWLTALLARRPAKVAAIALANKIARMAWAMMARGDRYKEPVALAA

SEQ ID NO: 273486 - protein, 445 aa, unidentified
MVHPNAAAIDVGATMHMAAVRADRAPDPVRSFGTFTADLHRLVYWFTECGVETVVMESTSVYWIPIFELLDARGFTVFLVNARDAKHVPGRKTDVSDAQWLQRLHSFGLLRASFRPKGQIAELRAYVRQRERLLEYAASHIQHMQKALTEMNLQLHHVVADITGATGLRIIRAILAGERDPEALACLRHYSCHSSAETIAKALTGSYRAEHLFALEQALALYDAYHEKASACDVRIEAVLKELSIHRGHGHGSAPRASRRRNRTDQANALAFDVREALFALLGKDITTIDGLGPYLSLKLIAECGDDLSSWPSAKHFTSWLGLAPSNKVSGGKMLSSRTRRSGGRAAALLRLAAVTVGRTDTALGAFYRRLSARIGKAKAVTATARKIAVLFYNAVRYGMDYVDPGASSYETRYRTRVVNNLHRRAKAFGFVLQPLEPKVGAAVS

SEQ ID NO: 273487 - protein, 336 aa, unidentified
MNGSTERWVGIDVAKSKLDVALLDDRGKLRSHVFANDAKGHAALMAWLNQRGGSSQQVCVCMEATGCYSEALAIALMDAGWCVSVVNPARIKGFGQGELVRNKTDRADAALLARFGQALRPEPWVAPSVEVRQLRALVDRLHSLKEMHQQEANRLEAAMNQTGMRESIQSHMQWLQAGIKQLERQIDDHIDGHPRLRADAKLITSIPGVGNTTAAKVMAYLGDVRRFKNAKAVSAFIGVTPRLRLSGTSVRGRSMISRSGHAAIRHALYMPALVALKHNPIVKTFGERLKTGGMSPKAVVAACMHKLVHLIYGILKSRTAFNANFMVVRLDSQDGI

SEQ ID NO: 273488 - protein, 409 aa, unidentified
MKLFVGLDVSSFDIKVCFLNGEGDKLNAFTVSNDLPGAKQLRDEILNSTQNQSVSELRIGLESTSVYSFHQSMFLHNDESIRALDGQVLVMNPKQIANFKKSYSDMDKTDEIDAFVIADYLRFGCLPMSVVKEEQYVALQQLTRARYSIVRQITQEKQRFLQYLSYKCNTFTEEVESSVFGKAMMDLFLENYSLEELSRMPLEELVDYLRLKGKNRFPDPKHVAKSIQKAVRSSYRLDKVVEDSIDTILGTSITLIRTFEKQKQEIDKSIKRIMKGIPQTLQTVPGIGPVFTPGIIAEIGQIEQFDDETKIAKYAGLYWRKHQSGRFTADETSLTRNGNQYLRYYLVEAANSVKKEIPEYGEYYAKKFKEVLKHQHKRALVLTARKFVRLVDALLRKNQIYTPKRSVNI

SEQ ID NO: 273489 - protein, 367 aa, unidentified
MEPIYIGVDFHSRRQTICYLKTETGELVITELKHQDKERVRAFYQQFPGPVIVGLEASGYSPWFEAMLEELGREVWLGDATEIRRRARWRYKDDRRDAELIWDLMVHHEFPRLHQPAPQSREILRMLRYRQKLIKVRTMTKNSLQAIALQAGLAKGKQLFTAAGQVEFKAVAMSPVLQYQRDHWFELLKPLNQELLETMKWCKAAAKGDAAITRLRTHPGIGLLTALCLQHTLQPVSRFRNQRKVVAYAGFDPMVRRSAESVIRLGISKAGSRMLRYLTVEAVQTAIRHDQDLKRFYKRLAERRGRPKAKVAAARKLLIRAYIMMRDEIDYAEFRRRAVAVRLARCSQGPPSSVPEVLIGQSTSPGA

SEQ ID NO: 273490 - protein, 335 aa, unidentified
MKKLFIGIDFSKEKLDATIILACGMNEIGSREYGCFPNNTTGYRKLCNWVKTNAWNTIAEEWLFCGEDTGSCSIGLSKWLYGKGYDIWIENAYAIKHSSGIQRVKNDKADSAIIAEYAWRQQDKVVPFEPLNESLAQLREIFLYRHKLVGQRVAMELRKEDKSQSNKSKAISFINRKSKHLIAEINKTIAECDKAIDSIIEADEELKENYAIITSIKGVARQNATCMLVYTNNFKKFGYDPRKIACYYGVAPFGKQSGTSVNTPAHTSHFANKLIKSLLGQAAHIAKIYNPEIRDYYQRLISKGKKPQVALNNVKNKLIRIIVALVRKKVPYDQT

SEQ ID NO: 273491 - protein, 403 aa, unidentified
MNNVAGIDVSKGKSMVSVLRPFGEVVAKPFSVGHTGSELKELADYLKSLDGETRVVMEHTGRYYEPVARFLHDEGVFVSAVNPKLIKDYGNNTLRKVKTDKADSRKIARYGIDNWAELRQHTPMDTIRMQLKTLNRQQSLYTKTKTMMKNNLIALLDQTYPGVNALFDSPVREDGSQKWVDFATTFWHVDCVRNMSLTAFAERYRKWCKRHGYNFSQSKAVEVHAGAQDLIAMLPRDALTKTMVRQAIDALNAISASMERLKAEMQALAAQLPEYPVVMAMHGVGDSLGPQLMAELGDVTRFTHRNAITAFAGVDPGADQSGTHEAKSTRVSKSGPPELRRALFLVMDCLLKTQPQDDPVYRFMDKKRAEGKPYLVYMTAGANKFLRIYYGRVKEYLAQLENS

SEQ ID NO: 273492 - protein, 315 aa, unidentified
MSADEKELSHKSFDNTPTGIQSLLDWIAGYHLSLSKLLFCAENMGSYVTELSVSSVSMGFSLALVCPLTIKKSIGLQRGKNDRIDAKRIANYAVLHYRKLELYKLPDKDLVRLRGWIIIRDNLVKQKVSSIKLLETFSWMAKLADVTESISFLEEQLKSIKERILEVEEDMEQLIAGSTSLYTNYLLLRSIKGIGIINAIVLLCVTDNFQRFDNPRKFACYCGVAPFEHTSGISIRGKTQTSSLANKEVKVYLTRAAITAISWDPQMKAYYKRKWCGNGSSGWFPHRTFREPPSVRKYRPVQSGSRRTYPATDWR

SEQ ID NO: 273493 - protein, 335 aa, unidentified
MKSYVGIDVHQDKCHATVQDEDGTLVKQGELVNSPSGFEDFFDGVDDAKVAIEAGDAWQPVYDWLDEEGFDVKLAHPYKTRIIAEVKIKTDCRDSEALADLVRANLIPEVYVPCDERRELRSIVKHRGKLVMERTKYKNRIRAELRKRGIGTEGVSLWTKSGASWLRELGISQVIDFLEVIGTLNGRILKLEKEIKEIAGDMKEARILMTIQGVSYYSALTIIAEIVTVERFPNSEKLCSYAGLVPSVKQSGTKVVHGQIRGGRPLLRWILIQSAWNHVNNANSHITRFYKRLERKKPKQLAIIATARKLLKTIYWMLKLEEPFYPEGYDPRKSR

SEQ ID NO: 273494 - protein, 338 aa, unidentified
MKLYGGIDLHSTNSVVALTDEQDRVVYQRRLSNDLPLILSELQPYQPLIEGLVVESTYNWYWLVDGLMEAGYRLHLANTSAIKQYEGLKYADDNTDARWLAKLLRLGLLPEGYIYPKEQRPVRDLLRKRSQLVHQHTDNLLSVQNLMARNRGHSLNANQVKRLQYAEVNRLLKDEHLALAVNSTLVVMHSQAEMIDLLEKAAKKRIKLRPEFKPLLTVSGIGEILGLTIMLETGEIQRFKRVGNYASYCRCVDSKRMSNGKKKGKGNRKNGNKFLAWAFVEAANFAVRYNPQIKRYYQRKRARTNGIVAIKTVAHKLARACYYILRDQVAFEVDKAFT

SEQ ID NO: 273495 - protein, 309 aa, unidentified
MKYYIGIDVSKLKLDICILKSLDSKDFKQIKNDKKDIKDFFISFENLNDLIVVFETTSTYSYNIAKVLTDLKIKYSELNPLKVSHFLKYISNKKNDKIDSYNLAYYSLKFENEIVFDSFNDKSKLLRSYQTLIELLNKINVQIQNYDDSQIHIYDENIKSVIDEFLDISNDNKRMLEDKAFDLVCDLLPQTKTILENEKGIGKNLAIYLFPVFYFNQDKNYKQIISYLGLSPKVFESGSSVKKKSIIDKKGNSNIRKALFLSSLSCVRYNPKFKRYYEHLLTQNKNKKVALVAVCNKIIRHLKNQYFRY

SEQ ID NO: 273496 - protein, 375 aa, unidentified
MNTIYIGVDFHARQQTICYLKTETGELVICELKHQDKEAVRAFYAQFKGHVIVGLEASGYSPWFERLLEEMGCEVWLGHATEIRRRARWRQKNDRRDAELILDLMIHNEFPRLHRPAVQSREVLRMLRYRQKLIKLRTMSKNSLQAIALQAGLAKGSRLFTKSGQQALRTAEMSPVMQWQCEHWVQLLEPLNKQLLETMVWCKAQSKGDESLTRLRTHPGIGLLTSLCLLHTLQPVSRFRNSRKVAAYAGFDPVERSSAERKCFLGISKAGSRLLRYLLVEAAQTAVRKDEDLKRFYKRLAERRGRPKAKVAAARKLLIRAYIMLRDEIDYAEFRRRAVAARLARRGHRPEVPEVLIGQPASAERQETVTCANKQ

SEQ ID NO: 273497 - protein, 412 aa, unidentified
MSPVYRKVAGIDVHKKVLYVVIGEQECGRGKRRRFGATRSELARLGDWLAAEEVDTVVMESTAQYWKPVWMALEQRFRLLLAQAGSNPAPYGRKSDFADAERLIKRLSSDELRLSFVPEAEQRDWRLLTRTRVQYSRNIITLRNRLEGLLEECQIKLSSLLSDLLGATGRRILRALAAGETDAQKLADLRVGRLQASKQEFWQALQGELRPACRLLLAQYLEQLDAAERQIEQLDRELSSMLRQYQDTIVRLCEMPGVALSAAEQIIAEVGPVAAKFPTPGHLASWVGACPGRQESAGKSTNDACPKGNRYMRRIINQCAWAAVRTKNSYFESLFRRLTPRLGVKKALWAVAHRFLRILWRILHEGDRYQERGLLPQPPKLLERRFRRLARDLTALGYHIQLVPPTPNQLPS

SEQ ID NO: 273498 - protein, 365 aa, unidentified
MKKIAYVGIDYHLNSLSIAVMLEGRRDFYETIRLKNSDKVICKYMKKLSKNFEIKACYEASCNGYTFQRKMISWGYGCDVIAPSLTPKKRGERRKNDFRDAKDLARLYAHGLLTVVHPPTEYEESVRSLVRCRLAFKESEKRVKHQINSLLLAQDFHWPHSKWTKDHLHWLSQLQIPNEYSKQALEEYLGHLEYISTRRRYLDEQIEQIACSDIYAPSVKKLRAFKGIRTLTAMVLIAEITDFRRFPNPKALMAFVGLIPSENSSGDVQKGGSITKSGNTRCRKLLIESMQHYMKRPRISLQMKDDLAQVDAHSANIAINCLKRLHKRYWSLTMKGKIHQVAITAIAREFVGFIWAMMQPQAATQ

SEQ ID NO: 273499 - protein, 363 aa, unidentified
MIVIGADTHKRTHALAAVDAGTGEVRGEREITANDDGHRKALHWAHEIDPDVVWALEDCRHVSHHLERALVTSGERVVRVTPRLMGQSRRGEREAGKSDQIDARAVARAVLQEGVEKFPGAHLDERAMEIRLLCDHREDQVAEINRLTNRLRWNLVILDPALEASIPPRKMDFPGQLDRVARRLRGMEPSARVQIAKDQVRKIRELSRQARELKRDLNTLIATYRPELLAELGCSTITAAILIGQTAGAERFPTDAHFARMAGVAPIPASSGKHERHRLHRGGNRRLNRALHVIAITRGRWDPATKAYLERKEAEGKTRMEALRCLKRQLARHFHRLLLKPPLTAATRPVVPINAAISVPCLT

SEQ ID NO: 273500 - protein, 319 aa, unidentified
MNTTTAAHIDRSERNIGIDIGKSMLDVCIFELDIYLQYPNTTEGIRELVKKLSRYNLTRLLVEATGGYERGLVEACAEKELPLIIMQPTQVRQFAKAQGINAKTDKMDSRVIAQFGAVMKPEVRPLNGKKVRYIRDLLSRKRQLNEMRTQELNRQHKAPAILAATHKRLIKVLDKEIESINKLLAKAVNEVTEWQRTYEILNSVPGVGDGVTFTLLGELPELGQLSPRKIAALCGLAPFNRDSGIMKGRRRIKGGRAPIRTVLYMAMLSAIQCNPVMKKFYKKLVEQGKHKKVALTACMRKMMTILNAMVRDNCEWQAN

SEQ ID NO: 273501 - protein, 460 aa, unidentified
MRILGIDLAVVAKHRAILADERGRFIGRLVKFRTCQADLERVYALARRGMTPDEPLAVVLEATDIVWYPVAIFFQQRGATVYLVNPRMAADLARFYQRYAKSDRLSAQTLARLPVVNPDSLYPWVRSGPDYLALQRSCKEVERLTTQASAIQNRLRSTDHLGWPDLHRRVFANPFSRAARWFRDHFYDPRCVVEAGVSGLRRAWRAAEVYDGDEDWIEPLLTLAQEVLSLYGEQGSYLDYRALAEEVQREQRRLAELEADAHFVRLQVTRPRYRQLHPSRNLETIKGVGQDGAAIHVAFVGDPSRFASNRAFRGWSGMVPYSDQSGEREGKGLRITQAGPDPVKKYAFLEAESARQWDPQIAAIYHDQMVNKGNHHTQAVCACATHLLDRIRVILTQDRPYELRDVDGTPVTTQQARAIIAERYTVPEEVRRRNTRRARRERAERRAERKEKKKRRSRSR

SEQ ID NO: 273502 - protein, 374 aa, unidentified
MSERTRFVGLDVHAATIAVAVADEDGSVTEQGTIANDPAAVRKLIGGLAAPDTRLKAAYEAGPTGYALHRRLTRSGITCVVVAPSLIPRRPGDRVKTDARDAVTLARLLRSGDLTAVWVPDEAHEALRNLVRARADAKTDETRARHRLSKFLLRQGLRPPAGVRAWTVKYETWLHHLEWIQPADQVVFDDYQATVRAATERVRRLETALMQQATSSPQVRFIAALQALHGIGFLSAVTIVAEVGDLRRFATARQLMAYAGLVPSEHSSGASRHRGQITKTGNGHLRHVLGEAAHHARHVPSPRTAAKQRHDGVPEPLVTLARRSHERLHQRYRHLAGRIGRPKALTAVARELAGFIWALEQLLDDVTVQEVASA

SEQ ID NO: 273503 - protein, 350 aa, unidentified
MLIGVDYHPSFQTIAFFVEETGECGDQELNHSDGQADKFYRDLKQRGICVRVGMEATGYSRWFERLLAELGFELWIGDPAEIKARRVKKQKFDREDARLLLRLLRENNFPQIWVPDPENRDLRQLLWHRHRLVQMRTRIMNQLHALAMNEGYRWKKKLFSEQGRAQLETLALAPWASRRRQELLELLDRINPTVEELTAAVEREARKRPEARRLMTHPGVGPLTALAYVLIIGTPTRFQRGKQIGTYVGMIPCEESSARKQRLGHISKQGSSLLRFLLVEAAQAAARKHPDWRRRYMHLAMRRHKSIAKVAMGRRLAVRLYWMWRNGCEYSPGLEFGSYAGQLGTGNGVK

SEQ ID NO: 273504 - protein, 343 aa, unidentified
MKLQVLGIDLGKTVFHLVGLDSAGRVVIRKRCSRTQLLAFTANLQVQLIGMEACSGAHFLGRALREQGHEVRLMPAQYVKPYVQTNKSDYLDAEAIAEAVQRPRMRFVPIKTEEQLDLQALHRVRERWVMRRTAVVNQIRSLLLERGLTLPKGRSHLDEQLPRILEDAELNLSDSFRVLLAQLKLELEQLAARVEEMDRVIQKTARENEACQRLTEIPGVGPVTATALIAAVGNASAFRKGRNLSAWMGIVPGEYSTGGKQKLLGISKRGNKYLRRLFVQGARSVLQQRHKQAPGLSSWLAQLLGRAHQNVVVVALANKLVRMAWAVLCKNERYRAPVFAVTT

SEQ ID NO: 273505 - protein, 419 aa, unidentified
MSFKILKNNCCGLDVHKTWIFACIGITDSNKRTVYKQARFSSFTKGLQELCHWLAKYDCTDVCMESTGKYWIPVFNILEKNNILVTLSHPKYTKPQKGNKTDRKDAKWICDLYMCGMVKPSFIPPADIRELRDLVRYRFKLTCMITGEKNRAHNCLTVSNLKLDDVFSDIFGRSSRSITEQILQHPGETFDVAPFVHGRCKTPIEEIQAAVDGAVSKEQAVKLRQCLNHIDELEMRKSEIEREIFRLSDKYEDILTLIRTVPGFDKNPMTAIQVLSEIGGDMSVFPTAKNLVSWAGCCPHNDQSNHKIKSTRISRAGSYFKPVLVQVANTLIKSKKHPEFSTRYRRIKARRGHKKAIIAICRMILTAIWHILTDLKPYTAKGFLEPRPVSKEKVLTASQALNLLKQRGYVIKDEPIFIS

SEQ ID NO: 273506 - protein, 331 aa, unidentified
MTRIICGVDVASQSLEARISQQGAADSFPNNPEGIAALAAFCHTHGVELVAMEATGGYEQQAFAQLSEQGLPVAIVNPRAVRQFAQSMGSLEKTDAIDAGMIAWYAETRKSQPLCLAPRTQLELRARVTRLRQLTEVRTAQLNQQRLVTNRAVQDGFRQMLAFLAAQMEELEQAIAQLIGADPLWRELNQAFRTIKGVADRTVARLMAEMPEIGALSNKTISKLAGVAPLANDSGNHQGKRAVRGGRAAVREILFIVASVVGRHEPDFIAFQQRLRAAGKPPKVVRIALAHKLLVRLNAKAREVRQRLAALQPDHMALPAGILVSHTEASR

SEQ ID NO: 273507 - protein, 311 aa, unidentified
MTMPQDVIGVDIAKDWIDIFTLSSGRARRIPSTRAALGRFAVQAQGTRVVFEASGGYERPLAEALAAANVTYARVNPRQAREFARASGRLAKTDRVDARVLAEMGRALAPRPTAPVEPDRARLADLMARRDDLCAMIRAEANRLKQARDAWVKRDIASLVKLLQRRVERLETEIAVHVAAHDRLSRQSIRLQSMPGIGPILAASLTARLPELGRLDRRAIASLAGLAPHARDSGTFRGKRRIWGGRAEVRRTLYLAGFIASRYDPKLKAFRSRLEAKGKPPKLAIVATARKLLTILNAMTRDRVDYKIAAA

SEQ ID NO: 273508 - protein, 466 aa, unidentified
MLLRLGIDVACRAAHQVSLADEQGRFVWTGRRFRTTPQDLARLWNMLPEGTDPADVLVVMEPTRNAWVPLAAWFRRHGAEVVLVPPERSADLRRYYAKHSKTDRLDSQLLARLPMLHPDGLYAEQGLGPGDALKRAAKLHSTLTHRRSQSLARLDALLEILGPAWHAAIGADLANRTPLKFLAAGYADPYVVKRLGRTRLARFCYRHSRGAWGEPHADALLAAANQTLQLWAGGELDYPDLAEDIAIEARLALQLTEEIKDLDERTTLLLHQADPMGILTSAPGVAAITAAAILGRLGDPKRFDSLAGARAFTGLVPILDSSGLNGRHGGPTKRGDAVLRQALFMAAGQARRIDPTLAAKYQRLMIDAGKHHNSVSALCHIATTLLTRVIACWRAGQPYQLRDVDGTPVTMDQARTIIAERYAIPKDLRARRKTTADTGTDRRSKESPSAPSTGPSNHNATTPDAA

SEQ ID NO: 273509 - protein, 386 aa, unidentified
MELLHRRCCGIDVHKETVVAGLRLVSDGKVTTEVRTFQTTTADLLRLSEWLAANDCTHVAMEATGVYWKPVWHILDDGEFTLVLANAAHVKNVPGRKTDVNDAMWLAELLAHGLIRASFVPDTQTQEMRNLLRTRKQLVREQSSHVLRVQKTLEDANVKLDSVLTDLMGKSGRAIIEALIAGETNPTKLASLADRRVKASPEELREALRGRVTKHHRFLLRLHLNQIDALNAAMATIDARVEANLGPFRTAVEQIMSMPGFKHLGAQVIISEIGIDMSRFPSAAHLISWACICPRNDESAGKRRSNRLRKGGTWLKTTLVQCAWAAVKKKDSYLQAQFHRIKARRGPKKAIMAVVASILTTIYHMLKDGTMYKDLGRNHFDRRSSK

SEQ ID NO: 273510 - protein, 333 aa, unidentified
MTRWETPNTAKGKERLAGRIAGLGKARCVYEAGPCGYDLRRFLDGKGIPCDVIAPSLIPTRPGDRIKTDRRDAEKLARMHRMGELTAICVPTPAQEALRDLVRTREDANEDLVRCRHRLQKFLLRQGRRFEGKSWTREHWRWVRALTFDDANAGTVLVEYVLAVDQQLERVARLDARIEEEAQNPGIAPAVARLKTLRGVRTLTAMTIHSELIDLSRFASPRDLMSFIGLVPSEYSSGGKQRRGSLTRAGNAHLRRVLVEAAWHYRHPPHRTGETIRKRREGQPPDVIETARKAEVRLYRKFTRMVMRGKRTTVAAVAVARELAGFVWAIGRI

SEQ ID NO: 273511 - protein, 411 aa, unidentified
MQRKFELFVGVDWGSEQHRVCIVSPTGEILDQRWVEHSGQSLAELVTWLRSKTTASPDNVAVAIELPRGSVVETLMEQGFAVFSINPKQLDRFRDRYSPAGAKDDRRDAFVLADSLRTDMRCFHTVRLDEPATIRLRELSRLDDDLRLEQNRVHNQLREQWHRFFPQLLQLSPAADEPWVWDLFQTVPLPGKAVKLPATRVQRILAKHRIRRIDVPQVQAILAATPLSVAPGAAEAASEHALLLLPRLRLLQQQRTAISKRIDTLLEELAKPDQTDSETIEHRDAEVLLSLPGVGRQIAATMLSEASQAIAERDYHGLRCYTGAAPVTRQSGKKKVVLMRQGCNERLRNALYHWSRVSVVYDPKSKIEYAAMRAKGHSHGRALRGIADHWLTVLLSMLRHHTLYDPQRRPA

SEQ ID NO: 273512 - protein, 394 aa, unidentified
MIYAGVDIAKTDHVIGAVDERGAEMCRPMPFKNTEAGLERAAAWLEGLAGSPSDVVVGMEATGHYWMACYSFLVARGYSVAVINPMQVKAVRKLKKLDKVKNDRIDAWLIAETLRIGQYDETRLATDEVASLRSLSRYLQSLRGMAAELKTQCVCLMDAHFPEYAGIFSDMFGAGSRAVLSKSPLPFELARRRADSLARDIAEASRRGGKSAGCAARIKAAARSSIGVRLGQEAASFQVKSLIRQIEFADSECAKVEARVRALLDEVEPLVLTIPGVSYVTGAQIVSEIGDVSRFRNASALVSYAGLNSSVSQSGQFDSGGGPITKHGSPYLRRALWLAANRARQHDPGLRAFYDKKRAEGKPHRVAVTAVARKLCHIVFAVMRDQVPYDPGRE

SEQ ID NO: 273513 - protein, 349 aa, unidentified
MRFYTKQHRHYCGIDLHARTMYVCILDAAGEVRVHQNLPAKPEVFLEVIAPYREDLVVACECIFTWYGLADLCAAEGIAFVLGHALYMKAIHGGKAKNDRIDALKIATLLRGGMLPQAYVYPAGMRATRDLLRRRLHIVRRRGQLLAHIQMTSHQYNLPALGKRIAYPSNREGVAEHFEDRVVRKSIAVDLALLERYDALVTDLESYLVRQAKQHDPQAFQLLRSIPGIGKVLALTILYEIHDVRRFDRVQEFASYARLVKCAKESAGKKHGTSGAKMGNVHLKWAFSEAAVLFVRHSEPGKKLLARLEKRFGKGKALSILAHKLGRAAFYILLRGKAFEIERFAATVS

SEQ ID NO: 273514 - protein, 357 aa, unidentified
MIKINQKADFNNHTIYVGIDVHLKSWNVSLYCNQQYLKSFNQPPLPDALQSFLLNSYPGACYKCAYESGFCGYWIQRELFQKNIDCIVVNAADVPQTNKGTKNKTDKNDSKRIAQALQAGLLQSIYIPDDEIEADRQLVRCNERFNNDLVRAKNRIKALLYQLGIKLPDNFNNCNWSYLFINWLKNLEFKNASAKLALSHQLTMVETIRQQKLFVLKDIRKLLRKERYITIAQYLCSVPGIGPITAASLLTEIDDMKRFATFEQLNSFIGFYPSQFSSGENIHQGNITARQHRRLRSLIIEAAWVAIKTDPAMTKCFIEFKNKVGAKRAIIKIARKLLSRIRFVWINKMKYEKGIIK

SEQ ID NO: 273515 - protein, 324 aa, unidentified
MNIFALTLRCRTVKLIKMKTEEIKFIQLIKAGCGIDVHRDIIVATIRKSNEEYETREFGAYTSSLTSLRDWCKKEGVTHVAIESTGVYWKPVFNILEEDFEIILVNARHVKNVPGHKTDKNDSIWISKLLLSGLLKGSFIPPVDIRELRDLVRYKKKVVAQIASEKNRIIKILEDANIKLSSVLSNVDGAVGTKIINSLIEGKTDVEELVKFYHGKMKVSKSEFKMALEGRITKHHRFMLQLHKDSIADKERLIERIDAEIDEATKAYQVEIDLLQTIPGVGKDSAISIISEIGVDMSRFPDENHLSSWAGMSPGNNETGGKKK

SEQ ID NO: 273516 - protein, 388 aa, unidentified
MRPISQTTTQKLSHCRRDDATLYASLELSQATWLVTSLSPGSEKMSKHSTLGGDRAALLGLLRRLQLRAERLAGGPVAIVVIQEAGLDGFWVHRLLSANGIESYVVDPTSIAVPRRRRRAKTDAIDGETLLRTLLAWQRGEPRVCAMVIPPTPEQEDRRRTSRERAVLLQERVRHVNRVKGLLASQGITHYEPLHKDRRTHLAALETGDGQPLPLRLKAELLREIELIELLIRQIAEVEVERDTAVELDAEGTQSPIVLLARLKAIGPQIAAVLYLEGLYRSFANRREVAAYAGLVPTPWRSGTIDREQGISKAGNRRLRHIMIELAWLWVRHQPDSALSRWFRARVGTERGRIRRIAIVALARKLLIALWRYVTHGEVPEGAVLKAA

SEQ ID NO: 273517 - protein, 369 aa, unidentified
MSVRRILAKTIDTDLEYEAIGIDLAKNCVSAALLTTDGEVVCIDRLDYSELEKSAQALSPTTFAMEPCTEMNYLVQKLEAWGHRCLVIGGKNVQNYVENHYSGQKTDLNDAQALAFLAQDKQLRTIKAKDIEQQKYASLTTLREQYIKQYRQTIVSLKGICQAWGLNISKGISGKAQLKDLIENHAAFPEELRESLVDMVTHAQTTQKVLNKITKTLEVLAKNDKVCQLIQTIPGLGTICSCRLRATIGDIKRFKNPKDFPAYYGLVPRSIATGHNEKKGKITHRGDRTMRSLMVQGAGCVIRLATCGKLKSKQLTKWILKKQKEKMPWGKLVCAVAAKLLRIVRAILISSKPYNPKIAGVAKLSLIHI

SEQ ID NO: 273518 - protein, 403 aa, unidentified
MSTFFAGLDWASRTHAACVIDEHGSVYLQFEVNHDACGLAELCRRLLGAAVTAVAIERPSGLIVDALLEAGFAVVPIHPNVVKATRPRYRSHGGKSDASDAYLLADLLRTDGHRFKPLAPQSDDICALRALVRGRDDLVATRVQLANQLRSLLQSFWPGAAEVFADVDSPIGLAFILRYPTPESAARLGPKRMAAFCAQHAYSGRRSAQELLDRLHQAAAVAVGELEMEAKGELSLSLARTLDRLVDQIRLLSSRIEHHVSSIDDGRILMSFPRAGRICAAQILAELGSVRERFDSDEHLAAEAGVAPVTYASGKSKAVTFRWACNHRLRAALTCMADNSRHANAWAASVYAKARARGCDHPHAVRILSRAWLRVIWRAWTDHKPYDPALHGGAQLVLKTAGG

SEQ ID NO: 273519 - protein, 437 aa, unidentified
MLDKTKTLQRKIMNETPPFACTIGLDWADQKHDLWICPAGSSKSEHLRLDQTPEALHQWVAKLRARFDNQRVAIGIETSRGPVISGLLAYDFIVLFPVNPKALKDYRAAFSVSGAKDDRTDAMLLEEWVRLHRDKLKALEPDTQLTRKLAGLAENRRHLVDERTRLVNQLHSALKTYYPLVESLLERQMTHPMATEFLIRWPDLEALKKTRPQTLRAFFYKHNSRSASLIEQRLQAVEQAKALTTDPAIVEPARGLVSALAGMLRPLHKSLGHLDQQIQNAMDQHPDAALVRSWPGAGPALAPRLLVAFGTHRERFGSATEVAQFYGIAPVVQQSGNTKTVHMRHRCPKFGRQTFHENAACALKKEPWAKCFYESHKNKHDGKHHQACRALAYKLVRIYFRCWKDRKPYQPDQYLQALQKHGSPLHKSLADQPAKPL

SEQ ID NO: 273520 - protein, 391 aa, unidentified
MIYIGIDVAKDKHDCFITNSDSEVLFKAFTIFNNLDGFNDLYQKIESVMDDVTKVKVGLEATGHYSYNLLGYLIDKGLPTYVINPLHTNLYRKSLSLRQTKTDKVDARTIASMLMSDVNLKSYSDTSYHNEELKSLTRYRFDKVKERAKLKTSVSRLVCILFPELEKLVPTLHMASVYALLSKFPSTKHVATAHLTRLTNLLSESSKGRYCKDTAITFRDAARASIGSNMPAKSLELKHTIKLIQELDSEIGEIENEIKIIMDGINSPILSIPGINYRMGAMIIAEICDFNRFDSPDKILAYAGFPPSTYQSGQLDGAYAHMEKRGSRYLRYALYNATKYVCHWDPTFAAYLAKKRAEGKHYNVAISHAVKKLVRVIYHLEKTKQQYIKAT

SEQ ID NO: 273521 - protein, 337 aa, unidentified
MESKLFMGCDIAQDTFTFCLRDQAHVIIQGEVSNSKKAIEKWLKELKQISQVDVTKVIFCLEHTGIYGMILIRTLHQRGLIVCVEGAANIKLSLGLQRGKNDRVDARRIAEYAMRYTDQLKQWKPKREVLDRLQLLNGMRSRLLKAHKVLSSHTKEAGKYLGKKEHMLLKKGTQESLKAIKANIKKADQDIEAIIKSDENLKRLSDLVTSVDSIGMVTCAAILVKTNEFQDFREAKKFACTSGVAPFEHSSGKSIRGKTRVSHRAHKDLKTLLHMCAVGSISRKGELQDFYLRKVGQGKNKMSVLNAIRNKLIHRVFAVVRDGVMYQKNYQYNLVMS

SEQ ID NO: 273522 - protein, 365 aa, unidentified
MKKSSTAAAASNKNFNQKLTIGLDLGDRSSWYCMLDEAGEVIRERKVGTTPKAMKEVFAAMPRSRVALETGMHSPWVSRVLEELGHEVIVAHARNVRLIGESRRKDDRLDAMTLARLARIDPQLLSPVKHRSAQAQADLTVIRARASLVRARTALVNTARGLTKSYGERLRGCNPRNMDTEKARALSPELQAALGPLLQALESLSERIAEYNQQIEAIAQQSYPQTALLKQIKGVGTLIALTYMLTLEDPHRFRKSRDAGCYLGLQPGRRNSGQSEPQMHISKEGDPYLRTLLVQGAHHILGPFGADSDLRRWGLKLAERGGKNGKKRAIIATARKLAVLLHRLWVSGEVYEPLRNTKRIMSAAA

SEQ ID NO: 273523 - protein, 414 aa, unidentified
MHQNQSWFAGVDWASQKHDVWLADGSGKRLGKRTFEHSGEGLAQMCNWLIATSGGKPEEIHVPHGAVVETLLDRGFKVYAINPRQLDRFRDRFSPAGAKDDSRDAETLSSSLRTDRRAFHEVSLASPAIIELRECSRMADDLSADKIRHANRLREQLQRYYPQMLQFGSDLAEEWFLSLWEAAPTPAKAARLRQGTVEKLLKRHRIRRIGAAEVLAILKQQALVVAPGVTEAAVAHIRALIESIRLFTRQLKEAHRQLDELCSLLAEPADGESGQTGPEPEQTLVAILQSLPGAGRVVLAVLLAEAFETLQRADYAILRMLCGVAPVTRRSGKSRAVTRRLACNPRLRNAIHYLADAARRCDEKSKAKYLALRARGCSHARALRTIGDRLLYVACTMLKNRTLFDPCFESQKSA

SEQ ID NO: 273524 - protein, 344 aa, unidentified
MTHYTGIDVSLRSVSICVVDDKGEVCLEAKVAAEIDAIVDRLRRFSGDVKSVGFEAGTLTQYLTYGLQAAGFEVICLEARQVSVTLAAMRNKTDRNDARGLAQILRTGWYSRVHVKSLQSHQVRALLTSRKAILKKCVDLENELRGLLKVFGIRLPSRVGHGSFDAELRETVSSDEVLACALVPLLDARTVLYKTYLKLDNAVKGLVRVDPICRRLMSIPGVGAVTALTFKAAVDDPNRFKSSRTVAAHFGLTPRRFQSGEVDNPGHISRAGDADVRSALYVAAHSLLTRNAQWSTLKAWGVRLAKTRGHRRVVIAVARKLAVILHRMWIDGSEFRWGAVATPA

SEQ ID NO: 273525 - protein, 350 aa, unidentified
MTSMTSTRRVVTVGVDTHSDVHHAAVIDEVGRPLADAGFPTTPDGYRQLLAWAGGHGEIAAFGVEGTGAYGAGLARHLRAAGQVVIEVDRPDRKTRRQRGKSDPIDAYAAAAAVLSGAAAGTPKTRDGRVEAIRTLRVARRSAIKGRTQAINQLKALVLTGPAELRQALAGQSTRQLLTTCRRLRVADRLTEAADPITAATKLTLRRLARRIATLTEEIDELDAELRPLVTATAPALMGVYGVGTEVAAQLLVTAGDNPERLRSEAAFAQLCGTAPLPASSGRTTRHRLNRGGDRHANYALHIIALSRLSSHQPTRAYAARRRAEGMSNLEIIRCLKRYIAREIHHVLTA

SEQ ID NO: 273526 - protein, 387 aa, unidentified
MIAVGIDVAKRTHEACFMRQDGQQVGKSRRFRNTQPGVRALLDDVQRLPEPVTIGLEATGHYWLALHDALIRAGHSVQVLNPLQTHAYRKTTVRKVKSDRKDAWLIADVVRIGRGRAAYVPDETILQLRELTRFRWGLVDQIGDAKRRALSILDRVFPEYEELFSDVFIKSSRALLQQAATAADFAEADLSELTAVLKKTSRGRLGLVKAEAVQAAARDSLGLAKLGGVAGFELRALLDQIAFVEHQVAAVEQQIEVLLGTIEQHVTDIKGIGPVLSASLVAEIGDVSRFPRLESLVAYTGIDPAVFSSGEFTATETHMSKRGSPYLRRALWLAAVSASRSNPDLAAYLQRRLDQGKPWGTAMGAVARKLLSRIYVILKHNRSYEVR

SEQ ID NO: 273527 - protein, 427 aa, unidentified
MAYLIAGIDVHKRMLAVVVADVEVDQEYQFERVKIGTSPNELRALADWLVERQVEEVVMESTAQYWRPVWEALELHWRPQRRSRDGATPVSGTLHLAQAQSNRGAGGRKKDFPDAERLVKRLVAQELTLSFVPDPEQRLWRTVMRRKYQVTRNRVQLHSRLESLLEEAHIKLSSVVSDLLGTSARRMLQALADGETDPATLAALADQRLRATPAQLRNAFGACAGLHPVYRRLVKLTLEELQMIEEHLGQLDQEMATLLSHHHAAVRRLAEVPGLGVDSAQQIIAEVGATAATFPSAKHLASWMGACPGTEESAGKNYSHRCPKGNRQMRRVLNQAANAAVKAKGTIFAIVYRRIVPRLGHAQAIGAITHRLCRLIWKILHQAVRYEERGPAVSEEAKKVRARKMIRELRSLGYRVELLQAPSSSPA

SEQ ID NO: 273528 - protein, 344 aa, unidentified
MNEFYEGQQFVGMDLHRRRSVLVRMTETGEHLETVRIVNTRDRLADVMTRAGESPEVVLEATYGWYWAVDALAELGATVHLAHPLGVKMFSLRRVKNDQLDAADLADLWRMGRLPEAWIAPPACRELRGWVRHRAKLVGLRSNLKCQVHAVLAAAGVQVPMSDLFGPSGQQLLATARLAVESRSRIDSLLRLIAGLDFEIDTFARLVAGRLREDPGYRAIQQIPGVGPVLAAVFVAEIGDITRFRRAAQLACWAGLTPTHHESDTTVHRGRITKQGSRLVRWAAVEAVQRVPAHTRLGQTRDRVGDRRGRNIGVVAAARELTELVFYGLRDHRIRCLATPASAA

SEQ ID NO: 273529 - protein, 395 aa, unidentified
MGHSYSVLYKDDTCLFEDEIEHTQRGFHALLEEIQHLPERPLIVFEATGIYSRPVEKFFQDHHFPYCLLNPLEAKKQMEESTLRSWKTDKSDAHRLAQTHLKNQRQPKEVQSNFYLEMRDLARFYQEIEKKITRLRMDLHNCLQLTFPELEQFFSNRLTPYALTLIRLFPHPDFVLASTRTKIKNKLINETRKKISANRAEQKADQIIHYAQCAYPAVEKDSIHCQKTIYYAELLQDLLEQKKALATQMIKKAEGSPCFLLYQTFPGIGALTAALLLGELGDITRFKTHKQLNAFVGIDIRRYHSGKYTGQDRINKRGNPKARKIIFFTIRNMIRQQRAAPNHIVDYYYKLKKQPIPKKDKVATVACMNKLLKCMHAMVRAHTEYDYAYAVSVDH

SEQ ID NO: 273530 - protein, 337 aa, unidentified
MFMQVYGIDLSMEKFDINFIDEKGKEKQKEVKNGVVSISKFLYSVPKDSVLCAEHTGAYGDLLVYLCNQENVPIALVPGYTIKHSLGLLKGKDDPLDARRIREYGERFTDKLVFSEYDEECIVELKQLYTLRSQLVKARKSLLTSEKGRGYLPMQSISVHNHLQPVLCGLDEEIEAVEEEIEALIMANEDLNENYELAKSVIGIGPVIATDLLIKTGNFEIIDTARKASSYAGVCPFPNTSGKMVGKSKTSPFADKKLKSLLYMGAKSAVKHNKEYRLYYQKKQLEGKPHYLIMNNVSNKMLRTIYSVVKNKTPYSQDYICLDPREKNINSSTKKVA

SEQ ID NO: 273531 - protein, 334 aa, unidentified
MENIALIGIDLGKNSFHIHCQDRRGKAVYRKKFTRSKLIEFLATCPATTIAMEACGGSHFMARKLEELGHFPKLISPQFVRPFVKSNKNDFVDAEAICEAASRPSMRFVQPRTESQQAMQALHRVRESLVQDKVKTTNQMHAFLLEFGISVPRGSAVISRLSTILEDNNLPLYLSQLLLKLQQHYHYLVEQIKELESQLKRKLDEDEVGQRLLSIPCVGTLTASTISTEIGDGKQYASSRDFAAATGLVPRQYSTGGRTTLLGISKRGNKKIRTLLVQCARVFIQKLEHQSGRLADWVRELLCRKSNFVVTCALANKLARIAWALTTRQQTYEA

SEQ ID NO: 273532 - protein, 372 aa, unidentified
MKQNIIHIGLDVDDTQYHGAAFNKETGEVVNFKCRPTLKGLLQQLDRMAQHFKGHKIKLCYEASYVGYCLQRDLVSKGVHCDIVSPSSIPSPRGKAIKTDRIDAGYLAQFYANDLLTIVQPPDEEQEQDRDLLRSRQKVMQQRNQLRKHLQSVLRRSGLHYKAETGNKSHWTKHHYCWLERTIDGLSGSLKVNLELLLRQLKALNEVLSDYGQQIDLLASLPRYQSAVQSLTCYKGIKNVFALTMITEIGDIKRFSHPRKLVSWVGMDIREYSSGGKYNRFGITKHGNRYVRTAFVEANQRGYRTAKIGQDLKSRRRHIAPELVNIADRCLRRLNKKGNRLLLAGKHPNKVKVACAREMVGFVWESLNKAAA

SEQ ID NO: 273533 - protein, 364 aa, unidentified
MLESIQLSINPQLTQREDMKKFFVGIDFSKRKMDVSIVEKDFPERTIAYKQFINNAEGAKKMCEWVEYTTNTSTKLEGEVLFCCEHTGSYCLEVCDYLSENGKYIWLGNPLDIKRSMGLVRGKDDISDSRRIATFAAEKHHKAILYMRPEDSTRALKYLLSIRNTLVGHKKALACQIKENSPKLHNITLLCNIEEKLKQMLDSIIKEIKKIEKMMLDIILSNKEYKNTFDILTSMKGVALINAAAIIVFTDNFKRFSFNSRKICTYWGISPFRNESGDSIRRGTHTSPIRNNWLKAILSEAVLCAIRYEKRMKEYYSRLMAKGKHRNVALNNTKNKLLKTLVAMVRDGKKFDENYVSIPQAYAV

SEQ ID NO: 273534 - protein, 342 aa, unidentified
MDVKTLGIDLGKSVFHVVGLDERGAIALKRRVTRTQLGVLVGNLPRCVVAMEACPGSHHMARRLAEHGHTVRLLPPQYVRPYVKTNKNDFRDAEAIAEAVGRGTMRFVPPKTVAQLDLQALHRVRDRLVGQRTALVNQIRAFLLEQGRPMRPGRLALRGELRRLLAAAAPGISPNLARLLAQLSQEWQQLEERIDCVTGELVLVATTDPACQRLMAIPGVGPISATALVAAVGNGRAFSKGRDFAAWLGLVPRQHSTGGKPRLLGASKRGNTYLRRLVVLGAQSVLRSKVRDRQRFGPWLRRLELRVHRNVAVVALANKLARIAWSVLANATPYRPLIDEAA

SEQ ID NO: 273535 - protein, 416 aa, unidentified
MRGIGLDVHRDFCEVAIQGAGEVRSAPRLKTTPAELELFAQSLGREDLVALEVSGNAWEVARIIRPHVARVLVVSPTDTGIRSARAKTDRLDARTIAKLAAAGSLEGIWMPDDQTRALRRRLERRGQLVRGRSRAKNEIHAALMRRLIAKPKLSDLFGVEGRSWLACLELPDEERETVDGCLRQIEFLDAEIAESERVIAQQALRSADIRRLMTVPGVNVVTAATFMAAVGEIGRFSSPRRLVGYLGLDPRVRQSGSAPAAHGRISRQGSASARWALVEAAWSVVRQPGPLCAFYRRIRARRGHQVAIVAVARKLACLFWCLLTREEDYAYGQPSLTQKKLRRLELAAGAPKGKPGTWAANKAMRSAERQLARQGEVAYERTVADWRAHQKKKGAGATPGRASRAARQESAPEPAL

SEQ ID NO: 273536 - protein, 478 aa, unidentified
MAAERNAQSEKAQTVRFSKKLEISNPYCAGLDLHKETIWACTGPFKDGIAPEVVTFPTHTEGLQKLVKHLKERHITSVAMESTGVYWLMPYLTLLDANLDPCLVNPGDIKNIKGRPKSDRADSVWICRLHSYGFLRASFIPPPTILNLRNLCSTRDKLIVQAGSAVQRMNNELVKMNIRLDNVVSDINGKSGVLVTEAIIRGERSPEALYDLLATRIQNKGKSKIIPYLTGRCDEFSIFNLETWHILHKSIEQNIERINEKIYQILQSLPKKASAADLPPAKKNYSESYLDFPYPLRPLFYEIFGVDLTQLPGVGAELLLSLVSTVGTDLSPWQDASHFVSWLALAPVNRESAGYRKSGKTKRTGNPLANAFKMSAMAARRTTTYLGQTARRLSNRITPKKAKVAIARKLAEIVYNIIRHGMPVYVKTLEEYESRRKKREIQHFVKSLNKFSSGDGFIPEVIEEIQRHNAKFTSTVAI

SEQ ID NO: 273537 - protein, 353 aa, unidentified
MEHKYVGLDVHQSSTVAAVHDEKGKSRMESILATEAESVRDFLKGLRGTVHVTFEEGAQAGWMYEIVRPLVAEVIVCNPRMNKLLSVGNKGDRVDAHKLAELLRCRQLKPVYHGAVGVRRLKELVHSYDSLVGDTTRVMNRVKAVYRGRAIGCAGREVYAPRHREAWLEKLNEPGVRQRAAFLYQQLDALTGLRREARKAMLEESRRHPAYRILKPIPVLGPIRMAQILAKVASPHRFRSKRQFWAYCGLAVVTRSSADYHFREGQAEKRQRAPMTRGLNPNFNHRLKEVFKSAALEGIHRAPFDRCYAQLVGKGIRPELARLTLARKIAAVTLTLWKRGELFDELKVSQPVT

SEQ ID NO: 273538 - protein, 328 aa, unidentified
MLEETEIKEDEVLEVVSSFIGIDVSKAQLDIAVRPSGERESVSNDEAGIRTMVGRLRELRPALIVLEATGGFERNVTRALASAELPVVVVNPRQVRDFAKATGRLAKTDRLDAEVLAHFGETVRPALRPLPDEVLLELRALIARRRQITEMIVAERNRLSGASKAVRKRIDAHIRWLESELDRADKDLDQSIRQSPIWQENENLLKSVPGVGPVISRTLLAELPELGRLNRKQIAALVGVAPLNRDSGTLKGRRTVWGGRATVRAALYMAALVASRRNSMIRAFYKRLHTAGKAPKAALVACMRKLLTILNAMIKHRTRWSEIILQTS

SEQ ID NO: 273539 - protein, 471 aa, unidentified
MIHSVGIDLHKGKHRAYCLDEKAQLVDSFSFQTTPEGFAELEKSVFQNGSSPIVVFEPAGLTWLMVASYLRSKHPECHIVRAKGQKVAALRRYLRGPVKSDRIDALTLAKMPFIDPERLDELYLAPAETHALQRLTRQRKRLEDRITTQKKRIGAIIDGYLPGVRHAFTHCWSIRARAFFHSKINPFAVVREGEEALCKFLAEAKPRSRDGRAESYHIYRACQNVLALQQLCQEAGSFDEDFFIDLQDEIDRELRLMEAEEAESKALDRRIEELYRKLHPSDNLRTIPGVGEHTAPVFVATIGDAKRFPCQSAFANWTGVVPAAKQSSDLESKGRRMTKAGPAIMKWALYQAAQIGRQWDPQLAAVYYRQMVHHGKNHKQAMGAVMSHVGARVFKVLREDRPYDLRDTEGKPITNTSARSLILARYHVPEDIRQQRRKGKGKKPGMVASSVREAALAPQTAKSDHPQELSV

SEQ ID NO: 273540 - protein, 313 aa, unidentified
MSQNTMTTIYSGLDIAKQNLQLHLRGRIHDLPNTAAGHRRLLKLLTHHSTVQVVCEATGGYEGEVVAALHQANIPVSVLNPARVRHFARATGQRAKTDHIDAAVLSSYGQALQPKPTAPRSEQDQQLTELVRRRVQVLEILVAQRQQAERLTLPVLRRQAQSLVRRLERDLKQIEEQLKKLRTQAPALHQRVQKLEAITGVGTLTSLAVLAELPELGTLNRRQAAALAGLAPHPRESGQWHGRRTIGGGRAPVRRALYMAALVAARSNRQLKEFYQRLRTTGKPAKVALTAVMRKLIVLMNHTLKNPDFVLQN

SEQ ID NO: 273541 - protein, 346 aa, unidentified
MLYAGLDLSRQRLDVHVLDEEGRTLEVTAVHPDADALRTLATHVLLQGQEVTAAIESMTGARFVHDQLERWGWDVAIADAVKVKGLAPLAAKTDKIDAWVLAELARRDLVPAIWLPDPTIRAERERARFRLHLVHHRTGLKNRIHATLMTFGYSVPVSDLFGTQGREILGRLTLPEPWAGTLTTSMRMIDDLNVEIAAAEADLRGLGPDHPYIPLLLSVPGVGPLLAYTIASEIGDIARFATPKKLTGYTGLCPIVRQSGPKDRRGPLAKNGPKYLRWALIEAATHAARDVRYRDRYERTKHRLGRQRGAKVARVDIARRLSEAIWHVLTKNEPFAPAGPAITLVA

SEQ ID NO: 273542 - protein, 311 aa, unidentified
MNTKTNPIHYVAIDVSKSTLQVQDDRRAFAVGNDPEGHRKLLDYLKTCANPLIVFEASGGYERALLQFLHKAGMPLARVNPARVRDFARSEGVRAKTDPIDGKIILSFAKSKDLRPMEAPSEACVKLAAFLDRRGHLVEQLAREKNRLQNSETFIHRSIKKMIRILEKEIAAIEEALEKLIGSDPGFKPRSVIIRSVQGVGKITAWTLLAYLGEIEDLNRNRLVALAGVAPFNRDSGKISGKRTIQGGRAKVRKCLYMAAHTAATCNPVIAAYVQGLRDRGKPYKCAIVAAMRKLLIHIQSLMKKAQLSPC

SEQ ID NO: 273543 - protein, 406 aa, unidentified
MNAVGIDVSKGKSTVTIRRPGDIVIMPPRDIPHTQSAINSLIGQIRALDGETKVCMEHTGRYYEPVATWLSDAGIFVSAVNPILIKDFGDDSLRTPKTDKADSKKIARYTLDRWAKLKQYGSMDKTRNQLKTMNRQFGFFMAQKTAMKNNLIALLDQTYPGANNFFDSPARNDGSQKWVDFVHTYWHVDCVRSKTLNTFTEHYRNWCKRKGYNFSAAKAEKIYQSSSDLIAVFPKDDSTKLLIRQAVAMLNTASETVESLRLKMDETASSLPEYTVVMAMNGVGPTLGPQLMAEIGDVTRFTHRGALTAFAGVDPGKNDSGQHIQKSVHTTKKGSPSLRRTLFQIMDGLIKRSPIDDPVYAFMDKKRAQGKPYYVYMTAGANKFLRIYYGRVKEYLSTLTESEKLK

SEQ ID NO: 273544 - protein, 352 aa, unidentified
MTMLADEVDVVIGVDTHKHTHTAAVVLAATGASVGERTVGADPNGYQELFELAEPHGALRAWAIEGTAGYGAGLTRYLLERGERVIELDRPNRAHRRGGAKSDSLDALRAAREALARGQLAEPRAGGQRAALSVLLATRRSAVDAGKVAQQQLHALVVAAPESLRAKFRSKTTTQMLSIGARLRVDGRWDLETRTTASVLKALSSRARELATEAKRHEDAINQVVRSWRPDLLTLEGVGPIVAATVLCAWSHPGRCRSDGAFAKLGGAAPIPASSGLTVRYRLNRYGDRQLNRALHTIVIVRLSHDPATKAYAQRRIKEGRTPREVKRCLKRYVARQLFRQLEGSEKALDCL

SEQ ID NO: 273545 - protein, 376 aa, unidentified
MNESTVYVGLDVHKETIAVAVARAGREEPEYRGEVTHSAQGIAKLLKKLSPAGEVLDVCYEAGPCGYGLYRELVARGHRCTVVAPALIPRKAGVRLKTDRRDAVLLARLHRAGELTAVWVPGEEQEAIRDLSRAREDMKAIELKARQRLGAFLLRHGQVYRDGASHWTQRHWHWLEAVRMPSPVQQLVLQEYIEAVKEAQRRVAGLEEQVRQVVADWSLRPVVEGLMALRGVSLIAAVTILAELGDLSRFDSPRELMGYLGLIPSEHSSGGSRRQGGITRTGNGHARRVLVEAAWNYRFPARKTRDIERRAERTPVAVQAIAWAAQKRLCARYQALLRAGKQKPQVTTAVARELAGFLWAIACEVMGKPHASKALA

SEQ ID NO: 273546 - protein, 378 aa, unidentified
MKNDIRFVGLDVHAETITAAVVEPDGEMRFLGTIPNRPEAVRRLVKRLGPATRLKACYEAGPTGYVLYWQLTGLGVHCDVIAPTLVPQKPGDRVKTDRRDAEKLAVLYRGGHLTPVWVPDQAHEALRDLVRAREAAKSDQLRARHRLQKFLLRHGRRPPQGIKAWTQKHVEWVRREVHFEAPAQEAVLVDHLAEVEHARERIRRLEGSIDVAVEAAPACLRAVIEALQGLRGIAKVSAATIVSEVGSLSRFRKPRQLMGYSGGVPREDSSGERVRRGAITKTGNAHLRRIVGEAAWSYRHRPTVRGELLKRQVGLSEEVKAISWKAQHRLYSRYRRLIGKGKTKQQVVTAVARELLGFIWAIGVHVEQQHGAAARRAA

SEQ ID NO: 273547 - protein, 400 aa, unidentified
MNKESFSCFLGIDISKDTFDACCIGINGEKHFHLSCSMDRMGFEKLVSRLETLSTPEESLLIGMESTACYHMNLFSFLLAGGYTAVLINPLLISNFVKLQLRKTKTDKKDALVIAQFLLMHMDTLTQTSIPPHISDLRDLSRQRESLLSQMTALKCDMKRILTITFPELEKLTGVFTKSILKLLSRFPSAQAIVQADPTEITQLLVDHSMGRNSAKTTEAILQAARSSIGTTSPSRELILKQKADVLIHLDGHLKELTAMMIELCRSDMGDDIDIMTSLRGIGEKTATNFLVEMGGDIRKFKDHKKLIAMAGIDPAIYQSGKHDGHGRITKRGNRHLRRVIWLMTIRVIQFNHCFQNYYKKRIRDGLPFKKAVLATAHKLLRVIFAMLTQRTSFSYVENS

SEQ ID NO: 273548 - protein, 360 aa, unidentified
MIGTMTWAAMDVHARSTTAASLDVQTGVLTRCRFNTGAVKPVVEWLVGLPGPVRCCYEAGPTGFGLYRAAVAAGVDCQVIAPSKTPRPSGDRNKSDRRDTDLLLRQLMAGALTPIAVPSVTFEAARDLARAREQVRVDLTRCRHRLSKLLLRHGRVYDRTAWTQAHRQWLAAQSFEQPNTELAFIDNLAACDGLIARKQALDERLSHTARESEFWPLVSRFRCFRGLDTLSALIVVLEVADFTRFARAVQLGSWLGLVPSREQSGESDRHGQITKTGSKYARRILVEAAWHYTRPPRIGTKLAERHDGQPDHILQIAWRAQHRLHRIHKRMRERRKPANVANVACARELACFLWAAAAAP

SEQ ID NO: 273549 - protein, 330 aa, unidentified
MENIALIGIDLGKNSFHIHCQDHRGKAVYRKKFTRPKLIEFLATCPATTIAMEACGGSHFMARKLEELGHFPKLISPQFVRPFVKSNKNDFVDAEAICEAASRPSMRFVQPRTESQQAMRVRESLVQDKVKTTNQMHAFLLEFGISVPRGAAVISRLSTLLEDSSLPLYLSQLLLKLQQHYHYLVEQIKDLESQLKRKLDEDEVGQRLLSIPCVGTLTASTISTEIGDGKQYASSRDFAAATGLVPRQYSTGGRTTLLGISKRGNKKIRTLLVQCARVFIQKLEHQSGKLADWVRELLCRKSNFVVTCALANKLARIAWALTARQQTYEA

SEQ ID NO: 273550 - protein, 396 aa, unidentified
MGRLIVGVDVSKESFSVAGLDGRGARCFAQDCAMDSDGFSEFLKTMRVHQEDLTAIVVGMESTGCYHINLFSYLTSQGIHAVVINPLLISNFAKLSLRKTKTDKKDALTIAQFLLAHVDKISQMSVSQDMQDMRDLARERESLTHSMAATKSEIKRVLQTTFPELERHCNVFSGMMLDFLKVFPSARLIKLTKWGAVEKALEPHGRGNRISVFTPDDIIQLAKNSVGTVSPAKETILRGKISTLLHFETRRDELTDMLTDYCNSLMMDDLEIITSVDGISTGTGTTFLAEIGKIENYETHKHLIAYAGIDPSVYQSGKYEGKSRISKRGNRHLRRVLWLMTVSVILNNKNFRAYYQKKKESGLPYKKAVMATMHKLVRMLFAMLSNRQLYTESCMN

SEQ ID NO: 273551 - protein, 374 aa, unidentified
MEVLYARCAGLDVHAGSVTACARIASGPQVTYEHRTVPTTTRGLLDLAEWLATHGCTHVGMEATGVYWKPVWHVLEAHFTLVLANAMHIRNVPGRKSDMNDATWIADLLAPGLIRSSFVPPAPIQELRDLTRTRRQLVHEVARHVLRIQKTLEDANLKLTQVMSDIVGVSGRAILNALIAGETDPHRLADLTRGRLQATRADLVEALHGRVTDHHRFMMQLHLTQIDTLEAAVATIEARIGDALGPFRAAVSLLTPMPGLSETTARVVIAEIGIDMTRFPSVGHLISWAGFCPRLDESAGKRRSSRTRQSAPWLKPTLVNAAWAATRKKDSYLRAQFLRIKTRRGAKKAILPRRSPFRTTRQGTARQASDPAPP

SEQ ID NO: 273552 - protein, 408 aa, unidentified
MYNAVGIDVSKGKSTITIIRPQGVVICKPFNVSHSAKELRNLTDYIVSLEGETRAVCECTGRYHEPILKAFSEANIFISAVNPKLVKGMGENTLRTIKTDPADSRKIAKYALDNWAELRQYSSMDDTRTQLKALNSQYSFILKQRTAAKANLISLLDNTYPGVNKLFDSPARDDGSEKWVDYAYSFWHADCVRKIGLKAFSERYSAFCKKHHYCVRKNKAQELFEASKELVTVFPKDSTYKLLIQQQINQVNLLSGQLAAIRKEMNDLASTLPEYTTVMGMYGIGETYGPQLIAEIGDITRFSHREALTAYAGVDPGANQSGSRDQKSNRASKIGSSKLRKTLFQIMTTLLQNKPANEPVYEFLNKKRSEGKPYLVYMTAGANKFLRIYYGKIKAHLRELEQAQETAE

SEQ ID NO: 273553 - protein, 344 aa, unidentified
MKITTIGLDLAKSIFQVHGVDATGQVVVRKSLRRSQMLPFFAKLPSCLIGIEACGTSHHWARELIKLGHEVRLMPPAYVKPYVKRGKTDAADAEAVCEAVTRPTMRFVHVKSPEQQAALSMHRTRDLLVKQRTQLINMIRGLLAEFGIDIPKGLERALLMARQIVEGKAPDVPIEAAKIVGTLSQHALDTHVRLREIDRDLLIWLRSNDVARRLTTIPGIGPVGATALAASVTDPHQFRSGRQFAAWLGLTPLQKSSGGKERLGRITKMGDKYLRKLLIVGMTSLVRRAKYNPATIDPRLADLLARKPTRVATVAMANKTARVIWAIMSRGETYRTGHRPTLAA

SEQ ID NO: 273554 - protein, 390 aa, unidentified
MALFVGIDVSKDKFDACGIGEEGEKVFSLTATMDRKGFEKLIVHLKMKPSLLLGLESTACYHIALFSYLTAKGYKVVIINPLLISNFVKLQLRKTKTDKKDALTIARFLMLRREVLEKQTFSADLMELRDLARRRERLTDQVTKLKGNMKRILSVTFPELEQLTGIFTKSILQLLTRFPSADALRKADVDTIAAIVVPRSWGRKSRAWVETLMATASTSVGLSSPAKELILKQDASLLLYVEEQIKETTKLLMSVCNDRVKKDIEILTSIKGIGKTTAMNFLIEMGGDVRLYENDKKLIAAAGLDPSTYQSGKYEGASRISKRGNRHLRRVIWLMAKSTVLSNAPFRAYFYKRRKEGLPYKKAVLATAHKLIRVMFSMLVHQKCFEQGGK

SEQ ID NO: 273555 - protein, 359 aa, unidentified
MERTTDMKASTATASVKTLGCDLGDKKSALCALDPSGRVLFQTEVKTTREEVRRYFSGIEKTEVVMEVGTHSAWVSALVKSLGHKVTVINPHEFKLLTESRRKSDEADAQLLAKVHQADLKLVKSVRHREEATRLQLASLRTRDSLVKTRTQLISTVRGMLKTFGARAGACDAKVFHKRVPAFIPDELKSALMPLVKVLEKLAEEMGELDEAVAQMAEREHEALKPLMSIPRVGVLTALTFRLVVEDPRRFKNSRDVGAYLGLTPGRKQSGDRDVQQGITKQGDEMLRRLLVQCAHQQTFKSAPDTALKRWALKKGKDGGKNGKKRVAVAVARKLAVLMHRLWRGNDTFQPFPSKQQEA

SEQ ID NO: 273556 - protein, 321 aa, unidentified
MTRIICGVDVASASLAVRIGQQGAQASFANSPEGIAELAAFCHHHQVELVAMEATGGYEQQPFALLCAQGLPVAILNPRAVRRFAEAMGHLEKTDAIDAGMIAYFAQTKPVSATPLGSAVQQHLRCLVTRLCQLTQVRTAQRNQRRLITDAVVLGSIDELLALLDRQMRALQADITQIIAADPLWRELDRAFRSIKGVADRTIARLMAELPEIGTLSHKTISKLAGVAPLARDSGKHQGKRAVRGGRASVREILFVVASVAGRYEPDFQAFHQRLSAAGKPAKVVRIALAHKLLIRLNAKAREVRQQLALSLSPQEACFVS

SEQ ID NO: 273557 - protein, 351 aa, unidentified
MALYVGLDVSLRMTSICVVEADGSSVWEGKAESEPVPLVKVLSPWRDKIVLVGIEACPLSEWLYGALVESGFQIVCIETRHAQRFLSSRPNKTDRSDARGIAEMMRLGHYRSVHVKSKASQLLRTTLIARKKFVDHMLAIEDTIRGLMKVHGLKLGAVHRSRFAARVETLLADAHDLRMAIGPLLEARNMMRKHKALMDRQLSQMARKDHVCERLMTVSGVGPLVSLSFKATIDDPNRFKDSKAVAAHLGLTPRVYQSGEIDRSGNISKCGDKLMRHALYEAANSHMRISKKWSTLRAWGVKLAKTYRGQKSMRGSCPQTGDYHASDVGRGNGLPLRKAACDPTHIRIVPA

SEQ ID NO: 273558 - protein, 413 aa, unidentified
MKKHSSFLEQRESGKAAKSARRDSREVMAELVAQLTKQLDVESVSVPGEDKNVPDCESPNLDRLTVGVDLGDQWSNYCILGLDGETLTEGQFRTRRQEMAEFFQGLARSRVVIEVGTHSAWVREVIAGLGHEVLVANTRRMEGSKRRRRKNDRIDAAKLARLGRVDPKSLYPIQHRSTEVREDLLVLCAREALVESRTKLISAVRGLVKTMGTRVSSSSSDAFSRKAAAEIPQQIRETIQPLLRLIANLSEEIKSYDRRIEQLASEKYMHTKLLRQVTGVGPVTALGYVLTLETPLRFARSRDVGPYLGLVPRQEDSGDSQPQLGISKAGDRMLRKLLVGSAHYILGPFGPDTDLRRFGKKLCERGGKNARKRATVAVARKLAVLLHRLWVSGDVYEPLGHGTLNKTEHAAAA

SEQ ID NO: 273559 - protein, 428 aa, unidentified
MNNFKQNQKIAQVKNCTLVVGIDIGSTKHFARAFDWRGTELGKVCIFSNSREGFNALSAWMQRISAKHNKSNVIVGIEPTGHYWFNLDAYLEDEGILLVMVNPYAVKQSKELDDNSPSKNDYKDPKVIAKLVIDGRYSKPYIPEGVYADLRIMVSNRMRVNKELGAIRNRLARWFSIYFPEYCNVFGDYEAIGSMLVLNVACTPQKILELGPEGVNNIWRAAKLRAVGMKRATTLCETAKASIGQRTSAVGAEYEMKILLQDYAYKKAQYDAILEEITRLCNEIPESKQMLAIKGIGILTVSGFLAEAGDLRRFESPRQIQKLAGLSLRENSSGKHKGQTTISKRGRSRLRAILFNAAIPMVAHNAEFSALHNYYTTRANNALKKKQSIIAICCKLIRVFYAIFTKHVAYDGQKLLSDIHRNFEPQIA

SEQ ID NO: 273560 - protein, 407 aa, unidentified
MMKLTYQTCCGVDVHKSFLVATIIKTTGGIEPSYQKKRFSTFNNSILDFMHWLLDNDCRDVCMESTGKYWIPVFNLLEDEINVTIANPKWVKAVKGNKDDTKDSKWIGDLFRLGLVKGSYIPCKPVRILREYTLYRYKLVSCRSSEKNRYQNALTVCNVALDSVVSDIFGKSSTSIIDYLLEQSGTSINHEEIASKLLRSLKSKEDAVIESIEGYQMTDTQKYRMRLVRAHMDYITAEINDVDSMIEKLISSNPDYENAIQLLCTIPGVKRDSAITIISEIGIDMSQFCNSKRLCCWAGLTPGSNESGSKKKSVRITRAGIDFTLHGGSVPMQPLNPISLLTTKRNTNPSLSVVVRKDPLSLLPECSSLLFTRCCLLVKNGIRAICIKLICLKLLSKNKRIKLSNKP

SEQ ID NO: 273561 - protein, 415 aa, unidentified
MPNPLLVGADVHRKTNRISLLDSQGAEVAPRFTVANNRPGTHACAERLAAVLQQGAFDSLRLADEATGWYGWYFLQALSQEPLLAAWPQCLYAFNPRLPAKFKETYSDLDKTDDVDCFVIADRLRLGRDLPSPFTLDATYLPLRFLTRYRYHLVRGLVREKAYCTALLYLKISEYRPLHPFSDVYGAASRAVLTEFASCEEIAALPLEQLVTLLDAKGRGRFADAMETARQLQRVAQDSYHLPEALQLPVNQVVDSCLQHIVFVEGQVHKADLAIAERLATIPHTLETIPGFGPVYSGGIIAEIGDLARFAYDESKVAKFAGLKWRQTQSADFRADETRLTKTGNRYLRYYLCEAANAVRVHDAEYQAYYQRKYDEVRQHQHQRAIVLTARKLVRLVVRLLTTNQPYRPRRRPAD

SEQ ID NO: 273562 - protein, 423 aa, unidentified
MNDKPTTLNQPTALFIGIDWADQKHDCHIIDPAGKEMAMELPHTPESINEWIAKMTEKAGGGKIAIMLEQSKGPLIHALMFHANIALYPINPKQLARYRESYPGGDGKSDPTDAMYLARMLGERIDTLKAWLADDEQTRLLNRLCEQRRFIVGNQTKQRQQLIAALKQYFPLVLALFGKSHELHLLLAIVQRWPDPRQLRRADRRLIDRVLREHGIRNQERRTELLAAIRSSTLLCDDSALITPMAMTVKHLAAQIDQCVKTIEQFDQQISESFKAHADSHLFASLRGAGPALAPRLLCAFGSQRDRWRDADELASFSGIAPITRQSGKQRQVQRRYACPKYLRQTFHEFVSAARTWCPWTKARYQMLRAQGMKHHAAIRKLARSWIRILYRVWQTRIPFDCDRYIETLKHRLPGIIPYLENP

SEQ ID NO: 273563 - protein, 347 aa, unidentified
MRFYKQQHQFYCGIDLHARKMYICVIDQKGKTRLHKNIPTEAEMFFELIFPFLKDIVIGVECVFCWYWIADLCAQHGIPFVLGHALYMKAIHGGKTKNDKIDSFKIAALLRGGNFPLAYPYPAPMRATRDLLRRRMYLSRRCGELVAHIQNTNTQYNLPEFAKKISRKYNREGVAERFENPVVRKSVEVDLAVIDALNQTLRQLEWYIEKTAREHDYKTLYLLRSIPGVGQILALVILYEICDIKRFATVQDFSSYARLIRPVKESDGKWAGTGNRKIGNHHLKWAINEAVILMLRESDQAKHFVERLTQKHNKGKALGILTHKLGRAIFFMLKNNEAFNMKRFFSS

SEQ ID NO: 273564 - protein, 343 aa, unidentified
MQAVTTIGLDIAKSVFQVHGVDADGNVVLRRQLKRRYVLAFFQKLPPCLIGIEACASSHYWSRELQALGHTVRLMPPAYVKPYVKRQKNDAADAEAICEAVTRPNMRFVPTKTPEQQSCLTLHRTRHLFIRQQTAVINSIRAYLAEFGIVAPVGRSGVEALLEVVANTNDTRLPEIARACVAALGTQLLGLKTQILAFDRRIMAWHRSNETSKRLDEIPGVGPALATALVAGVADPKAFRSGRDFSAWIGLVPKQNSSGGKDKLGSISKQGDRYLRSLFTAGALAVIRYAKIHGTKHRPWLTALLARRPTKVAAIALANKMARMAWPMMTRGERYKEPVALAA

SEQ ID NO: 273565 - protein, 354 aa, unidentified
MKATLSKKQRFFNQIKLTKDDDLYIGIDVHKTTYHVALYLNGGHAIDFITPADNSKICTTLKKLEPAIKNIVYEAGPTGYSLARQLQHQSLPVQVIAPSKTPQSCARDSKTDRLDGRKLAEYAAKGLLRPIAIPTHTQEANRQLPRLRIQFVKKLKQTKLQIKSFLLQHGISEPQSLRYWSQLAIEKLNKLQLIDQLRYTLDMLIIEYKFLNEKIKDIEKKLEETFAKKIQILKTHPGVGRVTSMMFAAELFNPRRFNNKEELAKYVGLAPTIIQSGQSLRDGPISKTGRPQLRSILIQAAWVWIIKDPQARQVYLRIARNTGQKNKAITAMARRLAIHLWKMLCNNEPYRKSA

SEQ ID NO: 273566 - protein, 482 aa, unidentified
MVNRKKSTFERLTNGRLNRKQRRELQRKLSAEDPGLEIVNRNVAGIDVGNESHFVAVPPGRDAQPVQEFGSWTADLERMADWLKACGIETVVMQSTGVYWIALYDVLEARGFKICLANARHTKNLLGRKSDVQESQWLLKLHTYGLLGNSFRPPDEIRALRSLWRLRDRHVKEAARAVQHMQKSMITMNIQLSNAISDISGVTGQAIIRSILAGERNPEKLAKLRDRRIQATLAEVSRSLEGNWREDMLFELRQAVEAYDFIQKQMAECDLRLQMLLAALPAREVETAGVAAEAAGKPACKKRSRKSRKNAPVFDLHAELERVCGVDLTSIDGIDIMTAQTIVAELGTDFSRWKDEAHFASWLGLSPCRDISSGKVLKQGSLKVKNRVATALRTAANTLLHSDSYLGARFRSLRTRRGAPKAIKAMARYLACLIYRMFTRGQAWVDRGAREFENKRAQRELSALLNKAAAHGFKLVKLPASA

SEQ ID NO: 273567 - protein, 342 aa, unidentified
MDHYAGIDVSLECSSVCAVDANGKIVREAKVASEPAALIGWFRSLGFDLARIGLEAGPLSQWLYAAMKQAGLAVELLETRHVSDAFKAMPVKSDRNDARNIAQLMRLGWFRPVHCKSMSAQEIRAMLTARKLIQSKLQDIENSLRGTLRGFGLKVGKTTKRSFASRISELVAGHPALETIAAAMLAVHMALLREFNGLEKRVRAMSLLDAKAKLLMSTPAVGPVISLTYASAIDDPCRFTSSKRAGPLFGLTPKKYQSGETDYSGRISKLGDASVREALYEAAHIILTKPIKRCSALKSWAMRIARRAGMSKAKVALARKLAVIMLRMLKNNVPFNPAAKAA

SEQ ID NO: 273568 - protein, 416 aa, unidentified
MKIYPRTRPIQRYIALDIHKEYILAGGMNASQVWVLSPHKIEMGKFREWAKKNLYETDAVVIETTTNVWDIYDIVEPLVGHAVVAHAGAVRQIAEARVKTDKEDVKRLIRLLIADIVPEVWIPPQPVRELRGLISYRQRLVKTGAVFRNRLQSLLHSHNLVLPEEGLVSQEWWTQQEKISPLEKLQIGQEIALLEQIEKHKTEVDQELGKQSLGETWSKDALRLMQLPGIGVVIAMTVLAAIGDIHRFESAAKLVGYSGLGAGVHDSGQEHIEKRITKSGRKELRWAMVEAAWRAVRMSPYWKEQYEKFFHRMRRESQAIVVVARKLLVAVWHVLSKEETDERASEEELAYKMLLCSWSLSEDARQGLSYKQFAKYALMRLGVQTDITRFVRGKVPRRIASREEVLVRMAELGLNG

SEQ ID NO: 273569 - protein, 361 aa, unidentified
MAATMTWVGLDVHARSTHAAAIDRESGELVRSRFGPGSESVVTWLAQLPQPIHACYEAGPTGYALYRAATRAGLRIDVVAPSKTPRAPGDRVKTDRKDAELLVRLLLAGSLVPVAVPPPAFEAVRDLARAREQVRADLARLRHRVSKLLLRHGRVYERDGGTWTRAHQRWLAAQRFEHPATELAYLDALAAIDGLLARRQALDERLSRLAHDPALWPTVARLRCFRGIETSTALVLHLEVGDWTRFRRPAQLAAWLGLVPALHQSGESETRGGITKTGSGYARRLLVEAAWHYLREPRIGVALHERQQGQPDHVLQIAWRAQHRLYRLHRSLRGRGKPGNVAVVAVARELACFLWAAAVAV

SEQ ID NO: 273570 - protein, 352 aa, unidentified
MKHVTVEVPASCIGLDLSDEKSSFCMINGQGQIMCEGRVETSDQDLRRVFAQLEASRIVLEASPQCHWIARLLRTLGHEVIVINPRRLQLIHESASKTDRNDARMLARVGRLDVALLQPVHEKSPETLAVRTQMRARTQLIRTRTSLINLVRNAMKTFGCKAPSCSAPAFVRKVAVLVPDILRSALEPVLRVLAPLEAGIERANEALSRRCDERSTPVAVFRELHGVGPVLALAFTMAIEDPRRFKTSRTVGAYFGLTRKRAQSGKSDPQLGISKEGDRSVRSLLVTAATHILKPSAPDSDLKRYGQRIARRGSKRDRGRARIAVARKLAVLMHRLWTTGEVYEPLRTSAVA

SEQ ID NO: 273571 - protein, 377 aa, unidentified
MKKNIRFIGLDVHGETIAVGVAEPSSEVRSLGVIPNRPESVRKLVKKLGPASSLRACYEAGPCGYVLYWQLTQMGVHCDVIAPTLVPTKSGERVKTDRRDAQKLARSYRSGDLTPVWVPDPEHEALRDLVRAREAAKKDQLRARHRLQKLLLRRGLRPPEQMKPWTTGYLAWIKSLRLQPPALEATLLDYLSEVDHAGERIKRLERTIDQAIEAAPAAIRAVIDGLQALRGIARISAATIVAEVGMLSRFSRPKQLMGYTGVVSREHSSGDRIRRGAITKTGNAHLRRILVEAAWSYRYRPAVGPQLRARQARQSAEVKEISWKAQHRLHYRYARLVGRGKPKQQVVTAVARELAGFIWAVGVQVEKQLPIGNVRAA

SEQ ID NO: 273572 - protein, 355 aa, unidentified
MSQEKYIGMDVHQATISVAVMDAGGKLIMECLLETKAATIVEFIRGLHGTLSLTFEEGTSAAWLHDLLKPHVSRLVVCDPRKNALLKDGNKSDRIDARKLAELLRGNQLHPVYHGEHGARTLKELGRSYLAITQDVTRVMNRIKALYRSWAIPCAGTTVYAPRHRAEWLAKIAEPGVRVRAERLYQQLDLLQPVRLEARRQLLAESHKHSAVKLLRQIPSIGPIRSALLVALLQTPHRFRTKRQLWAYSGFAVETHDSGEYRSVRGKLQRNRERMTVRGLNDNHNKDLKNLFKSAAISASTRPGPLRDFYVARVEKGMRPTMARLTLARKIAAISLTIWKKGVEFDPQQLQRQTA

SEQ ID NO: 273573 - protein, 363 aa, unidentified
MFYVGLDVHSKQITICVLNSDGKVHQRCTVRQVSGMVGVLKQLPGSFQVCYEASTGYGALFELLCTLAARVAVAHPGLLRLIFRSKHKNDRKDAEKLAKLLYIGEVPVVHVPAADVRAWRELITFRRRLVEKRTRAKNGIRGLLRSLLIRPPQGRGLWTRKGLAWLRELELNNPMHALKRDLLIEEIQNLTAQLKRVEAELARYSADSVAVQILMSIPGVGLRTAEAVAAFLDDPHRFPHSKCVGAYFGVVPSQDQSGGTNRLGHITCQGSATVRHLLTEAVWQAVRRSPTVRAYMTRIQRDDPGRRKIAIVATAHYLIRVMWAMLKNGTLWKETVSPNGSLGPSNKGTGCAFSGAGHQSQPG

SEQ ID NO: 273574 - protein, 345 aa, unidentified
MKITTMGIDLAKNVFQVHGIDARGKAVLRKQLRRSQVTVFFGNLPPCLIGMEACASAHYWARTLQCFGHTVRLMAPQFVKAYVKTNKNDVADAEAICEAVSRPNMRFVPIKSIEQQAILSVHRVRQGFVKARTAQANQIRGLLGEFGLVIPQGIYNVAKRVPEILEDASNELPVPFRHLIDRLTQHLRELDRQVKEFEQEIIAWHRGSELSRKLEKIPGIGPLAASALVASIADARSFKNGRQVSAWLGLVPRQNSSGGKPMLLGMSKRGDAYLRTLLIHGARSAILAAKNKIDNTQGWLTDLLKRRHPNIAAVALANKNVRTVWAILAHGREFKANYVPTRMTA

SEQ ID NO: 273575 - protein, 400 aa, unidentified
MLSIGIDVSKGKSTVCGMKPGGEIVYAPFEVQHTREGMSELVSLLRSSGEEVRAVLESTGSYHCPVVAALLENGIFVSVVNSLRMKRFCSQSIRKVKTDRIDAMQIALYGLAYWQELQPTKLPEDTYRELQLLARQYYQMTSMLIKAKVDFNALCDQVLPGMQELMSDHAGRHKLSDFVLRYRHTTHILEMGETRFRKDYCKWAEKKGYRNCERMAVLIFATAQNGIPVLPNAPSTQIVITEAIRVLHTVEASRDAILTQMQALAKTLPEYSLVREMPCIGDTLAPRLIAEIGDVRRFHSKRALIAYAGIDAPPYQSGKFCANNRHISKRGNRYLRKTGYEVMQSYVMHKPANDPIFTFIEKKRSEGKCGKLAMVAGLNKFLRVYYGKVTELYRSLSAVE

SEQ ID NO: 273576 - protein, 407 aa, unidentified
MSENDRIVFSGVDTHRDTHVAAVVDTTGRVLDTASFSTDAGGYQQLGTWLGSWGRVAQVGIEGTGSYGAGLSRHLTSIGVEVAEVNRPNRQLRRRWGKTDATDAEGAARAVLSGQATGTPKTGDGPVEGIRMLVVARRSAVKARTQAINQLHALVVTAPDQVKHQLGELSPKTRVKVCAAYRPGTAQTTIRYAKQALRSLARRYQTLTAEIQQLDTEIHQLCARANPALLAASGIGPETAATLLVTAGDNPHRLTSEASFAALCGASPVQASSGRTVRHRLNRGGDRQANNALWRIAMVRLRADPRTIEYAQRRQTEGKTRKEIIRCLKRYIARHVYQLLTNPHPTPSGAHLRCLRQNTHITLAQAATALHANPTSLSQLERGQYHNHHLATRYQTWLTTQNPICKT

SEQ ID NO: 273577 - protein, 340 aa, unidentified
MTITTVGIDLAKNVFAVHGVDQNGKTVLVKSRVTRAALPGLIAGLPPCVIGMEAFSGAHYWARLFRQYGHEPRLMAAKFVPPYRMAGKSGKNDAADAQAICEAVRRPHMRFVPVKDESQQAMQCLHRTRQGFIEEKTATYNRLRGLISEFGVIAPQSTDALRHMISVQKSSLPLQVQQCVDDLLEHVDRIEANITEYDRILSRMAKTDHRSQRLMELKGVGPTTACALVACIGNAHDFKNGRQLAAWLGLTPSQYSSGGKSKLGRITKAGDSYLRTLLVQGARSVLIGAEKRTDPFSRWVCSLVERRGYWRAVVAIAAKNARLCWASLHYGDDFRLYSAS

SEQ ID NO: 273578 - protein, 434 aa, unidentified
MPAAAFRFGETWLGVLMANVMIGVDPHKGSHTAVAIGAGEEPLGELRVDACPSQAEQLRAWAVAWPQRAWAIEGAAGLGNLLAQQLVAAGERVLDVPPKLAARVRLLQAGDTNKNDPNDALSVAVAALRSKLARPVLADGHAVVLKVWAKRHRDLARLRNQACCRLHAVLCDLVPGGVRREISAGRAARLLEQVRPADAVTTARCELAGEFLADIRRLDAQLRECHNKLAAAVRASGTSLTGLFGVGPVIAGTVIGDVRHVFRFPRRDHFASWNGTAPVEVSSGDRRKVYRLSLRGNRRVNHAIHMAAISQIRHKHSDGRAFYEKKLAEGKTHKEALRALKRRISDAIYAALAADARRAASACSKSPGGQPGDHSASRAAGSHPAHRHFGQATPGPAPTIRPGANSSRAPTQPNRARRRAAHSPASSKKPPATT

SEQ ID NO: 273579 - protein, 344 aa, unidentified
MDHYAGIDVSLECSSVCVVDASGKIVREAKVASEPEALMAWFGSLGFGLARIGLEAGPLSQWLYAAMKQAGLAVELLETRHVSDAFKAMPVKSDRNDARKIAQLMRLGWFRPVHCKSITAQEIRAMLTARKLVQSKLLDLENSLRGILRGFGLKVGKTTRTNFAGRIEELVKGHPNLQTIGEALLRARAVLLAEFNGFEKRVRAMSRLHQKARLLMSTPAVGPIVSLTFACAIDDPSRFTSSKQAGPHFGLTPKKYQSGETDYTGRISKHGDASVREALYEAAHIMLTKPIKGCSELKSWAMRIARRAGTNKAKVALARKLAVIMLRMLKDNVPFNPAAKPATA

SEQ ID NO: 273580 - protein, 403 aa, unidentified
MERFAGIDWASEENALCVVDEDGGAKAGELFACDEAGIRELIARMRALGVVRVAIERPDGLLVDRLAEAGLTVLPVHPNQLKATRSRYEAAGGKSDRFDAFCLAELARTDAHRLRILRPNSDETKALRALTRTREDLVAARVRLANELRAQLEAFWPGAARIFADVDSKIALAFLERYPSPADARGLGEKRLATFLARNGYCGRRSAAELLDRLRSAPKGRAGAIETEARRGAVLALVAGLRPLVAQIAELTSQIAHAVKAHPDGPIFLPVFRDPKSVITAARLVAEIGDDRSRYPTAEALAADAGMAPVARESGKRKVAGFRWACDKRLRDAVACLADSTRHHHPWARGFYLAARARGLDHPHAIRVLGRAWLRVLWRCWQDGVPYDPSKHGNLRRLETVEG

SEQ ID NO: 273581 - protein, 434 aa, unidentified
MLRYVGCDIHKRVAVFTILLESGSVHATHSVNVTRETLSEFAALHLNKEDRLAMEATTNTWAVAEVLRPHVQQIVIGNPLRTRAIAEAKIKTDKVDSRVLAELLRADYLPSVWQPGPDTQRLRRLTHRRAALVSDRTRLKNRLHSILHHCLIPLPRFDLFCQAGRAWLRGLSLPELEAASRDSDLRLLELTEREIALLEEKLVKEAWQDENVRLLMTIPGIDYTVAQTCLAAIGEVSRFANAKKLTSYLGLNPSTRQSAAHCVHGRITKQGNAHARWLLVQAAQHLGLYRGPLGHTMRSIIKRKNRKVAVVACARKLAVLVWHVLSSRQPFHYAVPKTLEAKYARLRVRATGTRRRSGVAKGSPRSLQYGKGRTRALPSLPQVLEQNGLPAPTPLLPGERNMLAKKKLDIFYLELQTASRVLKPMSGGTRKRME

SEQ ID NO: 273582 - protein, 413 aa, unidentified
MEVLYPRCAGLDVHKATVVAAVRLVAGGRVAREVRTFGTTTAGLLELAEWLAANGCTHVAMEATGVYWRPVWHILAEGGFALVLANAAQVKNVPGRKTDVGDATWLAELLAHGLVRASFVPDAPTGELRSLLRARKQLVRERASHVLRLQKTLEDANIKLDGVVADLLGTSGRAMLEALAAGETDPERLAALAHPRLAATPERLREALRGRVTRHHRFLLQLHLDQVDALDAAGGRVDREVEARLAPFRAAVELLASIPGVGALAARVIVAEIGPDMGRFPTAGHLVSWAGLCPRNDESAGKRRSDRLRKGAPWLKTTLVQCAWAASRKKASYLQAQYHRLRGRRGPKKAVCAVAASILTAAYHMLKDGTTYADLGPDHFDRRAKEVQARRLVRRLADLGYAVELAPLEPAPA

SEQ ID NO: 273583 - protein, 365 aa, unidentified
MASVAHLAPIHLGLDVHRDTISVGILAPGREVPVVERIAHDEASIRRLVGRLGDPRRLRACYEAGPTGYELARLLDRMGIGCEVIAPSLIPTAPGDRIKTDTRDCRRLARLHRAGELVAIRIPTPAEEAVRDLCRTRADMVEDLTRARNRLGKFLLRHGRVWRGGSAWTHKHEAWLGGQRFDEPALGTTYAHYRAVVATRHAQLDAVEVDLATWLDRPPFADQVARLAAYRGVTRLGGLTLAAEVGDWRRFARAAQFMGFCGLVPSEYSSGHSVHRGRLTKAGNAHLRAQLVESAWTYRHRPYVGRAIAGRQLGLDPEVVARAWAAQLRLSARFRALAARKNTKSIVAAAIARELAGFLWAEMVA

SEQ ID NO: 273584 - protein, 341 aa, unidentified
MNIVGAFDVHRRQVTFEYLDTGSGELKRGRVVPADRQHLREWLARFAGQADVHFALEGCTGWRYVAEELAAAGITPHLAEPADTAALRGRKRHAKTDKTDARHLRVHLMAGDLPECWIPPEHVLEARAVVRLYKDLLDERGAWHQRIAATLFHQGVPAIGSMATAEGRAAVEQVQLSLAGRQAVAAGLRQIDRLTAELDVLRRQLGMLARRQPGCRALREAWFGIGPVTAVAIWAELGDVRRFGNSGDVVRHTGLDITVRSSDGKGPPGRLSRQGPQLLRWALYESAKCAARPAAPDHGYYTAVRDQRTAGLATLSVARKLARRCYHTLRELGEDALAPAA

SEQ ID NO: 273585 - protein, 346 aa, unidentified
MLYVGLDLSRKRLDYHASLADGEVAAVGACPPDRDGLTHLVHGLGAAGPVLAAIESMSGARFVHDQLELAGWDVRIADARRVKGLAPLACKTDRIDAWVLAELARRDLLPEVWLPDPAVRAERERARFRLYLVQKRTSLKCRVHALLFQHGVQAPAGELFGAGGRRFLERLQLPEPWQTSLQTSCALIEVLDEEIAAQERALRRLGADHRYVRLLTTCPGIAWVLGYTIAAELGDIGRFRTPAKLVSYTGLCPRVRQSGEVDRRGRLSKQGPPYLRWALIEAAHNAIRYDAGYRELSARTRARLGRQRGGKIAAITVARKLSEAIWWMLTRNQPFAPAGARPFLTA

SEQ ID NO: 273586 - protein, 353 aa, unidentified
MKLDKYIGFDLHQATTVVAVLDAEGKVVLETIIATEAAAVIRFLKSLSGPLHITFEETTQARWMYDVVHGYVSEAIVCDPRRNKLLGEGSKADKPDARKLAELLRAGLLRPVYHGHEATRQLKELVRGYETLSTDTQRMMVRIKSIYRAHGIRTSGSAVYQQKQREQWLQLLSESGTRQRVSWLYEELDHLRPLRKQAKLAMVAEARKHQAFRLLRTIPQLGPIRCAMLVATVDTPYRFRTKRQLWAYSGLAIVTYMSSEYEIKSGRVVRSRKPVATRGLNRNCNRRLKDLFIGAAVAGSRSEPYRSYIEGLQQKGIRAEMARLTLARKIAAVALRVWKKGETFDPKKLNSTT

SEQ ID NO: 273587 - protein, 346 aa, unidentified
MAIVETTRSITGGVDTHLDTHVVAALDPNGGVLGVAAFPATRSGYCLLSSWLGEFGMIGRIGVEGTGAYGAGLARHLRSLGVEVIEVDRPNRQLRRAQGKSDTIDAIEAARAILSGRATGVAKTADGNVEAMRALLIAKRSGREARITCLNQIRHLGFTAPDELRERFQPVSRGMLAAQAAALRPRPDSDTVIYATKLAMRSLGRRVLTIDDEIARLEVVLGDLVTATAPGLVGLYGVGVDTAAILCVAAGDNPQRVRSEAAWAHLCGVAPLEATSGKVTRRHRLNRGGNRQANHALWRIVFTRLGSDPRTRAYVARRLDEGRSRPEIVRILKRYVARETYRHLPR

SEQ ID NO: 273588 - protein, 317 aa, unidentified
MVQTSTTTAGIDTSKDKLDIAVHGQSGCWEVANDLCGWRRLMQLLTKAGVRRVGIEATGGYERGVVEHLRAAGFIVLVLQPIQVKAFGRARLRRAKNDKLDAALIATFTASLEQVWDAPDPRLVELAEQLTFLEQAEEDIKRFKTRLEHMTEPGLRRLVLDDIARLKARRISQIRNIAKQLRAHHDLAARLDLVLSIPGIGERTALALLVRMPELGRISREQAAALAGLAPFDNDSGQYKGQRRIAGGRARLRRSLFAAALPAAFRWNKAVMALYARLTAAGKAHNAALIACARKLLIYANTVLQRGTPWTEKLLSV

SEQ ID NO: 273589 - protein, 377 aa, unidentified
MRRQEYGRNPNKRKEYVHHHALLLVGVDVSKANHHACSGTQPTMSCRKLACTHPREGFRRFAQTLQAHLVTKGRQHILSAMELSGISWPALYERLHSCGYAVCLVHCHAGQNKRQTMPAETSKTDAKDAASLFDLQRQGTVLLPVVRAPELKAAYRLMPRPRALKQRGSQLRKQRRAAMHLALPERTLRVQDLTQPTAVRFLHAHPTPASVLRHGRPHFLAQWQPRQRCGQGRPETFHRLYALAPASLGLQAPARLDAFESTPLTGDLVDALRKAQLWLDQARALLTHRADSQLRVQLPRMGKPPAAAMRSAIGDMHTSHKGQQLVQRAGLEPRVFESGSSIRNLPPIAHVGSASLRYGLYPYAMRLSAPAPPCQAD

SEQ ID NO: 273590 - protein, 340 aa, unidentified
MQLYAGIDLHASNNFIAVIDAGGKRMFKKKLPNEPELILSTLSSFREEMAGVVVESTFNWYWLVDLLGEAGYRVHLANPCAIQKYSGLKHSDDKNDAFWLAEMLRLAILPEGYIYPKEERPIRDLLRKRGHLVRLRTSLILSLQNIVARNCSIRLSVNDAKRLKENVVLPLLKSNDDLAMAGMVSKESIDFLTREIWTVETMVEQRVKLKNEYRYLLSLPGIGKILALTVMLETGPISRFPKVGDYVSYCRKVSSKWTSNDKTKGKGNKKNGNKYLAWAFSEAAELATRYDTQCRGYYNRKMQKTNFMVAHQALAHKLARAAYCVIKDQVPFMPEKLFAC

SEQ ID NO: 273591 - protein, 462 aa, unidentified
MKAKSEGKTGQNGRRQLQGLPLMRTDVAGMDIGSERHWVCAATEEGSGREIGDFGATTSELIRMAEWLKARRVKSVAMESTGVYWIPPHEVLEAQGLEVLLVDTRQLAQVPGRDKRTDPTDCEWIQRLHSCGLLRGSFRPAEGICMLRTLVRDKATLVAESGDWVRRMQKSLDQMNVRVHRAVSDISGTTGMAIIRAIAEGERDGRKLALLRDPHCRKTEEEIAEQLTGHWREDHLFSLCQALKMYEAKEERISVYEKEILRKLGEMEQEGQGGNNAPPLKNTNKARAIKKRGQEPKRQALYRMSGVDATQIDAIGVETVGVIISEYGPDLSRFPSEEQFVSHATLAPRVPKSGGKAVKKKRRNSTSTRVATALRMAAQSLRHRDTALGAYYRSTARRKGPGIATFAAARKIATLIYRLLRRGQPYIDEGAEAYETRYQQQRIRGLESRAKQLGYQLTPLTA

SEQ ID NO: 273592 - protein, 311 aa, unidentified
MTETNIGIDISKDHLDVHRLPGDERRRFDNSKAGHKALIRWIGDTPARVVYEPTGYYHRALERALAAAGMPIAKVNPRQARRFAEATGNLAKTDALDAAMLTRMGAVLSLEARPVPSGIINDLRDLRTARNALIKDQGAALTRAKAITLPLLKRQNAARLKQIEAQREAVDAEINALIQGDPDLAQRFAILCSIPGIAEVSAAMLLIEMPELGSLDEKQVAALAGLAPIARQSGNWKGKSFIRGGRQQVRQGLYMPALVAIRFNADLKTKYEQLIKAGKAPKQAITAVMRKLIILANALIKKDRKWQTRVA

SEQ ID NO: 273593 - protein, 334 aa, unidentified
MWHVGIDLHRATVVLAAVNDLGEAVNPVTIPCADGTTIVGTVKALGTFRAVIEATATYRWLYDLLRPYGTVLLAHPTRLRAMIQRRSKTDKLDAQLLANLLRINQIPLAYIPPEPYQQLRDLTRCRARLGRHLAEVKIQLRALLARQNRQSPYRTPFGPRGLRWFRGQDFGPIEGMVRDELLERFRHYAKQMTLFDQRLEEMQPAFPQAEALADIHGIGLYSALLIIAEIGEAERFRTAKQVGAYTGLTSRVHQSGGHCYQGSITRQGSPWLRWVLVQAAMKAVHRDAALKNFYSRIRKRSGAKIARVAAARKLAEICWKRLRRWQREHASQAA

SEQ ID NO: 273594 - protein, 351 aa, unidentified
MQYIAFDSHKRYTWALVQDEEGKVVEERRIEHIPGALTGFLERWTPGSPVAVETVGNWYWITDEIEAAGMIPRLVHARTAKLMSGKVNKTDQLDARSLNRLQRSGTLPTVWIPPRELRDQRELPRTRMVFVRMQTALKNAIHADLAKYNLRAQGVSDLFGVRGRIHLKEMVNELPCETRYVTQLLLAQLGEVQETIQGIERRMHSVFAQSAQLALIQTLPGVAFILGVVILTEVGDVSRFPTGSHLASYAGLTPRVHASGGRVRHGRTRFDVNRYLKWAYAEAANATMIRRRHDSRHVSKLYERVRRRRGHQKAIIAVGRHLAEATHAVLTTGEAYRDPTSLDPEEPMREA

SEQ ID NO: 273595 - protein, 331 aa, unidentified
MTTASASQSSPQPSLFVGIDVAKDKLDLATSDTRRVQTFDNNPAGHQQIVDLFVARKPACIVIESTGGYEWPLIQVLLEADLPVAHVNPRFIRHFAIGLRILAKTDPIDAHVLVRYAQLAEPTLLEKRSKNQAELTALVTCRRQLQQTLTQQSNRRGLTRSKAALKAIDQVIKTLQRQIADLDAAIRKLIESDDHFNDLDRLLRTVPGIGPVASATLVAQMPELGKTDRRHAPALLGVVPYNHDSGKLKGQRCIFGGRTEPRCVTYMATLAAMRCNPIIRAFAQRLRGKGKKAKVVIVACMRKLIILINAMIRDRLPWSELNLVKNLQTNP

SEQ ID NO: 273596 - protein, 375 aa, unidentified
MKNKVRFLGLDVHAETIAVAIAEPDGEVRSLGTIANRAESIRKLVKKLGSAEQLKACYEAGPTGYVLYWQLAELGVACEVIAPTLVPMKAGDRVKTDRRDAERLARSYRSGDLTAVLVPDEGSESLRDLARAREAAKQDQLRARHRLSKFLLRMGQRPAVGMKAWTAPYMAWVRQVHFTQVAREATMLDYLHEVDHMSERVRRLEQAITEAVKLATPAVQEVVNGLQALRGIAEISAVTIIAELGSITRFDTPRQLMGYSGAVPSENSSGKRTQRGSITKTGNAHLRRIVVEAAWSYRLRPAIGPRLRKRQEGVSEPIKEIAWKAQVRLTKRYARLAAAGKDQRKIVTAVGRELLGFIWAIGIKAETASKLQMAA

SEQ ID NO: 273597 - protein, 356 aa, unidentified
MKIIGVDLHTRQQTIAMLDDQTGELVEKQLNHEGEGVRQFYSALPRPVLVGIEATGSMFWFLRLLDELALDFRVGHPAKIRAAEPRKQKNDRRDARLLLRLLVENRFPAIWMPSPILRDLQVLLRHRHRLVRIRTRVQHGLQALALSHGLRRGSSLWTPGGQHQVRTLPLAQHAATQRETLLTLYPQLQHSIDCLDRQIETQVNERPQASRLMTHPGVGPITALATEVFLGDPRRFANGKAVASYIGMIPEEKSSGGRQRFGKLSKQGNTLLRFLWGQAAMQAVRRDPELLRFYRRKLVQKGLGKAMVAAARKLGIRLWIMLRDEIDYSEFCRRGNLLRQCGTAYAGMPEGDSGPR

SEQ ID NO: 273598 - protein, 345 aa, unidentified
MPIVGGLDIHRRQITFDYLDTVTGQVRRGQVSPADREHLRAWLARFHGCDDVTFAVEGCTGWRYVVEELAAAGVEAHLAEPADTAFARGRKRHAKTDKTDCRHLRMLLAEGRLPECWIPPGHILECRALLETYHDLRAEHTAWVQRIHAVLFHHGAPALGEGTLRTGPGAAALRAAAAGWLSPAGQLQVATALEVLEALEDRMHVVRHQLLAAARHLTGAKVLAARLYGVGPVTALALTCWLAGEGRFSSSRQAVRFAGLDVTVSSSDRKGPPGRLSRQGPPVLRWTVYEAGKAHARSSAPDHGYYATVKDRKGGKRAALSEARKILRQACHILAELGDDALAAT

SEQ ID NO: 273599 - protein, 350 aa, unidentified
MIIIGVDFHPEFQQIAWVDTDTGELQEKRLAHPEEAEKFYRGLAVGSQKVRVGMEASGHARWFERLLAELQMELWIGDAAEIHAKRARKQKTDRQDAEHILKLMLKDDFPQIWVPSWENRDLRQLLWHRHRMVQARTRIMNQLQAVALNEGLRCKKRLWREKGRQQLESFRLAPWASRRRHDLLELLDRLTPTIRELTQAIEQEAEKCAAAQRLMTHPGVGALTALAFVLIIGKAERFRCGKQIASYLGLVPLENSSGNRRRLGHITKQGSSMVRFLLVEAAQVTVRSVPEWRNQYFHLMMRRGRKIAKVAMARRLAIRLYWMWRQEWNYEQFVSFGSYVGQPGHRDGVR

SEQ ID NO: 273600 - protein, 341 aa, unidentified
MGARNYFVGVDLHRNQFTYCVRYSNGEEKVGKEPIEDLERFARRLGNHASVAVEATGNTWMFCQVLKQYAGRLVVVNPNQFKVISHSVKKTDKNDAKVLAEFLEKDLLPEVRMKNELQAKVASLTQTREKLVQLRTVLKNKINNLFASRFINLKREELSSEKGLLKVLSYHFDAISDVELRVMVDQIRSLNRSIEELDKAIEDSGSKMDGFDNLTSVKGIGAKGASTLLSVIGNVNDFRSAKQLAAYIGIVPRVSDSNETVHHGRITKLGSKIARTTLVQCSLIAKRYNPYLHAFHERIKARRGGAKANIALARKFLEIIYRVLKNKLVFEDFTTFKLKTT

SEQ ID NO: 273601 - protein, 343 aa, unidentified
METKRYIGIDLHRNCFTACLRLENGREYLKEWRLEDMDKFVAKLRPTDRVAVEVTGNTRLFHDAVAPHVERVVAVNPSQFKVITHSVKKTDPNDARNLALYLAKDLLPEVRMKDKTRAQIASLTQTRDSMVKLRTALKNKVNNLCSAQGVNLNKESLASEKGLRAVLEMQFDLLVNLELKIIVDQIRSLNKSIAELEETIGQEGQKLSGHRNLTSIKGIGGLSGGILLSIIGDIGDFADEGKLAAYFGIVPRVSNSNETEHAGRITKRGTKLGRTTLIQCALIAQRYSPYLKSYYEKMKSRRGTGKAIVALARKFLGIIYRTLKHKWVFEDFPNFVLAEEATA

SEQ ID NO: 273602 - protein, 393 aa, unidentified
MNCVGIDVSKGKSMIAVMRPFGEVVVSPFEVRHTANELSELAGLLKSLDGETRVVMESTGNYHAPVAWLLHDAGLYVSVVNAMLVHDYGNNSLRRGKTDKKDAVKLANYGLDHWLTLPRYIPEEDTRLMLKICYRQYQQYSKVQTMLKNNLISLLDTTFPDANRLFTSPPRADGSEKWVDFVATFWHCECVCGRSEKAFTTQYQKWCRKHGYNFSEDKALDIYASACRHFGVIPKTDTAKLLVEQAISQLQTTSSALAALKQEMQSLAASLPEYPVVMGMFGVGPTLGPQLLAEIGDVRRFHSKKALVAFAGIDAPPYQSGQIDVRSRSISKRGSASLRRTLFLVMGVLLQCAPMDEPVYQFMDKKRSEGKPYRVYMMASANKFLRIYYGRVK

SEQ ID NO: 273603 - protein, 342 aa, unidentified
MYYIGLDVHKKTISFCVKDAAGHVHREGKIGSTRRELDAWIGTLPQPRMIAMEATIFTGWIYDHLLPHASAIKVAHPLMLRAIALAKKLSDRIDASKIADCLRCDFLPEWHMASTEIRNRRRVLRYRHLLVRQMVQTKNRVSGLLLETGVEHNKSRLHKVGYFRRLLATNSDIDDSIRPLLRLSRETIERCQKTEYALVSSLERDPFLKERIKRLRTVPGVGPITALNWALEMGDISRFRTIKQAVSYCGLCGDERSSADKVMRMPLSKQRNKHIQHVLVEAAKLAPRQSAELALIHHKAMEKGNRNRATLAVARKIVAWLLAVDRENREFIPAEQREIRAA

SEQ ID NO: 273604 - protein, 364 aa, unidentified
MGVGSRHRPRLDWKPAAASADRPRMSLALQSFLPFPNSCQGTSPHQQGRGTKMTEHCYCGIDVAKDRLDAQVLPHRQRFSVDNNATGWAELVERLHALPIAAVGIEPSGGYERGIIRILLAAGLSVRRINPSKLRQFARARGILAKNDRLDAQLIAEYVSIMPTRVVQRVATAERLAEVVTMRRQLCDQHVTIENQAAHVEDAILRRLNKRRLARLKADIHLLDKRLAEIVAADVILAQRYELLTSMRGVGPTLAFTLIALLPELGQISRKQIAALVGLAPYDFDSGKLKGHRCIYGGRMPVRNILYMAALSAARYNPALKVFHNRLAAINKKPKVIIVAVMRKMITTLNAMVRDNAAWQPRAA

SEQ ID NO: 273605 - protein, 355 aa, unidentified
MTSTKYIGMDVHKESISIAVRNAAGKIVMECVIETKASTILQFFDGLRGDVHVTFEEGTWAAWLYDLLKPHVTKVVVCDPRRNALLQEGNQNDRVDARKLAEPLHNNQLRSVYHGDHGLRTLKELVRSYLTITRDLSRVMTRVKAIYRSWAILCTGKQVYASRHRAEWLAKISEPGVRRRAEFYYQQLDALRCLRQEVRRDLLAESKKHKPWKLLCQIPSIGPIRAAALLGILQTPHRFRTKRQLWTYGGVGIETSSSADHHLVKGQLERNRKQVEIRGLNRNYNHDLKNLFKGAAVVAATKPGPFAEFYAELLARGMRPEMARLTLARKIATIVLIVWKRGVCFDAQHLKPQTA

SEQ ID NO: 273606 - protein, 322 aa, unidentified
MMQDLAKVQRFIGVDVAKAELVVCEGIDGVMRAIPNRADAIAGWLRVLPADASIAMESTGRYHRLLATLAHQAGLAVYVLNARDVHFYAKALGSRAKTDAVDARIIARYLAGHRDRLHAWGGGQTSQDTLQLLLARRTQLAQQRSSVAQVLNDGLMAYDEAGAVLASFDALLKRLDAEIASLVQADPLQAERYRCLLTIPGIGAATGSMLVALFSRLPFANADAVVAYSGLDPRANDSGTRRGRRRLSKRGPAQLRRNLYMAGFAASRSNALKPLYQALRARGLSTTASFVILGRKLLRVAFSMWRSSRPFDLDLIGPKRLD

SEQ ID NO: 273607 - protein, 413 aa, unidentified
MKRIRDRVAGLDVHRDTVMAAAWVLDRATGEVVEDQEEFTTMSSGIARLSRWLLDHGVTTVGMESTGNYWKPVYYGLEGMFDELWVCNAQHVKNVPGRKSDLSDAMWLADVMAHGMVRASFVPPQPIRELRDLTRYRRTQVDIRGRELQRLEKVLQDAGIKITSVASRVWSLSSRRMIEALIAGERDPVVLANKALGKMRPKTARLTEALSGHWRDHHSLVAVEIIAHIDHLDASIDALSQAIGQRLGPFEDLIDRMCEVPGVSRTTAETVVAETGADISRFETPQQLCAWAGLAPASHESAGKRRPAGTRKGQRWLRRALVEGAKSLSRSNGSFLAARYKRIARRRGPNRATVAVAHSILTILWHLMADPDRRYSDLGADYYERRRDPEREARVLLAKLKDLGFTATIQPAA

SEQ ID NO: 273608 - protein, 321 aa, unidentified
MIDEADRLISERRLDNNLEAIEHHPQPYQDDISGVVVESTYNWYWLVDGLIEHGYPVHLANTLAIQQYNGIKYSNDETDARFLAHLLRLNILPTGYIYPKALRQVRDLLRRRLLLVKQRTAQLLSLQSMIGRHTGLCLSGHQVKQLKQDELAHYFDAKATLFAAQQTHQLIQQLKLQIEAIEGFVLERCQDSELYALITSTPGIGKILGMTILLETGPIERFAQVGNYSSYARCVPTDRISNGKSKGKGNARNGNRYLAMAFVEAAHYATIWDPTIKRYYQRKCKKKPVMVAKKTVANKLTRACYHMLKDGTAFDVTRAFG

SEQ ID NO: 273609 - protein, 354 aa, unidentified
MSQTLKTAIAVVGIDIGKNSFHVVGLDQRGAIVLRQKLSRGQVEARLANMPPCLIGMEACVGAHHLSRKLKELGHDARLMPARYVRPYSKGQKNDFRDAEAIAEAVQRPTMKFVATKTADQLDLQALHRVRERLVSQRTGIINQIRAFLLERGVAVRQGLRFLRAELPRILATPPDVLSPRMVRVIEGLAGDWRRLDERIEGLSSEIEAVARQDTACERLMSVPGIGPIISSAMVAAIGTGDVFSKGRDFAAWLGLVPRQISTGDRTILGKISKRGNRYLRVLFVQAAWVVLIKPKSWERHGLKPWIEAAKKRLHRNVLAIALANKLARIAWSVLARGRAFEVRKVDEAAAQPA

SEQ ID NO: 273610 - protein, 361 aa, unidentified
MVSTFTNDAKGFSQLKLLLNSLDTETRIGLESTGHYGMNLKLFLESNNFSFMEFNPLLINRFVKSKSLRKTKSDSIDCMMIAHYLMTVEYKPYPSSFYHTEKLKSLTRFRDSLIRLRSRQLVELTNILDKVFPEFKPFFGSRFSVTALYILSNYSSPEKIANMNSKSYEALRKLSRGRFSTVDFAKLKQLAKNTIGTTEDYLLLQMQIVLDIYRQLDSKVDETEVSIKECVSDMNPPMLSVPGIGIESAAVILAEFGDFSKFKNASQMLSFAGLEPGYFQSGTSETTGKMVKHGSSYLRYALMNCAQTVVNYEPTFAMFYSKKRAEGKPHRVALSHVVKKLLRVIYTLQTKNIAYDADFVR

SEQ ID NO: 273611 - protein, 349 aa, unidentified
MSTLNSAEENKPSYAAHIGLDWADQKHFWTMLTAEGKRTRGELKHTPEAIEVWAVELARTFGGRPIALALEQSRGALVAVLSKYAHVHLFPLHPTKLAHYRMSVCPSGAKGDPSDADLILDYLVKHPERLRCLEPDTVETRSLQFLVEERRKLVNQHTCQVQILIYWLKQIFPQMLVWFDNMSTPLVGDLLKRWPELPKLQKASAKILRKFFDQHNCRSEERIQQRLEEIGQAVPATTDAALLRAGNLCIQLSVQLLASLRAGIAEFDSQIEAIYQTHPDRFITASLPGAGPALEPRLLAAFGTNRARFESASNMACCFGIAPVTESSCKSRWVHWRWACSKFVRQTLH

SEQ ID NO: 273612 - protein, 356 aa, unidentified
MQTQVTKKIDFTGKQLFIGLDVHKKSWSVTILVDGTEHRTFTQPPDPESLNSYLQRMFPGGEYNSAYEAGFCGYGIHRRLNQLGINNIVINAADIPTSQKDKLQKRDPVDSRKIARSLEKGSLRGIHIFDRELEELRSLNRTRFYLMRDLRRSKTRIKSFLQYYGEPIPQEFDNNQWTLRFVSWLKQVKMQTMSGQDAFSNLISSYEYHRSQLLTLSRQIRERIQEYDKELYTLLKSISGIGPLTASALITELGDINRFKNIDQLGSYIGLIPRIRESGETTYTGGITFRCNSFLRTLLIESSWQAIRMDPAMMQYYHAHLVNNKGHKVVIKVARKLLNRIRYVMKNRQPYVNGVV

SEQ ID NO: 273613 - protein, 345 aa, unidentified
MSESYEGKQIVGINLHRRRSVLVRMTEAGERLETVRISNDPEYLRQVMARAGEAPDVALEAAYGWYWAADTLAELGAQVHLAHPLGVKMFSYRRVKNDERDAADLADLLRMGRLPEAWIAPPATRELRGWVRHRAKLVGLRSNLKCQVHAVLAAAGVQVPMSDLFAPGGQRLLAGCPLAPESRSRVDSLLRLIDALDFEIDTFARLVAGRLREHPCYIAIQQIPGVGPILAAVFVAEIGDVTRFPGPAQLASWAGLTPKHHESDTTVHRGRITKQGSRLIRWAAVEAVQRVPAHTRLGQVRDQIGACRGRNIGVVTARELTELVFYGLRDGHIRRLSAPQHTPAA

SEQ ID NO: 273614 - protein, 376 aa, unidentified
MSKSTPSSSAKKATKGAAKGRAVDVDWTRVATIGIDVGDRFSSYCAIDASGAIVAEGRITTTVGAIELKLGQVSRKTVAIEAGMHSPWMSRLLDRLGHEVIVANPRKLRLIYENQHKNDRVDAEYLARIARLDPKLLGAIEHRSELGQSHLALIRARDVLVRARVRLIHHVRAAIKSIGSPVPSGHTDAFHKRVRSAIPKLLDASLEPLVEMVEQLTSRIHEFDRKIERLAEDRYPEAEVLTQVAGVGPLTALAFMLTVEDHRRFRTSRSVGAWIGLTPGQCQSGQSNPQRHITKQGDHYLRRLLVGSAQYILGPFGTDSDLRRYGLAIAARGGKNAKKRAAVAVARKLAILLHHLWRTLDVYEPLYNSNSRRKAA

SEQ ID NO: 273615 - protein, 366 aa, unidentified
MDKVKFYVGLDVHKDSIAIASAAAYSRDDPHFVGTTRYSVISLTKALSRLGAPSELSICHEAGPCGYGLVRALREQGYHCEVVAPSRVARRPADRIKTDRRDALLLARLHRAGELVPVAVPEPQDEAIRDLVRAREDAVNDQRRVRQRLKSFLLRHGHAYTGTRWGPKHELFLSKIKFEDSAQHIVFTEYRMAVRFATELVERLTQSLRAHTETWRWLPMVKGLMTLRSIDFISALTIVAELGDLRRFPHPREFMGYLGLVPSEHSSGNSKQRGRLTKTGNTHVRRILIDAAWNYRLPARIGESLQPRLEGQPGHIIDIAWKAQLRLCQRFRRLRARGLHQNKTCAAIARELCGFIWDIGTRLQPA

SEQ ID NO: 273616 - protein, 421 aa, unidentified
MRRKDRMKTHSQLRHFGGLDWAKHQHQVCIVDPQGQIVERLQFEHSGPGWAKFRETIEKYPALGMAIETSQGAVVEQLLASQVSVWPVHPKAAKSYRQRQAPSGTKDDQLDSWSLADALRTDGGGWRPLNEQDPLIAELRLLCRDEEELITQRTALVNQLQAALQEYYPAALEAFDDWTAPYTWEFVARFPTAEQLVQARAHRQRAFLHRHRLWQPQLAQRRLEIFARADQFCGGEALTRAKSRLALSLVKLLQALQGQLDDYRAAIEKLFAEHPDHDLFGSLPGIGPKLGPRLMGSIGADRGQYPDVQGLQCVAGSAPVSFQSGQMRRVKIRWHCDRFLRHTVHLWADCSRKTCAWAAAYYQAKRDQRMSHACALRCLAQRWLKILWKMWQTHQPYDPEYHAQNQRRHGSWVLQLNPKSA

SEQ ID NO: 273617 - protein, 321 aa, unidentified
MQQRSQWVGIDVSKATLDIYIRPIAQQFQVQNQALGIADLVKRPQAFEIEQVIVESTGGLELEVAQALQDVGIAVSIINPRQGRDFAKASGKLAKTDRIDAAVLAHFGEALRPAITVLASDQDRALQEAVTRRRQLVEMLSAEKNRRASLRGTMRQNVDTHIEWLEEHIEDLDEEIEELSQSQVEWQARIALLKTVPGVGPVIATTLMAALPELGTVSDKRISALVGVAPFNRDSGKFRGSHMIWGGRANIRAVLYMGTLVAGRYNPVLKAFYERLLGQGKAKKVALIACMHKLLRILNAMIRDLKPWRVPEVLRPDEICC

SEQ ID NO: 273618 - protein, 287 aa, unidentified
MPRKCKDTVAVLGIDIGKNVFHLIGLDKRGAIVLRQKLSRGQLEARLANMPPCLIGMEACVGAHHLSRKLKILGHDPRLMPAKYVKAFLKGNKNDFRDAEAIAEAVQRPTMRFVATKTAEQLDLQALHRVRSRLVSERTAIANEIRAFLLDRGIAVAKGLHRLRATLPGILATRGDVLSPRLLHTIEDLIGDLRRLDERIDNVSLEIEVLARDDAGCERLMTVPGIGPIISSATVAAIGTGDVFSKGRDFGAWLGLVPKQISTGDRTILGKTDTSERCSCKRPAWCC

SEQ ID NO: 273619 - protein, 345 aa, unidentified
MTQFSRIGLDTSKSVFTLHCVDAAGTPMLRVSLRRPQLLGFFKRHARTVVAMEACGGSHHWARKLTALGHEVRLIPPQYVKPYLKRGKNDRNDAEAICEAAGRPGMRFVLAKTEDRQADTMVLKVRATLVEQRTQLINAMRGHAGEFGVISGRGTGKVTALLAEIAADTAIPPVAHEMLALLGEQIDHLDCRIKALEAKLDAMHKADAISQLLATVPGIGPIIGLSFALEVDPAAFTSGRHLAAWLGLTPQEHSTGGKQRMGGISRAGNERLRQLLVIGATSVIRFADRPGNKQANEWLLKLLARKPRKLVAVALANKIARTVWAMMRSGEVYQRQPSVAGAASA

SEQ ID NO: 273620 - protein, 416 aa, unidentified
MIEGVHWFVGIDWATQSHRVCLLDGEGSRVTEREVVHGGAGLTELRDWLLEKTKAAPAQIAVAIEMPHGPVVEMLLEHGFMVFAINPKQLDRFRDRFTVAGAKDDSRDALVLGDSLRTDRKAFRQLATDDPAVIELREWSRLMDELQQERTRLANRLRQQLWRYYPQAAELTDDVGDEWFLALWQKVPSPAAAAKASERAVARILKEHRIRRLDAATVLQTLRKTALFVAPGTTQAACVHIRSLVARMHLVNQQIKEAGAALDSLCDSLAAQEEDASGQSHEQCDVAILRSWPGIGRIVLATLLTEAAQPLQARDYHALRALAGVAPVTRQSGKQRCVIRRLACNKRLQTAVHHWSRVAIQRDAAARRRYNALRQRGHGHARALRGVADRLLSVLCAMLKHHTLYEADHGRTRTVA

SEQ ID NO: 273621 - protein, 312 aa, unidentified
MKTICGVDISKAVLDACIEPGEVRGQFSNDAAGIAELAAFCRQHRVELVVMESSGSYERRAFLLLSQDGLPCAITNARNVRLYAEAMGVPEKTDGIDSSMIARFARHKDLQPMPLPSPAQRRLKALVARLRQLTDDLIVQKQRRSSLRDDPEMLASIDEVIALLKRQSRTLEGEIGSMIDDDPLWASLSETFRSIKGVADRTVAWLMAELPEIGTYSNKAIAKLVGVAPIADDSGKRRGKRPVRGGRPGVRSILFLVAAIAARYDDDLGRFRDRLLAAGKEKMVVRIALARKLLVRLNAKARDARAAFAYAT

SEQ ID NO: 273622 - protein, 455 aa, unidentified
MTPCKVSGARRRQRLQVTNPDAAGIDVGADAHWVCVPEDRAAEQVQRFGTCTADLEAIADWLQACAVTTVAMESTGVYWVPLYELLEGRGFHVLLVDARQVARAPGRPKTDVKDCQWIQRLHSYGLLSAAFRPQDQVVVLRAYLRQRDMLVTYAGQHIQHMQKALEQMNVKLTEVVSDITGVTGMSIIKAILRGRRDPQQLAKLRDPRCKESEATIARALLGNWRPEHLFALQQALALYEFYHQQISACDQAIEAHLRTFTDKSGGEVLPCRPRRRKREANEPRFDARARLHCLCGVDLTEIEGIDETTALVLLSEIGMDMSRWPSLKHFCSWLGLCPQHKISGGKILNRRVRRGASRAKRCLRLAARSLHHSKSALGAFFRRIKARQGTPMAITAAAHKLARFVYSLLKHGTAYVAQEMADYEAKYRERKLQAITRQAHALGFHLVPVAVAATG

SEQ ID NO: 273623 - protein, 355 aa, unidentified
MSQEKYIGMDVHQATISVAVMDGNGKLVMECLLETKAATILEFVQGLRGTLSLTFEEGTSAAWLHDLLKPHVSRLVVCDPRKNALLKEGNKSDRIDARKLAELLRTNQLKAVYHGEHGIRTLKELGRSYLTLSKDVTRTMNRIKSLYRSWAIPCAGTSVYAPRHPAEWLAKIVEPGVRIRAERLYQQLDGLQSIRQQARRELLQESHQHPAVKLLRQIPSIGPIRSALLVALLQTPHRFRSKRQLWAYSGFAVETHDSGEYRYVRGKVQRNRERITVRGLNDNHNRDLKNLFKGAAISASTRPGPLHDFYVARVAQGMRPTMARLTLARKVAAITLTMWKKGVSFDPQQLSRQSV

SEQ ID NO: 273624 - protein, 387 aa, unidentified
MTGPSQVSRFIPGDYDIFAGLDVDKRSIAMTFCDHKTLLKSLRLPYSSAQLVNYVRKHFPQQRVAFVYEAGPTGFGLYDDITAEGHPCLVVAPSMVPTAPGQRVKTNRLDSKKLSIGLRGGELRSIHVPAASYRELRHLVQLRDTYVRQLTATKLRIKSLLLYEGIPFPEAPRTSQWSARVVHELEALPCGETVRFKLDQLIGTLYFHFNMAATTQKQIRRFCQKDPEIRQSISLLMSLPGIGWIVAAHTVARLGDWREIENVRSIAGFLGLVSSEHSTGDKVNRGSITRVGDSRLRNKLIQSAWVAIGKDPELRAFYRRIFARHPKKVAARKAIVAVARKLTTRMYAVLKQQRPFVIRPDSSIAPLTTEETVGSRERLDAAQNEQP

SEQ ID NO: 273625 - protein, 349 aa, unidentified
MTNYIGLNAHSKTCTFVVLDALGRQIAFQEIKTGEPEILKFVESVGGKKELVFEEGNLSKWLYAILRDKVDRLVVCDPVFVNRRLGPKDDYPDALHLAQQLRGNFLIPVFHQDGFFSELRAVVSAYLDLVRDTVRFQNRYKALFRAQATETDGKRIYSDRERIKEIKSDSNRFIAETLFDQIEFFREQKKEFLRRFMEYEKTNPQIAALASIPGIGEVRACVIAAVVLSPERFPNKYKFWAYCTLVKYDCRSGGVSYGKKNTRGNRVLKNVFMGAAKSVLAGDGFFRKYYDALREKGVDHAAAKKNVARKIAAIALASMRKGTRYKENYENQRKSQTVNSSLKHSVVEC

SEQ ID NO: 273626 - protein, 347 aa, unidentified
MGYFAGLDVSLEETAICIVDDVGQIVREARVASEAEALVAFFRACGMTMERVGLEACSLTAWLHAGLTEAGIPAVCIEARQAKAAMGAMPNKTDRNDARGIAQIMRTGWYRAVHVKSPSCRSWRALLTARRMVLNKRRDVENGIRALLREVGLKVGTPSRKDFAARVRELAADDPVLASLAESLLAVVEVMTREVERLTKRVLDEVRVEPACRRLMTVPGVGPLTALAFRATIDQPSRFRRSRDVGAHLGLTPRRYQSGETDVQGHISRCGDELARTALYEAAHSLLIRSTKWSALRAWGMNVAKRRGMARARVAVARKLAVILHRMWADGSEFRWGKQAAAPTVAA

SEQ ID NO: 273627 - protein, 383 aa, unidentified
MKAVCGLDVHKDSIYLCILHPDGELFEQVFGVLTFQLHEMCKLLKKHHVSEVSMESTSIYWIPIWRVLSPHFTLRLVNPYFIKQLPGHKSDVKDAQWIAECTMKELVNGSFVPPEIIQQLRQYDRRIFDLNEEIVRKESKVDAVLQRCNIRLSNYVSNIECKSYRTVVRRLSEGVTDPQELIKEIHGRIINKHGRETILASMEGVVSQAEIDVLRQLREEIDIAESHKKECQDKMSEICKKYFPEELRRLQTIPGIKERAATSLIAEIGTDMSKFETANHLAAWSGLRPRNDESNKKVKSRKTTHGNSYLRRTIIQCAWAASRQKDCFFSWFSYHQTVVRRKNKMKVIVAVARKMLVAVWHVLHDNVEYIDFKHDCEESANNG

SEQ ID NO: 273628 - protein, 405 aa, unidentified
MSNDVFVGLDWAVHTHAVCLIDANGSVLDRFEVTHDRDGLAELMRRLARHGARLRIAIERPSGLIVDALVDAGHEVFPIHPNAVKASRPRYRSHGAKSDASDAYLLADLLRTDGHRWRALAPQSDDIRALRALVRSRDDLVAARVAAANQLTSTLQAFWPGAAVIFADVASPIALAFLRRYPSPSSARRLTETQLQRFCKAQHYSGRRSAAELLGRLHAAAAGHVGAHTERALADVVRAQVKVLVPIVTQIAELTRRIEQFMHALPDGLLMMSFPRAGQVCAAQILAELGDVRERFPSADQLAAEAGTVPVTYQSGKTRSVAFRWACNHRLRQAITCMADNSRHANAWAKSMYQAARARGCDHTHAIRILARAWLRVIWRAWTDRKPYDPSLHGNAVILASVQGG

SEQ ID NO: 273629 - protein, 462 aa, unidentified
MKRKAKSQPTHSGLAVVNPNAAAIDIGATMHMAAVGANRASDPVRSFGTFTADLRRLADWFAECRVKTVVMESTSVYWIPIFELLEERGFEVILVNARDAKHVPGRKTDVSDAQWLQRLHSYGLLRASFRPKGEIVELRAYLRQRERLLDTAASLIQHMQKAMTEMNLQLHHVVSDITGATGMRIIRAIIAGERDPAVLASMRDTRCHSSIEVIEKALTGHYRAEHLFVLEQALALYDVYQQKVAACDIRIESVLKELISVRGSKEDASANGSGSPRRRSRQSNGPDFDVGKALNALLGKDLTRIHGIGPYLALKLVSECGDDLSAWPTAKHFTSWLCLAPSNKISGGKVLSSRTRRSGSRAASLLRLAAVTIGRTDTALGAFYRRLSARAGKSKAVTATARKIAVLFYNAIRHGMDYVDPGASYYETRYRERVVKNLHRRAKAFGFILQAAEIPVAEQAVS

SEQ ID NO: 273630 - protein, 427 aa, unidentified
MKIQDLPRRINANDELVVCFDVSKEKLDGYAIHTRREASDREITVTIDRRAKQIEEQINELSGYADEHGLDGLCVVCEPTGGYDQELLRLARKQGHRTAYVNAEHSAKMSTVDSGDTNKTDPADAKAMSLVAQVDRTQAHRTLEGEYGLLRELGQMYEDEDRQAVQVRTRFRDVLKKLFCDYEKGADFLFNSTGTAVMEEYAWDPQAIVQDGYERFCERIKSHVKRARWATLEALYEQAQQSARMQWPEGYRSAWKQRLRQLWGDYKRHTRRKEHLAERIEQLYRRLQERGEVPAPFEEITAKQLGRLIGEIGPIGDFEVYVAVEKYVGLNLRERQSGDYEGEVRITKKGRPLARKILGQMAHQLIPEGRLFGDYYQRKLQQGMKKAKAFVAVMRKILRLIVGLYKSDRPYDPSRVFTCRSEYAGAT

SEQ ID NO: 273631 - protein, 357 aa, unidentified
MSEGSWVGLDVHARSVVAGVLDAGSGELRSLRVPPGYEETVGWLQSLPGPVRVAYEAGPTGYGLARACSQAGIVCTVAAPSRIRRAAADKVKTDRRDAERLARLLRMGELVAVRVPEPHEEAARDLVRAREDTRSDLMRARHRLSKLLLRHGLVYDASAWTVAHDAWLRRQRFDSGPLRLAFDECYGTMLHTKTRRDALDQAIVELAATPPFAEIVGRLSCLRGVSTLTALALTVELGDWTRFRPQSLGPFLGLTPSEDSTGEKRRLGAITKTGNTHARRLLVEAAWHQRRPLRPSVTLERRRQGQPAAVKAQADRSARRLHARWHALENRGKRRTIVAVAVARELAGHCWALATME

SEQ ID NO: 273632 - protein, 312 aa, unidentified
MAKIICGVDVSSERLDARIGQDGPFQAFDRTPEGIEALAAFCKTHDVEFVAMEATGGYEKLPFGLLWLAGVPCAIVNPRGVRRFAEAMGIFEKTDRIDAGVIAHFAEVKRIVPQTPASATQEHLEAMVTRLRQITDLRTMQTNQRRLLTDAGVLAGIDELIALINRQIRGLERQIAQSIDADPLWKVLDAAFRSIKGVADRTVARLMAELPEIGTLSGKKAAKLAGLAPLARDSGKVKGPRSIRGGRAHLRSILFVVAEIVRRHEPDFNKFHKTLTDAGKCKKVIRVALARKLLVRLNAKARDARKELGLAV

SEQ ID NO: 273633 - protein, 422 aa, unidentified
MGKHRYKTVGFKALDWSGLGERLAGRRVVFSIDVAKDDFYAALMTAEDAVEALVKWVHPQETMALLAHLSALAQVAQVEVVMEPSGTYGDALRWQLTQRGLGVWRMGPKRVHDAAEVYDGVPSLHDAKAACLIGRLHWQGVSRPWREADAERRALLAEVSLVDLYKARHQAGTNRLEAQLSRHWPEVLRVLGCKSVTLARLLAQYGDAAHVAADEGRARELMRHSGRSVLGAERIEAVLASARTTLGVPCVEAERCLVQELARDVIETAKRLREAERTLERRVAEDATLTRLSAVVGVTSSAVLMATQGRPQDYSSPASYVKGLGLNLKERSSGKHVGQLKLTKRGPGVARHYLYFAALRQIRRDPEIRRWYQARIQRPGAVRGKSVVALMRKLAQGLWHVARGQPFEPGKLFDSKPQAGAA

SEQ ID NO: 273634 - protein, 437 aa, unidentified
MEEVTDEPLYRDRVCGIDIGKAQLYATIRVPSDGNPARRASETRSFATTKRGVLALADWLRSWQVPAVVMEATGDYWKGPFYRLEAEGFDCVLADAKQVKNLPGRPERDPSDSRWLAACFERGAVRPCFVPDPEFRIIRLHTRYRRDLIEERTREKNRTEKLLESAAIKLSSVVTDLHGVTGRDIMDHLIAGERSPKVLAQLARGRARRKISELEQALEGAEFFTDHHAGLLKTMLARIDQIDAEITPLSEVIEQLLAPWEEQLQQAESQPGWGRRSAEDVLAETGPDMTKFPTGGHLVSWAGRAPLDHQSGKRQGRFRHKKGNKYVAAATGETAISAGKTSTREGARYRKLARSRGKAKACVALGNTQLKVYHKLLSNPGMRYQDLGPDYYQRRAQTRRKIAYHVRELEELGLEVTLCRPGPAQDDPEPTQAPLTP

SEQ ID NO: 273635 - protein, 350 aa, unidentified
MIIIGCDDHPSFQQIAFLDSETGELQERRLQHREEAEKFYRDLAAQGMKVRVGMEASGHARWFERLLAELQLELWIGDATVICAKRGRKPKTDRQDAQHILKLMLKDDFPKIWVASWENRDLRQLLWHRHRMVQARTRMMNQLQAVALNEGLRYKKRLWREAGREQLEAIQLAPWASQRRHDLLELLDRLNPTIAKLTQAIDREVEKCPAAWRLQTHPGVGPLTALAFVLIIGKADRFQCGKQIAAYLGLVPLEDSSGERRRLGHITKQGNSLLRFLLVEAAQVTARSLPEWRSKYCHLTMRRGGQIAKVAMARKLAVRLYWMMRKEWDYEQLRKFGSHAGKPGTGDGVK

SEQ ID NO: 273636 - protein, 320 aa, unidentified
MMAQNDLVVVGIDVAKDKVDACIRRFTLRQTFPSTAQGHRKLVAWLRKYQVGKAVMEASGGYEREWRNVLYNAGIEVRIVDPRRVRSFALSAGRLAKNDPIDAEMIAWFAETFSQAPGQIPDAAREELAALAKARKVLVDGKIRLQAQDEHAAPEQARKAYARVLKSLAAEIDKLEAAISAKVKATPEFAERAEIIESVPGLAQATSAILIAGMPELGQVSDKVAAALIGVAPYDDDSGKRRGERYIKGGRRWVRNGIYMPCLGAATQCNPVLKAFYQRLLAKGKEPMVALVACMRKLIIILNTMLARRQKWNPGRHATA

SEQ ID NO: 273637 - protein, 352 aa, unidentified
MNHLKYIGMDVHKATTVIAVLNAVGKVVQETIIETKAEAILDFIKGQRGTLHVSFEEGTQAAWLYDLIQPHVARVVVCDPRKIAGQGRKADKPDAKRLAELLRTNSLSPVYHGERSTRALKELAQSYVAVVGDCTRVKNRLKALFRGRGIDCDGSAVYNEEEREEWLGKLDSAAVRARADRLWQELKCLAPLSEEAEAELVAEGRKHGDTKILRSVPGLGPVRAAVILGVAGTPHRFRTKRQFWAYCGLGIVTKTSSEYAVVDGQVRRSKKRPMVRGLNRNYNRALKWVFKGAAKTVASGPWKSEFQAMIAQGTPESLVRLTLARKIASITLALWKKGERYDEKKLKFKHAA

SEQ ID NO: 273638 - protein, 425 aa, unidentified
MHSISNKKINQVTDQTLVVGMDIAKKKHYACFVDERGRVLKKPFPVLQSREGLEWLYQCIVEAMKEFGKTEVIVGIEPTGHYWLNLAYFLDEKGIPLVMTNPMHVKRSKELDDNLPTKHDAKDALVIARLVKDGRFSYPRILKGMEAELRVGATFRSKLVEEQGAVRNQMIRWLDRYFPEFSQVFPSFGKMALAVLEYTPFPSDLAGKELEEVLALYRQSEGLQSPQKPKAKKLMELAQHSIGVTEGQQMARIEIATLVRRYRQLEEEIEALTEQLIELVQTSVEYEWLKTVPGLGDATIVELLSEIGSFSHYQDPRQLIKLAGLTLREHSSGQHKGQKRISKRGRRRLRALLFRVMMPMIRHNEAFRQLHEYYTTRPDNPLRKKQSIVVLCGKLLKVLHAVCTKHQAFDAKRMMQDIFGLETAA

SEQ ID NO: 273639 - protein, 327 aa, unidentified
MEAVTTMGLDIAKSVFQVHGVDGHGKVVVRRQLKRRYVLAFFKKLSPCLVGIEACATSHHWSRELQALGHTVRLMPPAYVKPYLKRQKNDAADAEAICEAVVRPNMRFVETKTAEQQSCLMLHRTRHLFVRQQNAVINSIRAHLAELGIVAPVGRNGVEELLDIVADPDDDRVPEVARDCVAALGAQLRMLKAQILEFDRRIMAWHRSNEASKRLDEIPGVGPALATALVARVADPRAFRSGRDFSAWIGLVPKQNSSGGKEKLGGIPSEATDTCAAYSQPARWRSFATRRCMAPSIGPGSPRCWRGGRPKWLPLRSPTRSRAWPGP

SEQ ID NO: 273640 - protein, 479 aa, unidentified
MAHHSQKDLSPVEAQPPSHSLSLHRVPTPRFLAHYPTEDLHVIHRNAAGIDLAGRGSHYIALEISETELEVIEVGGMTPDMIAWVAYLKSHNVTTVAMEATGVYWIPVYDALEKAGIEVFLVNPSHAKNVPGRPKDDKLDARWLQKLHKFGLLAASFRPSEDIRPLLELWHQRIKQVEFCGDAVRRQQRALDMMNLRPHQLISDLDGVTGQRIVDAIVDGERDPVKLASYRDHRCHCTDEELYAALTGYYQPHLVFALKIARNDHLFHQAQIAQIDAQILQHLTAIMPENDDEITEAVSLETHPVNQGKHPLPFNAGAMVTLFLGVDPTKLPGIGGLTALGLLSLLGYDMDKWKTDRHFGSYLGLAPVQKISGGKQLSSRTRPGIHPAAVLFLQSAVATIRSDNAYGAFYRRLAARISKPKALYATAYKIARMYYHLLKDGQQYVDLGVQDYEARSHAHQVAAMRKRAKKLGFDLIEAV

SEQ ID NO: 273641 - protein, 342 aa, unidentified
MEITTVGIDLAKSIFQVHAVDAAGHVVVRKALRRAQVVPFFAKLPRCLVGMEACGTAHHWARELMKLGHDVRLMPPAYVKPYVKSGKTDANDAAAICEAVARPSMRFVPVKSTEQQAALALHRTRDLLVKQRTQLVNMIRGLLAEFGIEMARGLRHALELAARLSAGDAAEVPPLAQRVVTGLADQIGAVQIQLTRLEKELLAWHRDSDLSQRLATIPGVGIVSATALAASVSEPERFRSGRQFAASLGLTPLQNCSGGKERLGRISRMGDRYLRRLLVVGMTSLIRRAKTTPTSVDPRLPALLQRKPVRVVTVAAANRTARVAWAIMTRGGTYRAPAATAA

SEQ ID NO: 273642 - protein, 338 aa, unidentified
MTTSKYFIGVDMASATFTACAGATPWQVLVKPTTFANTEDGFTTFLNWLKEHHLTSTQTVVCMESTGVYSEGLAYFLFANQYTVAIEPPLNIQRKFPANRSKNDLQDSQHIAEYACRYADKLSFWRPRPEILEQIKVLLTTREQFTTQVTAHKNALHAVKRKKVLSELAKKVHEDIIQQLAKHLKAIDVEIRRLIESDPTFKKTLLLLLSIPGVGLTLAAHFLLITQYSLDPRVLAAFLGICPYEHESGTSIYHTPTSRHYGPPAIRKLLYLAACSVRTHRKEFRQYFFRKVAEGKSKKLVLNNIENKLLKIACAVLRSQKPFIPNYVSVNPLVLKKA

SEQ ID NO: 273643 - protein, 438 aa, unidentified
MSNKVIFNLDELFISVGIDVGADFSWMSIALPNQQFVGKPYKILHNSIDSLTTAVSKIKEAEELYSLESRIFLESTGIYHYPLFCYLRDKGFNCSVINPIITKNSTNINIRKVHNDRFDSKKAALVGLKPDLKVSLMPSDLALNCRNLCREYYDLIDNRSAYVNKLQGELRMAFPQYLGIFSKVTINTSLTLLETYTSPSAFLKADKQEIIDIIKSTARFGLTYAQNKYNAIIQAATDANQFGYIIDSNIKRIRLYISFIRKYDEEINSILESLHELVDANEDSDFVKQIHLIETFKGAGFLSAVSIMGEIGDFSAFSKPKQLFAYFGLDPSVKQSGKFEGTKVQMSKRGSAIARRVIHTLTLQSISISRNREAKNPVLREYYLKKCDSKPKLVAMGAVSHKVCNMIFAILRDNKPFKIIAPQEHIKQYNSAKCDIAA

SEQ ID NO: 273644 - protein, 459 aa, unidentified
MGRTKSQASAWEGLKVIHPNAAGLDIGSEEIWAAVAPDRTAEPVRKFGTFTPDLQALADWLIACGVDTVALESTGVYWIPVYEILEARGLQVYVVNARHVKNVPGRKSDIQDCQWLQGLHSVGLLRGSFRPAGEIVALRAYLRQRATLIEYRAAHIQHMQKALQQMNVQLTQVVSDITGVTGLTILRAIVAGQRDPQELAALRQPGVKKMEAEIAKALTGNYRPEHVFALQQALALYDFYTAQMVACDVEIERQFANLKPVSADLPPLPPSTKRDTHSKNAPRYDARSYLYRLTGVDLVAITGLNESTVQAIISEIGTDLSAFPNEKHFASWLSLAPHNDISGGKLLRSRTLPGHNRAGQAFRMAAQSVAKSPNSAFGAFYRRLKARLGAQQAIVATAHKIARAFYHILKHRTPFHDLGGEEYERRAREREIKNLQKRAAKLGLVVAETPAAPALAGSF

SEQ ID NO: 273645 - protein, 375 aa, unidentified
MKQTIRSFVGMDVHKETISISVAEDGRSGHVRFIGVIPNTPEAVHKMAKQLTRHGELDFCYEASGCGYGIHRQLTRLGHKCTVAAPSMIPRKPGERIKTDRRDSEKLAILHRSGDLTPVWVPDTTHEALRDLVRARVDASMHLMRARQQLLAFLLRHGRSYPTGKHWTQRHRCWLAGQTFQEHAHGIVFQDYLETVWTTQQRRDALIDRISAMVGSWSLGPLVEALRGLRGIDMIAAATFIASTGDLSRFESPRLLMGYLGLVPSEHSSGGTTRRGGITKTGNREARRMLIEAAWSYQYPARIAKEKAEILVRLPKNIRDIAWKAQTRLCTRYRSMVARGKKPTVVVAAIARELAGFIWAIGQEVRCSNLSVVGD

SEQ ID NO: 273646 - protein, 307 aa, unidentified
MLYLGIDLHLKQMTVSLRNEDGDVALRRQVSTRWPKLEEFREQLRQVAAADEKYVAIVEVCGFHDWLVKWLQQDERCHLVLVVQALGRLATKTDRRDANALSELLWINRERLLRGDRVHGVRTVHQPGEEQLADRRLTAMRERLVRRRTQTLNQIHKILRRQNLEWERPTKTFQTGKVAQWLKTLPLEPMDRLVLNQLLVQWKLWEEQIAKVDTRIGERFLADPDAQLLATIPGVNAFIAVAIACRIAPIARFPHGRSLANFLGLTPGCRSSGETERMGSITKMGSRIVRFLLGQVIVQRPRHQHHR

SEQ ID NO: 273647 - protein, 462 aa, unidentified
MGNPLKVKNKGKADSSKKLVTLPLINEHAAGIDVGSRSHFVSVGQDLNTDVRKFGVYDSDLRECAAWLQSREIKTVAMESTGSYWQNLYDVLIESDFEVLLVNGSKTKNIGGKTDVKDSRWIQFLHSVGLLTNSFLPDIDTEELRTLHRHRTFLLQQASKYINKMQKSLRLMNFRLDVVLSDITGVSGQAVIKSIISGETDPQVLASKADWRVKKSKEEIARALSYNGRKDYLYELTDSFDIYQSYVGKIDACDKEIEKLMRSQIIKLGKPQTNPPPLEKPKKQNKNSPKIPIEKLAWQLNDEVNLMTIKGVSHSIALTIISEVGLSIKKFSSAKKFVSWMRLSPDNRISGGKILSSHVRKGSNHLATALRHAAESIGKQKDAPLYPFFQRILLRKGRCAAIVATARKLGVIIWNMLSKKEMYKPYDTAKIESQMRDKQIKKINKLMQAFDVKISEIKFAYG

SEQ ID NO: 273648 - protein, 394 aa, unidentified
MGKIYVGIDVSKEKSSAHGLDERGNDCFNLTFEMNSAGFADLIKAINENSRREIDVIVAMESTACYHINLYSFLISKGLEAVVVNPLLIANFGKLSLRKTKTDKKDAKTIAHFLFAHRDSITQMGISQELQDLRDLARERESLCQQISATKVEIRRVLQTTFPELEGICNLFTKVMLHFIKRFPSARLVIASKPSAIAKTLKQTQGGGKITFTPQEIIEAARSSVATVSPAKEIILIGKIETLEHLEKRSGELTRALTGYCEARVIEDLKIITSIDGINKGTATTFLAEVGPIKNYRSHKKLIAYAGVDPTVYQSGKYEGASKISKRGNRHLRRVLWLMTVNVIQHNEVFRSHFQKKRAEGQPFKKAVFATAHKLIRVIFTMLTHRTYFREVNI

SEQ ID NO: 273649 - protein, 344 aa, unidentified
MKFIQFIGIDVSKKTLDASIFVAGEVINKFPHIQVRNDKQGFKDLFRWAKEQGVKTKDTLFGLEFTGYYSDALEQFLTKKQISYAMLPTTVVKHYQRGTHDKNDKIDSAKIADYLFRFNGTECIKLRVLPSKALQKLKELKSERKFLVQNRVGCECRLQVAKSKSEEKHMQKLIDLYKEEIEQVEKEMLDVVAQDPDIYTTYRLLNSIPGIGFVNAINTIANTQNFTAFETARQYAKYVGVAPSEHSSGTSVQWRRRPSPHADLQAKADLSMAALHAIELSAEMRQLYERKLGNRPKDKDIQKKALNAVKFKLIREMFSVAKQARNFELRGPDKERAEAHSTEE

SEQ ID NO: 273650 - protein, 356 aa, unidentified
MSRDTKYIGMDVHKGAIVIAVLNDSGKLVMESIVETQASSILQFIHGLRGELHVTWEEGTWAAWLYDLLKPHVHEVLVCNPRRNALLKEGSKSDKVDARKLADLLRTGMLRPVYHGESGLRTLRELARSYQTISKDLNRVMNRLKALYRGWGIACSGTQVYAARYREEWLHKIPHAGVHRRAELLYQQMDGLQALRRTLRPELLAESRKHKAAKLLRQIPCIGPIRAARLLALMQTPHRFRSKRLLWTYSGLGIETHESAQYRYVRGQLQRSKKPQQIRGLNQNHNHEMKEIFKGAATRASCGVGPLRDFYVALLDKGMRPEMARLTLARKIAAIALTLWKKEERFDAEQLNPQAA

SEQ ID NO: 273651 - protein, 460 aa, unidentified
MKAYLGIDVSKGYADFTLLNEQKKELETVFQLDDTRLGHDALKELLQKFITAHQISLIYCAVESTGGFENNWYAWLTKLSNVLPLKISRLNPSGVKNNVLAGLERNVTDALSSRYIAAYLVSHADKVVYDVADATYSSYRSLHKHILLLKKQNTQLINELKMVLYSSFPEMMRYCKQGVPEWVLSILKKHGSSASIAKLKLHQLAKFKGVTDDKAKAILDKATKSVSSRNNSMQEFLIKSLAKQISDKQELIEEHKTFLTENCKGNEVAIVDSIPGIGTYSAAAIMIEIENIHRFATPAHLASYFGLHPVIKESGDKKFAYRMSKKGRATMRASLYLCAQTAVMHDAHLKSIYHRHRSNGKSHKQTIGIIMHKMLRVIWGLLTKKEMYNAVTDKENQNKKVTAPKENKREELKTKRRYQTLDTQAPVSNIQTKKRKVYIESQVSSAEQALDHQCTPDVNL

SEQ ID NO: 273652 - protein, 400 aa, unidentified
MKFVGWDWASTSHDVTVLDEQGRVVERWALRHTEQALAETLARLARHGQPAELPVIIERSAGLVVDRLLAAGHPVVPVHPTAFHAARPRWGAAGAKSDPGDSYKLADYLRTDGHRLRRLQPLDPGLRELQALVRLREDHVRARTAASNQLGALLDASWPGPKAMFCKLASDIALAFLTDYPTPQAAARLGQARLAAFCRRHAYRGGKPPAELLARLRAAPIPSSGLAPAVLAQLICAQVQLLRSLQATIGELETAITQRVAQHPRAKLLRGLPGVGTINLAQLLAEVGPILDRVSTAEQAAADCGAAPVTRASGKTSGVYFRWAANSRARTALTAFAHNARMQSPWAGRLYADARARGKPNPHATRIVARAWLRVIWACWHTNTPYDPCAHRAEQRLTAA

SEQ ID NO: 273653 - protein, 339 aa, unidentified
MKYTPVGVDIAKHLMQLHFIDEHTGEAIDKQIKRDALLKYFSNREPCLIGMEACGGSQYWARELEKLGHKVRLLQGKFVKAFVMGNKNDVMDARAIWMAVQQPARVVAVKTEEQQAVLSLHKIRRQLVKFRTAQINALHGLLLEFGETVRKGRASLDKAMPEVLERLKEKLPPFLIDQVEDQHRRLSDLDMQIDGIEKQLTAWAKQNEACKRIMDIPGVGPVVATAAVSIMGDAGTFRSGREFAAYIGLVPKQTGTGGKVRLLGISKRGDAYMRTLFIHGARSAALQAKAPNPWVTELMKRRPTSVAVVGMANKIARTVWALIAHNQTYDKKHISVRPF

SEQ ID NO: 273654 - protein, 325 aa, unidentified
MMHYIGIDVSKHKLDCCWLRDAQTNKIKSKVFKNNNEGYQALMQWILTQTRAMPEELHLVLEATGIYHESLAYALHKNGINVSVINPARPKEFANSLGNTHKTDKKDSFVLALFGYKMQPTFWQPDPKEVRELKALTARLEALETDLRRELNRLEKSSFNGASATVVDSIQHMVTHLKAEIKQLEKTIDDHIDDHPQLKKDRALMNSIPGVGPVVSRVMLQVIHGGDFSKAGQVAAYLGLIPKIQQSGQWKGRSRITKQGSPKVRAKLYMAAVTSISCNPDLQAHYQRLVGRGKCKMQAIIAVMRKLVQICFGVVKHQSEFQPQC

SEQ ID NO: 273655 - protein, 390 aa, unidentified
MQVLCPRPQEHAAIRTDLNAIFVSLELSRSTWVITSLAPGGGEKMSKHSVRSGDIAGLLARLSQLTEKARARTGHIFPIIVIQEAGLDGFWIHRVLQKEGIESHVVDPASIATSRRRRRAKTDTIDGEALVRALLAYKRGEPRVCAMVKAPTPEEEDRRRISRERETLTAERVQHVNRIKGLLFAQGIGDYEPLHRNRRERLEELITGDGRPLPDCLKAQIRRELDRLELLIEQVKAVEAERDALLARAQASPGVPAPAAMLLALRGVGPEAAARLWSEGLFRTFTNRKQVAAYAGLAPTPWQSGSVHREQGVSKAGNPRLRTIMIQLAWLWLRHQPQSALAVWFHERIKRKGGRFGKTMIVALARKLLIALWKYATAGVLMEGAVLKHA

SEQ ID NO: 273656 - protein, 399 aa, unidentified
MIGIGIDISKNKSTVSAINDTGEIIMKPQEFKHSENELNKLIQWIKDQEDTVFVVMESTGHYHYPVLKKLYEEGIYVSVVNAYLMKKYGDIEIRKAKTDKKDAIRIAKYAIEKRFSLKKYEGEDEKYNDLKFLSRQYNQIVSIRVKAKIQFNNLLDEIMPGINKILTRTTGNSSKILYDFVEKYEHFDNIKRKGEQKFIKEYSAWSKKKGYRNGAVKALKIYELAQNSITTRSANNSTYIALKNCIKILRETEESSNSILTQMQTIAYTLPEYKIVRELKGVGDKLAPSLIAEIGDVRKFTSAKALNAYAGNDAPPHQSGQFEGTKRHISKRGSSSLRKVGYEIMMALKVTKPTEDNAVYEFMIKKESEGKAKNVAKMAALNKFLRIYYTRVMNLYKTL

SEQ ID NO: 273657 - protein, 344 aa, unidentified
MKPQQQYVGLDVSLEQTSICVVDDAGATIWRGKCLSTPESIHTVVAKHAPEAVRIGLESGQLSTWLFHELKARGLPVICIDARHAKAALSLQINKTDANDAHGIAQIVRVGWYREVAVKSMDSHAIRSVLVARAQLVTQKVKLTNCIRGLLKTFGIVLGGGKGRRFEVMVRERIVENPMLTTIIEPMLVVLLTVREQLGVFERLVRRRARADHDVRRLMTVPGVGAVIALAYTTTIEDPTRFKRSSSVAAYLGLTPRRYQSGEMDRTGHISRCGDAMLRTYLYEAANVMLRRSTRPSHISIWGRALSERIGARKALVAVARKLALLLHSMWRHRMEFRFEQAAA

SEQ ID NO: 273658 - protein, 340 aa, unidentified
MGNELYCGVDLHSNNGVYHVMGTDGKQVWHRRLPNRPEAVLAALAPFRPALVTVAIESTYNWYWLADGLEDAGYRVVLANPSRMDQYQGLKTTDDDSDATFIAELCRLGILPTGWICPREERALRDLLRRRMLVVESRTCQVNSLQGLLIRQTGAAAKYALLETLTTAQLRALLTHESLLVVAGAQLKLIEAHDTAIATLERFALEKCRPRPEYALLTSIPGVGKILAMTMMLEIGDIRRFAGPGDLSSYVRAVKAERLSNGKVKGKNNGRNGNHYLSWAFIEAVNHAARCCEPARKWYQRKAAATLPVVARKALASKFAKAVWYMLTENKPFQIEKVFG

SEQ ID NO: 273659 - protein, 341 aa, unidentified
MKVNTISIDLAKNIFQVMGFTKTGKILFNKRLNRQQLTEFMQMQPQCRVVMEACYSSHYWGRVFQAMGHSVGLIPAQHVTPFVRGNKNDNNDTLAIFEASSRPFIRFVPVKKQAQQETLILHRLRERLLSNRIATSNQLRGLLTDFGIIFPLGHKGFNDKLIALCSDDSLSATLTWLINDVYTEYTHLNNRIKDIEKKLKSAIEEHPLGKILLSIPGIGYLNASAFIASIGNGQAFASGREFAVWLGLTPKQFASGNKSIMTGISKRGDQYLRKLLIHGARAMVSHAGKRQDALNQWVCQLRERKSFNCTAVATAHKLARIMWTLLQKNCYYTPQLMKVAV

SEQ ID NO: 273660 - protein, 342 aa, unidentified
MGEVSIIGVDLAKNVFQVHGAAADGSVLFRKKLSRPQFARFMADQPPCLVAMEACASAHHWAREMSRYGHEVRLIAPHYVKPFLKRQKNDAADAEAIVEAALRPTMRFVEPKSADQQARAVAFRTREQLVKQRTEAVNALRSHLYEFGHVAPEGIGYLPRLAKVIDEPGTDVPELAREICRMLLEQIAQLTARIDALKARIAAMSQEADLPRQLQTMPGVGPITALAVETFAPPMDQFRRGRDFAAWLGLVPRQHSSGGKQKLGKTSKMGQRDIRRLLVIGATAVIRWASRRGAPKGSWLARMLDRKPVPVVATALANKMARGIWAMLTRGESYRGPVLIGA

SEQ ID NO: 273661 - protein, 452 aa, unidentified
MMEHDMSTSKPRAARGGRSKLEVMHPDAAGIDVGGSMHCVAVPNHAADETVRQFGCYTVELNALADWLAQCGVKIVAMESTGVYWIPLYELLERRGFEVMLVDARHVKGVHGRKSDVLDCQWLQQLLSYGLLRAAFRPHDQFCALRELNRIRSRTLRDQGRSVQHMQKAMTLMNIQLGQAISDVAGVTGQKIVRAIVAGERDPQELAAYRDRRIKASEEEIAASLEGTWRAEHLFALKQALATFDFCAGQLQDCEGEIEQVMQQLHKYSGEPTKGKRRGRAKNAPKFDVREHLFKMCGVDVTRVDGIDVSTALSIISETGTDLSRFASDKHFASWLCLCPGTRISGGKVLGSGTRHSVNRATQAFKQAAAALRTSQSALGAYFRRLCARMDKAKAVTAAAHKLARLFYALLTKGQEYVDQGQLYYEERYRQRVIYNLQRKASKLGMSLVPSA

SEQ ID NO: 273662 - protein, 429 aa, unidentified
MLYRIAGIDVHKKMLAVVVSDVEVDSEFQFERRWFGSNPEQLRSLAAWLLEQEAEEVVMESTAQYWKPVWGALERYWKPICEKRKSARRKSGTLHLAQALSNRGRRGRKRDFRDAERLMKRLVAQELTLSFVPDTEQRLWRTVTRKKYQLRCDRVRLQNQVESLLEEAHIKLSSFVTDLLGVSARRMLKALADGETNPAALGALADERLRATPEQLCDALGACTELNAVYRRLLKMTLEELRLIDEQIGQLDQEMASLLSKHQDAVERLAEVPGLGVDSAQQIIAEVGPTAATFPSEKCLASWVGACPGDEESARVNKSHRSPKGNRHLRRLLNQAANAAVKAKGSIFEIVYRRSVPRLGHNQAIGAIAHRHCRLIWLILHQGVRYEERGPAVTKQSRQKRMARMLRQLRSLGYRIEPPNLQPSQVQAG

SEQ ID NO: 273663 - protein, 361 aa, unidentified
METLSYELEADMEKVARFSVGIDLHETIIQVCVLDGDGAVVEEKRWRGASLAEGHHVVRWLTEWRVGGRFAVEAIGVNRWFVTACREVGLDVVVVDPIQLKLKALGKKTDRRDAREIARRLYLGDIDAYATTYCPTPAEYALRKLVRTQRDLLQMRQGIGLRIRSMLRAHRVPAPKGAYYRRKGLEWLSRCELPEPEETMCLQHWVALLGEVQAHWEAVMKRVKRLGTENAAIASLVAMLPSVQAQTAAVFWSELGNPGRFRRTRQVGSYAGLVPRVAESADRSHHGSLTKRGNRHLRWALGQWAVRLMARDPIAQAWATPRLRRMHRNKVRTALARKLLIGVYVSLRDDVPFSLETCLGQ

SEQ ID NO: 273664 - protein, 438 aa, unidentified
MIRYVGIDLHKHLIVGHIVDETGKLLDTFRYDSVDAASLSHIARKRLRPDDHVVMEATTHCWAVVRALEPHVAKVVVSNPMATKAIAKAKVKTDKVDAAVLAHLLRLGYLPEVWQPDAATRDLREWTARRSRLVGQRTAVINRIRSTLAQRLLDCPHDMTTPAAREWIATQEVNADARWLLDSDLQLLDGVQAQIDAIDGRLAQRGYVDERVKLLITLPGVSQHTAQSLLAAIGDIARFPTADKLAAYLGLVPSTRQSANHCYHGPITKQGRGHTRWMLIQAAQAVRLHPGPLGHFFRRLKARKCHNVAVVAVAHKLALLAWHLLKTGEPYRYALPRTTEDKLRKLRIAAGGEKRRGGLGEGIDPRTARASGEKGRTQRSLPQVLANEGVPAASPAPAGERRHVAELKLDEFVSDLQQPKVIPRRAKPKKDEAPDQNA

SEQ ID NO: 273665 - protein, 345 aa, unidentified
MEQIRRIGMDTSKHIFQLHGVNAAEEPILRKKLRRKEMVTFFEKLAPTVIAIEACAASHHWARLLQSLGHSVKLIAPQLVKPYVKRGKNDAADAEALCEATSRPTMRFVPVKTAEQQAALMLVGVRDRLIRNRTQLVNAIRGHAAEFGVTAAKGKAHLDALLERIQADESLPALARELFVAQAKEYAQLRAQIAEVDARLMSWHRADECSRRLAKIPGVGPIGAVLLKMKTPEPELFRSGRQFAAWIGLTPKDHSTAGKVRLGVITRAGDEGLRSVLVVGATAVIQHVRRGGRSSPWLTELLKRKSPKLVAVAQANKMARIAWKLMVTGENYAAKSAPAALAGAA

SEQ ID NO: 273666 - protein, 312 aa, unidentified
MVEHCYGGIDVSKDRLDVQVLPQGRCFSVANTSAGWSQLVDRLRGLSIAALGIEPSGGYERGVIRALLAAGLSVRRINPNKLRQFARARGVLAKNDRLDARLIAEYVAIMPTRVVHRDPAAEQLAAVVTIRRQLSDEHVAVENQTAHIEDAMLRRLNKRRLARLEADILLLDKRMAEIVASNANLARRYDLLTSMRGVGPTLAFTLIALLPELGQMSRKQIAALVGLAPYDFDSGKLKGHRCIYGGRIPVRNVLYMAALSAARYNPALKTFHNRLAAANKKPKVVIVAVMRKMITTLNAMLRDNVAWQPKSA

SEQ ID NO: 273667 - protein, 360 aa, unidentified
MAKARSLVGLDVHATKIVAAVLDAESGELQSFAMDGESAGAAGFCAGLPGPVRVTYEAGPTGYGLARELARRGVECVVAAPSKIPRAPGDRVKTDRRDAELLARLLLAGELHPVRVPGDEEEALRDLVRARETVRVDLMRSRHRLSKLLLRHGVRFAEGRAWTERHQRWLGTVALDWPAAQITLLDCRGAIDALTHRRERLEREIIGLLPSSPWQIQVGRLRCLRGVDTLTAVGLCAEIGDFERFARAGQLMSYVGLVPSESTTGQQRRLGAITKTGSGHARRLLVEAAWHYRLRPTIGKALSDRQEGQPPEAVAVAWSAQRRLHQTWARLEARAKRRTIIAVAAARELAGFCWAITRIE

SEQ ID NO: 273668 - protein, 354 aa, unidentified
MSQTPNTAVAVIGIDIGKNSFHVVGHDARGAIVLRQKWSRGQVEARLANIPPCLIGMEACVGAHHLSRKLASLGHDARLMPAKDVRPYSKGQKNDFNDAEAIAEAVQRPTMKFVAIKTAEQLDLQALHRVRERLVSQRTGIINQIRAFMLERGIAVRQGIGFLRTELPTILATRTDALSPRMLRVIEELAGDWRRLDQRIDGLSGEIEALARQDQACSRLMTVPGIGPIISSAMVAAIGTGDVFSKGRDFGAWLGLVPKQISTGDRTILGKISRRGNRYLRVLFVQAAWVVLVRIKNWERYGLKSWIEAAKKRLHHNVLAIALANKLARIAWAVLAKGRAFELTRTDDADVRPA

SEQ ID NO: 273669 - protein, 407 aa, unidentified
MTMWYAGIDWADQHHDAVVIDEAGKRVGTTRVAHTAAGLDTLVTFLKGIGDVTDHPDHLACIIETNRGLLITTLLEAGLPVYPVNPKTVDRHRKPAGAKTDAIDAYLLARTGRSDLADLRRLTPDSPVIAELKALTRDQDTLIQSQTRLVNQLTACLKAYYPMALELFGKLQQPTTLAFLQAFPTPDQARAATVEHIAAVLKAASHPTAEVKARQIHDRVSQPQLRGDAVVTRTKTRLMLTLAAQLRVLLPEIAAYDEEITRLFRLHSDSRAFASLPRAGQRLAPRLLAEWGDDRERYTDAASVQALAGTSPVPFQSGNVAKAHRRYACNKPLRHALQQFAWQSTQKEPWALTYYQRKRRDGKSHAMAVRALANQWVRLIYALWINHDTYDPAIFHAAQQAHAPRAA

SEQ ID NO: 273670 - protein, 329 aa, unidentified
MTQPTMNPTSTGFNHIVAFEVAKSSLEVCILPGRECLSIANTPGQVRRLLKREMKRNQSGGLGPMLVICEATGGYERHVLEVAVELAIDCHRAHGSAVRGYAKYRRKRAKTDAIDVDLLADYGRQTEDLLLYHPPRPEQETLRRLQGRRKELQDMLLAENCRLEHASVERPSLERMIKVLDKELKRIEGEIARLIEADDTFRRNAELMQTIKGVGPVTAATMLAYMPELGQLKRSTVTALAGLAPFNRDTGKMSAPRHIHGGRRPVRNCLYMAAKSAIRYSPLFKQYADHLKAKGKSYKVVVTAVMRKLVITLNAIIRDQEPWKHAKTA

SEQ ID NO: 273671 - protein, 398 aa, unidentified
MKTEDIQIFLGLDVGKTDHWACAVIQDGTKIWNKTLPNDETKLTAVYQKLLAQGQVLVVVDQPATIGALAVAVAQNLGIPVAYLPGLSMRRIADMYPGTAKTDEKDAFIIADAARTMPHTLRSIQVSDEDEATLGMLTGFDLDLARQITQTSNRIRGLFTQIHPPLERILGPWLEHDAVLEILATWPTPAQLKHAGKARIDAKLKKYGARRHTAWAVAIMDALDEQTVVVVGTDAAGLVIPHLARQLISLHAQRVDVAMHLETMVEAHPLYPVLTSMPGVAVRTAAIIIAETSGKTFPSAAALSSYAGLAPTTRQSGTSIKSERVSHSGNKRLKRALFLSAFASIRFDPTSRDYYDRKRAQGKRHNQALIALAHRRLTVLFAMIRDGSLYDVPELKIA

SEQ ID NO: 273672 - protein, 350 aa, unidentified
MKTTAKTVPVTIGLDIAKNFFQVHGVDAAGQVVLRRKLSRGEVLRFFEAQPKTLVGIEACGSGHHWAREIAALGHEVKLLPPAYVKPYVKRGKTDAADAQAICEAVTRPNMHFVPIKTPEQQAALMMHRARELLVGQRTALVNALRGHLAEFGIVTAKGIHRVADLLAELVGVESARIPSLALASLRCLAAQIEAAETQIDDLEALIMEWHKGNEASQRLAKIPGVGPITASAVVATIGDASNFTSARHLSSALGLTPRQNSSGGKARQGGISKAGNTYLRRLLFIGAIAVIRSKRAEGAGTWLARLLERRPAKVVAIAIANKTARIIWAMLRRGDAYRAPTMPAAAAAA

SEQ ID NO: 273673 - protein, 357 aa, unidentified
MAKKPRRQRITGGVDTHSGTHHAAVVLMNGRRLADAEFAATATGYADLLAWMRSFGRLHAVGVEGTGSYGAGLARHLRGQDVTVVEVNRPDRRQRRAKGKSDPLDAYAAAEAVLAGRATTVPKAGDGIVESIRALHLVRAGAIKARTACSNEMKALVVTAPAQLREQLPTRSAGRLAQACAQLPAPGDLGDPAGGVTAALRRLAARYHTLTAEISDADAQLAGLVKQARPDLLAIRGVGVETAAQLLSTCGDNPDRLHSDAAFASLCGVSQVPASSGKTRRHRLNRGGDRQTNRALYMIVITRMGHDTRTRAYVRRRIGEGLSTKEIIRCLKRYVARELYKTLTRPTNPAQDLPAAA

SEQ ID NO: 273674 - protein, 460 aa, unidentified
MNRKKWKSKIDRTMPVVHPNAAAIDIGATMHMAAVRADRAPEPVCSFGTFTADLHRLVDWFAECGVETVVMESTSVYWIPIFELLDARGFTVFLVNARDAKHVPGRKTDVSDAQWLQRLHSFGLLRASFRPKGQIAELRAYVRQRERLLEYAASHIQHMQKALTEMNLQLHHVVADITGATGLRIIRAILAGERDPEVLACLRHYSCHSSAETIAKALTGSYRTEHLFALEQALSLYDAYHEKASACDVRIESVLKELIIHRGHDHGSAPPVSRRRNRTDQANALAFDVRAALFGLLGKDVTTIDGLGPYLSLKLIAECGDDLTSWPSAKHFTSWLGLAPSNKVSGGKMLSSRTRRSGGRAAALLRLAAVTVGRTDTALGAFYRRLSSRIGKAKAVTATARKIAVLFYNAVRHGMDYVDPGASSYETRYRTRVINNLHRRAKAFGFVLQPLEPKAGAAVS

SEQ ID NO: 273675 - protein, 387 aa, unidentified
MNTTRASTTTILAIDLGKYKSVACVYDDGSGEFRFTTFETTRAELQKLVGKERPAIVVIEACLLAGWVHDLCAELGVRCLVANTASEAWKFKHLKRKTDKDDALRLAQLHLLGQLPTVSLPPTAVRQWRSLIACRQAIVGRRIAVQNRIRALFVAQGLPAPRGAKAWAATGLAGMASWAKPLGECGPDELWRGLLELALTEYRQICALVEQAEERLDALGKQHADVILLQTTPGLGPRTAETVTAYLHDPNRFRTGKQVSAYSGLVPRQHQSGEMDRRGRITKRGPALLRKMLVECAWCLVRYNGWARALYQRLTGGGQRRKKQAIVAIARKILVRCWAMLRDKKPWRDARAAPKQRLSPSKQRRHEEALRRRQEKMQDPLVGAATP

SEQ ID NO: 273676 - protein, 361 aa, unidentified
MTTITIGVDLAKQVFSTCVVDASGRVEQRKDFRRDEFAAWLAQVPAGSVVAMEACSGAHHWGRRCLEYKLRPRLMAAQFVTPFRKSRAIKHDRNDAEAIATAARQGNMRFVPVKTIDQQARLAWHRGREGYKTESLAVCNRLRGLLAEFGVVVARNEAALREVLADLEEHGLPDSLVELLGDLRAHWQQLRERIAAYDRRIESQAQADERCVRLRSIIGIGPLTADAVVATVGSARDFKNGRQLAAWLGLAPSQHSSGGRTRLGSISCRGDSYLRTLLIQGARSSVQRAHKVPREKATSEQIWIQLLARRMPFGKLLVAIANKHARQLWAMLARGEDYDPDAWSKHPMLQRAASPQALTTS

SEQ ID NO: 273677 - protein, 349 aa, unidentified
MTVYVAVDFHAREQTVSYCDLADGEIHRRKLRHQHDDVRAFYQQFTGEVIVAFEASGYSAWFEQMLAELGHTVWLGNPAEIRRKAPRRQKNDRRDADLMLDLLLKGDFPRVHGFSEESRTVLRQLRYRHKLVKVRTIAKNSLHAIGINAGLPLKRRLLTEPGIAQLQALSLSPVLTQQRDEWLQLIGSMNERIATVEAQLQQRAKDDAAIALLRTHPGIGLLTSLALRYTLLPTSRFSTTRQVTAYVGLDCMEDQSAERRRMGSISKAGSKLLRFLLNEAGHTAARHDPELKKFYRRLLHRRDKPKAKVAVARKLLVRSFIMLRDQIDYAEFVRRGVAARVAREAHSLP

SEQ ID NO: 273678 - protein, 307 aa, unidentified
MKHWIGIDVSSATLDFALLDEHGVHLESLQVSNGRTAVMTLMNSWKKRYGVDTGECLVCLEPTGHYTLMLLNLIVEQHWHAWLAHPLDIQKSMGIKRVKNDKVDALRIAQYARTFREKTRLFTAQNLKLDKLKHLLTRRQHLVRVRAMYKKHLSDLNRYMDKDIKKAFDQLDKRLIVASDRAVIRVEQLIMASIKADDITSEQYNLLLTIPGVGPQLASYLIALTDGFHRFTNPRELACHAGVAPFERSSGSSIRGRTQVSHQANKILKTMLTWRTCQRATRRRIKGLLQRKVSEGKKPILVVNAGP

SEQ ID NO: 273679 - protein, 361 aa, unidentified
MLYLAIDQHRKQLTVNVRDEVGEILVRRQVSTRWKAVEEFFAELEERAAAHGGYMAILEVCGFNDWLLEKLREHNCREIVLVQSEERSKRKTDRRDANTLGELLWVNRARLLAGQPVHRLRRVHIASPQDQEDRQLTALRRNLGVRRTRVINRIKHLLLRHNRLQDCPTKGLQTQRAAKWLAQLALSELDRLEMNHLLSEWKLIETQRMELEARIRARQAPHPTARLVASLPGASAYTSLGLASRIGPIGRFPQPRSLANYWGLTPGCRNSGEAQQRLGSITKQGSAMARFLLGQLVLHVLRKDASMRQWYKRIKQRRGSKIARVAVMRRLCTILWHMLRKQEAYQCGGPPRRRLRSAVVR

SEQ ID NO: 273680 - protein, 430 aa, unidentified
MRYIGLDVHRESCEVAIQEEGKVRSAGRIKTRKEELELFAQSLGSDDEVALEVTGGAEAIAAILRPHVARVVVANTKRIRQISEAKQKTDRLDARRLAELLAAGLLVEVWCPDERTRALRRLVARRAQLVRQRTRAKNEIAAALQRNLLERPDVEDVAGKKGRQQLSELELPADERTTVEGCLRQITFLDEEIALVGRALAEAVVDSAEVRRLMSVPGVNLQTAATFMARVGKIERFESPRQLVSYLGLDPKVRQSGEEPVRYGHISKEGAAEARHMLCEAAWIVVRYPSPLRAFAERTAVRRGSGRATVAVARKFVVLFWHLLTKDEDYAYGRPTLTRRKLRQLELAAGAERRRSGGRPKAGVPTLKERQKAEVELARQAETAYRRLLADWQKAPKKKGAGVPVGRASSSHLLGEETAARQDTAPDPAL

SEQ ID NO: 273681 - protein, 365 aa, unidentified
MEVLYPHCAGLDVHKNTVVACVRHTVDGTIKREVRTFKTITKELLALSEWLAAEGCTHIAMEATGVYWKPVWHILSDGDFALVLANAAHVKNVPGRKTDVNDATWLADLLAHGLIRSSFVPDQQTQEMRDLLRTRKQLVRERSRHVQRLQKTLEDANIKLDSVISDVMGLSGRKMIEALIAGESDSEQLAQLAHRRIKATPEELCEALRGRVTRHHRFLLNVHLQQIDAIDAAINTIDQEIDAHVEPFRDTVLLLTTIPGVDELGACVILAEIGRDMSRFPTAGHLISWAGLCPRNDESAGKRRSTRMRKAAAWLKTTLVQCAWAATRKKASYLQAQFHRLRARRGAKRRSAPSPPRSSPLPTKC

SEQ ID NO: 273682 - protein, 326 aa, unidentified
MTLSHLTDNIFVGIDVGGAGLDVAWHRGDSAHYANRPDAIATLVQRLRTGPEVTRIVLEPTGGYEKPLVKALRQAQLPVEVIHTTRFNAYRALVGVKAKSDTSDAKLLASYAAAPDEVRGRKAGYVELPEDAIREALSELASRRDQLKHMIHAETCRLGTVRMVELRQAITAHLEVLRAEDKQVHRMMLELVRQRIDLRRDQRLLKTIKGIGVKSALSLLASVPELGRIDNKAAAALVGVAPFVRRSGTMNAPARIHGGRAAVRSILYMAAVTASRHNPVLRPFYERLIAKGKPPKVALIAVLRRLVVFANAVLRSGQPWRGAVTP

SEQ ID NO: 273683 - protein, 341 aa, unidentified
MAMFAGLDVGGKRTAVCILDDAGRIVWRGMADTHPEMIDAVLRRFKSELVKIGLESGPFTPHLFRSLAAMGYPMICMDARRAADAIKSRRIKSDKGDAWALAEMLRTGWFTSVHVKSVDTHRLKALLGARDQLVKVKRSLGNQVRGLLRPFGLRLPSRAGMKKFAEAAYQATRDDPVLGASIKALLEALASIEAQLSRLDDALKELSRRNEVAWRLMSVPGVGPITALAFIAAIENVERFKRTRDIGAYLGLTEKRYQSADTDVGMGISKQGDAMARHYLYEAANVLLTTVKRRFALRSWGLKLVKTIGPKRARVAVARKLAVLMGRMWKDGAHFEAAVAA

SEQ ID NO: 273684 - protein, 327 aa, unidentified
MAKRTTICAGIDTGKRKLDIALDGSSEQLQVDNTPEGYKALLDWLRRHRVKRIGIEASGGYEQAVVAELRRQRFVVVVFQPAQVRAYAKFHLLRAKNDKIDAALIAACTAAVKTIHAPPDARLLPFAEHLTMIDQIGEDIARLKNRLETCRNPRFRQTWKEDIARLAKREKIELKALVAAIRQHRDLAERLDLIESVDGIGLPTAVAILVRLPEIGRITREQAAALAGLAPYDDDSGDQVGIRHIDGGRERLRRALYTAALPASFRWNPQLIALYGRLIAAGKEHKRALIACARKLLIFANAVVARGTPWDRERPPIASITAVPQAG

SEQ ID NO: 273685 - protein, 418 aa, unidentified
MKIVFPTCCGVDVHKSFLVATIIKTPQNSLQQSYQKKRFSTFNSDLNRFADWLRENDCLDVCMESTGKYWVPVFNILEKQGIRVVIANPKWVKAVKGNKDDTKDSKWIGDLFRIGLVKSSFIPNKEIRILRELTRYRYKLISMKSSEKNRFQNAFTVCNVALDSVVSDMFGKSATAITDYLTSDVEFDAQHCISLLQRSLKKKAPAVLEAVEGHEIAPEQKTRIGIVRDHLHYIDKLVERVDDCVEGMVQKYEGAITLLRTIPGVDRSSAITILSEIGIDMAQFGSSKRLCCWAGLTPGNNESAGKKKSVRISRAEVYLKPALVQAAHAAVKDKSSTYYAVKYERISKRRGKKRAIIAIARMILTAVFCMLSTGEVWNPVDLYKVDMPEHLKEKQLAKAVKQAVHFLETQGLTVLDSA

SEQ ID NO: 273686 - protein, 402 aa, unidentified
MNAVGIDVSKGKSMVAIMRPFGEIVSAPFEIKHTASDINSLVELINSVEGESRIVMEHTGRYYEALAHQLSEANLFVSAINPKLIKDFDNDSLRKVKSDKADAIKIARYALDKWQNLKQYNVMDELRNQLKTMNRQFGFYMKHKTAMKNNLIGILDQTYPGVNTYFDSPARSDGSQKWVDFASTYWHVDCVRKMSLNAFIDHYQNWCKRKKYNFSQSKAEEIYGKAKELVPVLPKDDITKLIIKQAVNQLNSASTTVESLRTLMNETASKLPEYPIVMAMKGVGASLGPQLMAEIGDVSRFTHKGAITAFAGVDPGVNESGSYEQKSVPTSKRGSSDLRKTLFQVMDVLIKTHPQDDPVYQFLDKKRAQGKPYYVYMTAGANKFLRIYYGRVKEYLSSLPES

SEQ ID NO: 273687 - protein, 388 aa, unidentified
MSMVVIGMDPHKRSATIEVMASDETVLGKGRYGTHASGYRAMVRAVRHWPERTWAIEGCQGIGRHIALRLIADGEHVVDVPPKLSARTRVFATGQGRKTDATDAHSVALAATRMTGLRPVADDAQLAVLRVLADRRRSLGEDHTRMVSQLHRLLLELIPGGAKKALSAAQAKALLAGVRPRDAAGKARRRVAAELVSDLERTYQRKKDADKELRELLTGTKTNLTTLNGIGPSGAARLLVEVADITRFPSKAHFASWNGTAPIDASSGDQVRHRLSRAGNRQINRVLHIMAVVHLRHRDSEGRAYYDRKIAAGKTPMEAMRALKRRLSDIVYHQMILDHQAHRTGPGGQSGTTLNSSVASSTPAASSSDKPLPGPASSHPKTAPPTAS

SEQ ID NO: 273688 - protein, 427 aa, unidentified
MAVKKRVYRSIPFQKVNIQKLNDAFENKRTVVGIDVAKEVFFAGFMQESGKIELTLKFTHPQESRKFVKLLSGLPASHVECVLEPTGTYGDSLRFLLEQAEIPVFQISTVKSRAMSEVYDGVPSQHDAKSAAILGKLHLDDVSQLWPPSSVKTRELSALFSQMEMFADQVGRHINKLEALMARHWPELIQQLKLKSATLLELLVAYGSPQKVAQKLRSARKLMRKIGGNFLGQEKIEEVLRSAENTVGLPMMDCEEKWVQTLAMEIRRAQKEEARTCRELKEVGKEMETVAGMAEVIGERSAIAMELKLDSASEYESPKSYLKAMGLNMTIIQSGKRQGQLHISKRGNSSVRKYIYFAAMRWVEKDPWAKSWYQKKVKRDGGKVKMKALIALMRKLVQGLWHVGQGREFDSTKLFDTSKLTPAIITK

SEQ ID NO: 273689 - protein, 347 aa, unidentified
MLIIGCDLHTRTQQIALLDTETGQVVERRLEHENGEAKRFYEELKEAALVGIETTGYALWFAEMLAELGHELVVGDAAKIRAMEPRKQKHDRRDAEHLLNLLVRGDFPRLWLPSVEERDVRVLLEHRHQLVELRTRAKNGLQALALSYGLRRRGRLWSAAGQQALQKLPLREGMARRREDLLRLRAQLDSWIHELDQRLQREAEKREAAQRLMTHPGVGPLTALGTVLVLGPVERFPDARHVTSYVGLIPQEESSGGRQRFGHLTKQGNRLLRFLLVEAAQTASRFDPGLRRVYRRLAFRKGAASAKVAVARKLLIRLYIMLRDQIDYAEFCRRGSHAGMLGDVALV

SEQ ID NO: 273690 - protein, 344 aa, unidentified
MSKYSTPGGDGDALLSLLERMRVRAQQLTGRPVQIVAIQEAGLDGFWVHRLLEVNGIESHVVDPASIAVPRRRRRAKTDAIDGETLLRTLLAWKRGEPRVCAMVVPPTPEEEDCRRVCRERAILLQERIRHTNRVKGLLAGQGITGFNPLHKDRRQLLEAARTGDGRPLPLHLKAEILREIELIELLLRQIADVEAARDALAEPKAAKASSPIVLLKQLKGIGPEIASVLYLEGLFRSFGNRRQVAAYAGLAPTPWRSGTVDQEQGISKAGNPRLRSTMIEFAWLWQRHQPASTLSRWFHSRVGRERGRIRRIAIVALARKLLIAVWRYVTQGEIPEGAVLKAA

SEQ ID NO: 273691 - protein, 371 aa, unidentified
MNHVTSIGLDVHARSVTAVALDSITGEVRSQKFGYSPAEIAGWILQLDSPKAVYESGVTGFHLARELREMGVDCIVGAVSKMHKPASDRRKKNDRNDAEFLARQLMAHNIVEVFVPDVETEGARNLSRALEDVRDDLTRAKHRLTHLLIRWGYIWNEFNEDGKRRGSWTHAHWEWIRGIELPDAAARESLDYYISEVRHIESQKKAIEKRVAQCASRPRWRDRVEALRCMKGIETVTAFALTVEAGVFSRFDSARAFASWLGLVPSEHSSGERASRGGITKAGNSHLRKLLVEASWHYTRATKERKRSLYDESVPAPISNHAAVGVKRLVERRRHLSCELRKRPVVANVATARELACWIWALGRMSEGALA

SEQ ID NO: 273692 - protein, 359 aa, unidentified
MRMASCSMAQPDHGVTVGVDTHGDGHVAAAFTSDLGRPLGHLTIATTPAGYRSLLEWAHRLGSDPRFGVEGTGSYGAGLARFLVGAGCTVIEVSRPNRQTRYARGKSDPVDAEAAARAVLSGEATGLAKVDTDHIGMIRALRVARRSAMKMRTQSFQQMKALIVTAPAELREQLRSLSRDRLVDTAACLRPGPVTSVAAAVKLTLKCLAQRHQMLTTEIAMLDRDLDRLVLTAAPALCALKGIGTDVAGAVLVAAGDNPERLRSEGAFANLCGVAPLPASSGKTTGRHRLNHGGDRHANCALWRVVIVRLATHQPTKNYMARRTQEGMSKAEIIRCLKRYVAREIYRELTPPAELAAAA

SEQ ID NO: 273693 - protein, 405 aa, unidentified
MEVIYPRCCGLDIHKKTVVACVITPEEKEIRTFSTMTEDILAMVDWIKSKSCTHVAMESTGSYWKPIYNILEIEGLNPMVVNANHIKNVPGRKTDVKDAEWIAGLLQHGLLQGSYIPSREQRELRELIRYRRSLIEERAREINRMQKVLEGANIKLASVTTDILGKSSRAMIEAIINGEKDPAILSELAQKRLKNKKEELKKALNGLIGPHQRLMLKTQLAHIDFLDEQIALLDEEIKKRMLPFEEDLERLDTIPGVGRRTAEHIIAEIGTNMDQFPSAAHLCSWAGVAPGNNESAGKRKSGRTRKGNEKLRSVLVEAARAAAHTKDTYLSAQYHRIAARRGANRAAVAVAHSILTIVYYLLKRKERYNELGVNYYEERKKEAIVKQSIKKLEALGLKVTVENAV

SEQ ID NO: 273694 - protein, 428 aa, unidentified
MNSASNNENTPPNYAAFVAIDWADSKHAFCLQVAGESKKESGTLEQKPEIIGPWVAKLRERFGGRTVAVALEQSRGALIHALLSYDFLVLYPIHPNTVSRFREAFKSSGCKDDPLDTEQILEILTKHLDLLKPLNPDTEETRLLGRLTEDRRKTVDLRTAHIQALGASLKEYFPQAFELVNGNLASRLAGDFLMKWPTFQAFQQAKPNILKRFYYGHNIRSPDVIEEVLSLAKTAQALTTDSAIVESGRRISQMHAQVIQTLNPVIKDYDDRIEQVFQAHPEAYLVRDLPGAGPAMGPRLCAFFGTDRTRFETAENVQSFTGIAPVTKRSGKSRVVYFRRACPKFDRQTFHEFARLSIAKCQWARNYVEYYTGRGKKFQTVIRALAYKWIRILFRCWQNRTPYDEAKYMEALKKKGSIFATLHLEKKP

SEQ ID NO: 273695 - protein, 387 aa, unidentified
MIYVGIDIAKNTHWASAMNSDGEILLEPFSFQNNNEGFQKFISKLSSFDKQKMLIGLESTAHYGENIISYLFNLDYKIGIINPIQTSNLRKSNIRKTKNDKVDTFIIIKSLTLNNYNLITTRDINNIKLKGLSRSRHNLIVMRSRSKIQLASFIDQLFPELNKFFKGNLHLNVSYQLLKEYSSPKDISSLHLTKLSNILHDNSHGRYNKEDAIHLRELAKNSVGIDNPTLSLQIKQAILQIELYSAQIEEVEKLSKQILDEMKSKLLTIPGMSYNQATAIHGFIGDIRRFNKSCQLLAYAGLDSSIYQSGNFEARSTRMSKRGNSLLRYNLVYAAHNLVLHNRTFKEYYDLKRSQGKTHYCALGHCAHKLVRVIFKMLKSNVDFNLD

SEQ ID NO: 273696 - protein, 354 aa, unidentified
MSQKLDTSPAVIGIDIGKNSFHIVGQNQRGAIVLRQKWSRDQVEARLANLPPCLIGMEACVGAHHLSSKLQMFGHDARLMPAKYVRPYSKGQKNDFRDAEAIAEAVQRPTMKFVATKTADQLDLQALHRVRERLVGQRTGVINQIRAFLLERGIAVRQGLRSLRSELPGILATRTDVLSPRMLRIIEDLAGDWRRLDERIEGLSNELETLARQDKACERLMTVPGIGPIISSAMVAAIGTGDVFSKGRDFGAWLGLVPKQISTGDRTILGKISRRGNRYLRVLFVQAAWVVLVKVKCWERYGLKSWIEAAKKRLHHNVLAIALANKLARIAWAVLNKGRAFECVKTEETASRPA

SEQ ID NO: 273697 - protein, 337 aa, unidentified
MRTIYFIGIDVSKAKLDYTLCKEGDFIKHSTIDNSPKALRLWFQEIKSEYKAGGQNTIFCIEHTGPYGDVVSRTLDKLNARVWLESSIQIKRSLGLQRGKSDKIDSRRIAEYAFHFQKKFRRWQKPSRSIEKLRHLLNLRRTVNSQLRHLMMLKGDSIPAHNKSLQREIGRLCQDIIRPLNAGLDKIDLEIKSLIKNDPELNHLFKIVTSVSYVGDIVAEELLVCTNGFKNFNSAKKFACYCGVAPFEHSSGSSIHKKARVSKIANKRIKSLLHMPALSSIRKTAEFKPYYERKIAEGHAGMSVLNAVKNKIIKRIFACVRDDRLYMKEREVNKLVN

SEQ ID NO: 273698 - protein, 417 aa, unidentified
MDSHSKKVKHINKKTLMVTLDIGKAVHYGYMRTPGGEEVKPFPFNNRRQGFHELWDRVCQFKQVQGLENIIVGFESTGPYAEPLFHFLRTKPVRLVQVNPLHSKRLKELTGNSPCKTDKKDPRVIADIMSLGHALTLVVPQGAAAQLRRLTQARERAMKRRTALLNQIQHLVFVVFPELLDVFKTTHSKSVLYLLQHYPTPQDIVDLGCESLTVLLRRVSRGKVTAERARQLFEAAHGSVGITEGRESILVEVKHLLTAIAHEDQLMDEVEQQLNYYVQQIPYSQCMLSVKGLGTITVAGLIGEAGDFDAFATVAEIMKLAGLDLYEVSSGKHRGRHHISKRGRALMRKLLYFAALTMVRKQGIMHEYYHQMLGRGMPKVKALVAISRKLLRLICALVHNRTVYIAQYHQRALGIAA

SEQ ID NO: 273699 - protein, 370 aa, unidentified
MGKSVLYVGLDVHKMSVDVAIAEAGPAGEVRFYGRIGGDLEALDKVTRKLQAQGAELRFAYEAGPCGYQVYRHLTARGLECLVAAPALIPRRPGDRLKNDRRDALALARLLRAGELTPIKVPDEDDEAMRDLTRAREDAICVERRARQRTVAFLLRHGRVYQGKTTWGRGHWAWLLQQVMDHPAQQIVLQEYLDAVREASARVLRLTGQIRDLVPQWRQAPFVAAYQALRGVSLIVAATVVAEVGDLDRFNNPKELMAYLGLVPSEHSSGASVRRGRITKTGNSHARRVLVEAAWAYRLQARVTRHLLKRQEGLPECVRQLAWKAQLRLCARYRRLLARGKARQTIVIALARELAAFLWAIGRAVAPATA

SEQ ID NO: 273700 - protein, 418 aa, unidentified
MKSMEITAVGIDVSKSKSTVAIRRPGGVIVARPFDISHSNHNLEKLVSILKTTGGDIRVVMEHTSNYWKPIALTLKEAGFYVSVVNAMLIHDFSDNSIRKLKTDRADSLKIANYALTFWNELPPFNDEDETRLVLREQSRMYERLASTATSLRNGLIALADQTFPSIDQAFGHAIKNADGHEKWVDFFSIYWHRDCVLRLSIEKFTESYRKWCLRRNYKFRTNTAHKLYALAQDAVPTLPKNNGTKALVLQACKSLNAVCEAKQSTQEEMNRLASLLPEYEVVMQMEGTGPITGPALMAEIGDVRRFKNKKALVAFAGIDAPPFQSGNFESKSRHVSKRGSPHLRRAVFLVANIILTLSHKDNSVFCFMDKKRAEGKHYYVYTIAGSAKFLRIYYARVTEYLRTQEIPVAASCLNGNS

SEQ ID NO: 273701 - protein, 441 aa, unidentified
MATKIVNLNAAGIDISSKEHVVAVPEDRVDKSVRTFPGFTRDLHQLAKWLKECKIETIAMESTGVYWYDLYTILLDYGFEVYLVNAYHVKNVPGRKSDVSDARWLQELHTFGLLRGSFQPDNLTRSLRNYVRQRKNIIRQMTRETQRMQKALEQMNIKLNNVIRDLNGKTGTQIITKIIEGERDPKILVQYRDWRIKASEETLLKSLEGNWREEQVFNLQLAYNHYCFLQDQLKGCDLESEKTIKKMSTLSNPKEVVKIKKSKNNPNFNVSQYLYEALGIEVTKIYGIKEITALTIFSETGVNIKEKFPTEKQFLSWLNVVPNNKITGGKVISSRVRRKKNKAGQAFRDAASALWKAQNPIGDYLRRKKAKSGGKQAVVATARKLAAIYYKIVTEKVEFDPIKITKYKERYLREKLKQLEKMKQKTESLLLEYHNIEKLVI

SEQ ID NO: 273702 - protein, 314 aa, unidentified
MSTEHFVGIDVSKDTLDASVYPTQDSFRVPNSPDGLDELMKRLKPIESRLIVFEATGGYETLAVSSLAAAGLPVVVVNARQVRDFAKSIGQLAKTDSIDASVIARFASAVRPELRPLKDSPSQELTGLVTRRRQIVDMIVAETNRLKAATRRNRRDIQTHIRWLQKRLKQVDDEIQRDIKNSPLWRTTDHILQSAPGIGPVSSAMLISCLPELGQLDHKKIACLTGVAPLNRDSGKYKGRRTIWGGRAQVRAVLYMSALSAIRSNPIIRQFYQRLREAGKCFKVAIVACMRKLLVILNAMVRNQTMWRHSEIYP

SEQ ID NO: 273703 - protein, 318 aa, unidentified
MSINHFHSIQPTFIGIDVAKDSLALFVSSSEEHLSFLNNPIGFTEIISLAKHFSPQRICLEATGGYQTPLLLALAEAQLPVSLVNPRQVRHFAKGIGRLAKTDKIDAQLLALFAQQVEPRLTIIQSDEQMALSALVRRREQIIEMLNAEKNRLETAHHSIKPSLEKNIAWFETQLQEIDNDLDTTLKSSSLWEKAQLLETIPGLARVSSLTLLAELPELGTISNKEIAALAGVAPFSQSSGKWRGQERIQQGREFVRRKLYMTAFNAIRCNTRLKSFYENLRLNGKPFKVALVAVMRKLLCLCNSMLRYQKSWQPSLT

SEQ ID NO: 273704 - protein, 343 aa, unidentified
MQVVRIGLDLAKYVFEVHGVDKHGKVIVRKRLRRDAVARFFANLPACLVGMEASNGAHYWARMFTGLGHQVRLISPQFVTPYVKSNKNDRNDAEAICEAVGRPSMRFVPQKSTDQLAVQAVHRIRRRLVADRVRLVNQIRGLLSEHGIVIARDIAQLRRGLAVIVGNINDGLSEMVRALMRELQAELAEVDARITAYDRRIREIFRASEQCQRLGKIEGIGPVTATALIAAVGDRSCFKNGRQFAAWLGLVPKQRSSGGRTRLFGISKRGDRYLRTLMIHGARAALSRAGGKQDPRSLWLGKMRQRRHPNVAAVALANKNARIVWAMLTGDTAYEPALSVKAA

SEQ ID NO: 273705 - protein, 329 aa, unidentified
MAEHPRLRNTREAILEVLGEWEKPVTVAMESCLHWAWLHDVLVAEGYDVEVAHPYQVKLISHARCKTDPVDARKLADLLRTNLLPTIWVPDPETRASRKLLRGRAFLVRIRTKLKNRVQAYLAEENHRVPMSDLFGTGGRQWLEVVELTEASRLQVELLLETIDGLTERIGRLDSRIKKQVKVSPEAEQLMTVPGIGPFTALMISSEIGDIARFPTSHALTSYAGLVPSTRSSGGKTYHGTVGPAGNAWLKWAVVGAAQVAKRRPGPVRRHYDRLFRAKGKQKAMIGAARKLCCYLYWMMREGWSYEEWLEQHEAGRGVRPSNRLAGAA

SEQ ID NO: 273706 - protein, 341 aa, unidentified
MDISVLGVDLGKNSCNVVGLDKTGRVVIRRRMRRETVISFAAGLPPCVVAMEACCGAHHMGRALAAQGHSIRLMSPEYVRPYVKAQKNDDRDAEAIAEAATRPTMRFVELKTEEQLDMQTLHRIRDQLVGDRTSLMNQIRSLLLERGHIVPQGRAKLLARLEELIDDEEPVLGHRIHRLVADMRERWRMLDERIADLDAEFIDGARSDVRTRRLLTIPGIGALNATALVAAVGDARTFGRGRDLAAWLGLVPRQATTGGKPRLLGITKRGSRYLRKILIQGARSSLPTISKSDTRLGAWIRGLLSRAHPNTVVVALAAKMARIVWALLRHERDYEATMLPA

SEQ ID NO: 273707 - protein, 373 aa, unidentified
MTKIIRIGVDTSKTIFVLHGVDAAEQPVLRRKLRRRHFLEFFGRLEPTKIGMEACGAAHHWARELGAIGHEVVLLPPQYVKPYVKRGKNDSADAEAICEAMSRPTMRFVPVKTAEQQAGLMLAGTLKGLRDRRTQLTNMIRGYAAEFGLVAAKGLDKIEPLLARIAEEARLPRLAKQLFAVYAKEYRQLREQIAKVEAKLMAWHKSNEQSRRLAEIPGIGPIGATLLTMKVANPRTFRTGRDFAAWLGLTPKDHSTAGKMRLGVITRAGDEQLRSILVVGATAAIKQARLGKGKRPRWLVELVNRKPPKLAAVALANKTARVAWKLMVSGERYDRNRASHREGRGAALIGGSAPRPSLPPCQTPRELPAPSNA

SEQ ID NO: 273708 - protein, 341 aa, unidentified
MQITTIGLDIAKNVFQVHGIDAAENVTVRKQLRRTQVTKFFEALPPCLIGMEACATAHYWARELTRLGHQVRLMPARDVKAYVKRNKNDAADAAAICEAVRRPTMRFVEVKSAEQQGRLMQHRTRDLLLRQRTQTINALRAHMAELGIVAAQGQEGLKHLLRVVADEKDERLAIDARATLIVLAAQLQALQTMIGAIERRIMAQHRADETSKRVATIPGIGVLGASAITATVTSPGAFRSGRDFAAWIGLVPRQDSTGGKHKLGPISKQGDRYLRRILVLGAHSVLKRAKQEPEKYPWLAQLLARRPFKVVAIALANKMARIAWALLANGETYRRPQLAAA

SEQ ID NO: 273709 - protein, 389 aa, unidentified
MSQLFDASRSLTALEQDSTLIAVIEMSQSHWLVAGMIPGLGRQALKKLDADASELLQLLGRWRAEALRAGREIKRIAVAYEAGRDGFWLARWLRAHAVESYVMHASSVAVSREHRRAKTDRLDTELLLRAFLGWLRGEKRHCSMAAIPSAAQEDARRPNRERENLVGEQTRIVNRIKAILARFGIRTFKPTLRKAEDKLAVVRTAEGMPLPPNTCAELRRNLARLRLVREQIRAIEQERLRELAAAPATQNGPHAMVRLIARVIGIGIETADMLVHEILARGLRDRRALARYAGLTGAPDESGKRRREKGLARAGNARVRRGMIQLAWRFLMFQKHSALARWFAARTADGRGNTRKTMIVALARKLLIALWRLVTAGEMPQDLALRPAA

SEQ ID NO: 273710 - protein, 373 aa, unidentified
MLAESVDEDQVIARVAAVDVGKSELVCCVRVPAAGGGRSRLQEVSTHSTMTRSLAELANRLVDLRIERVVMEATSDYWRPVFYLLEAHGLEPWLVNARDVRHLPGRPKTDVLDAVWLCKVAERQMLRPSFVPPRPIRELRDFTRYRIDLVGARTAEKNRVEKLLEDACIKLSVVASDIFGVSGPAMMAAMIAGERDPSVLAEMARTRMRAKIPQLVEAFTGHFDDHHGFLLAQMLGRVDGIEADIAVLDAHIEMLLDPFAEAVERLDEIPGIGPIAAAVIIAEVGLDMTRFPTAGHLCSWAKFSPGLKSSAGKTKGNGSTGHGNRYLARILGEAAVTAARTDTFLGERYRRIARRRGKKKAIVAVGRSILVVI

SEQ ID NO: 273711 - protein, 423 aa, unidentified
MKPLSERPFTAHVGIDWADAKHDVCLQAADSKQREFDRIAHQVGSIDQWAKSLHQRFDGPIAVALELAKGPIVYALQKYDFFVLFPINPATLARYRAAFKPSGAKDDPTDAELALDLLLRHPERFTPLKPQSVAMRTLLSLTEQRRELVDDKTRVTNRLGNALKQYYPQALDWFEQRDTLLFCDFLTRWPTLAQVKRARRASLQAFFYAHNGRRAKVIDHRIDSIRAATPLTDDMGVIAPYRLQVLVLVEQLRVTLHAIDRFDRQIAAVAATLPDYALFSPLPGAGPHLAPRLLAAFGEQRERFRSADELQKYTGIAPVTERSGKKHWVHWRWQCPTFVRQTFVEWAAQTINKSFWAGVYYRQQRDKGSSHQAAVRALAFKWIRILYRCWQAGTPYDESTYLNALRQRGSPLLKQLHPTAQNA

SEQ ID NO: 273712 - protein, 311 aa, unidentified
MSAVPCFVGIDVAKAQLDIALRPSGERWAVPNDASGVATLVDRVQPLHPTLIVLEATGGLERAATSALAAAGLPVVVVNPRQARDFARATGQWAKTDALDARALAHFADVIRPLPDAQTQELRALLGRRQQLIGMRTAEQNRLAGTSARLTQAIAAHITWLNTDIATLDDDLETLLRASPLWRENDDLLQSAKGIGPVCAHTLLLELPELGTLTRQQIAALVGVAPLNCDSGTLRGRRTIWGGRAHVRTVLYMGTLVATRFNPQIKVFYERLLAAGKVKKVALTACMHKFLTILNAMLKHRTPWKPQEVQN

SEQ ID NO: 273713 - protein, 365 aa, unidentified
MNQEKYIGMDVHQATISVAVMDAGGKLIMECLLETKASTIVEFIQGLQGTLSLAFEEGTSAAWLHDLLKPHVSRLVVCDPRKAALLKEGNKSDRIDARKLAELLRTNQLKPVYHEEHGIRGLKELGRSYLTITKDVTRVMNRIKALYRSWGIPCSGTSIYAPRHRAEWLAMLVEPGVRVRGEHLYQQLDSLQPLRLQARRELLRESHKHSGVKLLRQIPSIGPIRAALLVALLQTPQRFRTKRQLWAYSGFAVETHDSGEYRCVRGKLQRNRERITVRGLNRERITVRGLNDNHNKDVKNLFKSAAISASTRPGPLHDFYVARVEMGMRPTMARLTLARKIATITLTMWKKGVGFDPQNLYRQAA

SEQ ID NO: 273714 - protein, 377 aa, unidentified
MKRIKFVGLDVHAETISVAVAEQGGEIRSLGVIPNREESIRKLVKKLGPVEELRFCYEAGPTGYALYWQLTRMGAKCEVVAPTLVPVKAGDRVKTDRRDALKLARNYRAGELTAVWVPDAAHEALRDLVRAREAAKKDELRARHRLNKFLLRHGRRPPMGVKAWTMKYLEWVKREVHFEQMAQEATLLDYLHEVEHGATRTARLDGAIEEAVKLAPPQMRAVIEALQALRGIAQVSAVTVVAELGEFSRFARAKQLMGYGGIVPSEDSSGERTRRGNITKAGNAHLRRVVVEAAWAYRHRPAVGTTLRKRQEKVSEEIKEIAWKAQQRLHERYRKLLAKGKNKGVVVTAVGRELLGFIWAIGIQVETAQKESLQRAA

SEQ ID NO: 273715 - protein, 342 aa, unidentified
MEISTIGLDLAKSVFQVHAVDAAGTPVVRKALRRAQVLPFFTKVPACLIGVEACGTSHHWARELVRLGHEVRLMPPAYVKPYVKRGKTDANDAEAICEAVTRPTMRFVPIKSAEQQAALALHRTRDLLVKQRTQLVNMVRGLLAEFGIEMARGLHHALSLAARLSAGDAAEVPALAQRVVKGLADQIGALQVHLGMLEKELLAWHRSNELSQRLATIPGVGVISATALAASVTEPERFRSGRQFAASLGLTPLQNCSGGKERMGRISRMGDRYLRRLLVVGMTSLVRRARARPDSVDPRFVAMLQRKPVRVVTVAAANRTARVAWAIMTHGGTYQAPLAAAV

SEQ ID NO: 273716 - protein, 455 aa, unidentified
MTRAKSGGMDAMAMVNPGAAAIDIGSTMHMAAINPNADDNPVRAFGTFTGDLHDMARWFKERGVTSVAMESTGVYWIPAYEVLEQHGFHVILVNARYAKNVPGRKTDVSDAAWLQRLHSYGLLRGSFRPEAGVATLRAYLRQRERLIEYGASHIQHMQKALMEMNVQLHHVVSDITGVTGMRIIRAIVAGERDPGTLAEMRDVRCHASVEKICAALSGNWRDEHVFALCQSLALFDFYQTKILECDRKLEVALKALEMGGGHDIRQLPKVRTKTKQVNTPDFEVRSALYRVLGVDLTQIHGIGPSLALKLVGECGTDLAAWPSSKHFASWLCLAPGNKISGGKLLSSKTRRSSSRAAALLRLAATTIGRSDTALGAFYRRLSARAGKAKAVTATARKIAVLFYNSLRYGMAYHDPGASQYEERYRSRVIGNLQRRAKTFGFRLHEIPREPDMAVS

SEQ ID NO: 273717 - protein, 359 aa, unidentified
MFNNSTFFIGLDLGDKQSHIFVLDPKGEVIEESRLPTNPTSLQRKFASLPRSRVAMEVGAHSRWASQLLKDLGHEVLVANARKLRAIYSNPRKGDRADAETLARLARLDPNLLSPIHHRSPQAQADLAILRSRDALVRSRTLLINHVRSVAKSSGARLPSCSADSFSNKAAASIPQPLCPALLPLLETIASLTQQIHAYDRQITSLGETRYPETQPLRRIDGVGPITALAFVLTLEDPSRFQKSREVGPAIGLVPRTDQSGDRDPQLRITKTGNSYLRRLLVNSAQYMLGPFGPECELRTWGLMLAERGGKNAKKRAVVAVARKLAILLHRLWKNGEIYDPFYRSRSNAGQPVIASAAA

SEQ ID NO: 273718 - protein, 409 aa, unidentified
MLFVGDDWAEDHHDVEVQDETGHRLARARLPEGVAGVARLHELIGAHLPAEAGPEQVAIGIETDKGPWVQALVAAGYAVYAVNPRQVARFRDRHGTSGAKSDQGDAHTLADMVRTDRHQLRVIAGDTPQTQAVKVVARAHQTLIWDRQRHALRLRAALLDFFPAALAAFDELTAPDTLRLLAKAPDPAAAARLSRAQVLAELKRAGRRGGLQARAEAIVAALRSEQLTQPPAVAAAYAATVRSLTALIEAFNAQIAAMDKEVADCFGQARDAEIYLSQPGLGQILAARALGEFGDDPDRYATPKARKNYAGTSPITVQSGKKKTVLARFVHNDRLADALHQQAFCTLTISPGARAYYDQIRARGASHHAALRQLANRLVGILHGCLKTRTLYDEDKAWAHHSEDQQAAA

SEQ ID NO: 273719 - protein, 342 aa, unidentified
MRLFVGLDVSLAKTAICVISEHGKIIDEAEAASEPEVLVRRLGDLDGSIAAIGLEAGPLSQWLHRGLTEAGLDTVLMETRQVKGALKAMPIKTDRRDAEGIARLLHLGWFRPVHCKSASAQETRAVLGARKAIQQNMIALEMSLRGLLRNFGLKVGAISRGRFETRIRELADGNPMLETATTPMLRARATLRLELAALEKQVRQLAQDDPVCRRLMTMPGIGAVVALTFRAAVDDPARFRSSKRIGPWAGLTPSRNQSGERDVSGGITKAGDVNLRRALCQAATVMMNRGRSTWLRTWGAQLAQRRGRKIAMVALARRIAVILHRIWVDGTVFEPDVAPQMA

SEQ ID NO: 273720 - protein, 343 aa, unidentified
MKLHVVGIDLGKTVFHLVGLDSTGRVVIRKKCSRTQLLAFTANLQVELIGMESCSGSHFLGRALREQGHEVRLMPAQYVKPYVQTNKSDFLDAEAIAEAVQRPRMRFVPIKTEEQLDLQALHRVRERWVMRRTAVVNQIRSLLLERGLTLPKGRRYVDEQLPRILEDAELRLSGSFRVLLAQLKVELEQLTARIEQMDAVIQQTAKENEACQRLTEIPGVGPVTATALIAAVGNGSTFQKGRNLAAWMGLVPRECSTGGKQKLLGISKRGNKYLRTLFVQGARSVLQQRHKQAPGLSAWLAQLLTRAHQNVVIVALANKMVRMAWAVLCKNERYRAPVLAVTT

SEQ ID NO: 273721 - protein, 316 aa, unidentified
MRKKEVFVGIDVAKEELEVAVFPRAETETWPNTEEGILRLVYHLKSLCPTLVVLEATGGLEMPCVGALAAEGIPVVVMNPRQIRDFAKATGRLAKTDRIDARVIARFAEAVRPEIRELKTEEMQELTALGLRRRQIIQMITSEKNRLATASKWTREDIKEHISWLEKRLDDVNKELEKSIRNSPVWREKDDLLRSVPGVGPVLSATLLSQLPELGSLNRKQIAALVGVAPLNRDSGQFRGKRCIWGGRASVRCALYMATLVATRFNPTIAEFYHRLRTAGKEHKVALTACMRKLLTILNAMARDRAHWSPVCLTES

SEQ ID NO: 273722 - protein, 445 aa, unidentified
MPELAELAVPVAYVGLDVSQDEAVVCFLLADGREPVPRWAVANSASGATALVARLAELAVEHGVGELRVGLEATGLYWWHLACALKDAPALAAFRPSVYALNPKLVHDFRKHYGALPKTDRADAFVIAERVRFGRQLPPPFQIDVRYAPIQRLTRFRFHLAQTLAREKSYFLTFLFLKFSAFSQVHPFKDSFGATSCAILEEFTTEELAQAELADLAAYLDAKGRGRFADPDAVAATLQRAARDSFRLDKVLDEPLTLVLGTTMATIRTLQSQLKTLDATIARELRAIPQPLTSVPGLGPVWSAGLIAEIGEVGRFTDEAALAQYAGLVWKAHESGQFQAEDTPLAKTGNTYLRYYLVEAANSVRVHCPEYAAYYQTKFAQSPRHAHKRALVLTARKLVRLIDALLRTGSLYRPPEARQDQTEVHLPTTNRPSANRRSRRAASVG

SEQ ID NO: 273723 - protein, 345 aa, unidentified
MEIVTLGIDLAKNIFALHGVGADGKVLLQRPAVKRAKLLELTASLSPCLIGMEACSGAHQWAREMTRQGHTVRLIAPKFVAPYRMSGKRGKNDAADAAAICEAVTRPAMRFVPMKSIEQQSELFLHRARQGYVEQRTALINRIRGLLSELGIVLPQKADTIRRELAKLLEDLPGHCNTVVADAITDLERLDARVGEYDRHIATCAKANADARRLMQLSGIGPTTASALVASIGDGHDFESGRQFAAWLGMVPGQYSSGGKQRLGRITKAGDRYLRTLLILGARSVLQSGKKKEDAISRWTRDVESRRGYWKAVVAMAAKNARLAWAVLRRGEDFKLYGQKVPAGA

SEQ ID NO: 273724 - protein, 350 aa, unidentified
MTTIARRITGGVDTHLDVHVAAALDERGAQLGVESFAATGAGYQELLGWLEGFGTLELVGVEGTGSYGAGLTRHLLSRQVAVVEIDRPNRQRRRRTGKSDPHDAVAAARAAQGGEATGSAKTRDGNVEAMRVLRVARRSARSNRTQALNQMRSLISTAPEELRADLRNLSIYKVLQLASAFRHTGKTDVATVTKLTLRTLARRALSLEEEVKEIDRMLKVLVAETAPELNAVDGVGTDVASAILVAGGDNPERLKSESTFAKLCGVSPLDASSGKQQRHRLNRSGDRQANSALWHIVFTRMVNDPRTKHYIERRMKEGRTKKEAIRCLKRYVAREVFAALPRSEFALDSP

SEQ ID NO: 273725 - protein, 544 aa, unidentified
MKVGLEAIHMPACGLDVHKDKIDACIIDESGLMHQKTFSAMRNAIYSLKAWILSYNCMHVLMESTGVYWLPVYEILEEVPGIDVGVGNSRHMKNVPGRPKTDKHDSRWISKLCMFGLILKSFVTGRKFRELREYTRYHKKLVQDRARQVNRIEKLLQMNGFKLSSVLSDITGKSGMKLLKKLSEKGSVSLDDVKEALHFRVKKSPEEIEFAINGQMKLTSRILLSKMISRLESCDKEIADIYQMMLKYSEKYKKEIKIIQSIPGMGELSAIYIIAEISTDMSSFKTANHIASWAGLAPKDNESAGKQKAKKTQKANIYIKSILVECAWAATRTRKTRLSNWYWRNSKRLGEKKAITAVARKLLCYIYAMLKSGELYDISLDAADENKLWAQKLESVRKKVDNKLQSSNVVEQNDEAHSTDGATILVCDDNIAPRNNTDEAATLAKPKIPETANNPKVASDIVKPARKRGRPRKTIDCSNKSENTTTDCMPLETNDAIAISASQNIGISDPTNINSNDLDAIIKPSRKRGRPRKTVADKLDTNLD

SEQ ID NO: 273726 - protein, 343 aa, unidentified
MDRTTVAIDLAKTIFEVAISQQPGHIHQRRRLSRARLGSFLAELPPTTVLLEACGSAHFWARLAQGYGHQVVLLPPHATRPYVLRDKTDRADARALLEAFRNQDIHPIPVKSVDQQALTALHRLRSAWLATRTARLNALRGFLREFGVVIPLGARFVLPQVRQLLAGSDSPLPAALHPTLADTCAEIEELESHTRSLERQLATLAADLPVVARLRSVPGVGLLTATALLAFVGDVHRFRSGRRFANYLGLTPREHSSGSSRHLGSISKRGDPYLRMLLIHGARAVLCHAHRLPRPDRLRAWALQLEQLRGHNKATVALANKLARIVWAVWRSETRFQEEELAA

SEQ ID NO: 273727 - protein, 347 aa, unidentified
MNFYNSTHRHYCGIDLHARSLYVCIMDQQGETLLHKEIPAKPEPLLHLIEPYLDDLVIGVECMHCWYWIADFCEDQGIVFILGHALYMKAIHGGKTKNDRVDSYKIAALIRGGNFPLAYVYPRSMRATRDLLRRRTGLVRHGADLKAHVVNTTSQYNLPPNKVNLKNVSAREQLGRTFDDPLVQRNIDLDMAVLECYHRELSQVEWLLEKQAKKHQPTYYHLLKTIPGVGRILALTILYEVGDIRRFESVQKFASYSRLIKCKAESAGKTYGTQGNKIGNAHLKWAFSEAAVLYLRGNPGAQKLLQRFQKRMSKAKALSALAHKLGRAVYFMLKNEKVFNEQRFLTS

SEQ ID NO: 273728 - protein, 412 aa, unidentified
METVVERCAGLDVAKDEVVACVRVPDGTGGRRQETKTFRTFTADLEALADWMASEGVTLVVMEATGQYWKGVWYVLEERRFELMLVNARHVKIVPGRKTDVKDAEWLAQLLEHGLLRGSFVPPAAIRELRDLTRYRKRLIQAHTAECQRVQKTLEDAGIKLDSVASDVLGVSGRAMLKALVAGDRDPKVLAELAKGKLRAKIPELRRALRGRFSEHHALLVRLALDHIEHLEAAVATLDTEVDRVMVPFGKARDRLDTITGVGKRAAECILAEIGVDMGVFPTASHLASWAGRCPGNNVTGGKRRSGKTNKGNRWLGEILVECAWGAAHSRDTYLSAQFWRLARRIGKKKAAVAVGHSILVVAWHLLKYNCDYEDLGGDYFLRRDVDRHRQRLVSQLQALGYYVTLEPVAAA

SEQ ID NO: 273729 - protein, 354 aa, unidentified
MTKITTIGLDLAKNVFQVHGVDAKGKVIVARQLRRKQVLAFFAKLPPCLVGIEACGSAHYWAREIAKLGHTVRLMPPKYVKAYVKRGKTDAGDAAAICEAVSRPSMTFVPVKSVGQQGLSMLHSVRSQLVSQRTQLVNAVRGHLSELGIVAERGLLGLAELAAVVRDKTDERLPAAARAALLVIVYQIETVGAEIAKLDTALRKENKASDLGRRLETIPSVGPVIASAFRARVTKPELFKNGRHLAAWIGIVPENDSTGGKPKQKGLSKKGDRYLRALLVSGAMAVVRQARMRPERYPWVASLLTRMSAKQAAIALANKNARIAWVVMVRGGVYEAGHRAPAYRGAALPVPAVA

SEQ ID NO: 273730 - protein, 347 aa, unidentified
MAMTTIEAARPVTGGVDTHGELHVAAAVDQVGGLLGTESFAASPAGYVALLDWLSGFGGISSVGVEGTGAYGAGLARFLRRSGITVAEVDRPNRQARRRQGKSDPLDAVEAARAALSGRAGEAKSKDGAVEALRVLLVARRSAAQARTKALVQMRHLVYAAPDDLAVALKALSVKQLVERASALRPLRSPDQVTAATKLALHALAGRVRFLDEQLGDLDQFLAPLASSTAPELLELVGVGPLTAATLLVVAGDNPERLRSEAAWAHLCGVAPLEASSGKVVRHRLDPGGNRQANSALWRIVMVRLTCDPETQAYMERRGKEGRSKREVVRSLKRYVAREVYRLLPHR

SEQ ID NO: 273731 - protein, 449 aa, unidentified
MGNGSGVSRGDRNRNARLERLRSLVPVTNAIVGIDLAGSKQMVVVTDHDSKVIARRTFRCRAWDLGSALDWAAGRAAAKGWAGVTVSCEPTGHRWRVLGQLAADRSMPFVCVQPMVTSWSRRTEDLTCDKTDEKDAVLIARLTAQLRCYVPEPVDETWGRLRHLGTRREQLITEAGGQIQQMRDLLECVWPAALDTARQPFRSGTWVAALWVIAGRDGGDFARTRRLGAARFEQAVRREITRRGGQKPCLRIVRGLFTALADPAGVIAHRPGALERVQLLLEDWRHTQDRLAETERRMTAVLDELGLTGLVTSMTGLSAIGAAAILAETGDPRRFATGRAVVKHAGLAPREKLSGAFTGRTRLTGQGRPGLRLAAWRAVWGAQRANPVYAARYQYLISREQNKLTPTQAQTVIAAAILRQLHAVITTGQAWDPVTATHGTRRASTPLAA

SEQ ID NO: 273732 - protein, 382 aa, unidentified
MPAYADPTPTPISADTIFLAFELSGTSWLVALHAPDADKVERHRLSAGVAAEVLGLIARTKARVTRRLGTTPRVACCYEAGRDGFWLHRVLEAEGIASHVMDPTSLQVDRRARRAKTDRLDAQALLRALMAWSRGERQVCSMVRPPSPEHEDERRLSRERGTLLKERLRLSNRIKGLCAAQGIYDYEPLGADRRERLARLVTGDGRALPGRLAAEIGRQLDCFELVLRHLAEVEAVRDARAAQAREEGGSKLATLLRLKGIGPELATVLELEVFHRHFANRRDVAAYAGLAPSPYASGGTSREQGISKAGNRRARKALIELAWLWLRHQPESALARWYRDRVGTATGRVKRIAIVALARKLLVAIWRYVETGLVPAEAAVRT

SEQ ID NO: 273733 - protein, 408 aa, unidentified
MARKRTLSTLDTSIAYEAVGLDLAKEDTAIAAFGPDHEGPYLIDRMPYDKLYELLADMAPTLVAMEPCSGAHQIAEQIQELGHEVMMISGRHVQAWVKDHCNGQKTDLNDAFAILNLAYDRWLTPIRGKTREECRLLALQSSYRQLKGQRTKTMVHVKATLHAWGFPIRTGSFNQKALHELIDANREAFGDEVVETLHLMINRVHDLDHDIATVLKLLTEATQRDPRASLLRSIPGFGVLTTSRWCAVVGDIARFDTPKQTMAFIGLVPNNRITGHHTETSSGREARGQGKMSKRGDKMLRSLCILGAGALCLMVRNDRLPDCPFVASIKERLASPRPWFKVLVYVAAKLVRIATALLKYGETFSFEKAGISKAVLKQWELEQAKAAKALTARKRIVRPQARLIHEMP

SEQ ID NO: 273734 - protein, 466 aa, unidentified
MARKQKSNKSKKHKRPIQSLETIQPNAAGIDLGSREHWVAGPPQEDKIPNVERFGTTTPELLRLADWLTQQGVKSVAMESTGVYWIPLFEILDSKGFEVLLANARQVTHVPGRKTDMLDCQWLQLLHACGLLRGSFRPSDDICRLRALFRERNTMVDQRSDWVRRMQKSLDQMNICVHHAVSDITGVTGMRIIRAIVDGERDPQALARMRDRRCRKSEQQIAAELTGNWRSEHLFNLHQALKMYDQLCTVVADYDSEILSYIQTLQPEDNNDTAVPPPSTKAKARGIAKRGQEPLRQALYRFSGFDMTTIDGIGVDTASVVISELGLDYTMFPEEGNFVSYLRLAPNLSISAGKKVPSKSKASTCTRVASALRMAALTLRNSKTALGASYRRVAWRKGASVAVFATARKLAQLIYRLVRYGQAYVDAGAKAYETRFNQRRLKFYTKALNDMGYNVEPLAAAEANSG

SEQ ID NO: 273735 - protein, 316 aa, unidentified
MNYLGIDVSKKKIDCCLIVGDKYLHRVLKNDQSGFEKLRDWLKKYTDKPVYACLEATGIYSEHIADWLHDEGHSVALVNPLSIKKFAEMQLLAVKTDKQDAKTIAKYCQMAQPTLYAPPPKSERQLKALTRQVEYLKEMVVANQNRFQVSQDVTAPIIADTIAHLRQQISQVEQQIQTHIKQSPDLKDKADLLKSVRGIGTATIPHLITLFGFKAFSTAKAAIKYVGLNPIIKQSGEKKTRFIAISKQGDKTIRTALYMPAVRAFTLPEWQPFVNRLKSAGKTGKQIVCAIMRKLLVYCFTVLKNGRPYDPQIQAA

SEQ ID NO: 273736 - protein, 389 aa, unidentified
MKIFVGIDIAKLNHFAAAISSDGEILIEPFKFTNDADGFQLLVSKLESFDKNSIIIGLESTAHYGDNLVRYLVAEFYQVCVLNPIKTCQMRKNNVRKTKTDKVDTFVIAKTLMMQDDLRFITFFDLDMMDLKALGRFRQKTIKQRTRLKIQLTTYVDQVFPEIQYFFKSGLHQNAVYALLKEAPSPKEIASMHMTHLANLLKVNSHGHFTKEQAKELRVLAQKSVGANDSAISIQITQTIQQIELLDSQLEKIEAEMTDIMKFNDSVIMTIPGIGYINGGMILGEIGDMHRFSNPNKLLAFAGLDPSVYQSGNFQAKTTRMSKRGSRVLRYALVNAAWNVVRNNATFKAYYDAKRAEGRSHYNALGHCAGKLVRVIWKMLTDEVEFNLE

SEQ ID NO: 273737 - protein, 359 aa, unidentified
MQIQSNELDFKGQNIYVGLDVHKNQWKATIMLDDLALKTFSQPPDPDTLHKYLRTNFPGGNYYTAYEAGFCGFWPHKRLEELGIHSMVVNPADIPTTDKEKRQKEDKRDSRKIAKGLRSGDLRAIYVPSDKTLEDRLLLRTRFTLVKDLNRNKNRIKSLLHFYGIKLPERFSSPQSHWSKSFMTWLESIEFKEESAAKSLSLRINQCKQLRQGLLEITREIRKLSKTEAYWKRVKLLTSIKGIGLINAMVILTELETIARFKKLDGLCAYIGLIPTTNSTGNNENTGDITPRRHRLLRTLLVEASWVAIRNDPALTMCYANLTKRMEPNKAIIRIAKKLLNRIRYVLKNEKEYTLATLR

SEQ ID NO: 273738 - protein, 428 aa, unidentified
MKYNTQNAKIESITEKTLIVGIDVGSETHYARAFDWRNYEYSKKPLEFSNNEAGFVTFKVWMEELAEKYGKDVVIPGMEPTGHYWFNLGAYLQDNGMKPVHVNPHHVKKSKELDDNNPNKNDRKDPKTIAALVNEGRFSYPYIPTGVYAEIRSLSNLRLQAQEEITRIKNRIARWFSIYFPEIKDVYKNPGAVSGLMILKVAPLPKDIVKLGVDGVNQIWRDAKLRAAGLKRAKTLVTAAEHSIGSQEACDSARIELKILLNDYEIYHQREEELMELIEEKLSEVPYIDKLLEIKGIGMKTVSGFVAEVGDIKRFDNPKQLQKLAGYAIVECSSGKHKGESHISYRGRKRLRYVLYEAAISLIARNTEFKEIHRYYQTRGKNSLKKMQSVIAVACKALRIFYAILTKGVTYDGAKMLQDIKRPQLKVE

SEQ ID NO: 273739 - protein, 335 aa, unidentified
MALYCGIDLHSNNHVIVVIDEEDRRLYERRLGNDVSLTLNALEPYRSELAGVAVESTFNWYWLVDGLQAAGYPMRLVNTTAVQQYAGLKYTDDRYDAYWLAHLMRLGILPTGYIYPKEQRGIRDLLRRRMQLVHTASQQLISLQSQIWRHTGERIASSRLKQADFGVDLPGAAQKLSAQSTLQVYRAIAEQVELLEGVLLQVVRPRPDYQLLTTIPGVGAILGMTIALETGDIHRFREVGHYASYCRCVKSEKLSNGKKKGEGNAKSGNKYLSWAFSEAAHFAVRYEPLAKRFFDRKQRKTNGIVAIRAVAHKLARASYYMLRDQVAFDVHKLFG

SEQ ID NO: 273740 - protein, 310 aa, unidentified
METVFVGIDVSQDRLDVHVRPREEAFAVARDGAGLAALVARLREVEPARIAVEATGGFETVVTAALAAAGLPVVVVNPAQVRHFAQAVGQRAKTDPIDAALIARFVEATRPELRPLADEATRLLADLVARRRQIVEMIGAERNRARRAPAGRIQRSIARLIAALEKELASVDGDIDAGVRGSPLWRAKEDLLASVPGIGPVIARTLMAELPELGTLSHKRIASLAGLAPYTRQSGRWKGQSRIGGGRKSVRSALFLAALVAGRHNPVLKAFRDRLVGAGKPKMVAVIAVARKLLTILNAILRDQTPWQNA

SEQ ID NO: 273741 - protein, 423 aa, unidentified
MQNTAARKRRRVPEGYLVVGVDPHKKKHAAVAITQDFTTQAKFKFGNTRQGLDMMLDRAKAEMVKSGCRGVIFAIETGGHYWRNIAYYLDERGIPFHFINQYTLKRRREGKDLNRRKNDYRDSEVAAQLLCTGEFVESVIPQGVYAELRTSHNAYQRLVKERTRITNLVKGLLDGLFPEFTQVFKDPGGLTALSVLSTCPIPRLIAGMTADEFVATIEARHKGRLMRKKLRALHYLARTSIGIDAGARSISSEIAFLVDKLELIRQHIRIMEGLFVRLVGETEEGKYLLSIRGLNYIAVAGLLAELGCFKLYRSAKQMIKMAGSNPTESESAGKKRAQTPMSKQGRPLLRYCAWTSVIPMLRFNPDFRAWAKQRRERPIHANPLSGREIVGAALNRLLRLAFALVKNHTYYQDVKPTVIPAAV

SEQ ID NO: 273742 - protein, 374 aa, unidentified
MGDYSEVFVGIDTSKLRNAVAIAECGRNGEVRYLGEVENTEAATRKLVKKLAAQHRRLTFCYEAGPTGYGLHRLIKALGHDCVVVAPSLIPKKPGDRVKTNRRDALNLAKLLRAGELTAVWVPDARHEAMRDLVRAREAAVDDLKSKRQQVLSLLLRLGRHFTGKRTWTRAHMMWLVSQKLAHREQRIAFEEMLLAVRQAGERVIRLERAIVAAVPDWSLAKVVTALMAVRGLDLISAAIFLAEIGDLSRFASPRQLMAYLGLVPGEESTGDRVWRGGITKAGNHRARRILVECSWSYRHPPRVGKKKLGKVEATPPAVQEIAWKAQARLTARYRALARRGKRPTLVVTAIARELSGFIWAVSRAAGTPAPSAA

SEQ ID NO: 273743 - protein, 347 aa, unidentified
MNKNWFIGIDVSKKTLDASIFVAGEVINRFPHTQVRNEKQGFRELLRWAKAQGVNTKDTLFGLEFTGYYSDALEQFLTGKKLCYTMLPTTVVKHYQRGTRDKNDKTDSAKIADYLFRFNGTECIRLRQLPSKAMQELKALKSERKFYVQQRVACENRQKVAKSKQEQKHLQKAIDLFNEQIEQTERLMADVVTSDEEIYLTYTRLLTIPGIGPVNAINTIANTQNFTAFETARQYAKYVGVAPSEHSSGTSVRWRGRPSPHADLQAKADLSMAALRAVEFDFEMSQYYEHKLGNRKDDKDVQRKALNAVKFKLIRQMFSVAKQHKNFTVMQQGQAQAETHSTEQRVN

SEQ ID NO: 273744 - protein, 491 aa, unidentified
MNSIFQRKNPAIEKLFQNAGSPKKVMCIPIDYAKRQHTALVCNGEGSQLRGPFNIHNNPAGIEFLEEVIAGLRRKHSIRQKFVFFGGEDCSAIAFNFIHALLQKGYLGIGLNARDAAAERENQVASTDKLDLLGIASLLVNKKRGRTLSAEYSEARVLRELTHHRGALVRARTASAYRLHHLIDQLLPGFLDEKQSGLTPFSKPCLWVMSQNFSPKQILARKSEMMAEKLRLFMVQNAEEKVAKLRALARVVLPPPAALCATLQVNLSHEVSVYEHLEGCIHDVEKSIAHHLAPTPGAMLTTVPGIGITLAADLYAEIGDPSRDRCLKRLSSYAGLVARLKQTGGPDKEAQTRGRSRRACVPLKRCVLDIALKVGQYGHAELKADYQRREAQGQDVRLTLGRRMLRICAHLIRKRDFFVPPSMLRDSEYDVRRDYYARAWDKILIKWRDRSSIQQALAEDTPLEQWRLMLNERYELNLSRLSPQYDRLRAR

SEQ ID NO: 273745 - protein, 382 aa, unidentified
MAILAIDVSKNYLSFFSDFIGSGTVENSPQGIVELFNKAFASSSDFSLVLESTGVFSFNVANFFFQNNVPVFWVKTDNIKLYRKILNRPKTDKIDAELIFSIASKFPESLVPFVNNSYIISELRNLTRLYLKFNEDIARLKLRLYSYVSLYFPKLDFKLNKTFECLLKDYTIEEIANMPIEELFEYIAKISRHNVSSQVLAEKLQTLAKDALRLSVNPSNTLRISIVSTIDLIQHYEKQIELVKKEISKLLKVIPNTLTTVKGIGEITAAGIIAEIGDINRFEKASALASYAGLVWTINQSGNYKSENNQLTKKGNKYLRTYLVMAANGVKTYDPVYKEYYRKKYAEATTHKHMRALILTARKLVNLVYYLLKNNVPYVPMK

SEQ ID NO: 273746 - protein, 308 aa, unidentified
MNREPYSYFAVDVSSQSLETLTNERRKELDYTKRAVRQLIKEVQSDPQMVVVLEATGGYERKLLDALHEAQVPCVRVNPGRVRAFAYSEAVKAKTDRIDAGMILRFAQEKKLQPVAAPTEDQKQLAALMDRRSQLNSMLTEEKNRLHNSPKCIQADIRGSIRTLTTRIQKIQQRIQELIEASAGLSEAAKVIGSVKGVGPVTTAAILAYLPEINQINRNQLAALAGVAPFNRDSGEKTGKTTIYAGRSNVRTPLYMAAVCASQCNPVIRDYVQGLRDRGKPAKCALVAAMRKLLIHIQSELRKHQDAA

SEQ ID NO: 273747 - protein, 345 aa, unidentified
MEVLHPRCAGLDVHKETVVACVRIASGGEVSRAVRTFETTTARLIELAEWLEANGCTHAAMEATGVYWKPVWQVLAAGGFELVLANAAHVKNVPGRKTDVNDATWLAELLAHGLIRASFVPGPEIQELRGLLRTRKQLVREKASHVQRLQKTLEEANIKLESVLSDVMGRSGRAMIQALIAGETDPAKLAALAHPKVRAPQARLREALRGRVKRHHRFLLDLHLQQIDALDAGIAAIDREVDAGLASFRDAVKQLSTIPGVSQLSAQVILSEIGIDMSRFATAAHLRSWAGLCPRNDESAGKRRSTRLRTGAPWLKATLVQCGWAAARTKGPSRDKRAIWAMGIW

SEQ ID NO: 273748 - protein, 387 aa, unidentified
MSATAPGVSQTVIDVNLAAIFVSLELSRSTWLITSLSPGKGEKMSKHSVHSGDVTGLLNHFTRLQVKAQTRTGKSFPVIVIHEAGLDGFWLHRVLEREGVESHVVDAASVLTSRRRRKAKTDRIDGEALLRTLLAYTRGEPRVCAMVRPPSPEEEDRRRLCRERKTLVAERVAHVNRIKGLLFAQGIADYEPLRRNRRQRLEQLTTGDGRPLPAHLKAQLGRELDRLELTLQQLKAVEAERDALLEPEGDAAPAPVAALAGLRGIGPEFAAVLWLECFFRSFSNRRQVAAYAGLAPTPWQSGSVDHEQGVSQSGNPKLRSTMVQLAWLWLRHQPTSALSRWFKERVKQNEGRGKKAAIVALARKLLVALWKFVSSGVVIEGAAMKAA

SEQ ID NO: 273749 - protein, 375 aa, unidentified
MEHHSEAFVALDTAKLRNAVAIADAGRNGEIRYLGEIDNTEAETRKLVAKLASKHARLTFCYEAGPTGYGLYRLIKSIGHDCIVVAPSLIPSKPGDRVKTNRRDAVNLVKLLRAGELTAVWVPDERHEAMRDLVRARDAAVKDYRIKRQNVSSLLLRLGRHYPGKKTWGRTHINWLTGLKLEHREQRIAFEEMLLAVRQVRERIERLEQAMREAVADWTLAPVIEAVQAMRGIDMIGAIAFLAELGDLSRFENPRQLMAYLGLTPSERSTGESVKRGGITKAGNTRARRLLIEAAWSYRFPPRVSKDMQTRIGAAPRTAREIAWKAQMRLCGRFRTLTRKGKRPTIVVTAIARELSAFIWAINREVVGSHAMANQ

SEQ ID NO: 273750 - protein, 337 aa, unidentified
MKLYGGIDLHSNNSVIGLLDEEDQMIYHRRLRNDLPTILEVLEPHREKIQGLAVESTYNWYWLVDGLMEAGYRVHLVNTAAVKQYEGLKHGDDHTDSRWLAHLLRLGILPEGYIYPKEDRAVRDLLRKRGQLVQLRTTNILSIQTLITRNTGGRMNGNKIKKLLPAEVSELAPYEEVALAINSNLSVMQTLQEQIEILERAIQKKAKLRSEYAALKSIPGIGIILALTIMLETGPIQRFSKVGNYASYCRCVGSTRLSNGKQKGKGNAKNGNRYLSWAFVEAANFAVRYNDDIKAYYQRKQAKTNNVVAIKTVAHKLARACYFILRDQVEFDLQKAF

SEQ ID NO: 273751 - protein, 345 aa, unidentified
MVVLGADTHKRSHTVVAADEAGVELGSITVGATPEGHLRLAQWAARFGMGRRWAIEDCRALSRRLEADLLATGEQVVRVPPKLMAGTRRSARTRGKSDPIDALAVARAALREPDLPVAQLDGPSRELRLLVDYREALVKDRTAAQNRLRWRLHELEPGYDPPAGSLNRYKTLDQIDELLAVHDSVVADLAHREVERIRELTREANQLERDITARVAELVPTLLEIPGCGPLSAAKLVGEAADITRFRNRDAYAMWAGTAPIPVWSANNQRHRLNRGGNRQTNAAIHRIVITQLRIHPDAQAFISRRLETGSTRREAIRLLKRKLANVVYRTLLADAQKPALQQAA

SEQ ID NO: 273752 - protein, 391 aa, unidentified
MIYVGIDVAKDKHDCFISNSDGEVLFKAFTISNSLDGFHELYSKICSVSEDLTKVKVGLEATGHYSYNLLGYLLDKGLPTFVINPLHTNLYRKSLSLRQTKTDKVDAMTIASMLMSDVNLKSYSDTSYHNEELKSLTRYRFDKVKERAKLKTSISRLVTILFPELEKLVPTLHMKSVYSLLYEMPSAKDVSNSHLTHLAKLLESASKGRYSKETALLFRDAARNSIGQNMPAKSLELKHTIKLINELTYEIDEIENEIKIIMDSINSPILSIPGINYRMGAMIIAEIGDFSRFDSPDKILAYAGLSPSTYQSGQLDSSYSHMEKRGSRYLRYALFNATIYVCQWNPDFNAYLAKKRAEGKHYYVAVSHAAKKLVRLIYHLEKTGQTFIKAS

SEQ ID NO: 273753 - protein, 314 aa, unidentified
MDKITVGIDVSKDRLDVAVRPSGEVFVVARNAAGLEELVERLCSLGPHLVALEATGGFETVAAAALAAAGLPVVIVNPAQVRAFAKAIGQRAKTDPIDARVIAHFAEATQPEPRPLPDEATRLLADLVARRRQIIDMIGAERQREKRAPARLKKSIVRLVKALEKELTSVDGDIDDAVRGSPAWRETEDLLASVPGVGSTIARTLIAELPELGRLDRKQIAALAGLAPHTRQSGQWKGRSFIGGGRANVRTALFMGAMVAKKHNPVLKAFFDRLVAAGKPKMLALIAVARKLLTILNAIIRDHRPWQGTVVAAS

SEQ ID NO: 273754 - protein, 356 aa, unidentified
MISSTKYIGMDVHTQSISSAVMNSVGKVVIESVIETKASTILEFIDGLRGDLRVTFEEGTWAAWLYDLLKPHVTEVVVCNPRKAALLKDGSKGDRIDARKLAELLYMNRIKSVYHGENGLRTLKELARSYLTITKDLTRIMNRLKALYRSWGVPCAGKDVYAPRHRAEWLGKISEAGVRRRAEHYYQQLDVLRLLRQEVRRDLLAEAKKHKPWKLLRQIPGIGPIRAAVLIAVIQTPHRFRTKRQLWKYSGLGLETHDSGQYHTEEGQLQRSKKPATVRGLNKDHNHDLKDIFKGAATTVSSSRGPLRDFYENLLAKGRKPTMARLTLARKIAAITLIVWKKEVRFDANYLKQQAA

SEQ ID NO: 273755 - protein, 344 aa, unidentified
MTYFAGLNVSLRSTNICVVDNQGKLIAEGKTDADVTGIIAFLEALDVEITEVGLEAGTLTQYLTYGLQFAGYEVICMEARQVKSALAAMRNKTDKHDARGIAQLLRSGWYSRVHVKSMESHRVRALLTSRRAVLAKCIDLEQEIRGIFKIYGIKLPPRLGHGSFDPHVRPLIEADEVLSLSLLPMLDARLVLYRTFRELDNRTRKLALSDPICQRLMTAPGVGFVTALTFKAGVDDPARFKHSRTVAAHFGLTPRRFQSGELDLEGHISRCGDASVRATLYTAANAMLTRSSKWSSLKAWGMQLAKTRGHRRAVIAVARKLAVILHRMWIDDTQFRWGTEAARS

SEQ ID NO: 273756 - protein, 423 aa, unidentified
MMRLTYPICCGLDVHKNVIVATIVTTNNVGISEYNQKSFSTINSDIQKFHDWLIEYNCYHVCMESTGKYWIPIFNYLENDIDVCLTHPKYVKAIKGKKTDKKDSKWIADLYKFDLVRCSFIPPKDFRGLRELARYRFKLVCMKSSEKNRIQNCMTVSNIGIANVLSDPFGKTATEIMSYLLKNTSDSIDSKAVRKLIKKGATAKSDEIIEAIKGYNIETDQSKKLELARGHIDYLDDMITQTEVELYIRIKPYYEFVEYISSLPGVTELSATIILAEIGVDMNIFDDAKHLCSWCGLSPSNNESAGKKKSVRIAKAGAYLKPMMVQCALAAIKSKKQPYFAIKYGRIKKRRGHKKAIIAIARMMMVCIHHMVSEKQHFNPTDYTELMDPHFNQKRVTLNDSNVFAYLEAQGYDTSLLVKCNDN

SEQ ID NO: 273757 - protein, 352 aa, unidentified
MSSQEQFPNLTIGLDLGDKVSRTCELDAAGAVVKTAAVATTPGAIERYFGGRPRCRVVLEVSTHSPWVSRQLKALGHEAVVSNTSEVYGRTRRKRRNDRIDAEFLARQGRADVELLHPIQHRSVEAQQDMELLRARDQLVQARTKLINHVRGAVKSLGSRINKCSAEVFAIRAPAQLPASLRPSLTPLVEVIAELTKRIRGMDEQVERIVEAHPEAALLQQPKGVGLLTAVAFVRSIEDASRFKHSRQVGAYFGLVPKLDESSDVSPQLRITKAGDPLVRRYLVSAARYILGPFAQPCDLRRYGEVIASRGGKNAKKRAAVAVARKLAVMLHRLWVTNAEYDPNWSQTHRAA

SEQ ID NO: 273758 - protein, 375 aa, unidentified
MRKSSILFIGMDVHKESIEIAIAEDGTNGEIRRYGKIGGTFDALKKALRKLVSQGKTLHFCYEAGPCGYELYRYLTGEGHVCVVVAPSLIPKKPGDKVKTDKRDAVQLARLFRAGELTPVYVPDREDEAIRDLSRAREDAMLVQKSARQRLKSFLLRHNIRYQGKANWKEKHLRWLADEVRLPDPAQQVVFQEYVNTVTEAAQRMERLVGEIQHYVECWRLYPVVQALMSMRGVQMIVAVTVIAELGDLTRFENPKQLMSYLGLTPCEYSTGERQRRGAITKTGNRHARRILIEAAWSYRYLPKVSPEIQRRQENLPLPIRDIAWKAQLRLTKRYRVMSRRGKPPNVVAVAIARELAGFMWAIAQAVPLSKSSQT

SEQ ID NO: 273759 - protein, 419 aa, unidentified
MNQSQNTSTISLVHPVCCGIDVHKKSVSACLMFNDAKGKESSIVQEFDTFTDSLMELRDWLLEHECPVVAMESTGVYWQPVHNILEENAQVILVNARDIKNLPGRKTDIADSKWLAGLLRYGLLKGSFIPPQHVRQWRALTRLRTKHVQTLNDYKRRTHKLLQSANIKIDSVLTDLFGATGRRLMALLADPQREITLQDLHEAVHGRVKKKVPELYRSIQGHFTAEHAFLLQSLLRSVEHHEQEIKILNERLNELMSSYETILQELDAIPGVNEVIARVILAELGSNLDHFPTAQHLASWVGVCPGNNESAGKRKGGRNPVRGHYLKTILVEAGWGAIKKKDSYYKEKFYRLRARRGAKKAILAIAHKILKAVYHIMKFGTPYKELGAEYLQEKTKKANLRRLKQQAAQLGMKLTPIEA

SEQ ID NO: 273760 - protein, 338 aa, unidentified
MTQHKIIGIDLAKNIFFLFEINHKGKNLSRKKLPRNKPLNYVASQSPCIIAIEDCSGAHYWAREFVKFGHEVLLYPPQHVKNQRRKQKNDYNDAEAIAELALYQRHPAVPHKSIEQQDIQSLIRMRRLCVTERTRLINQVRGLIAEYGIVLPKGKTSFRKAIPEVLEDAENQLSPILRELLSRQYERYLYIDEQISWFEDKLNQTVKQFDNAKRLMSIPGFGPLTSQAVAVWLGSGKQFKTGRDASAAMGLVPRQDTTGGNVTLLGITKQGNTYIRSLLVHGARAALRRAKFKSDKLSKWMLELQERRGPNRAAVALANKLMRIAWAVIAKNEEYQPA

SEQ ID NO: 273761 - protein, 322 aa, unidentified
MTTSPLGIDISKRKFDARLVREGGRLRHRVFPNTEAGFSQLSAWLSKHQVERTHACLEATGTYGEALATYLHEAGHTVSVVNPAAIKAYAQSRLSRAKTDKADATLIAQFCHERRPPAWRPPAAEVRDLQALVRRLDSLAEMRQMEANRLEVAATAAVKESLAGHLAYLDQEVARTEELIRSHLDSHPGLRGQRDLLLSIPGIGGTTAARLLAEIMDVKLYESARQLAAFAGLAPRLHESGSSVRRKARLSKAGAPRLRKALYFPAVAATKYNPYVRDLSGRLRSRGKCPMQVIGAAMRKLLHLAYGVLKSGKPFDPELQTA

SEQ ID NO: 273762 - protein, 347 aa, unidentified
MAHYAGLDVSDKETAIHVVDGAGKTLWRGKRPSEPDALASALRRHAPELERVGLETGPLAPWLYHSLKQLGLPVVCLDARHARTATALQRNKTDAHDAETLAQLVRTGWYREARVKGWAAHLIRRLVGARAQMVGISLDLSNQIRSTLKTFGLRASGGAGRAFEAKVHVALEGRPEVASVIEPLLAAWRAVRDQVAALDRRLIKAAREDATCRLLMTCPGVGVVVAASYTAAVEAPAHFPRSRSIGAYLGLTPRRHQSGEVDRNAGISKRGDKLLRAYLFEAAAALLIRVQRGSALKTWGADLAKRLGFKRAAVAVARKIGVVLHAMWKTGKPFEAWPSSDSAAAAA

SEQ ID NO: 273763 - protein, 422 aa, unidentified
MNEQEVIGYSVYVGIDWADSKHDICICPNDSDTREFDVIRHRAEVIDAWVKDLHERYGGRIAIAVELSKGPIVAALQKYDFIDIFPVNPVTLAKYREAFQPSRAKDDPTDAELAVDLLLRHPEHFKVLKPQSTEMRTLATMVEQRRRLVNDQGRITNRLRCALKQYYPQVLEWFEHIDTPLFCAFVKRWPTLTQARRARANTLKQFFHEHHMYREDVVERRRRSIKAASPLTLDEAVIVPYRMQALVLVEQLELMFKAIDQFDDEIAKLASQHPDYALFQPLPGAGPSLTPRLMVAFGEQRERFSSAGDVQKLSGIAPVTERSGQKHWVHWRLQCPTFMRQTFVEWAAQTINKSYWAGAYYRQQRAKGSTYQAAVRSLAFKWIRILYRCWQTGVVYDESRYLKALERRGSPLVKRQEMLESA

SEQ ID NO: 273764 - protein, 584 aa, unidentified
MLGVGIDWAEEFHGVALGRPGDGVFDEIHVDHTPAALDALIARIVALEPDAAEVRVVIETRHGLLVERLVDAGFTVLPVNPDLIARRRGPAKKKDDAEDARIAGRLALDRFTDLRAQRDARRLLNRLRADLIATFPAALAIAGDDMAAPTFLKLLQRWPTADALASAARDELEAFARSCRHGWPDRFTDKVTAALAADQLAAKPYLVRAKADTIRLAAAQLLLIHTQRHAWEKRMGALLLGAPREGRAHQPGDDRGPAVPGGEIYLSFPGLGDRLAARIAAEIGDITTFTTANARQCYAGKAPVTRRSGKSELTVATRLACNRFLADAVQQWAFTSLTKSGWAREFYDAKIAIGNNHHKALRALGNRWLEILWHCLTHGVAYDEATHVANRNRALGRLNEQRRPPETGVDKGCLIGWPPDEHWICSSVPKKITFGGSQPKAAAAGMYGLMRHCAASSATSVWARRLKAPPPYSAGDAMHHSPACRALRRASSSTSGGSLYASKSSPSSAGWISLRMKSRTVCWRARSSSGSSQLPGIGFTFLVCSSTRCVALRSAARPRGTAAVQLRCRPPRRAPRSRVPPFQG

SEQ ID NO: 273765 - protein, 410 aa, unidentified
MEIIVQCCAGLDVHKDSVEACVRRMEPEGKLYHQIRHWGTATRELMAMADWFKAEGVTQVAMESTGVYWKPIFNILEGEFEVLLVNAQKWKHVPGHKTDVQDCQWIAQLLQHGLLKESFIPPRWQRELRDLTRQRAQVIGEHSRISNRIQKVLEDANIKLGSVASDVVGVSGRQMLQAIIGGESDPAQLADLARRRLRGKIPQLQEALYGKISEHHRWMLALLWDPLAAAEAFIARLDERIAQLTRPQQPALEKLDAIPGIDRRVAEVVLAEIGPDMSPFPSHAHLASWAGVCPGNNESAGKRRSGKTTKGSRWLRQAWVQAAWAASHKKDSYFQAHAHNLMRRRGRKRGLVGVAHSLLLVIYHILHDGTDYRDLGRDFLDRIRATHLIRYHLKQLQQLGFTVTLAPAPA

SEQ ID NO: 273766 - protein, 362 aa, unidentified
MLYLGCDVHKNYTTMSFITEDGKVLDTSSFYNDIKELKSLLGKFPKEEFSAVLEAGLNWGVIYDMLDSLSEVKNVSLAHPPKVKAIASAKIKTDKIDSKILGQLLRTDLIPEVWIPCKETRMLKDIVRFRAFTVRIKTMIKNRIHDILRKSHINPPEVKDIFGKYGRMWLEDIELTDKRADKLLRYHLKLKDTFEEMEIELKKWINKEMKTNEDLKLVKTIPGIREVFGPVIVLEIDDINRFPDPAHLHSYSGLVPSTHVSGNTSYHGRLIKGNRWLRWAFIEGAHTSVRVSPYFRKYYDSVKRKAGSQAASVASGRKLATIVYKVLKEKRPYIEEYRIKQNIGRSPSVRPSGGITSRSFQE

SEQ ID NO: 273767 - protein, 416 aa, unidentified
MIDHETFTWFAAIDWGTEKHQACVVDVRGGIVGERAFSHDGAGLALLCDWILSIAGNATIVAVAVEVPHGPVVDALLDRGLAVYAINPKQLDRLRDRFSVSGAKDDRRDAYVAADGLRTDRHLFRRLQIADPRLIQLREWSRLAEELQQERVRLSNRLYSQLWRYYPQMLGLSDDLAAGWLLDLWTMAPTPVKAMHLRKTSVVQLLKRNRIRRIDAETVLRALRGPAINVADGVAEAATIHIGSLVTRLRIVGRELHDAMRKLDELCACLDEPSPTAAEHGGSGRHDVKILKSMPGIGKIILGILLAEASGPLSRRDYQALRTLSGVAPVTKQSGKSRMVVRRYAAHVRLRDAVYHWARVAIQHDPRSHSRYVALRQRGHSHGRAIRGVADRLLALACTLWQRQTVFDRDFSRGRS

SEQ ID NO: 273768 - protein, 312 aa, unidentified
MTPSIIGIDISKDRLDVHRLPDGAAKRFTNDMAGHAALLDWLAQTRVARIVYEPTGAYHRALEQALAAKGLPLAKVNPRQARRFAEATGKLAKTDRADAAMLARMGLALAPDTRPLPSQILRDLKELHLARQALMKDWTAAKNREKSLRLPLLKRQNQKRQRQIETQIAAVEAEIASRIAANAELAERLAILESIPGIAKITACALLIEMPELGTLDGKQAASLAGLAPLARQSGRWTGRAFIRGGRASLRQALYMPALVATRFNPQLKAKYHQLITAGKPTKVALTAIMRKLIVLANALLRQRRNWDENPA

SEQ ID NO: 273769 - protein, 400 aa, unidentified
MLSIGIDVSKGKSTVCGMKPGGEIVYTPFEVQHTREGMSELLSLLRGSGEEVRVVLESTGSYHCPVVAALLENGIFVSVVNSLRMKRFCSQSIRRVKTDQIDAMQIALYGLAYWQELQPTRLPENTYRELQLLARQYYQMTSLLIKAKVDFNALCDQVLPGMQELMNDHAGRHKLSDFVLRYHHTAHILKMGETRFRKDYCKWAEKKGYRNRERMAALIFATAQNGIPVLPNAPSTQIVITEAIRVLHTVEASRDAILTQMQALAKTLPEYSLVREMPCIGDTLAPRLIAEIGDVRRFHSKRALIAYAGIDAPPYQSGKFCANNRHISKRGNRYLRKTGYEVMQSYVMHKPANDPIFTFIEKKRSEGKSGKLAMVAGLNKFLRVYYGKVTELYRSLPAIE

SEQ ID NO: 273770 - protein, 387 aa, unidentified
MYYIGIDISKFKHDCAVIDDSGEIVTPSWSFTNDAEGFSQLKLLLNSLDTETGIGLESTGHYGMNLKLFLESNNFSFMEFNPLLINRFVKSKSLRKTKSDSIDCMMIAHYLMTVEYKPYPSSFYHTEKLKSLTRFRDSLIRLRSRQLVELTNILDKVFPEFKPFFGSRFSVTALYILSNYSSPEKIANMNSKSYEALRKLSRGRFSTVDFAKLKQLAKNTIGTTEDYLLLQMQIVLDIYRQLDSKVDETEVSIKECVSDMNPPMLSVPGIGIESAAVILAEFGDFSKFKNASQMLSFAGLEPGYFQSGTSETTGKMVKHGSSYLRYALMNCAQTVVNYEPTFAMFYSKKRAEGKPHRVALSHVVKKLLRVIYTLQTKNIAYDADFVR

SEQ ID NO: 273771 - protein, 311 aa, unidentified
MDHFAGLDVSVKETSVCIVDDTGRIVREVKVASEPEALLPVPKNPAYHFKRIGLEAGPLSQWLFGALAEAGLLVIRVETRHMRAVLKARINKTDRNDARGIAQMMRAGLYHPVHVKTLRSQKLRMLLTHREARIQELVENLPDLAVLVEPLLVVRRVLREQIGILHRRLLAIVRDDEVCRRLMTVPGVGPVVALTYCATVDVPARFRNSKAVGVVFGLTPSKYQSGEINRTGAISKCGDEMIRMMLYEAAKVMLTRTNKWSWLKAWAMKIARHRGMKKAIVALARRLAVIMHRIWVDGTEFRWTREETAAA

SEQ ID NO: 273772 - protein, 342 aa, unidentified
MEQYVALDVSPKEISVCIIDSKGEVVFEGKTAAEPATLVELIRSKAPQVKRVGLETGATSPWLFHALTAAGLPVICMDARHAHAALSMRPTKSDRSDARGLADMLRMGWYREVHAKSITSHEHRTILGARHQLVTMRSELDAQIRGILKTFGLILGTGNKDTLIQRAEELAAGHPVLSGLVAKLAEVRRHVTSQITAIDRDIRHLVHTEPTLKRLISVPGVGPITALAFLSAVDDPSRFKHARDVGPYLGLTPTRYQSGETDRQGRISKCGDTFTRTCLYEAAHVLLTRVQRFSPLKAWGMRLAKRIGGRKARIAVARKIAVILHCIWTDGTEFWWTREKAA

SEQ ID NO: 273773 - protein, 390 aa, unidentified
MTRRRQLRAFAKHLPVADGVDGPYGISCARMRLSKTHSQEPSMSQIIRIGMDTSKHIFQLHGVDASEQVVLRKRLSRKAMLEFFTKLPATVIVIEACGAAHYLARELGKLVHTVKLIAPQLVKPYVPRNKNDGRDAEGLCEAASRPRMRYVPVKTAEQQAALMLLGVREQLVARRTQLSNTIRGHAAEFGLIAAKGLDKLAAFLATIKQDDRVPALARELFAMLARQYDQVQVELKAVEAKLVAWHRADAMSRRLAQIPGVGPVTAAALVMKAPDPHAFRSGRLFAAWLGLTPKDHSTAGKTRLGKITRAGDERLRQLLVVGATSVVKQAMAKDSGPHWLVELLKRKTPKLAAVALANKMARIAWKLMTTAQEYDSARLNARADQAPAAA

SEQ ID NO: 273774 - protein, 388 aa, unidentified
MIYVGIDIAKLNHFAPAISFNSEILLEPFKFTNDYDGFYLLLSNLAPLDQNSIIIGLESTAHYGDNLVRFLISKGFKVCVLNPIQTSSMRKNNVRKTKTDKVDTFVIAKTLMMQDSLRFMTLKDLDYIELKELSRFRQKLVKQRTRLKIQLTSYVDQVFPELQYFFKSGLHQNSVYALLKEAPTPAVIASMHMTHLAHLLEVASHGHFGKEKARDLRVLAQKSVGVNDSSLSIQITHTIEQIELLDSQLFHTELEMANLVTCLHSVIMTIPGIGFINGGMILGEIGDIHRFSEPKKLLAFAGLDPSVHQSGNFQAQRTRMSKRGSRVLRYALMNAAHNVVKNNTTFKAYYDAKRAEGRTHYNALGHCAGKLVRVIWKMLTDEVEFNLE

SEQ ID NO: 273775 - protein, 422 aa, unidentified
MKYARIHVLPETPPGGLTAGIDWGSADHAVCVVDAAGQVPARFTVAHDRAGIGKLIAGLRAAGVSEAAIERGDGVLVEALLEAGLTLVVITSRQMKNLRSRYGSAGAKDDRFDAFVLADVLRTDRARLRPLAVDMPATAALRAVVRARRDLVAHRIAACNQLRAHLAAVFPGAVGLFAALDSQISLAFLARFPTQDAVDQVSEDDLAAWLGTLPRRGNAPRPGQLHARLHSAARGTAGADAAARAAITSALVATLITLAAQIKALEAEIAAQLAAHPDAHIFTSLPRAGTVRAARLLAETGDCRARFPDPESLAGLAGVAPVTRQSGKHISVGFRWAVNRQLRDAVCDFAADSRHASCWAAAIYDAARARGKDHPHAVRILARAWIYVIWRCWQDGTAYDPAKHNALQRVQAEAAAGSGADR

SEQ ID NO: 273776 - protein, 348 aa, unidentified
MKYYTENHRYYCGVDLHSKNMYLCVMDSDGKILIHRRIGNDPKYFLKLLHPFNDDLAVCCESTFNYYWLYDVCCTNNITFILAHALNVKAIHGAKTKNDKIDSEKLSRLLRAQLIPIAYSYPQEMRAARDLMRRRTHFVCSRAALIGHVKIVNMQYNLPSLKIDMRYPSKHEKVLKQFKFDENIHSSVKADLDLVCSYKTVISNLENKILEKAKAHKKTDLDILLSIKGVGKIISLTILYEINNINRFSSVQNFASYSRLVKCPHTSNGKKYGYGNAKMGNPYLKWIFSEMVISVPRYNPAIQKKLERLEKKYGKSKGKTILAHKLGRAVYYMLKNKEDFKEEKFLQT

SEQ ID NO: 273777 - protein, 342 aa, unidentified
MIYTMIGVDLAKNVFQLHGASMSGEVKFRKKLSRPQFRKFMEEQPACIVVFEACGGAHYWARELTGQGHQVKLIAPQYVKPFVKRQKNDAADAEAIVIAAQRPEMRFVEPKNNEQIARGVVFRSRDRLVRQRTEQVNALRSVLYEQGLVFPTGVRQVKKIAEFLEQADNGLLRLIQEECEELLASISDLTTLIEAKTLKLKKLSKESEVSRRLQTIPGVGPLTAMAIEAFAPSMEIFRYGRDFAAWLGLVPKQHSSGGKARLGKVSKEGQVDIRRLLIIGAMSRISWMGRKSIQDGSWLDRMMKRKPKMLVAIALANKMARAIWAVLTKEEDYRDPAKTVAA

SEQ ID NO: 273778 - protein, 465 aa, unidentified
MSKSKSGPVAKQKGKSVDWKAVEIVHPDAAGIDVGGSEHWVAVSPDRDPEPVRRFGCFTADIREMAKWLVEKGVRSVVLQSTGVYWMPVFEVLEQHGLEVYLVNAQHTKNVPGRKTDVQECQWLMKLHSFGLLNNSFQPTNEIRIARSLWRHRGNLTTEAGTAVQRMQKALTEMNVQLSNVLSDISGVSGMRIIAAILEGERDPWQLASLVQPEVKASAEDIAKSLEGTWREELLFVLSQHVELYRIYQKKIGDCDLQLQAHLKTFAPKADLQTQPIGPKPKGKKGSRNAPAFDLRTELYRITGIDWTQINGVDVLTAQTVIAEAGADLSAFGSEKQFSSWLGLCPTNEQSGGRVLNRRTRKVVNRASVAFRNAASTLIRSQSYLGAQYRRLRTRLGAPKAITAMARKLACLFYRLIKHGQQYVDKGIEHYEAKYRQQQIQSLAKRAKKLGLQLLLADNPSPTGA

SEQ ID NO: 273779 - protein, 315 aa, unidentified
MYYLGIDVSKKTIDCCLISDSIFYERRFDNIEDGFRRLDDWIQEYTTETVHCCCEATGIYHEAIAAHLRQKHIVSIVNPSKIKGFREAEQTRTKTDRQDARLIAEYCRRMQPKEWQPPTEEQKYLQAITDYIARLKQQRAAEQTKHQTAPDTIRHHIQTTIDHLNRLITTVQNELKDFYRQNPIYNEKKNRLKTIDGIGESAASVLLAKLTRYDFANQNQFAAYLGLDPKIKDSGTSVKGKPRISKQGQKNARKALYMPALVAYRMNAFPAFTARLKARGKPPKLIIVAIMRKLAVIAYQLYKTGKDYDRSRYRN

SEQ ID NO: 273780 - protein, 361 aa, unidentified
MEHTTIAVDLAKSVFQVAVSHKAGHVDAERRLARERFLEYLAKQPPATVLLEACGSAHYWARRLQPFGHTVRLLPAHDVHRYVRRNKTDRTDTKALLEAGRNTEIHAVPVKTVDHQAIASLHRLRSTWLATRTARLNTVRGLLREFGLVIPVGAQHVIPQVRALLAESSDVPDLMRPSLASACDEIEGIEKHMRAVERQLTTLARDRDDIKLLQTVPGVGLLTATALVALVGDARRFPTSREFASFLGLTPREDSSAGRRRLGAISKQGDGYLRMLLIHGARSVLLRAKSAGVPTQFQAWARATQQRRGHNVAAVAVANKLARIVWAVWTHQRPYDADYRPTVTRQTSITSSPQEDCTELN

SEQ ID NO: 273781 - protein, 448 aa, unidentified
MPRKKIFLETSATVPPRKENRNDLCSHRTVCRNRRRQEVFGRVCHGRAVRGEPRVEIRKFGTIRVELEGLRDWLKQQEVTHVVMESTGSYWKPVFNALEDAVKVYLANPQEVKNRKGHKTDNKDGWWLAHLLRHAMIHPSFIPPRTIRELRDLTRRRKRLLGAGTSERNRVQKVLEDANVKLGNVLSDLFGVSGQLMLEALLQGQAKPEEIAHFAKGRAKKKIPEMIAALEGHQMSDHHRRMIRYSVDHMGFLEGQIEQLDQDIVARIREAGLEPQWQLLQSVPGVQETSAAEILAETGTDMTQFPSEKHISSWAGICPGNNRSAGRNKSSHTTGGNRWLRGTLTECAWAASAKKNGFIKDKFRRIITKSGGKKPPAVVAIAHTLLILIYQALLTGQPYQDKRAPVLDQRQKQRLIRHHIRRLGKLGVAVCSARPGSSATAAKTPTGT

SEQ ID NO: 273782 - protein, 316 aa, unidentified
MGHELYIGIDVSKDQFDVASEPSSFAGSYDNDAVGIRALADQLRLLRPRLIVLEATGPYHRPLVSALKAAGLPVVVMNPRIVRHFAQGKGLLAKTDRLDAGILALYGACMRPIVRELPDALGQELQMLVARRRDLMDMITAEKNRRQGAGAWLTRRLEKHLRDLQGEVERIDARIVRLLQSDARRWESYRLLLTVPGVGTVTAFTLVALLPELGRLSRQEIAALVGVAPFNCDSGRQRGTRHCWGGRAPVREVLYMATLTACTHNPSIRAFHHRLHHQYKKPFKVVHIACIRKLLCILNAMLRDRAAWRPELAAAA

SEQ ID NO: 273783 - protein, 353 aa, unidentified
MKYVGVDWAYRRAQLCALAPGGEVAGEGGIAADRDGLARLVLELGDEVKACLEMMSGALWVRDELVACGWQVQVADARKVKTVAPLAAKTDKVDARLLAELCRRELVPGLWLPSLNERALRERLRRRMHLVRLRTSAKGRIFGLQTQWGVRVSLARLRRADGLSLLERAGVPEVWRRSVGECLALIDFLDARIAPLEAELRPFAQADPRAVLLDTIPGVAELLALTIAVEIGEIGRFTRPEKLVSYGRLAPRVHQSGDGRARSGPLSKSGSRLLGWAAVEAAQQAWRESNPWHELYLDVGRRSRHTNAAKAAVARKILIAAWHMLSRNEPFKPASRTTAGTSVPASSRLALAA

SEQ ID NO: 273784 - protein, 337 aa, unidentified
MIIIGCDFHPSFQQIAMLDTETGATKEQKLMHASGEAERFYRELSSAALVGIEAVGNDQWFVQLLQKLDHEVWVGDAAQIRASYVRKQKTDKRDAKHILQLLVEGRFPRIWIPCAEMRDHRQLLVHRHKLVQIRTRVKNELQHLMLNQGMQKRQKLWSAEGRATLASLPLEPWTDRRRGDLLNLLAMLDGQLEKLNDAVAQVASQYPDVQLLMSQPGVGAVTALAFVLTIGEVRRFQRGKQVASYLGLIPREYSSGGKQRMGGISKQGNRLLRFLLVEAANIAVRFDPVFRKEYLHRCHQKHFTVAKVAAARKLAIRMYWILRTQTPYPNVLSSRVA

SEQ ID NO: 273785 - protein, 359 aa, unidentified
MGKINERCAGIDVGKRFLLCCVLTGAANEEPSSRTLRFDTTVAALTRLREWLLAERITHVVMESTGSYWVPIFNILEDHFVVVLANPEEVKNRKGHKTDRKDAEHLADLLRHDHLRSSFIPPKAVRELRDLTRRRLQLTQDAIRERNRVEKLLEHVNIKIGNVLSDVFGVSGQNMLLALIDGHATPEQIAGLARGQAKRKIPQLIEALNGHGMSDHERFLIRSCLRHLACLEEELEEVDGEILRRMQTPPFQGPFLLVQTVPGIGQLAAAAILAETGTDVSTFPTVEQIASWAGLCPGNRESAGIRKGSQTTKGNPYLRTTLVQCAWAATRKQGSVFQARFQQLAPRRGQKRAIVAVAH

SEQ ID NO: 273786 - protein, 372 aa, unidentified
MGHHTEAFVGIDTSKSCNAIAIADGGRGGEVRYLGEFSATEAAIRKLVAKLAAKYRDLMFCYEAGPTGYGLHRLLKSLGHECLVVAPSLIPKKAGDRVKTNRRDAVSLAKLLRAGELTAVWVPDERHEAMRDLSRARLAVKKDLQGKRQQISSLMLRLGRIFPGKTTWGPAHMKWLMAQKLEHREQRIAFEELLEGIRQESERVERLENAIREAVPEWSLAEVVVALQAVRGIDLIAAVGVLAEIGDLSRFQNPRELMGYLGLVPSESSTGDKVKRGGITKAGNGRARRILVEAAWSYRYPPRVSRDKQSKVEAAPRRVREIAWKAQTRLCGRFRSLERKGKRRTVIATAIARELSAFIWAINRELMAPRQA

SEQ ID NO: 273787 - protein, 459 aa, unidentified
MNHPTKTIRKTPTSLPTLQPMVAGIDIGSSQHWVAGPPKEDAEPNVRVFGTTTPDLTALVDWLVKQGVTSAAMESTSVYWIPLYELLESRGIQPVLVNARQLHHVPGRKTDFQDCQWLQLLHSRGLLRGSFRPTEAITRLRALHRQMGNLVAARSRYVQWIQKALDQMNVQVHRAVADLTGKTGMAIVRAIVAGERDPVRLARHRDARCRKSVEEIARALVGTWREEHLFNLTSALRLYDAIEQEIASYDARMLAELEALQPPERQDQEPPRHPNPAKEKSIRQQGGQALRTTLWRLAGVDLMRIEGIGPGAAQTILSEVGTDLSAFPSESHFVSWLRLCPRTPISGGKPVKKRHNGLGANRIAGVLRMAAVSVQRSKTALGATFRRIARHKGAAVAVFATARLLAQLVYRMLRHGQDYVDIGEKAYEAKYQSRRLAALKEAAKSFGCTLVEEDPALAV

SEQ ID NO: 273788 - protein, 403 aa, unidentified
MGLTVGLDWASKEHAVCVLDAAGAVRSRFAVAHSAAGLSELVVRLARFGAPHTLPIAVERPSGLLIDTLVEAGHPVVPIHPNALKASRPRYRAAGSKSDAEDAFILADLLRTDGHRYRVLRPLTDETRGLRALVRTRDDLVATRVALANQLRELLASFWPGAAAIFADVDSPIALAFLARYPTPESAERLGEKRLAAFLARHGYSGRRPVVELLDRLRAAPPGRASEAESEAKGHLVRALVRVLEPLVTELQQLTAAVEHAVAVHPDGAVLMSFPRTGKVNAAQILAELGDDRARFATPEQLAAEGGVAPVTSESGKHRAVTWRWACNKRLRRALTCWADNSRHGSLWAAAAYARAVARGCDHPHAIRILARAWTRVLWRCWQDATPYDPTRHGGAKPFLNAA

SEQ ID NO: 273789 - protein, 395 aa, unidentified
MNAFAVGWDVHRKFSKVSLEQMTAEGEIQVIERARLEHEDRAAMRQWLTRVPKGTPVALEAAYGWPWIADLLEEMELEPHLGHPPAIKVLAKTEAKGDRIDADRLGKFQLRGILPEAYLATPEVRTQRERIRYRMALSGLRTGVKNRIAAILHRLGILHSFSDLFGKAGRRFLDRLDVPEASREVLFGYLELLDRISTLIAQVEDWMAAHLKANETVQLLATIPGIGLILAHVIYAEIGEIERFPSRRHLNSYAGLAPVSDDSADRHGRRHCSPACNHALRWALIEAVTGVLNGRASRGQRLRKLYCRLTHGGQSNKNQAKVAVARELSQLVYVIWKKRTPYTDAAPLRPGAATDHRKVIDNPRKQLRLKQAMRSDQPRASMVRCRRKAVSQTLK

SEQ ID NO: 273790 - protein, 339 aa, unidentified
MTVKTVGLDLAKDVFQVHCVSATGRRIINKKIKRAKLIAFFETLPRCVVGMEACGSSHHWARELSKLGHDVRLMPAAYVKPYVKRGKTDAADAEAICEAVRRPTMRFVEVKSEDQQAVLAIHRARDLVVRQRTQVVNMIRSILREFGHILPTGIEAVSKFAREHGTEEQLDMPEIADGILGVMCHQLNGLNARVDGLTKLIEQHAWLDADARRLMRMPGIGPITASAVVATIGDAKQFDTGRDLAAWLGLTPLNKSSGGRERLGRITKKGDRYIRKLLIIGMTSRALMAKNKPEKADIWTAKLLDEKPFRLATVAMANKSARIIWALLTKRQEYRQPIA

SEQ ID NO: 273791 - protein, 391 aa, unidentified
MDGSDSGPSRAGAENLHYVDVSEMSLKSWLVGAIVPGVSRAPLKKLEADEAGLLRQLHRWRDEATKAGRHIKRLVVAFEAGRDGFWLAWWLRARGIEAYVIHAASVAVSREHRRAKTDRLDTEMLKRAFLGWLRGEPEHCQMAAIPTLAEEDARRPNRERECLVRERTRIVNRVKSALVRLGVRGFNPKLRKAAQRLDDLVTPQGEPLPPNTLAELRRDLARLALLREQIGAIEAARLERLEEQVSSEGPHAMVRLIAQIVGVGIETADMLVHEILSRNLRDQRALARYAGLTGSPDESGSRRREKGLARAGNGRVRRGMIQLAWRFLRFQGDSALAKWYEARTMVAPNTRKNPNTRKKMIVALARKLLIALWRFVTTGVIPDGIALRAAA

SEQ ID NO: 273792 - protein, 330 aa, unidentified
MRILHSTDQVTRFIGIDVASRSFVAAVDGRRPRSFGMDETGVQELLDWLPGNDDIARMTAVMEHTGAYSRCLAAMLAEHGIDSVLVDPRRVRDYACSQGIRTKTDNVDARAILSFAQHFQPVNRVQRSMAEQQLSVLLGQRSLLVRQRAMLKRQLASVAMLPGNLEAGNEAMLAVQSTLDDSIAELDRLIDCLIREDERLSKAFAILMSIPGIGRVNAAMLCARLSVIEDCSAAELTALVGLSPKHRQSGNMQGRSRIDKQGWSGLRRTLYMSALAAVRSDETLAEFRQRLIDRGKPKILAAVAVARKLLVISHALIRKQEKYVTQSTAA

SEQ ID NO: 273793 - protein, 439 aa, unidentified
MTTPSLPVLDPSAAAIDVGSEQLHVSVAGGPPKVFGTMTGQLHQMRDWLKAQGARSVAMEATGIYWLCPYEVLEQGGLEVVVVNGKYVKNLPGRKTDMSDCQWQATLHAHGLLKPGFVPSAHIRRLQDYIRVRTDHITLAATHEQHMQKALDRMNVKIHEVISDLTGESGLSVVRGILDGLRHPQALLALCHRQIQEKKAERMLAALEGTWKEEHLFALRQAYELWKFYQEKISECDEAIEKVLQEIAGPEDPAKPAPPATKRGGVNRPGIVGLHSLLWRLCGNKDLTVLPGVADYVLLQLLAETGTDLDEHWKSEKHFTAWLGLAPGSRQSGKRRGSQKRGRNRAGRLSCVIARSVGRSVDKALGGFYRRLKGRRGGLVANLALARKLAEMFWRLMVHGITYVEQGLKKYEEKVAQTEQRLLQKLARKYNMVLQSKAA

SEQ ID NO: 273794 - protein, 321 aa, unidentified
MDKSTIFVGIDISKDTIDIYDAFNGHLQIENNSKGFSKFGKILSADHWCVMEATGCYHQRLAIYLYERGIRLSVVNPLVIKRYVQMKLKHVKTDRSDALMICGYASEQPLAQWSPEDPYIVECKRYQSAIRLYFKQRTALKNMLHSLSTSGQGNGKLVRSVKRQIKHLGKEIDLLEQETEQLIRANEQGLYTRLNTIPGIGKKTAMILIVSTNGFRDFESSSQVSSFFGLAPAERRSGTSIRGRTRINKIGDPLLRNHLFLCSFTACVHNPQCRALYERITAKGKSKKLALIAVCNKLIKQAYGISRSGLDYDRNYVGRLS

SEQ ID NO: 273795 - protein, 456 aa, unidentified
MSEERTRSKPTGLPIIHPFAAGIDIGSRFHVVAVSPDLCDEPVQTFQAFTSDLQRMADWLMATGTKTVVMESTGVYWVAAYEVLEARGLEVILANAREARAVPGRKSDVNDAQWLQRLLACGLLRASFRPGRAIAELRAYLRARERHTDYAAAHIQHMQKALTFMNIQLHHVIASITGATGMSIIRAIVAGERDPDKLAAMRDVRCKESQETIRSALVGNYQPEHLFALKQALALYDFYQHCIEECDTEIEHAVAALNIDRPIPEAPLPKPKHRGKMPNTPAFDVRRALYQLTGTDLTQIHGIGPFLALRLVGECGTDLSRWPTAKHFTSWLTLSPGCKISGGKVLSAHTRKTSNRVTVALRLAAVTVGKSHTALGAFYRRLAARIGNAKAVTATARKIAVLFYNAMRFGMDYRDPGADYYEQQYRNRVIKQLHRRAAQFGFNLQPQDPLQKGGVS

SEQ ID NO: 273796 - protein, 370 aa, unidentified
MLDTTTFIGLDVHARSIKAVSLDVMTGEVRAATFGYDAGAVAEWVRSVDPGARCVYESGVTGFDLQKRLTGLGVDCVVGAVSKMIKPSADRRRKNDRNDAEFLARMLSVGNVVEVWVPDDECEAARDLTRALEDARDDLSRSKQRLSKFLLRHGLVFDERTPTGRRKGNWTRAHCSWIESIRFAEGADNDVLAYYVDAVRRAAEEKARLEGLVEAEARKPRWRKRVDSLRCLKGVDTASAADLVFEAGEFSRFRNARSFAAWVGLTPSEHSSGESDRRGAITKAGNKHLRKTLVEAAWHYLTCSGRPKDLAKGQAPDRGARRHAAKGVRRLVERREALLARGVHGNKANVATARELACWVWAVGLMAEEA

SEQ ID NO: 273797 - protein, 317 aa, unidentified
MSEVTTIKIFVGIDVSKSNLDVAINPSGEILRFANDPTSIESVVKKLRPLSPERIVVESTGGIEKPLVAALAEAQLNVAMVNPRRVRDYARAMGHLAKTDRIDCMVLAAFAANVDTRLTPLKTDEQELMSALLARRRQLVQMLIEEKNRLASSPTTLRKEIKAHIGYIEKRITRCDDDIDKLVTNSELWRAKDELLQSVPGVGRVVSHTLLAGLPELGTIDRKKIGTLMGLAPLNCDSGKHRGKRHIAAGRATVRSVLYMGTLTAIRVNPVIKAFYKRLVAANKPKKVAIIACMHKLITILNAMLKSNSPWRTIEQP

SEQ ID NO: 273798 - protein, 396 aa, unidentified
MSKKKSSVAGLGALYARVCGLDVHKKVVVACVRILDAKDGTVQSTLRQFGTMTADLVELRQWLAEARVTHVAMESTGVYWQPVFNLLEGHFKTWVVNAQHIKKVPGRKTDMKDAEWIAQLMQCGLLRPSFIPDRQQRELRDLTRQQTKLVQQRNAVDNRIQKVLETANIKLGSVASDVLGVSGRKMIEALIAGEKDVTVLAELAQRKLRDKIPQLQRALEGELNDHHRFLLRQLLGQYDFLEKEIASVSERLGAIAPPSFRAAVEQLDAIAGVGERGARALLAETGTDMSRFPTHKHFTSWAGQCPGNHESAGKRRSGKTPAANRHLDAVLTEMAHAAVRTKNSYFKSQYHRLAGRRGKKRAIGAVKHSLLVTVYFMLRDHKPYKDLGVDYFDKLN

SEQ ID NO: 273799 - protein, 345 aa, unidentified
MPIVGGLDIHRKQLTFDYLDTVTGEVRRGQIAPADRAHLRAWLARFAGRDDVAFALEGCTGWRYVAEELAAAGVTAHVAEPADTAFARGRKRHAKTDKTDSRHLRVLLEQGRLPQCWIPPAQILECRALLEAYHDLRREHTAWIERIHAVFFHQGAPRLGEGALRTDRGLAALREAAAVHLSPAGQLQVATALDMLAAIDARMDTLRGQLLHAARHLAGARALQAQLYGVGPLAGLAMTCWLGGAGRFSSSRKAVRFAGLDVTVYSSDGKRSPGHLSRQGPEILRWVAYEAGKTHARASAPGHDYYAAVKDRQGGKIAALAQARKLIRQACHILTEPGDDALTAA

SEQ ID NO: 273800 - protein, 389 aa, unidentified
MHRWAAGCSPLRSKTGLYLGTPFLPKGDAACKVGNPPEHVPNVSFNRNLNSTQRMNEIKPNPDLPAVGVDIAKAKFDACLWRARPLLKTFDNTPEGCTALLAWLAQHGVTQAHVCLEATSTYGDALARHCHERGHRVSLVNPARIKAFGQACGLRNKTDSADARLIAEFCDQQRPRPWTPPAPEVATLRELMRQWTDLSSWLAAQKCRLATAGESVRGFIEKQIEFLEEQIRAVRKTVNAHLRKHPALWRKVKLLETIPGIGRQNAARLLAELPAELETAREAAAYVGVTPRRNESGAIVRRSCLSRQGKASVRPGLYLAALNAFRFNAPCRALAERLLAKGMTKKAVVVAVMHKLLRIAFGVLKHQKPFDPKWAEAAFPSLAAPSAAS

SEQ ID NO: 273801 - protein, 355 aa, unidentified
MISNIKYIGMDVHTESISIAVRNAAGKIVMECVIETKASTILQFFDGLRGDLQVTFEEGTWAAWLYDLLRPHVGSLVVCDPRRNALLKDDNRNDRIDARKLSDLLYMNKLNPVYHGEHGLRALKELVRSYLTITRDLARVMTRVKAIYRSWGIPCTGKQVYAPRHREEWLAKISELGVRRRAEFYYQQLDALRVLRQQVRQDVLAESKKHRAWKRLCQIPSIGPIRAAVLLGILQTPHRFRTKRPLWKYSGFAIETHSSADHRSVNGQLQRKKKTSVRGLNENCNHDLKNLFKSAAVVASSKPGPFQEFYAALVAKGMRPEMARLTLARKIATIVLIVWKKGVCFDAQYLKPQTA

SEQ ID NO: 273802 - protein, 344 aa, unidentified
MDNHTQYSGFAGVDLAKKVMQIHFVTEDGEITDKPVKRADFLDFFRNRSKCLIGMEACGASQDWARKLETMGHEVHLMSPKAVKPFVSGQKNDHNDAIGIYKAMFNGVRRVPVKSTEIRDLQTLRRIRSQVTKDRVKEINHVRGLLAEYGIVMGKSLNAFNKDISSALEILKERGDVSPLVADELRTTVEAIKAKIERQKKLDREIEQLARGCKNYENFLKTPGVGPFTAAMLCVLLCDPSIFANGRRFAAYIGLAPRSRGSGGKNFVTSIPSKFNCDSESRAVLVECAQAIARCKNKSSWVEDILRRKPKKVALIAIANKLARQVWAMANKGENFKQRAILTA

SEQ ID NO: 273803 - protein, 428 aa, unidentified
MNEDELSRLKEFRQLKKQIQGSENHLVVGIDVAKDRHHAFLGTATGKTLVKKVIFENSASGFSELLARVEAVRAQSGLSGVVFGLEPTSNYHKPLGRYLISKGCHVVLVGGKAVKNNREILDERWDKHDTKDAANIADLVSRGKCFYYDRPSGQIEELRELHSLRARLKKEEQSLNLRIRNNLLAKHFPELDSFYTASERETLAIVRWCLNPQQIAGMPFDEFFKRVAPNARGIGQKLRLQKIHRLAHESIGCPVDSAVQLQAGLLVEKIKQVREQIVQVEQVIQQLCVQFPSYEHLLSIPGFGPYVASKVLATIADPRRFDTAKQVIRTAGYDLCADRSGKSSDQSVPVISKKGNSQLRYALYQAALIASSRHRFFMAYFARMLQGRERERGIRTKMRVKLAAKMLVIAWTLMKRGELFNPEYLKVQ

SEQ ID NO: 273804 - protein, 356 aa, unidentified
MNRTGSKPKNEGRPTVENCGIDLHLKSSEVCVVDEAGEASERARIPSTEASFRRWFGGRAPMRICIEASGLSPWVARILAELGHEVIVANAQRVRLIAESTLKNDRIDAETLARLVRMDPALLCPIRHRREETQRLRGMLRVRRTLVNSRTACLNTARGLLRSFGYRVPGQRPERLARALTTAKVPEVLCGLVAPLVATALELDEKVQALDGEVADVGRSFPEVARFQQVPGIGPLVALSYVLCIEDPGRFRNSRDIPSFLGLRPRMRESAERSHFGSITRHGDAEMRRLLVQAAHGCLRSRQDTELKRWAEQLAGRIGKKKAVVALARKLAVLFHRLWVTGEDYEALRTEVAAAA

SEQ ID NO: 273805 - protein, 338 aa, unidentified
MTTRISMLAIDLAKGSFQVCAIGADGAVLYNRVLSRPRLMTLLAEQPACVVAMEACATSHHWGRVAQSHGHEVRLVPAAYVKPFVKRQKNDKVDAEAIAEAASRPTMRFVAVKSAETQGRAVAFRTHQCLVRQRTQLINALRGHLAEFGLVAPKGPASLKVLETALADETSALPAAVCEMGTIYLEQIERLTDVIEQLAGELEAASKTDVQLRRLCTIPGIGPVTAGAVAAFAPDLDTFDSGRNFAAWLGLVPRQRSTGGKTRLGSVSKMGQTDIRRLLIVGAMSVIRWVVRKGGSANRWLAALVARKPKMVAAVALANKMARMIWAMTTKQENYRMA

SEQ ID NO: 273806 - protein, 374 aa, unidentified
MSKIARIGIDTSKGSFELHGVNEKDEVVLRRTVRRRQFLEFMVKLEPTVIGLEACGASHHWARELRRLGHRVMLIPPQAVKPYVSPGRKNDKNDAEAICEAMSRPRVRARLVPVKSVEQSASQMLMGVRDSLLKRRTQLCNTIRGHAAEFGLVAAKGLDKIEPLLARIAGDDGLPALAREMFGDLGQEHAELSQRIVQIDRKLAAFHRSNELSRRLMEIPIVGPVGAGLLITKIINPHGFRSGRLCAAWVGLTPKDHSTGGKQRLGGITRAGDESLRAVLVSGATAYIQQVRRGRIVPSPWLAALLERKPPKLAAVALANKTVRIAWKLMTSGGRYDPTHRVDREGPGASLYGGLRAEPLAPSPTAGHSHAVAA

SEQ ID NO: 273807 - protein, 356 aa, unidentified
MNAITIGLDIAKSVFQVHGEDAKGKVVLQKRLGRARMEKFFARLEPCLVGIEACGSSHYWARTLRALGHEVRLIPAAYVKPFVRRNKTDARDAAAICAALRRPDMRFVAIKSVEQQGWRGLERSRELLVKQHTQLMNCTRSQLAELGIVAAQGRRGFAELSGLLGGGEGRIPEAMAAGLGLLVRQIAALEEAIAALEKRIVAAAGEDAAMRRLVSIPGVGALTAHAIVAAVGAGKQFGSARDFAAWCGLTPREHSSAKKRRQVGISRQGDNRLRKLFALGASTVMRGVRAHDERATEWQRGILARRPVKVAVLAQAAKTARIAWAILQSGETYRRPVVAAQRPSATALVALAAAGR

SEQ ID NO: 273808 - protein, 343 aa, unidentified
MGKISMIGLDLAKNVFQVHGVDASGSVVLRRQLRRGAVEKFFAQLPPCTVGIEACGSAHHWARVIGGYGHQVRLMPPAYVKPYVKRNKNDGRDAEAIYEAVGRPTMRFVPVKSVEQQATLAVHTTRALLVRQRTMVANSLRAALSEIGIVAAQGIAGLRELMAKLEAPNEEVPEIMRAALLVLARHWQALDADERALERQIAKAARADREARRLMEVPCVGPIIASTVLAKVPDATVFRSGRDFAAWIGLTGRDHGTGGKHRPGRITKQGDRMLRALLISGASAYLRHQRTRGVSDPWLRDLLARRPYKVVMVALAAKTARILWAMLVKGEPYRDRASAPAAA

SEQ ID NO: 273809 - protein, 402 aa, unidentified
MNAVGIDVSKGKSMVSIMRPFGEVVATPFEVTHTVTELSKLAESLKDLNGETKVVMECTGNYFYPIAATLHEAGLFVSTVHAKIIHAYGNNSIRKVKTDKADSIKIANYALSHWLELQEYTPEEDIRFMLKTFSRQYSKYKKMKTMLKNNFIALTDNTFPGVNELFSSPPRKSDGREKWMDFAIKFWHCECVTSLSEKAFTERYKKWCKKEGYNFSQSKVEAIYTSACGHFYVMPKNDSTKLLITKAVDQINAVSENIAVIASEMKRLAEMLPEYSIVSDFYGVGDILGPQLMAEIGDVFRFRNKGSLVAFAGLEAPPFQSGKFESGNRKISKKGSPHLRKTLFQIVECYLIHSPANEPIYQFLDKKRAEGKHYYSYMTAASAKFLRIYYARVKEFLTNLDK

SEQ ID NO: 273810 - protein, 344 aa, unidentified
MTVTTIGIDLAKNVLQIHGVDGNGRCKLRKRIKRSQMTVFFANMPPCLIGMEACAGAHHWARILASQGHDVRLMPPQFVKPYVKTNKNDMADAEAICEAATRPNMRFVSVKTPEQQSLLSFHRARAGFVKARTAQINQIRGLLAEFGIVLPAGAVAISRHIPALLEDAENSLPVPFRRLLSSLYENVKQLSEHVEAMETAINEHFRHDELCKKIAAIPGIGVLTATAIVSTVGDGTGFKNGRQLAAWLGLVPRQYSSGGKNTLGSISKRGDAYIRTLLIHGARAVLSARKDKLKPESWLGRLLLRRNRNVAAVALANKNARMLWVLLNTDKEFSPEEVMGAAYM

SEQ ID NO: 273811 - protein, 283 aa, unidentified
MSHKSTPSTISTIGIDIGKNSFHLVGLDQRGAIVLQQKVSRAQLERRLVNVPNCLIGMEACSGAHHIGRQLAALGHDVRLIPAQYVKPFLKGHKNDYRDAEAIAEAVQRPTMRFVAIKTPEQMDLLALHRVRSRLVGQRTGVINQIRGFVIERGIIVRQGVVPLRKALPDILSSNNDALSPRMVNLIAELAQDWRRLDERIAAVSDEIESLAEQDEACQRVMTVPGVGPIISSAVVAAIGNGAGFTQGRDFGAWLEIARSWARSLSAATSICGRCSCRPHTSC

SEQ ID NO: 273812 - protein, 430 aa, unidentified
MMEEVDDAELVVERIAALDLGKAGLEACVRVPSPHRPGRRMQELRGYGTTTAQLLEMVAWLRQWGVQRAVMESTSTYWKGVYYLLEAEGFECWLVNAREVKNVPGRAKTDRADAIWLAKVAERGMCRPSLVHPAEIRRLRDLTRYRRALVQDRTREQQRIEKLLEDAQIKISSVLSELHGVTARAMMDALIAGQRDPRALAQLAKGRARKKTAQLEEALRGFFTDHHAAILRMMLDSTDRISAQIAALDARIQAEIGPFSGQAARLAEIPGVDAVAAAELIAEIGVDMTRFPSDAHLVSWAKFCPQTHESAGKSKSKGRGRGNPWLAGTLGRIAFANSRADTFLGARYRRLARRRGKQKAIVATGNSVLTVVYYLLSDPMATFCDLGPGYYESRINVHRRARDLVTQLQALTGQHIVIRDGKAVITDAAA

SEQ ID NO: 273813 - protein, 353 aa, unidentified
MKDKYVGLDLHQSSTMAVVHDEKGKAVMESILKTEAEAIRDFVKGLSGTIHVTFEEGTQAGWLYEMVKPLVAEMVVCNPRANKLLAVGNKGDRVDAHKLAELLRGGQLKSVYHGGSSSRQLKELVHNYDSLVSDTTRVMNRIKAIYRGRAIRCAGRDVYYRRHRDEWLEKLKEAGVRRRAEFLYQELDTLRKLRREAKQAMLKESRRHAAYPTLKQIPVLGPIRIAEILAKVVSPHRFRTKRQFWAYCGFAVVTRSSADYEFVEGRVQKRQRAPMTRGLNPNFNRRLKYVFKSAAVDGMHQEPFQSYYLRRVAVGMRPEMARLTLARKIAALTLTLWKKGEGFDELKIGESVA

SEQ ID NO: 273814 - protein, 420 aa, unidentified
MSSHPSDFAAVIGLDWADRKHDICLLEAGQLTPEFSVLEHDPVAIDAWAAKLKQRFGGRSVAVCIELARGPIVSALLEYDFFVIFPINPAMLAKYRRAFSPSRAKDDPKDAFLALDLFRHHFDRLSPLRRERPAMRALQRLVHNRRTLVDDRCRLINRLTYALKEYFPQVVRWFRDKHTDVFIDFVTRWPTLAAAKRAHRDTFVDFFNVHNVRSDKLIQRRVDAIKAARQLTSDTAVIEPHRLLAESLLAQIGVLSKAIARFDTEIDARAAELPDYKIFAALPGAGATLAPRLLAAFGEHRDRFPDAASVQKCSGIAPVVERSGNKSWTHWRFIGPTFLRQTFVEWVGQSIPHCFWAKAFYDSRRAKDVPHQVIIRALAFKWIRILWRCWYDRQPYDEARYLLALQKRRSPIIANAALPA

SEQ ID NO: 273815 - protein, 414 aa, unidentified
MRIIHENVAGLDVHKKVVVAAIIVHQADGTWLEARHSFGTMTGDLLELSDWLMGQNVTHVAMESTGEYWKPVFNILENTFDVIVVNAQHISKVPGRKTDQSDAEWIAELMQYGLLKASFIPPLGQRELRELTRYRSSFIRERATLVNRVQKVLESANIKLASVATNVMGISGRAMLAAIISGQANPEEMAGLAKGRLREKREELTRALEGRVKAHHRFVLTELLCQIDNFDETIARFDQEIEEYCRPFEEAVGLLDTIPGVGREAAEIIVSEIGTDMSRFPTADHLAAWAGVAPGNNESAGKRRSGKTRKGNQPLCTVLNQAAHAAVHSKSTYLSAQFHRLAGRRGTKKAIVAVEHSILVIVYHLIKRHEPYRELGGDYFDKRRPETTTNRLVKRLEQMGFQVTLQPTPAPLAA

SEQ ID NO: 273816 - protein, 343 aa, unidentified
MTKDTMIGVDLAKNVFVLHGASLMGQLQFRRRLSRQGFSRFMAQQPPALIVMEACGSAHYWAREMIRFGHEVKLIAPHYVKPFLKRQKNDATDAEAIVEAASRPTMRFVEPKSADQQSLAILFRARERLVHQRTELVNALRACLYEYGHVVPQGIRQIKRIEEILDASNSDLPDLLREECRDLLEQIAEKTVRINARTDKIKTLAAEADTARRLQTVPGVGPLTALAFEAFAPPMGSFKCGRDFAAWLGLVPRQFSSGGKERLGRVSKAGQADLRRLLIIGAMSRLNWMGRKSIPEGSWLAQMMARKPRMLVAIALANKMARTIWAMLTKQQDYQVPAAATVA

SEQ ID NO: 273817 - protein, 354 aa, unidentified
MSQTPNTAIAVIGIDIGKNSFHVVGHDARGAIALRQKWSRGQVEARFANMPPCLIGMEACVGAHHLSRKLASLGHDARLMPAKHVRPYSKGQKNDFNDAEAIAEAVQRPTMKFVATKTAEQLDLQALHRVRERLVSQRTGIINQIRAFMLERGIAVRQGIGFLRTELPTILATRTDALSPRMLRVIEELAGDWRRLDQRIEGLTGEIAALAHQDQACSRLMTVPGIGPIISSAMVAAIGTGDVFSKGRDFGAWLGLVPKQISTGDRTILGKISKRGNRYLRVLFVQAAWVVLVKIKDWERYGLKSWIEAAKKRLHHNVLAIALANKLARIAWAVLAKGRAFELTRTDDASVRPA

SEQ ID NO: 273818 - protein, 386 aa, unidentified
MTLYAGIDVSKFKHDLAILDDQGEIIIKNLRFDNSTQGFKILKEHLEALDSPISEIHIALEDTGHYGDNLLMFLQNLGYSVFTYNPLLIKKFVKSQTLRKSKTDKKDALVIARRLLTDSYSERFKVEPQMRELKELTRYQNRLIHDRSKAKILYVRVLDIIFPELAKIVTSPHNQYVYELLTRYPSASKIRQAPFDSLLEIKRLKADKANQIQQAAEMTIGNSSFALQLELKQLIITIRHFTHQIDEIQNQINSILYKLDSPITSIPGIGERLGATILAEIKNINNFKNPAQLQAYAGLEPSIYQSGTMDTTGRMVKRGSPYLRYALMLATTCVCRFSPHFQTYLALKRSQGKHYYVAISHAAKKLIRVIFHLLKTNQTFDENKLA

SEQ ID NO: 273819 - protein, 453 aa, unidentified
MAQGSGLTRGDRNRNDRIAALRAVVRRDRAVLAIDLGEDKQAAALVDHEGRVLARRIVKAKAYQLGELLAWAAGKAAAAGFAGLTVACEPTGHRWKALMGLADAAGCGFVCVQSLAVARAREGDDYTRDKTDHRDAYLIGKLVIRLDCYLPERADEIWARLRHLGARRFALVADVISCMQQVSDLLACAWPAALGVAARPLEATTWLAAMGAVVDRCNGNPARLRTMGYEKFVAAVRRELPRWGAKNIYHKIVKGLWEALADTGGVAAQRRGALERVHLLMGDWRSLLARLADAEERMSAVLDELGLRELVTSIDGLSAVGAAVILAETGELTRFASARSVVKHAGLNPSEHTSATLAGKTRISHRGRPALRAAAWRAVWGGMRHNRVLRARHAHLTGRDGNRLSDGQARAACAATLLRWLYAVVSRRQMWDPRIAAGVIPARRGAVTAPAAA

SEQ ID NO: 273820 - protein, 354 aa, unidentified
MNIKYIGMDVHKETISIAVMNGDGKLVMESIIETKASTILQFMQGLRGDLHVTFEEGTWAAWLYDLLKPHVTELVVCDPRKNALLKEGNKSDKIDARKLADLLRGGYLRSVYHGENGLRTLKELARSYLTISKDLTRVMNRVKALYRSWGILCGGQQVYAPRHRAEWLNKIGEAGVRRRAEFYYQQLDALRALRQAVRRDLLAESRKHGATKLLRQIPSIGPIRAALLIALIQTPHRFRTKRQLWTYSGLAIETRDSAQYRYVAGQLQRSKKPQQLRGLNQNHNHDMKAIFKSAATMASSREGPFQAFYQGLLMKGMEPAMARLTLARKIAAITLILWKKGAHFDAEQLKPQAA

SEQ ID NO: 273821 - protein, 398 aa, unidentified
MSAWTLPVPVRTHLGGLIRSLSASRRDSSQFCHAVSLAPEAGTYQSTWEGSKPMLVQEVDYVIGVDTHKESHSAAVVSATGGVIVGLEASACDSGYRTLLRHANTHAAGRRIWAVEGTGSYGSGLAVFLHEHGERVIEIERPRRPGRKKGKSDQLDAIRAARQALADDKQATPRNRGQREALRILLTTREGAMRARTAALCQLHALVVGAPDELRGRLRHLRTEDLVRRCSRLRPDRQQCPELRITIQALQSVARRADSLRVEAESYERDLIQLVNMLAPRLAAEPGIGPICAGQILNAWSHRGRLRSEAAFAALAGVAPIPASSGQTVRHRLNRGGDRQLNRALHTIVLWRTNFHSESKAYLVKRRHEGKTDREVRRCLKRHLARRIFKLLQGLDSL

SEQ ID NO: 273822 - protein, 348 aa, unidentified
MLIIGCDYHPGFQQIAWVNTDTGECGERRLTHREEAEQFYSTLKGQSVRVGMEASGHARWFERWLSELQFELWIGDAAEIRTKRVRKQKTDRQDAQLLLRLMMEDRFPRIWVADAENRDLRQLLWHRHRLVQMRTRVMNQLHVVALNEGLRRKKALWRPAGRSELESLVLAPWASRRRQDLLDVLDQLTPKIQELTRSLEEEVEKRPVTRRLMTHPGVGPLTALAFELVIGTPERFHCGKQIASYVGLVPSEESSGDRRRLGHISKQGNSLLRFLLVEAAQVTVRSQPHWRSKFFHLALRRGRKIAKVAMARKLAVHLYWMWRQGLDYGQFAKLGSHAGEPGHRHGGE

SEQ ID NO: 273823 - protein, 366 aa, unidentified
MIVIGADPHKNTHTLAAVDAATGEQLDVVTVAATRAGSERALRWAGGLGEGERVWAIEDCRHVSGRFERELIGCGQRVVRVAPRLMAGARRSARERGKSDPIDALAVARAALREGVDRLPCAYLEGRSLEIRLLLDHHDDLVAQRSDTQRRLRWHLHDLFDDLPIPPGALDRTVWLDKIARRLARCEQTVRGRIARDQVNAIRAATRRIRELEREIAALVELEAPQLLAETGCGPLTAAKLIGEIAGADRFASDAKLARTAGVAPIPVSSGRRDRHRLDRGGNRQLNLALHRLAVNKARLCPQTAAYLERKQAEGKSRMEALRCLKRHLARRVWHLLTDPADQAMTMTTNPTINNANAPQPAPALT

SEQ ID NO: 273824 - protein, 326 aa, unidentified
MDEQTFPTSPAGLGRAIGWIARRTGGDLTGILITAEGTGSYGAILAGRLAAAGYRVTEAPTPRRDRASGKDDDLDAITAARSTMVMAVAKLRDRRGADPQGITVALGVLLTARLQTTRDRTRVVNALTALLRTHDLGLDVRRKLTKTQIKTIAGWRPRAESLALDTARRQAIRHARRIRELDTDLAHNNTEIATLVALQAPLLLSQPGVGPISAATVLTVWSHPGRVRSEAAFAAIGGAAPIPASSGNTTRHRLNRGGDRRLNSALHTIVMTRMRCDPATRAYVERRLAQGKTRREIRRALKRYTARQLYRILNTIPATDEHATAA

SEQ ID NO: 273825 - protein, 356 aa, unidentified
MIKDSIVFVGLDLGDRWSQLQVLDQEGEVVEESRLPTRESALRRKFTTTGRWRVAMEVGTHSPWVSRLVKELGHEVIVADARKLRLIYRNPRKNDRIDAEYLARLARLDPQLLSPVHHRSLETQADLALIRSRDALVRGRTMLINHMRGMAKSFGKRLPACSADSFHHKVREAMPQPLQPALEPLLDTLGEMTERIRAYDRQIEDLCQSRYPETKGLRQVGGVGALTSLAYILSLEDPARFRKSREVGPFLGMVPRQNQSGGADPQLRITKTGDVYLRRLLVSSAQYILGPFGPDCDLRRWGLSLAERGGMNAKKRAVVGVARKLAVLLHRLWVTGEDYQPLRQITPATQPALTVN

SEQ ID NO: 273826 - protein, 400 aa, unidentified
MSGSRRPFQGFVGIDVSKDKFDACGIREDGAKLFQFSATMDRNGFEKLKSHLSSVSMGSVLIGMESTASYHVNLFSYLVSEGYAAVVLNPLLISNYVKMQLRKTKTDKKDAWVIAQFLLANKDSLIRRATSPLISDLRELARQRESLVDQMTSLKNDIKRILNITFPELEHMTGIFTKSILKLLQRYPSAYALQEVDPDQLTRMLIEDSYGRKRGAFAEALLKAARSSIGTPSPMKDVILKQKVSLHFHLEEALQEITEMLLQTSRGMMGDDMDILNSIKGIGEKTAASFLIEMGGDIQQFDDPNKIIALAGIDPAVRQSGKHEGSSRITKRGNRHLRRIIWLMTTQVIHYCDIFRVYYQKRRKDGLPYKKAVLATSHKLIRVIYAMLTQRTFFCQTVNS

SEQ ID NO: 273827 - protein, 339 aa, unidentified
MELYAGLDLHSRNTYIGILNKDLKRIFKKRVPNNLDQILATLEPFEKNLKGLVVESTFNWYWLVDGLMDAGYQCLHLANPSAVKQYEGLKHTDDQHDAFFLAQLLILGILPQGYIYPKKDRPVRDLARKRLFLVQHKTSYVLSLQSLIQRCTAQKYNARNIAALTVTDLKQLLGEKHIVLSARANLENITFLSQQIKRIEDTIKKQLKLKKAFKCLLTVPGIGNVLALTIMLEVGDINRFPKVGNFASYCRCVASKRLSDGKVKGSGNRKNGNRYLSWAFIEASHFVRRYNERFRRYYNRKAAQTNTIVATKALSNKVARICYYIMRDQVPFREKLLSQ

SEQ ID NO: 273828 - protein, 370 aa, unidentified
MSQSTTLYVGLDVHKESISVAYAADERGAEVIFVGPIGTRQCDIDKMVRRFQSKAAHLVFAYEAGPCGYVLHRYLAQKGLPCLVVAPSLIPRKAGDRVKTDRRDAQTLARLLRSGDLQSVYVPTVEDEAIRDLCRAREDVVGDLKACKARLKSFLLRLGISYGGRADWKDAHLRYLASVVCPTPSQRIVFQEYLTAVQEHNERVKRIDTALQEQVKAWRLFPVVEALQALRGVQQIVAVTLVTEVGDLTRFDTPRQLMDYLGLVPSEHSTGERRRQGGITKAGNQHARRVLVEGSWAYRYPAKVSPAIRKRMEKVPKSVQDIAWKAQVRLCRRYRHLVGRGKNPNVAVVAVARELAGFLWAIAQEVKIAA

SEQ ID NO: 273829 - protein, 427 aa, unidentified
MKSDVIRYKKFCQLKSEIRASKKHLIIGIDIGKDNHHAFFGTARGKTLLKRLVFNNNIDGFRKLIDQVKELQIQYSLTKTVFGMEPTGNYHKPLAAWLINNDHFPVLVSGKAVKDNRELLDGRWDKNDDKDSANIADLISQGKCLFYENPEESIIELRNLLSLRKRLKKEDHRLRMRIRNGLLARYFPEMDRYWGKSIKENLAIVKWCIDPKKISKMDFMDFVKRVTTTDRGKRQLNRLKKIYDAAADSIGMAVDISVEFEAKMLADRLKRIRERIKDTMQKIQTVAKKHKSYTILQTIPGFGPFIAALVIAVIGNPFRFNSYKQVIRLAGYDLNASRSGKTSSSAVPVISKKGDSELRYGLYQASMVGTYHNHQFRLLFNRILKGRERERGIKTKMRVKIATKMLVIAWTLMKKGEPFNPDLLVTD

SEQ ID NO: 273830 - protein, 314 aa, unidentified
MKITDEINVGIDTGKHQLDIYIRPLGEYFAVDNTQQGIKQAIKRIKKHSPTRIIIEATGRLEYPFACAAAKAKLPIVIANSYHVHNFAVATGKLAKTDKLDAKMIAHYGQAMQPKLTELKADNIKQISDLLIRRGQLVEMRTMEKNRLSILPVELHRSMNKVNKTLENEIKRIEQQLDGLIEKTPQWQQIMTILLSVKGVGKIVAYTLLSELPELGQLNRKEIAALIGVAPMNRESGAYCGKRRIRGGRAKIRTVLFMAMMSAIQSNPKFKGIYTRMVAAGKPKKVAIIACMRRLITILNTLVKKEQCWDENLA

SEQ ID NO: 273831 - protein, 345 aa, unidentified
MEIVILGVDLGKTDCSVAGLDACGRVVTRRRIKRAKLAQFLVNLPRCVVAMEACCGAHQMGRIAEDHGHEVRLMPPEYVRPYVKAQKNDDRDAEGIAEAATRPTMRFVTLKTAEQLDLQSLHRLRERLVNSRTRTINQLRAFLLERGIAVAKSPAKLRAAVPGILANESNGLRPRMRTMVDEMMREVRDLDERIGRLDREILEIGYADPDAQRLMAIPGIGALSATAIVAAVGDASAFKSGRDLAAWLGLVPRQVTTGGKPRLLGITKRGNKYIRRLLVHGARTAKSGLLKSETPRGRWLTGVVERRHGNVATVALAQKMARTVWALLAHGRRYDPAYVPAPPVA

SEQ ID NO: 273832 - protein, 351 aa, unidentified
MNILAMDIAKSKTVVCYYDSESGRHEYGKVKTSPQQIHDLVAEYSPDRVVFEICSSAGWLHDIVTALGTEVQVANTNTQAWRWKNVKNKNDKKDALKLAQLSAMNQLPTVHMPKPNVRQKRALIQYRQTLVARVVQIKNNIRSILDKQGYSMAAGKSGWTNKSIEQLNQMALPIERCGVHDLWRGQLYVELTMLSSTQDALAHVTSKLDKLAESDSQVNLLQTVDGVGTRLAEAIVAFLDEPERFKSSKHIGSYAGLTPRQYQSGSTNRQGRISGQGNKLLRALLVEVSWIGLRYNRWIRETYQRLLRGSASRKKIAITAVARKLLVRCWAMLRDGQPWRDMGVKTERQAA

SEQ ID NO: 273833 - protein, 365 aa, unidentified
MTGVGSWGHPRHDWKPAAVSDVTPRMSLVLQSILPYPDSCLGTSPHQQGWDTKMAELSFGGIDVSKDRLDVLLLPEGLCFSVCNDAPGWAELIVRLRPLAVCAIGLEPSGGYERGIIRALLAAGLSVRRINPNKLRQFARARGVLAKNDRLDARLIAEYVAIMPTRVLQRDDAIERLAEIVTMRRQLCDEHVAAMNQATHLEDAMLRRISKRRLLRIEADILLLDKRLAELVAADPRLAHRYQLLISMPGVGPTLAYTLLATLPELGQIDRKQIAALVGLAPYDFDSGKLKGHRCIYGGRMPVRNVLYMAALSASRYNPALKAFSNRLAAAGKKSKVIIVAVMRKMIITLNAMLRDNTEWHPTAA

SEQ ID NO: 273834 - protein, 365 aa, unidentified
MTMYLGLDVHASATVYVAQDQEGKVLGKGKVSTSREGLKGMLVQVGAPAGSKVALESGSQSFWVSGLLSELGMESYVIEASEVRQKARRPRQKSDRRDAFEICDGFRRGIFVKMVYVPVREAQRLRLVLSRRRHFVRICTSQINAAKSLLRSIGLAELAGSLVTVKAWEGLLAKPELGELQQMVSLHYQVWRSARSQAEELKGELDKVLTPFAAISRRLQTVPGVGEITAATFIAVIARPDRFPTSGEVSSYLGLVPSGWDSGESEKHGPITKTGNSELRSLLVECAHHASSPNHPLHPYFARVCAKGGFKKAVVCVAQRLARILWRMWLNQEDFQVEKLNVIKGRRKVSRTYYWRIKEPARAEA

SEQ ID NO: 273835 - protein, 376 aa, unidentified
MHNVRFVGLDVHAETIAVAVAEPDGEVRALGMIPNRPESIHKLVKKLGPAEQLRVCYEAGPTGYVVYWQLTGLGVCCEVVAPTLVPVKAGDRVKTDRRDAIKLARSYRAGDLTPVWVPDGAHEALRDLVRAREAAKKDQLRARHRLGKFLLRSGRRPSTALHPWTQTHLAWVKTVHVEHAAQEATLLDYLHEVEHMADRIERLERAIDEAVKTAPERMRAVIEALQALRGIAQVSAVTIVAEVGELSRFTTARQLMGYSGAVASEDSTGERVRRGGITKTGNAHLRRVVIEAAWAYRYRPAVSAALRKRQATVGSEVKEIAWKAQHRLHARYRHLTARGKSKQETVTAVGRELLGFIWAIGVNVEAKHRDTESVAA

SEQ ID NO: 273836 - protein, 340 aa, unidentified
MSKESVSSHVTVYAGIDVSAATLAVAVQREDRTGFEQRQLANSAMGHKQLIGWLLKCGGIVRVSLEATGIYSLDVALALDLAENIEVAVLNPKIANRFAQTLRRSKTDPADAVALAEYSRRMPFVAWQRPGRIELELRAISRHIVTLTDEHTRLSNRLHAAEASDTTPRCVRQDLKHSIDALKKRIVRLRKAALALVEQNETLAMKFKQLIEIPGIAEASALQLLGELAPLDPQMTARQWVAHSGLDPAHQVSGSSVHKPSRISRHGNRYLRRALYMPALVGVRFDPHMKAFYLQLQVRHKTKLQALMAVARKLLHAIYGIFKSRTHYDGRKLFPQLGVA

SEQ ID NO: 273837 - protein, 354 aa, unidentified
MNSTQVFEKRKIAVAIGIDLAKDHCDVVAYNADNKICFSKANMPYPKLMEWLANTQPAVVLMESCKGCHVRARDIADLGHDTRLVKGADVKALRNVCQKNDIRDADYIARLLYVPGTKFVFVKNQRQQSLQFLQNEYKSFQELRIRVGNQIHAGLEEFGCPAPKSQQFVQSRMMAHLEKNAELIPEEVMASFLRRREMWLNLFKQEEDAKKRMEEIAKTDDDTKRMMTVPGVGAQTAVGMLVHIGGDIGRFKNSGQFAASIGLVPKQNSTGGNTTLNGITKRGPKRLRANLVQCGQVILMHADKLKGNFGDWVRKMRDSGKKRGVIACAIAAKIARIIYRLMKDKVDYTPVPSR

SEQ ID NO: 273838 - protein, 416 aa, unidentified
MNAAGIDVSSRKSTVAVLRPFGEVVRLPFDVAHNTEGLASLAEQLKALDGETRVVLEHTGRYYEPVAKALHEAGLYVSAVNPLLIKEYGANSLRRVKTDKADAVKIARYALDNWADLRDYTPMDTIRYDLKTLNRQFQLASKQRTASANNLIALLEQSFPGIRKCFDSPVRSDGTQKWVDFVHTFWHVECVRKQSLNAFSERYRKWCKRHGYIFKQGNAVEVYSLAKNAVVLVPKSEVTKVLVQEAANQLTSISRSVETYRAEMERLASTLPEYPVVMAMYGVGKSFGPQLMAEIGDVRRFERKQSLVAFAGIDPMPNQSGNKNVRSNKSSKRGSPYLRKMLFNIMGIYLKCSPQDEPVYQFLDHKRSEGKPFYVYMTAASNKFLRRYYAQVRDYLSTLDDLPPVDMDSTGLKTTD

SEQ ID NO: 273839 - protein, 409 aa, unidentified
MEVLYPRCAGLDVHQQTVVACARIVTEGKVAQDVETFETTTQGLERLRDWLASHGCTHVAMESTGVYWKPVWHVLERSFTLVLAHAAHIRNIPGRKSDVNDAMWIADLLAHGLIRGSFVPPTPVQELRDLTRTRKQLVREIAQHTQRLQKTLEDANIKLTGVISDVLGQSGRALLQALIAGETDPERLVELTTGRLKAPRAQLIEALRGRVRPHHRFLLKLHLDQIDALQEAVREVEARIGESTEPYRAAVALLDTIPGVNETTAHVILAEIGDDMTRFPTAAHLISWAGFCPRNDESAGKRRSTRVRKGAPWLKTTLVQAAWAAVRKKGSYLRAQFLRIKARRGPMKAILAVAASMLTAAYHMLRTGAVYQDLGERYFDTRDRLKLVKRLVRRLGDLGVQVELKEAAA

SEQ ID NO: 273840 - protein, 369 aa, unidentified
MNKSSTIVGLDVHKKAITAAVLPPTMTRPREVLTIENERRAIARFVRRVIAHHTATFVYEAGPCGYEVHRQITALGCPAAVIAPALTPVRPGDRVKTNRRDAEKLARLYRAGELTEIRVPSRLEEAARDLVRAREDATADRLRARHRLDKFLLRQGRVFHETKAWSVAHRQWLRTQRFDLLLLQRTFDAYLRAVEEAEDRLASLDQQVLELAHTAPYQTPVKYLRCLKGIDTLSALTILVETQEFRRFPDAPAYMTFTGLVSSEDSSGDRIRRGPITKAGNAHLRRVLVEASWNYRRRNITGPALSARRHGCPTTVVQIARRAQDRLHRKFWRLTSRGKLAQVATVAVARELAGFIWAIAREFPTARVA

SEQ ID NO: 273841 - protein, 425 aa, unidentified
MRNIGLDLGRHTGEAASVDGHGRAVSLGSVEVSPAGLEALIGRLRPDDRVVLEASTNTWTIAELLAPHVGQVIVSNPLRTRAIAEAKVKTDQIDAATLAELLAADYIPSVWQPDPDTLARRRLVSLRAALVRGRTGERNRVAAIIGRRLLACPVSDAFGVAGRAWLAGLELPADERLALDLHLRLHDAIAAEIEVAETAIARSVRDSAPIRHMLSVPGIGLTTAAALDALIGDVSRFSRPTKLVGYLGLDPRVRASGARSYTGHISRAGQAHARALLIEAAHSAVRTPGPLAGFYLRIKRRRGAGVAIVAVARKLAVLTWHLLTEDVDYAWSPPSASAAKIRRLELLAGDAKRMTRAGMVMGTGASTKAALKAQRARERAMLAGAQATYERFVATRAASVKADAAAAKGERLVGPTESEPAAPRS

SEQ ID NO: 273842 - protein, 480 aa, unidentified
MAKRTQQHPNLKAVPMLKSESVYIGVDIGKRKHVAGFLSKTLLERHERFEVCPALVFDNSREGFRIFIDRIREYAPLEHIFILMERTGHYHRPLEQYLREFDLPVYMMHVQSRPTGMLKTDKRDALTLANHLYSQLELGVQVPNKLQLVRRVAPPTEAASQLKGLIRHRYELIRESTRRKNKLIAINDELFPELVRIIKDPNALVALTLREQFPTPQALATASFTTLQQIRGSARSLSDAKLVELQRLAAESIGVKDLVRQRGLVLEQGQLIKELRLLREHIEQLETEMVSIVEHAREGQILQSFPGVGPVTAATIIAAIGSIRNFPSASALKSYCGWAPVVAQSGSTLDRSGLTRGGTRTMKQIMFLAVLQTIRLRDNEWAHLYERLVKAKCPYDERTQSRTGKTRVIGRVAGQMIEAFYALLMRDAEILSKVPPGQEPPPPMLYDPEVHQRHRQGNYRPLKVTPLPDIIIVPQAHPSE

SEQ ID NO: 273843 - protein, 363 aa, unidentified
MEKDSTAYVALDTSKLRNAVAIAAEGRDGEVRYLGEIDNTPTATGKLVRKLAKRHPAVTFCYEAGPTGYGLYRQIKSLGHDCMVVAPSLIPQKPGDRVKTNRRDALSMARQLRAGDLTAVWVPDPHHEAVRDLTRARGAAVRDLRSKRQQVSALLLRLGQPYPGKTTWGKTHLAWLSSRKLDHLEQRIALEEMLHAVGQATDRIGRLEQAIRAAVPDWSLASTASALMALRGIDLIAATSLLAEIGDLTRFASPRELMAWLGMVPSEHSTGPRVRRGAITKAGNRRARSMLVECAWSYRHPPRVGADKLAKVAAAPPAVRDIAWKAQTRLSARYRALRRAGKPDNVAITAVRPGRFAITRAVC

SEQ ID NO: 273844 - protein, 372 aa, unidentified
MSTTSTTQEHMVIAIDPHKASWTAAVVDASLQPVATIRVPVSRDGYRALRRFADRWPDPTWAIEGASGLGAPLTTRLRTDGIDVLDVPAKLAARVRMLSTGHGRKNDDADAVSVAIAARSAHRLNSAVVDGAITALRAIVEHRDDLVKTRTQTVNRLHVVLTNLIPAGAQRDLTAERAAELLRGIRPRDPAGKTLRGLAIDLVSEIRQLDRRIAKAASDIQAAVTDSGTTLTALCGIGALTAGKILGRVGTIHRFRSAAAFATYTGTAPIDVSSGDVVRHRLSRAGDRQLNLCLHVMALTQIRQDTPGRAYYQRKRSQGKGHKEAMRCLKRRLSDVVYRQLRHDANNSAEAGPGGHSGAALSSSAASSNPAH

SEQ ID NO: 273845 - protein, 344 aa, unidentified
MHYCGLDVSRKSTHVCIEDAQGRRVKRAVVPTTPAGLTAAIERYTERGLRVAVEAGNQTAWIVDLLRERGAKVHVVHPLKVKLIAESKKKTDRIDAQLLAHLLRVGGLPEPVHVPSSRSRELRGLLVARRQLVHMRTKLLNVVRGLARQQRIELRPRALLTLGGWTQLTAASLSPALREVVGAYEATVQAASTALAALDRELARRAGRDPRVARLETMPGVGPISAQTLVAAVDTIERFPSAKKLVAYAGLVPSVRASGERVEYGRITKQGRSEIRAVWVQAAHAVLAVKAAAASPLQRWCERVARRRGKKTALVALARKLLTIAFHLLRDGTTYDPRRLRCPA

SEQ ID NO: 273846 - protein, 425 aa, unidentified
MNYKQNEKINQVKESTLVVGIDIGSTTQYARAFDWRGIELGKVFPFSNSREGFESFKAWMQHLQDKYKKLDAIVGIEPTGHYWFDLGAYLEDEGILLVMVNPYAVKQTKELDDNSQSKNDRKDPKVIAKLVTEGRYSAPYTPDGVYADLRIMVTNRKRLIREMTQIKNRFARWFAIYFPEYTDVFGDYEAQSSMLLLKKVCTPEAIVELGAEKINQIWRDAKLRAVGMKRATTLCETAKRSIGLKKGSSAAQYEMKLLLEDYEYKKAQLDAVMEEIEKLCRKIPESEQMLAIKGIGVITVAGFLAEVGDVRRFESPRQIQKLAGLSLRENSSGKHKGQTTISKRGRSKLRAVLFNAAIPLIAKNPEFKSLHEYYTTRANNPLKKKQSVIAISCKLIRVFYAILANGVTYDAQKMLSDIHRQPQAA

SEQ ID NO: 273847 - protein, 403 aa, unidentified
MNSVGIDISKGRSTIAVMRPFGEVVISPFEVRHTGSELSKLAKQLKSLDGETRVVMEATGNYHASVAKLLHDAGLYVSVVNAKLVHDYGNNELRRVKTDRKDAVKLANYGLDRWLTLPRYIPEEDTRLLLRNCYRQYRQYSKVQTVLKNNLISLLDTVFPNANRLFSSPIRGDGSEKWVDFVAEFWHCRCVSEKSERAFTSKYLRWCRKHGYNFSEAKAHTIYAEASGHIGVMPKSETTKLLVEQAVAQLRATSTALAALKLEMQTLASQLPEYPVVMDLFGVGPTLGPQLIAEIGDVRRFYSKKALVAYAGLDAPPNDSGDVTGRHKSMSKIGASSLRRTLFLVMSVYLQNAPLDEPVYQFMDRKRAEGKPYRVYMMASANKFLRIYYATVKAYLESLEHTA

SEQ ID NO: 273848 - protein, 366 aa, unidentified
MPVRPVARIESTHVREDGAMVTIGIDTHKATLAVSAIDEAGRERAAETFPNDREGHARLLHWARIHGPERRFGIEGSGSYGAALARRLVASGEQVVEVPAVLTDRERRHLRRAGKSDPGDALAIARVALRERSLGPAPMPGITEDLKLLVDAREHCLAERTRVANQLHAHLVVLTPGYKDEIKNLSAARYLAAATRLLRRVGSVRAELARAELVRLRALDVESDVLEGRIRALVQLSGSSLPTIRGVADLTAAKLLGETGDPRRIRSASAFALMSGTAPIPASSGQTSRHRLNRGGNRQLNRALYTIALTQARTDPRAKTYMARRIAEGKSWLDALRCLKRHLADVVWRTMLADAQRAAEIRGLTT

SEQ ID NO: 273849 - protein, 407 aa, unidentified
MHPICCGLDVHKESVSACVIFPDDKGEEQCDVKVFGTFTDDLMRLRDWLAAHNCPVVAMESTGVYWRPVHNVLEDSVQVVLVNARDMHNVPGRKTDIGDSRWIAGLLRHGLLKSSFIPPQDVRQWRDLTRLRKKYVQSAGDYRKRTHKLFESANVKIDSVVSDLFGVTGRNLMQLLVEDRKALTLSDIQGCVRGKLRGKEAELFRSIQGFFTDHHRFVLKTILETITMLEAQIEALDHEIRRVMKGHEPLLDRMKKAPGISDVSSCDILAEIGPTLDSFPTDAALVSWSGLCPGNNESAGKRKSGRSPVRKHHLKTIMLEVAWAAVKKKGSYFKDKYYRLKARRGAKKAIVAIAHRILLGVYHVIKDGAEFRDLGEDYLTRRNKSQKVFHLRKQALALGFDLVPQAV

SEQ ID NO: 273850 - protein, 355 aa, unidentified
MNDAKYIGLDVHQATISAAVLDSAGKLLMESTFETKASTILQFLDGLRGSVQVTFEEGTCAAWLYDLVKPHVHKVVVCDPRKNALLKAGNKSDRIDARKLADLLRTGLVSAVYHGEHGVRTLKELARSYLALTQDATRVMNRLKALYRSRAIPCAGGRVYSQHHRGEWLAQLTEAGALRRAEFCYEQLDALQALRQHVRRDLLEEGRKHSAIKLLRQVPSIGPIRATLLVALMQTPHRFRTKRQFWAYSGLAVETHASGEYQMAQGQVKRSRRHPAIRGLNGNHNHDLKNIFKGAATRAAVAAGPLQEFYAALVERGMKPHLARLTLARKIAAITLLVWKKGVRFDAEYLKPQAA

SEQ ID NO: 273851 - protein, 417 aa, unidentified
MDEPGWFVGFDWASECHYVCLLDADGKCIAEREVKHDGAALSELCSWLTEKSGASPARIAVAIEVPRGPVVEVLLERGFQVFAINPKQLDRFRDRFTMAGAKDDRRDALVLGGSLRTDQSAFRRVSVDDPLVIELREWSRMHDELTQERTRLANRLRGQLWRYYPQAGELTDDVAADWFLDLWEQVPTPEQAARASDKIIAQILKKHRIRRLDASAALRILRKPSLVVASGTVPAATAHIRIIAARVKLLNQQIKEVGQRLDQLCAAIEAAAENNPGQICEQRDLEILRSCPGLGRINIATLLAEASEPLRKRDYHVLRVLTGSAPVTRRSGKSCIVLRRHACNKRLAQTMYHWARVAMQHDPRSRQRYAELRRRGHSHGRSLRTIADRLLYVLCTLLQHQTLFDSGFATSQEAAAT

SEQ ID NO: 273852 - protein, 406 aa, unidentified
MQVVHERCCGLDVHKRVIVACVLSGRERTIRSFGTMTEDLEGMAAWLEECDVTHVAMESTGVFWKPIHNVLEGHAFELLVVNAQHMKAIPGKKTDVKDAEWIADLLRHGLLKPSFVPSRAQRELRELVRYRKALVRERAAESNRVQKVLEGANVKLASVATRVLGLSGRAMVEALSSGVTDPTELADLARGRLRAKHADLQRALRGMVGPHQQMLLAALLRHLHYLDGEIESLSQEIASREQPDEAALAQLQTIPGVGRRTAEVILAEVGADLSRFPSAGHLASWAGLCPGQNESAGKRRSGRTRKGSAALREALTEAARAAARTRQCYLAAQYRRIAARRGANRAAVAVAHSILVIAYHLLTKGSVYEDLGSNYFDDRDKVATVNRAVARIKRLGYEVTVTPHAA

SEQ ID NO: 273853 - protein, 363 aa, unidentified
MEKKAWAGVDVGKGFHWAHVVDASGEALLSRRVENDEADLLALVEEVLRLAGNVVWAVDQPGGTAALLLALLWEREQKVIYLPGLAVDRARDGYRGESKTDRRDARVIADQARMRGDLGELSPGDGELAELQLLLSRRRDHVADRTRAVTRLRETLLVLFPALERALNLNSAGPLELVARYHSADAVRRAGRKRIAAYLKKRGVAKADTLAEKVVAAAKGQSATLPAQDVAASIVAELAAEVLSLKGRLNALERELERRFYARPEARVLASFPGMGPILGAEFLVAVGDVCAFSSADRLAAYAGLVPPATPVSGLETTARGAAATGFSSGSSTSRRSPACVASRSPGLSTTVRGERARGTPKQ

SEQ ID NO: 273854 - protein, 385 aa, unidentified
MKPNSQMTLGDFFRQCVGIDISKKKFTACLYMYDRASDVGCYTKSIDFANTKSGFNQLVKWSRKEAVKEYPLTYLMEPTGIYYEPLAYHLHKIGQTVYVVLPNKARKFCEAEGIKTKTDAVDARCLALMGCVSRKLSPWSPPSTIYHELRQMTRFHADLCKVRTSVSNRMEALDHMHGPDKSVIRHCQKLLEEIDKLMEKNGQALLQKLSENKELEERVKRIATAKGISVQTILCVVAETNGFHLIRNRKQLTSYSGLDVIAKQSGNEDPKHRISKKGNVHIRAALYMPALVAIRYNRQLKTTYDRICQKHPKEKMIGITAVMRRILLLIYTLWKNGEEYDETRDMIRMPRKKGLEPENGQEDLVGIDREPIDWNAVGDNGEPPF

SEQ ID NO: 273855 - protein, 425 aa, unidentified
MNPITTYAAFVGLDWADRSHQICLRAAEGTRDEQSKLAHDPLALHTWAYELRARFPEGRIAVALEQTKGPLVYALSMHAHLELFPINPAMLAKYREAAKAASGTKNDPLDAALLCELMRVHRDWLRPLPAVPAAVRGLQMLLEARRGLVDQRTGLGNQLTAALKGYYPQALGLVGHDVGAPLTCAFLRRWPTLSAVQRARPETLRRFYHAHQVRSEERIAERLAVVRGAVALTDDAAVLAVLPVQVAVLVAQLEVLAPAIADYDRRIAAAFATQADAALFESLPGAGEQLAPRLLVAFGPDRTRYTRALQLQQYSGIAPVQEQSGNTQTTHWRWHCPKFLRQSFHEFAGCSVPQSRWAKAYYDAQIERGKPRHRVLRALAYKWQRILFRCWQNHEAYDEERYIAALRRRHSPLIARIDSTCADAA

SEQ ID NO: 273856 - protein, 342 aa, unidentified
MNHYAGIDVSLEYANICVRDGNGEIVREGKVLSEPAALIGWFGGLGLSLTRIGLEAGPLSQWLYAAMQQAGLAVELLETRHVRNAFKIMPVKTDRKDARGIAELMRMGWFRPVHCKSMEAQETRALLTARKLVQKAMLEVEASLRGILRGFGLKVGKTTPVRFEARIRELVEGHPSLVEIAHALLVVRGGLRREFNGFERRLRALARCDTRARLLMSTPGVGAIVALTFASAIDDPARFKSSKIVGAHLGLTPSKYQSGETDRSGRISKIGDSSVRTVLYEAAHVILSKPLKGATALKSWGMRLAKRAGTSKAKVALARKLAVILHRMLADGTPFAAQPARA

SEQ ID NO: 273857 - protein, 323 aa, unidentified
MQNITLIGIDLGKHSFHIHCQDKFGKALLRKKFTRTKLMQFLATCPPSVVVMEACAGAHFMARRISDFGHETKLISPQFVRPFVKSNKNDFVDAEAICEAASRPSMRFVQPRTEPLQAMRALHRVRESLIRDKVKTTNQIHGFLLEFGISLPTGDAVIKRLSLVLAEHEIPEYLSRLLVRLHTHYLYLVEQIAELESELSQSINADDTAQRIMTIPGVGPITASLLSSQPGDGKQFSCSRDFAASTGLVPRQYSTGGKSTLLGISKRGDKNLRRLLVQCARSFMMRLERQHGKLAEWVREQLNKKNIRLDINADITQLAYCKQ

SEQ ID NO: 273858 - protein, 350 aa, unidentified
MQGNGRWIGLDLSKKTYEMCYFDQKGKVGRSGGETTKGGRAKLYAKLKAEDIVAMEVNSLAFVMEKEMRVIGCTVVILDASQLSIIYSSTKKTDKEDALKLARLIKIYEKEDLPIVDVPTEKEYYRRKLTKECKTLKDDRTQEINRLHALFLQCGITTMKRSNLQTDANRQKVLPQLFGYEVGQAQRVCERLTLLETQIKELEQTITKECKADKDIERLKTIPGVGDKTALAFAAYVGDGKRFNNGDEVANYLGLVPRVDCSGSINRYGHITKKGNRIVRALLYQAAWSIVRSKHGGALKAKYFYMTEHGKGKKISITAIARKMAKLMYLIMKNKGEEYKELPAPASRAG

SEQ ID NO: 273859 - protein, 329 aa, unidentified
MSALICGLDVHKDSTYATILSPEGKIVNQTRMNNERVLSYLSHFSVGKVAMESSNQVASLYRKLESKGYSVVLSHPKKTRYIAEAKIKSDRVDSRAIAELARLDALPLAYMPEKEVSVLREQVRRRAFLVRQRVKLRVKIKSILTYEGVRWPSDSGLFTRKGVEWLHGLSVESIESYLRIMRIFDDEIRLLNRQLRGVAENDEDVRLLMTVPGIGYYSALLVKSEIGDINRFPFGDRLCSYAGLVPSTHASGNTVRHGGITKEGSRWLRWVMVEAAQTHVHRYDSAITRVYHRVAERRGRRVAVVAAAHKLLMCCWAVLKYREPYHDQA

SEQ ID NO: 273860 - protein, 422 aa, unidentified
MHKERRWFVGIDWGSQEHVVSLCDDVGKRIGQRKFAHGGTGLTDMIAWLLKESGGKPGEIHVAIETPHGPIVEVLLERSCNVYSINPKQLDRFRDRFTVAGAKDDSRDADVLADSLRTDMRAFRKLSSVDPTIVELREWSRIDEELKAEHVRLTNRLKHQLWRYYPQIYELANDVGAGWFLDLLEALPTPEKAAKTREKTVARILKQHRIRRFDAAHVLGELRKPALTVAPGTIEAATAGIRILIARLRLINSQLVDAEQQLDRLCKKIVGPVAGEEGENTPGQKNEPRDAAILDSTPGIGRTVLASLLTEASDALQRRDYHALRALCGTAPVTKRSGKSCLVSRRRACNRRLRNAVHYWAHNAVQHDATSRAKYEALRAKGHGHARALRSVADRLLNVVCAMLRTGTSFDSSLASKKQAGT

SEQ ID NO: 273861 - protein, 410 aa, unidentified
MLKIMYPTCCGIDVHKTFVVACIASTNEKGVTTYKSKRYSTCTKNLRELASWLEANNCRDACMESTGKYWQPVYNVLEQSCELVLAHPKYLKAIRGKKTDKRDAKWIADIFKHDLVSGSFIPPAPIRELRDLIRYRAKLTNYMTGEKNRAQNCLTSSNIQLDHAFSDVFGKSAAAILEHLLEHPEDKNFDVAPFVDRRCKTPTEEIQLAIDGTISPEQTEKLKVIRSHMDALKACQANLESAILSLAEPFAEQINLVSTVPGIRDFSAIAIIAEIGTDMSVFPTAKHLCSWAGLAPQCNESGGKKKSSRVSRAGAYIKPLLIQCANAVVTSKKHPEIRNRYLAIKKRRGHKKAIVAIARMMLTAIYSILLKGEAYNPELYRQSDISPVDREEQAIALLQKKGYSIQKVAT

SEQ ID NO: 273862 - protein, 429 aa, unidentified
MNYNTQNAKIASITEKTLIVGIDVGSETHYARAFSWRNYEYSKKPFAFSNDEAGFAAFKEWMDDIAEKHEMEVIIPGMEPTGHYWLNLGAYLQEQGMKPVHVNPHHVKKSKELDDNNPSKNDRKDPKTIAGLVNEGRFSYPYIPTGIYAEIRNLSNLRIQTQEEITRIKNRMARWFSIYFPEIKDVYRNPDAVSGLMVIKQAPLPCDIRELGVEGVNRIWRDARLKGAGIKRATTLVTAAEHSIGNTEAPRSARKEIRNLLEDYEGYKKRMDELMEEIEKTLSEIPYIDKLMEITGIGIKTVSCFIAEVGDIGRFDNPKQVQKLAGYAIVADNSGKHNGESRISHRGRKRLRYALYEAAISVIGKNKEFKEIHSYYRTREKNPLKKMQSVIAVACKLIRIFYTILTKGVDYDGQKMLNDIVRPEIQPAA

SEQ ID NO: 273863 - protein, 357 aa, unidentified
MHTARALSFDNTHFFIGVDTHLKSWKVTIRTNGIELKTFSMNPAPLELLAYLNKNYPGGIYHIVYEAGFCGFWALRVFKEHNIDCIIANPADVPTSDKEKANKSDPIDSRKLARELENKSLHGIYIPSCDQEELRMLMRLRYRIVQSQTRTKNRIKGLLYSQGIRIPLQFSGHQRWSHAFILWLESLSMKTTAGQFALRNLLLQLKEIRQHNKDILKQLRQEAKHHSIASIVNALMTVPGIAFINAMTLYTEIFDMNRFSSEDHLAAFIGLIPSTRSSDDTIKGNSITKRQNAFLRYIMIESAWTAVREDPAMTMKFKELCQRMKSQDAIVRIAKKLTKRIRHVWLHKQEYQYALVA

SEQ ID NO: 273864 - protein, 345 aa, unidentified
MSMVRSVVGGVDTHADSHVAAVIDVNGGVLGIESFPADHGGFGALVRWIASHGEIVRVGVEGTGSWGVGLSRFLHNHGISVVEVDRQNRQNRRRVGKSDSTDAVSAARAALSGSALVMPKTRNGPVEQIRILLVARRSARSQRIETLNQLRHLVFTGPDEIRSRFKDRPKTGLVTDVARLRPRKGSDPVLYTTMVTMRGLARRIQHLNYETKHLDTRLTELVADTAPSLVGLYGVGTETAASLLVAAGDNPDRLHSERSWAHLCGVCPIPAGSGKTDGRHRLNRGGDRQANAALYRIVLTRMSGDPATKTYVARRRDEGKNTAEIMRCLKRFVARETFKHLPRTA

SEQ ID NO: 273865 - protein, 445 aa, unidentified
MFIQSQDDSHYCYSFFTKVVILMMKLKYSICCGLDVHKNVIVATIVITNKDGVSEYKQKSFSTISSDIQKFHNWLIENHCYHVCMESTGKYWIPIFNYLENDIEVCLTHPKYVKAIKGKKTDKKDSKWIADLYKFDLVRCSFIPPKDFRQLRELARYRFKLVCMKSSEKNRIQNCMTVSNVGIASVLSDPFGKTATEIMSYLLEHTADSIDEKAVRKLIKKGAKAKSDEIIEAIRGYNIETDQAKKLELARAHLDFLDDMITQTEVELYVRIKPYYEFVEFVSSMPGMTELSSTIVLAETGVDMNIFDNAKHLCSWCGLSPANNESAGKKKSVRIAKAGDYLKPMMVQCALAAVKSRKQPYFAIKYGRIKKRRGHKKAIIAIARMMMVCIYHMVSEKKPFTPTDYEELMDPQNHVERVVLNENNVFAYLETLGYDSSKLVKRSDN

SEQ ID NO: 273866 - protein, 335 aa, unidentified
MDFCFFIGIDIAKDTLDWAVYTQQGLQLSTHTPNTLAGIKTALAEFKALPGWNPKQAGFAMEHTGIYNAHLLELLHQQKLAIWLESSLQIKQAGGMQRGKTDKVDAQRIAQYAYRFRDQIRLWEPPREVIQKLAFLSATRQRLNQAYNLLAVPVAEQETFISKSLQKTLKGNVKKSLIALKEEQKAVEQAIKQLIEADARLKELFDLMVSVPGIGPVIATELLVATNEMQTINEPKKLACHAGVAPFEYRSGSSIRGKTRVSHQARKRLKSLIHMGTMSAIQMKGDLQDYYQRKLGEGKHKMLVLNAVRNKLIHRVCAVVRRGEKYDKNYKPALA

SEQ ID NO: 273867 - protein, 419 aa, unidentified
MNQRSDQPGLFIGIDWADQKHDCHVIDRDGKGFHQEISHSPEDIDLWIGEMLNLADGKPIAIMLEQSRGPLVYALMFRENVLLYPVNPKQLVRYRESYPGGGKDDPTDARYLARMLRERIATLTCWQPDDENTRLLANLSQQRRKLVDGQTKLRQQLIAQLKSYFSVVLELFGKESQLPLLLSVLGRWTDPRKLRRADRRLIRRVLSDHSIRNQEQQDEIIDRIRSAQLLCSDEALITPSAMAAKLLASQIQQSRKTIQEFDTKIAEVMKKHPDAHLFTSLRGAGPALAPRLLCAFGSQKDRWEDADSLAAFSGIAPVTRKSGKQCKVQRRYACPKYLRQTFHEFADSARKYCPWTKARYRLLRDKGMKHNAALRKLARSWIRILFRVWQTGVPFDCERYIVQLKKRCPEITPYLEQEK

SEQ ID NO: 273868 - protein, 348 aa, unidentified
MMHFVGLDVSVKATSVCIVDAAGTVILEQKVPTEPADIIALLASLGTPYSRIGIEAGPLSQWLVNALIAAELPVICVETRHMKALLTAQQINKTDRNDARGIAQMMRVGLFKPVHVKTLAAQEQRMLLTSRKLLQRKLLDLESDLRGTLRNFGLKVGVVSNSRYEARVRELVAGFPRLCAITEPLLNVRRVMRQQFAVLHKMLLDTVRGDAVCRRLMTAPGVGAVVALTYRATVDQPQRFVHSRAVGAHVGLTPKRYQSGEIDYDGRVSKCGDALLRTMLYEAAQVLLTHSGKWSWLKAWGMRVAQRRGIRRAIVAVARRLAVVLHRMWVDGSEFRWRKDAAAVPAVA

SEQ ID NO: 273869 - protein, 374 aa, unidentified
MKERGLRSSCPSRVRMLGVLTLLRRRRPLVSELYEGRQFVGMDLHRRRSVLVRMSETGEHLETVRILNDRDVLADVMSRAGESPEVVLEATYGWYWAADALAELGATVHLAHPLAVKAFSYRRVKNDQRDAADLADLLRMGRLPHAWIAPPETRELRELVRHRAKLVAMRSQCKAHVHAVLAKGGIWVPMTDLFGVEGNLLLDNVTMPAPYQARIASLRRFIEAFDAEIDLFTGLAQRRLTHHAGYTAIQQIPGIGPVLAAVFVAEIGDVHRFPGPAQLTCWAGLTPSHHESDTTVRRGRITKQGSCLVRWAAIESVKSLPDTSHIGAIRDQVAHRRGNRNIGAVAAARRQLELVFYGLRDHHIRALHHPPRAA

SEQ ID NO: 273870 - protein, 400 aa, unidentified
MKLYGGIDLHSTNSVVVVLDEQDRVLLERRVTNDLQRVKDLLAPFREALCGVVVESTYNWYWLVDGLMAAGYRVRLANTAAIKQYEGLKYSDDAHDARWLAHLLRLSILPTGYIYPKGARAVRDLARRRMRLVQQRSLNLLAVQTTLERELGRRVSANAIKRTGSEVALLHGVEEPNVGSSLTANLAVMRCLDAQIERLEREIVSQVKLAAQFEPLKSVAGVGQILALTIMLETGEIGRFAKVGNFASYARCVQAKRISNGKKKGEGNAKCGNAYLAWAFVEAAHFAVRYYPKVKRFYERKRAKSNAIVAIKACAHKLARAAYHVMRTQQPFDIDRAFALTMGRAGAACIGVGITIRLDWRAGTAHPFRFELRRLDQQPREGWRCHQATATRSVRDAMWS

SEQ ID NO: 273871 - protein, 428 aa, unidentified
MNTEGIIRREQFCQIKSEIRGSDDYLVVGIDVAKDKHHAFMGSATGKSLLRKLVFENDLDGFGKLLDRSKAIQTQNALSKVVFGMEPTANYHKPLGAHLIGCGCHVVLVTGKAVKYNRELLDGRWDKNDDKDAANVADLVSRGKCLYYDYPFSSINELRQSLSLRRRLKKEEHSLRMRIRNNLLAQYFPELDRFYSACESESLAIVRWCLDPRRIAGMDFDEFFSMVTRIRRGIAQKRRLQKIHQLAVESVGCVMGPAAEFEAALLVDKLKEVRGQLKQIADLMQNVCLQFADYSYLLTIPGFGPYVAARVLASIANPWRFDSSNQVIKMAGYDLGANRSGKRSEDAVPVISKRGNAELRYALYQAAHVASTRNRDFIGYFTRMLRGRQRERGIKTKMKVKLAAKMLKIAWTLMKKQEAFDPNHLYLK

SEQ ID NO: 273872 - protein, 321 aa, unidentified
MPTFYLGIDVAKAKLDCALRSPDGKLRTKTVPNNPQGYNELLGWLSYKQALDIHVCMEATGVYWEEVAQFLATHGLTVSVVNPAQIKAYAASRLTRSKTDALDARLIAEFCTERQPPPWQPRPEAEVTLRALVLRLDALQTMRTQESNRLGVAQEAVCGDIQQHLDWLDQQIESLIKAINDHLNSNLELKAKRDLLQSIPGLGERTTAILLAFYADPSRFANSRQAAAFAGLDPRQRESGTSLKAKPRLSKVGHAFLRKALYMPAMVTLYKTKWGKQFKERLALSGKPAKLIIGAMMRKLLQVAFGVLKSGKNFDPALHGA

SEQ ID NO: 273873 - protein, 386 aa, unidentified
MTHSTNILPRSVDYDQTLVLAIELSNKSWVLAAQVPGLSQTKAKRTIDPNKNDLLSAIDGYRTRAAAAGRSVKRVIASYEAGWCGFWLARWLMAHGIEVHVVQPSSVPVDRRMRRGKSDGIDAELLLRTLLAWLRGEPRVCSMVPIPDEADEDARRCVRERSELVSERVGLVNRIGAILATLGADDYNPLLQSRRRRLTELRTGLGDPIPPNALAKIVRLLTRLELVLAQIVELELKRDAVARTDAPDRAGKMIQQLISLRGIGVQSATVLVREAFVRRFANGKALGSYAGLTSTPYSSGGIDREQGIGKAGNRRLRTVMVELAWLWQRYQPGTAQVVWFRERVGSTGRRVRKVMVVALARKLLIALWRFVIDGVMPEGAVTKPCV

SEQ ID NO: 273874 - protein, 327 aa, unidentified
MEQQVAGIDVAKLTLDIVLTNGQKTLHNKFENTPKGHELLARWLTRQGANTAHVCMEATGQYGDGIAEYLYSLGFPVSVVNPARIKHYANSKLRRNKTDKADAQIIAEFCYRENPGLWTPPPAIFKDLQALVRHLDGLQATRQQEVNRLNSGVKTLAVIESLKQICAFFDDQIKQTKEAIQTLIDQHSELKRRQSLLITIPGIAKLTAAKLLGKIRDIQEFQNARQLAAYAGLTPRNFVSGTSVHKKARLSKTGNAHLRKILYMPAISARKWNSIVSIFCDRLALTGLRPMELIGAAMRKLIHLIFGILKRGKPFDPNYLATSQTLP

SEQ ID NO: 273875 - protein, 391 aa, unidentified
MIYVGIDVAKDKHDCFITNSDGEVLFKAFTISNNLDGFNELYQKIESVMEDTTKVKVGLEATGHYSYNLLGYLIDKGLPTYVINPLHTNLYRKSLSLRQTKTDKVDARTIASMLMSDVNLKSYSDTSYHNEELKSLTRYRFDKVKQRAKLKSSVSRLVCILFPELEKLVPTLHIASVYAMLSEFPGAKQVANAHLTRFTNLLSEASKGRYGKETAIAFRDAARTSIGSNMPAKSLELKHTIKLIQELTSEIDEIEHEIKLIMDELNSPILSIPGINYRMGAMIIAEIGDFTRFDSPDKILAYAGFSPSTYQSGQLDGAYSHIEKRGSRYLRYALYNAAKYVCIWDPTFAEYLAKKRSEGKHYTVAISHAVKKLVRVIYHLEKTNQQYIKAA

SEQ ID NO: 273876 - protein, 332 aa, unidentified
MEYIAFDAHKHYTLASVARPDGQLVREQRIAHARGALQQFLERCEPGSPVAVETVGNWYWIVDEIEAAGCVPRLVHARKAKLMMGEINKTDKLDVRGLNQLQRTGTLPTVSIPPGELRDQRDLPRTRMVLVRQRTQLKNRIHSTLAKYALHDLEVSDLFGARGRALVRQRLELLPPCTAYTTDPLFKPTPTIQHLLTLPGVGLTLAVVIALEVGDVARFPTAEKLAAYAGTTPRVHASGGKTRFGPSRPDVNRYRKWAFVEAANAICLNRGRTPRRHVTRLYERVAQRKGHQKAIGAVARHLAEATYWVLTKQQPYREPTTAAVSSTGDKRG

SEQ ID NO: 273877 - protein, 414 aa, unidentified
MEDILDCCCGLDIHKESIVACLLKGPLGEGLKPRSEIKEFGTQLPDLIALQKWLALHECRHVAMESTGIYWQPVYAVLEKALTDEMHLLVVNARHMKNVPGKKTDMRDAEWIATLLRAGLLKGSFVPERDIRDLRQFTRYRKALIRDITSQKNRIEKMLQSNGFRLSSFLSDIFGSSGLAIMHQLVQVGSISSQSLDRCLKARARQKAGEILSNLNGTLSLPQRKLLKMQLAHLADLKANLQEVEEEIHDGFSQFQGPIELLDSIPGIDQTAAYAILAEIGREMSAFPTAQHICSWAGLAPGNHTSANKQKRQRVTQGNNYLKTMLCEVAWVIASHKKLYLSGWYWRLKQHTDAKRAIVALARKLLVIIYTMLKTGQPFNEQKFQERKNASEQKRVKRMVNELTRLGYAVALAA

SEQ ID NO: 273878 - protein, 369 aa, unidentified
MLYLAIDQHRKQLTVSLRSEAGDVLLRRQVSTRWSKVREFFAGLRDQVVPEGGFMTILEVCGFSEWLLALLQEYGCRETVLVQPHERSKRKTDRRDADALGELLWVNRHRLLTGQKVQQLRRIVPPEREVAADRQLTALRQRMGQLRTRTLNKIQRILLKHNLQQECPTKTLDTQRARKWLAGLSLSAIDRCEMNLLLAQWKLWDEQLGMLQEQLVQRQQRNPTAMLIATAPGAGALGSLALASRMDRIERFPHPASLANYWGLTPSCRNSGEATDRLGSITKQGSGVARFILGQMVLHALRRDASMKAWYQRIKRRRGAKIARVAVMRRLATILWHMVKHEQPYLTGGPPRQRLPAPTAAQAAVPPTH

SEQ ID NO: 273879 - protein, 407 aa, unidentified
MNAVGIDVSKGKSMVAALRPMGEVAFLPREFLHTEVGLEQMAYAILALGEDTRVIMEATGRYHEPVAAALHEYGIYVCVLNPLFIKQSGGGSIRKVKTDKADAIKIAKYGLDNWVDLREYTPMDTVRQQLKLCSRQYDLYMKTVISLQNNLISLTDKTFPGVNELFSSPERADGHQKWVDFVMTFWHCDCICRVSEKAFTERYQKWCKRKGYHFSVKKALEVYAGSCGHFTTLPKNDNTKLLIISAAQQLLAGKITLAALRAEMTRLARQLPEYDTVRAMYGVGDKTAPALMAEIGDVRRFPRRSSIVGFAGIDPGVDESGKHSAKSVPTTKRGSPHLRKTLYQIVCTYLKKSPADEPVYQFLDKKRSEGKPYFVYMTAAQNKFLRIYYARVKECLEAFDAQTTERK

SEQ ID NO: 273880 - protein, 453 aa, unidentified
MILPLDTAKRNQTLKTQNQTMNLNSPDQPPPPAQPFAAFIGIDWADQKHAICLSDCASNKTEQSTLPQQPEAIATWVGELRARFGGRPVAVCLEQSKGALIHALMAHDFLVLYPVNPATAALYRKAFATSRAKDDPTDAQICLELVRFHREKLRAWRPEDAPTRELRQLLEKRRRAVNLRTKLTNSLRDELKTYFPQALELVGEDLHSALACAFLLRWPSVQALQKAKKETLRKFYYAHNARRLDLVERRLESIATMQALTADAAIIDPAILTVTMLTRLLGPLRDAIAAFDQRIAQLYAAHPDHQIFHSFPGAGPALGPRLLAAFGSDRQRFEGPASIQQYSGIAPVTERSGKSTWVHRRWSRPMFLHQSFFEYAGQSALHCDWASAFLQDQKARGKTHPTAVRALAFKWQRIMFICWRERRPYDEALYLQALKTRGSHLFQKLEKLQLEAA

SEQ ID NO: 273881 - protein, 411 aa, unidentified
METIFERVGALDVHKAQVTACVRVPGADGRREPHLAEFSTTVSGLLALADWLKAFAVTHVAMEATGVYWQPVWHILEEDFELMLVNARHVKNVPGRKTDVSDAQWLCQLMEAGLLRSSFVPPKPQRRLRALTRYRKTQIAERQREANRLHKALEDTGIKLDCVATDILGKSGRAMLDALVSGTTDPDVLADLAKGKLRAKIPALREALQGRFEAHHALLIGAILSHLDFLDEQINGLSEAIEELLGPTGLAGRQLASTITGVAERTGEVLVAEIGTDMSIFPTAGHLASWAGRCPGNDQSAGKRRSGRTRKGSKWLGIALEEAALAAIRSKGTYLAGQYQRLKPRLGHGRALGAVKHSILIAYWHMFKTGETYRDLGGDYFARRDPQRATKRLVAKLEALGHAVTLQPNAA

SEQ ID NO: 273882 - protein, 338 aa, unidentified
MSAIKVIGIDLGKSTFHLVDHDYSGREQYRHKLSRSKLIQFISVHEPTLIAMEACCGAHWLARKCQEYGHQVKLIPPQYVKPYVKAHKNDFIDAAAIAEASTRPNMRFVSPKSEQAQVGVVIRRVRTGYIRERTATMNRIGSMLIEFGISFPRGHANMKKLFQWLADNKEPSPPLLVQELQNQLDYYNQLNERIKEQDRKLEKLSSEDELYTLLQTIPGVGPMTASCCLSCVGKPSDFSNGRNFAAWIGLVPFQYSTGGKQRMLGISKRGNKELRELFVHAARAVMWREETAERYFGSWLLDLKRRKPFNVALVALANKLARIAWSVMTSHKPFELRV

SEQ ID NO: 273883 - protein, 353 aa, unidentified
MSSEKYIGLDVHQATISVAVLDSRGKLVMESIVETKAATILDFFAGLRGTLSVTFEEGTWAAWLYDLLKPHVDKLVVCNPRKNALLKDGNKSDRIDARKLAELLRLDNLKPVYHGETGVRMLRELARSYLTIVKDLSRVMNRLKALYRRWAIPCGDVYYTRHRAEWLGKIREAGVRRRAEQLYQQLDMLQHLRQQTRGELLAESRKHTITVRLRQIPSLGPIRSALAVALIQTPHRFRTKRQLWAYSGLALETRTTGEHRYVKGQLRRSKKQISIRGLNKDHNHDLKGLFKAAATRASVQPGPFQDFYQRSLAKGIKPTMVRLTLARKIAAITLTLWKKGENFDAEKLKSQAA

SEQ ID NO: 273884 - protein, 379 aa, unidentified
MDLKYSVGLDVSSKKINGCISLISDSQKVTVKSSIVFTNDLKGFKSLEDWMIKHRRELKIPLVICMEATGIYHENCALYLFEKQYNVSIILPNKAKKYLEAIGLKSKNDSIDAKGLSQMGAEQCLEQWEPFGKYFYELRLYTRQNQNLQELKTVISNQLHALEHTMYTNQTVIEQLENTVKLFDLQLKELEKKIKLHLESDAKIKQKVANVIKIKGLGILTVATILAETNGFDLFKNYKQLVSYAGFDVVESQSGSRIGKTKISKKGNSRIRRALHMPSLVVITYKEKPFLDLFERTYAKHGVKMKSYVAVQKKLLTMVYYLWKKNEMYNPDYQNNIQEKELELSSLLAFEKGIKKSPKQVEAKQGKHPVKNRSMLPLC

SEQ ID NO: 273885 - protein, 400 aa, unidentified
MECVFGIDVSKENANVAVLVDNVVIKQFKIGLDRLGFSLLSDELNSFNAPLIIYEATAMYSRRLRAFLQRDGWKYTELNPLAAKKVMEEFRHTKTDALDAVGLARAMIKNHFRPTYQESPVYTELHDLERTYQQFNKDIVTNKNRLHRALQLTFPEIEHFMSSTDGFLYGHIVQRFPHPAIVLSHEENELTEIILTETSKKIGLKRAMKLANRLLALAQNSAPAKEPQSHAVRAVIALAKEVERINQLKAQIIVEMTTLGENLSEVPLLVSIPGIGIKTALCLIAELGDVRRFHSANAINAYIGIDLIRYESGQYEAKMHIRKRGNPYARKILYRAILNIISVSQYQPTLISANYKRKKQSAQSHGTKKIAIAAMSQFNRLMHHLILNNELYDSTTFMPE

SEQ ID NO: 273886 - protein, 437 aa, unidentified
MRRKKNKANKSVNLQVLPVVHPNAAGIDVGAKEHVVAVPCDRDPQPVRTFQAFTPDLHELGAWLKRCGIETVALESTGIYWISLYEVLEQYGFEIRVVNARHVKHVPGRTKTDVLDCQWIQKLHSFGLLNGSFRPDQQIRKLRTYMRLRDNLVVASTQAVHHMQKALFEMNVQLSNVISDIVGETGLRIIEAIIAGQRDPVQLAASCSTRIKASRETVAKSLHGNWDEALLFALKAALETYRFSQTKIQECDCCVQQHLAQFESRAEAINSPQDLKAQLHRVCGVDLTKIPGIKEQSAQIIISEVGLDMTQWKTEKQFCSFLGLCPDNSISGGKVLHRATRKVYNRAADTLRLCAQSLTHSKSALGAKYRRLRAKLGAPKAIVAMAHHLARLVYRMLRYGQNYVEQGIHQYELKFQLQRVRWLRKEAKSLNLQLVPA

SEQ ID NO: 273887 - protein, 428 aa, unidentified
MSKAAKPRRSAGRKSSTRVRLDDLTDVHDRCAGIDVHKQSVTVCISTGDGQGELREYQTTTGALRELKEWFQQMGVTHVVMESTGIYWQPVWQILEDDSYQLLLANARQVRNMPGRKTDGEDAIWLATLLRKGLIRGSFIPPAEVRALRDLCRTRANLVGDRASVSQRIEKILEQANIKLDTVVTDIMGVSSRRMIEELLDGETDRARIAELALGAMRAKIPQLQEALDGYFLPHQRTMLRVQLSQFDALSGAIAAIEEAIETYARPFAPQMEQLDQIPGIDRIAAATIIGEIGVDMNCFPTPEQFCRWATMAPGNNESAGKKKSGSIGKGNTWLRRIMTQTAWAATRTKNSYFAAQFKRLLRRGPQRALVAVAHSLLGVIWHMLTRNTAYRELGGDYFQRRNQQHLVRSHVRKLENLGFRVQLQPVG

SEQ ID NO: 273888 - protein, 348 aa, unidentified
MLIIGCDYHPGFQQIAFVDTETGELGERRLTHREEAEQFYGSLKGRTVRVGMEASGHARWFERLLRDLQFELWIGDAAEIRTKRVRKQKTDRQDAQLLLKLLMEDRFPRIWVPDAENRDLRQLLWHRHRLVQMRTRLMNQLHVVALNEGLRRKKALWRSAGRSELESLVLAPWASRRRRDLLDVLDQLTPKIQELTRALEDEVEKRPVTRRLMTHPGVGPLTALAFDLVIGTPERFHCGKQIASYVGLVPSEESSGDRRRLGHISKQGNSLLRFLLVEAAQVTVRSQPQWRSKFFHLALRRGRKIAKVAMARKLAVHLYWMWRRGWDYGQFEKLGSHAGAPGNRRGVQ

SEQ ID NO: 273889 - protein, 430 aa, unidentified
MKSNTQNAKIEAITEKTLVLGIDVGSETHYARAFDYRGVEYSKKPFKFSNTEAGFVTFKAWVLDIKEKHGKDKVIPGMEPTGHYWFNLGKFLQDNEMKPVLVNPHHVKKSKELDDNNPTKNDRKDPKVIAGLVREGRYMIPYLPEGVYADLRTASNIRFQLQAELTRIQNRISRWFNIYFPEYKTVYGKPDAKSGMLILKAAPLPEDILTLGIDGVNQIWRDAKLRAVGKARAKTLIEAAEHSVGSKEGAVSARMEIRMLLEDYESRNTRLQEVMVLIEELVRKIPMAEKLLEIKGVGIRTVSGFLAEVGDISRFNNPKELQKLAGLALVENSSGKHKGETTISRRGRKRLRYLLFEVAMSLVSKNQEFRELHNYYTTRRLNPLKKMQSLMAIAAKLIRVFYAMLTKGVDYDPKKMVSDIKRPAVYLQAA

SEQ ID NO: 273890 - protein, 402 aa, unidentified
MGGDVSDRAWAGVDVGKEHHWVVVVDKSGRMLLSRKVGNDESEIAAVIADAADLAGQVSWTLDLTTAYAALLLSVLWQAGQSVHYLAGRSVHQASVLYRGEGKTDARDAKVIADQSRMREDLPRLVPDEDLIAELRMLTAHRSDLVADRTRTINRLRQQLSAVCPALERAAEITKHRGWVVLLARYQRPKAIRRAGVERLTRTLAAAGVRNAAVIAQAAVTAAKSQTVRLHGEDVAAGLVGELAKGVIDLDARIKHADTAVEERFRRHRLAEVITSLPGMGYRLGAEFLAAVGDPGLIESADHLAAWAGLAPVPKDSGKRTGRLQTPMRYNRALRRVFYMSALTSVRCHAESRIYYDRKRTEGKRPVQAVVCLARRRTNVLFALMRDNRTWTNEAPVTTAAA

SEQ ID NO: 273891 - protein, 461 aa, unidentified
MTRPQLTPQRIPIETLPCLYPNAAGVDIGGAEIIVAVPPDRDSQPVRAFRTFTSDLEALVTWLLACGIDTVAMESTGIYWIPLYELLEQAGILPVLVNAQQVRMVPGRKTDWNDAQWLQKLHMLGLLHGSFRPDAELCVLRTFLRHRAQLIEHRAPHILHMQQALKHMNIQLSVVLTDSTGTTGMAILRAIVRGERDVLTLAQLRNPACKSSEEMIAKALSGTWRHEHLFILTQALALFDDYTAKISDCDAQIERTVAAMQSRAEPNAALPALPAAKPNSRSKNQPSATTRAQLARITGVDLVAVTGLAAATVQTIISEIGTDMSKFPTVKHFCSWLGLAPHNDISGGRVLRSHTLKVVNRAAQAFRMAAQSVTRSDSAFGAYFRTMRARKGPQQAIVATAHKIARVVYHLLKYGEAFVSEDAAEYEHKRQERELKQLTRRAKKLGYNLVPQVAPPPVPAT

SEQ ID NO: 273892 - protein, 347 aa, unidentified
MHYKTIKSEFFCGVDVHSKKSYLCILDNTGEKHVQMNIQNNFQLFKDILTPYIPHIVVGCESTYTYYWLADGCRQANIPFYLGHALYMKAISKNKHKHDPLDARTIADLLRTSFFPEAYPYPREMRPTRDLLRRRQRYVTIRAEAFTHIQMVAHQNAIHSIGSYEVKKRDEQARLIRLFTEHGLETLIHPDIETINAFDPIIARIEQEIRENAIAHNPRDMMLLKTAPGIGDILALIILYETHDIRRFPKHQNYASYSRVVRCPQTSSGKITGIKNQNIGNPYLKYAFNAIIISAQQQSAQISKYYKKLESKFGKKKARARMAHKFNTAVYYMLKNRIPFDEKMFLK

SEQ ID NO: 273893 - protein, 342 aa, unidentified
MREKRSIGIDLHRRRFTCCVRLENGRNYLSEWSLEQVPQFIKKLRSTDEIAVEVTGNTRLFYEAVAPYVARVVVVDPHQFRVISHSVKKTDPHDARNLALYLAKGLLPEVRMKEKEQAEVASLTQTRDRLVKLRTALKNKVNNLLSARGIELDKESLSSEKGLTWVLEQKIEPLAHLELDVIVEQIRSLNRSIARLEQASQEASQKLKGYRNLTSIKGIGSLGAGILLSVIGDVDDFAHEGKLAAYFGIVPRVQDSNETEHRGRITKRGSKLGRTALVQCALIAKRYSPYLHRYYERLRARRGTGKAIIALARKFLTIIYYTLKNNWIFEDFPNFVLAEAKT

SEQ ID NO: 273894 - protein, 498 aa, unidentified
MSRNIFPERSQAAAELLAGTDPARLLAVPVDFAKKAHVARIVRGTGEYLQERPLTVRNDAAGGAYLVGRIEAACARYRIPKGNVLVGGEDIPEYAWNFVLSIQAAGYRFVRVNAKEAKKHRTNSRATSDALALDGIAQVMLLRRGYDLQAHDGLYGALKMAERARRSLRTQVTATRSRIHRDVDLLCPGLLDERRSGLFPFGPGSLALMEDGCSVERLRRMSPASLAKRLARAGTPTPGSVAAKLKALAASALPPDPGLVPYRQGSLARKVGLLRALDAALADEENEMARCLVRTPGFVLTSIAGLGVVLGGGIVAEYGDPQLWPDPDRMMSYAGLAVRQHQSGGPGSPPVAGNLPIDANHHLKDILLQAAFHVGTTPHPVWRELGLPGDHPLREHYLRIEQRGGRSRLGTAKKLLRTVRAMVREQRVYLPADALRHPAAADAMPADRLLEYRRAVGRMLLAKWRRYDLGGIPDDDNQLQLWLRETDQLEHFLNNPTK

SEQ ID NO: 273895 - protein, 395 aa, unidentified
MYSLLVGIDVSKDFFATAGIDSEGKESFSRTCSMDSNGFGDFLKTITSHCEDLSRVLIGMESTGCYHINLFSFLTSQGIRTMVVNPLLIANFAKLSLRKTKTDKKDAMTIARFLLDHHEEISQLAVSQGLQDLRDLSRERESLSHLISATKVEMKRVLRTTFPELETIGDIYTGVMLRLIQEYPSARLVRAAKPRAIAKLLKGPYVGNKLTFTAEDILRAAKTSIATVSPAKEIILQGKIATLLHLQDRLEAITKLLTDLCKATRVDDLKILRSIKGVGPKTAAPFLAEMGTVDNFLSHKKLIAFAGMDPSVCQSGKFVGMSKISKRGNRHLRRAIYLMTASVVSKNDWFKAYFQKRKAEGLPPQKALFATAHKLIRVIFAMLSQRTYFKVKEAI

SEQ ID NO: 273896 - protein, 433 aa, unidentified
MLKLNYMSTLFVGIDVSSKTNAVYAMDFEENKYISSSFGNNQPGADKLVNMIAECMHKHKNLNTILIVLESTSVYSVHISNFLSTSEVLMPYKPYVFCVNPKATSNYRKSYIGMEKTDPTDAYLIADFGRVGRTKKLEPWRGGQFISLKRLTRHRMHLSECITREKTYMVSNLYLKFSELQLLEGDDKPFGSLYGATSSAVLTEFLSPQEIIDMPEEELLTFLAGKSRNRISDLSKTSELLRKAARDSYRLDKCMYEPLNISLASSFNCIHAYQKEIKLIEQAIEKCINGMNPNALLILQSIPGIGPIWASGILSEIGDITVFHSSDALAKYAGLYWPKGDSGDFTSEDNKMSKAGNPYLRCYLGEAANSVRKHIPEYADFYARKYAEVTKHQHKRALALTSRKLVRLVFGLLVKNQLYTGEKLDTEYNIESN

SEQ ID NO: 273897 - protein, 372 aa, unidentified
MPDVSSTAPADVRLWVALDVHKLSIVAATLPASGGRPEIYRIETTERAIRRFVDRLGGPDGLAVCYEAGPGGFELLRLLARLGVACDVIAPSLIPVRAGDRVKTDRRDAQKLVRLYRAGELTFVAPPRPETEGLRDLMRCRDDLRCTRTAARHRVAKQLLRHGRVYRGGKSSWTQAHRAWVAAQRLDDVLAQAALEQMLIHLDGLDRQLEALDRDLERIAASDPWREQVQILTRFRGIATRTALGLIAEIGDFRRFSHPRELASWLGICPTEYSSGDQQHRGHITKAGNHHARRLLVEAAWHYRHRPRQPASGPQPDARAWNAQVRLHHRWRALTTRGKRSTVANVAIARELTGFLWAAMTNQPLRDAPTTT

SEQ ID NO: 273898 - protein, 343 aa, unidentified
MQVVRIGLDLAKYIFQVHGVDARGKAVLRKTLRRDAVSHFFANLPPCLVGMEASNGAHYWARVLTDLGHQVRLISPQFVTPYVKSNKNDRNDAEAICEAVGRPSMRFVPPKSAEQLAIQAVHRIRRRLVSDRVQLVNQVRGILAEHGIVIPRDITQLRRGLAGLAAADDCRLSPLMQSLVRELQEELRELDRRIASYDRQVREIFCSSEACQRLGRIEGIGPVTATALVAAVGDQTCFKNGRQFAAWLGLVPKQRSSGGRTRLLGISKRGDRYLRTLMIHGARAALARAGSKLDAKSLWLNKLRQRRNPNVTAVALANKNARIVWAMLAGNTVYEPTLSVKAA

SEQ ID NO: 273899 - protein, 343 aa, unidentified
MEYVGLDMHKKFTFGTVMDSKGKIRKQEKFLTDRDSIKKFLEGVKHAKIAIESSTSAIPWHGFLTDMGHDVHVSHPLKTKLIAESKIKTDKVDSQVLADLLRSNFLPCSYVPGAEIVKLRNKTRHRVYLGRLKTSLKNRIRSELGKRGIDEPDTSLFTRKGNDFLVSLNIGEINSSLEVLEFVETKIKRSSEELEQVAKQHEDVKLLKTIPGVGTYSALLIFSEIADIGRFGNAEKLCCYAGVVPSIHQSGSVLRSGRTTKQGSAWLRWILTEVVWVHINNSPGSNLTKFFKKLAKTKGKKKAAVATSRKLLHVIYAMLRDRKPFMIKGQEKSRSAPAAAMTA

SEQ ID NO: 273900 - protein, 329 aa, unidentified
MKVQHIIGADLSKKSIDLVCHLLKSHVQIENTITGFKDLMQWFKHQKVNASKTMIVMEHTGLYSYCFEKFLHQHQIPFCKVNALAIKRSIGLVRGKTDKLDAARIAAYGYEKKDRLAIDVPGSDALKRLQLLHSTRERLVRHRASLICAIKEYKHIGISEKDIIMQTQLQLVKKFDKQIEKLMTEIETIIEKQEALKQNFRLLQSIRGVGKVVALVTIIKTHNFTRFANARKFACFCGTAPFPHDSGTSIKKKTRVSHLADKQMKSLLDLSAKSAIQYDKELREYYLKRTEGGKSKMSTINVVRNKILYRMFAVIKRQTPFLENYLQAA

SEQ ID NO: 273901 - protein, 374 aa, unidentified
MENTITYVAMDTHKKQHKIALHYPCREEIIEFTISNTVRDIRKMVNKIKKQAPGKIEFCYEADVCGFTLKRRIEQLGCRCCVIAPSLVPRKPGDRVKTDRRDARKLLMMYQAGLLTEVHAPNEHQEAARELTRLRETAKDNLKRIRHQLLKLLTRHGYVYTEGRHWTQRHITWLRTVKFAESTLTGVFENYFNEMIYCIGRLENPDKEVGLLANSQEYKEIVGLLCCYHGIDTLTAITIITEIFEFGRFESPRFLMSYLGLTPSEDSSGDKQEKGAITKAGNKRIRRLLNEASWHYRHRYVPSAALKKRRKGQPQWAIEIADAAGRRLSKRHRYLVEKGKMPCKANIAVARELAGFIWFTVTQYQARKDTNDAA

SEQ ID NO: 273902 - protein, 358 aa, unidentified
MKIIGCDLHARQQTIAMLDTDTGEFVEKTLEHDGEELRKFYSGLSRPVLVGIEATGSMQWFLELMEELGIECRVGHPQKIRKAETRKQKHDRRDARLLLTLLAENRFPTIWIPSTEQRDLRTLLRHRHQWVRLRSRVQHTLQSMALNHGLRRGHSLWSQAGQHALRALPLAPHASERRAALLALYPRLQESIDELDRQVSEQTQQRPEARRLMTHPGVGPITALATEVFLGDPLRFSDGKALASYIGMIPSEHSSGRRQRLGAMSKQGNALLRYLWCEAAMHAVGRDPELKRFYRRKLVQKGLGKARVAAARKLGIRLWIMMRDQIDYQEFCRRGKARQESGSVHAGMPDLDSGPAAQ

SEQ ID NO: 273903 - protein, 342 aa, unidentified
MEEVTIIGIDLAKNVFQLHGAAADGRPVFRKKLTRLQFQRFMAAQPPRIVAMEACPGSHYWAREMAALGHTVKVISPQYVTPYVKRQKNDAADAEAIAEAATRPHMRFVEPKSAEQQARAVVFRVRQKAIAQRIELVNALRSHLYEFGYIAPVGLQHLPKLVAVLEDETSDLPGPARIACRGILRQIESLGGEIAALDAQIAELSKESRWARLLQTMPGVGPITAMAIEAFAPPMETFRRGRDFAAWLGLVPRQSSSGGKARLGKVSKAGQHDIRRLLVIGAMAAMVGACRRGIPEDTWLGKLMLRKPRILVAIALANKMARRIWAMLTKGESYRDPALAEV

SEQ ID NO: 273904 - protein, 323 aa, unidentified
MIKDIKYFGIDISYLVFDVTDSNGNYYPFKNNASGFKKFTKLLDNNSHCVMEATGYYHYQLAYHLLESGIKVSVENALSVKRFIQMKLSKIKTDKSDSKLICEYAQKVDIKLWKGNTKDEMECLQITRALSVYTKQSTMLKNKLHGEAVLGAPSKAVVRSLKRSLTQLKKEITTLEDKLLVLVKLAHQDLLTRLKTIPGIGPKTSIMLVVLTGGFDRFTSAAELCSYAGLTPVIRQSGSSVKGRPRISKIGNQKLRNLLFMCRFNACKYNKACRDLYERIVAKGKSKKLALIAVCNKLLKQAFAIAKSGLIYDKEYKSTLVRN

SEQ ID NO: 273905 - protein, 314 aa, unidentified
MTIQNDKYHIGIDVSKAILDVYILPEKKFLQFENNIAGIRKLVKKLKLFSEALIVMESTGGYEKSTAQALAKENFSVAVVNPRQIRDFAKALGRLAKTDRIDAQVIALFGEKIQPKENVSCDENQQKLAEKNARRRQLVDMIIMEKNRLDKASKEMKKSIQHVVKLLEKELEKINKSLEQYIKSDDEYARRNTLLQTIKGIGSVVAAGIIADLPELGKLSAKQVSSLAGLAPLNRDSGSLRGKRTIWGGRASVRRTLYMATLVATRYNNKIKTFYERLCAAGKQKKVAIIACMHKLLIIMNAMIKNDQPWRLEV

SEQ ID NO: 273906 - protein, 359 aa, unidentified
MSDICIIGLDTAKHVFQVHAVGKEKTILRRRLPRDRVLPFFASFAPCTVGLEACGAAHHWAREIAKFGHDVRLMPPSYVKPYVKRNKNDAADAEACCEAVGRPSMRFVPVKTEDQQAALVRHKVRDVLVRQRTQWVNALRGHLAEFGVTVRKGLSRVADLVAVIEDEADRRVPTVARAALRIIIDVLAGIDRKIEDLDREVATSAKADLVAKRLMTVPGVGPITASRIAASFPNPGVFRSGRDFAASLGLVPRQNSTGGKSLLGGISKQGSGTLRRLLVGGAMAALFRSKEWRSDPWLVALRERKPTKVVAVALANKMARAIWAIMTHGGVWRSRPVDGTAVLALVKPEPPMAAAYGRA

SEQ ID NO: 273907 - protein, 405 aa, unidentified
MGIYVGIDWAEAQHDICVLDETGLVLGKRRIGEGLEGVGQLHAMLADHAAEPDQVVVGIETDRGLLVGALLAAGYQVYAINPLAASRYRERHVTSGAKSDPGDAKVLADLVRTDRHNHRPVAGDSELAASLQVLARAHQNLIWSRQRLVNQLRNNLREYYPAALAAFGTELAHPVALGVLDAAPTPAMGRTLSQSKLAAILRRAGRERGVEEKAAAIQAELRAPQLAAPALIGAAYGKSVASTVRILRGMNAELASLEAELAPSFEKHPDAEIYRSLPGLGIVLGARVLSEFGDDRTRFVHPKARKNYAGSSPITKTSGKSRVVLARHARNRRLADACHQWAFCALTGSDGARNYYHALRQRGKTHHQALRAVANRLVGILHGCLDHQQTYREDIAWPGSLTVAA

SEQ ID NO: 273908 - protein, 343 aa, unidentified
MQVVRIGLDLAKYVFEVHGVDKHGKVIVRKRLRRDAVARFFANLPACLVGMEASNGAHYWARMFTELGHQVRLISPQFVTPYVKSNKNDRNDAEAICEAVGRPSMRFVPQKSTDQLAVQAVHRIRRRLVADRVRLVNQIRGLLSEHGIVIARDIAQLRRGLAVIVGNINDGLSEMVRALMRELQAELAEVDARITAYDRRIKEIFHASEQCQRLGKIEGIGPVTATALIAAVGDRSCFKNGRQFAAWLGLVPKQRSSGGRTRLFGISKRGDRYLRTLMIHGARAALSRAGGKQDPRSLWLGKMRQRRHPNVAAVALANKNARIVWAMLTGDTAYEPALSVKAA

SEQ ID NO: 273909 - protein, 377 aa, unidentified
MKRVKFVGLDVHAETIAIAIAEQDGEVRSLGVIPNREDSVRKLVRKLGTMEELRFCYEAGPTGCVLYWQLTRMGAKCEVVAPTLVPVKAGDRVKTDRRDALKLARNYRAGELTAVWVPDAAHEALRDVVRAREAAKKDQLRARHRLSKFLLRHGRRPAMGVKVWTIKYLEWVKREVHFEQLAQEATLLDYLHEVEHAAARIARLDGAIEEAVKVAPPKMRAVIEALQALRGVAHVSAVTVVAELGELSRFARAKQLMGYGGIVASEDSSGERTRRGNITKTGNAHLRRVVVEAAWAYRHRPDVGATLRKRQEHVSEEVKEIAWKAQQRLHQRYRKLLAKGKNKGVVVTAIGRELLGFIWAIGIKVETAQKEPLQRAA

SEQ ID NO: 273910 - protein, 474 aa, unidentified
MSENSASPQRFIGLDIHKHYLIAIAVNPAGEQIGGPWRAELLELEAWAKRHLTGQDAVALEMSTNTWTIYDELKPMVHSLTVVHPPHVGLIVRAQVKTDQRAALALAQLLAKNLLPAMWVPPAPVREQRATLAQRTKFVRLSTQAKNRLHAALQRHHLALPPEGSPFALANRDWWRKLPVSVSERARLQSDLETLAFAEQQIARLTTALTAEAAQDERLPLVLQLAGFGVINSLTVLAAIGDIRRFETAKHLVGYAGLGARVHDSGQLHRTGRITKAGRRDLRAALVEAAQTAANTHPHWQAELARLEPRLGRNKAIVAIARKLLVAVWHVLTHSQADRFAEPERVARKLLTHAEHLGKQGRRVRRRAPMSAPSSIGWGWARTSRRSSVAATSVCGCRPLPWPPKRSGAQWCKPPGKVNWLQRTRFVFSERGGPTPYNRIVSNCGVLFFLGRGGFCSRAWFFVSELALDPIPFR

SEQ ID NO: 273911 - protein, 367 aa, unidentified
MSNLRYVGLDVHKDSIVISVAESGSAEAKVLATFLNDSNKIIKQLKKLSPDVSLLRVCYEAGPTGFGLSRRLKKEGIDCIVIAPSLVPQKSGLRIKTDRRDSKKLAHYLRSGDLTQVWVPDEQTEALRDLERTRDDAKNAERTARHQLSKFLLRNDRAYRDGREWTAKHMIWVRKQKFEDACRQCVLDDNIKAVDDASARVKQLMKHIEKFIEGHALQPLVKAMMGFRGIQILSATVIAAEIGDLRRFKTARQFMAFLGLVPSESSSGNTVKRGSLTKTGNGHVRRILIEAAQHYRHRPVLSAALRKRQEGISKEVRDISWQAQQRLCNRLTHFTNSGKPRNKAIVALARELAGFIWSLGQVSQLLA

SEQ ID NO: 273912 - protein, 369 aa, unidentified
MQINSVGIDLGKTTFHLVALGEAGKVLVRKKFNQRQLLTYTANLPTSLIGLEACSGAHFLGRALRKQGHDVRLIAAQFVKPFVKSNKNDFVDAEAIAESVERKNMRFVPIKTDDQLDLQAIHRVRDRLISRRTAVINQLRAFLLERGLTFAKTPAKLRNALPDILENPEVDLTTQMRNLIDLLWAEWKAVEYQIEGLSRELERISAGDAGCTRLRRIPGIGPIVATAIVAAIGNGAAFRKGRDFAAWLGVVPRQYSTGGKTRLLGISKRGNVYLRKVLIHGARAAVLRMKRDRAPIGAWLDALDARAPKNIVAVAMANKLARIAWAAFSCMPTTSRASTMLIGSLRQDRCRSSSPRMTSSLPTSTTSTS

SEQ ID NO: 273913 - protein, 379 aa, unidentified
MSITMIGLDTAKSVFQIHAVDETGKTLIRRKLSRTELIPFFEKQEACTIVMEACGASHHWARLLTSLGHHVKLIAPEAVRPFVKKGKKNDAADAAALCEAASRPDMKFVPMKTAEQQAILALHSARSLLVKQQTMLVNAMRGLATEFGLTVPKGINRLDELTALVDADEAFPETARRVFRALREQCNSLSDNIEEIETKIVAHARGDETARRLATIPGIGPITASLIAATVADIGTFKSARQFAAWLGLVPRQHSTGGKTRLGRITKAGNREIRKLRVLGATSMVYRAEQWNSAVGAWTRGVLERRPVRLVTVALANKMARIGVSGRSEVAPCCALDEGRSLGAALQEEASNHHERLLLNGDGRERHGQKARLDRVRYG

SEQ ID NO: 273914 - protein, 477 aa, unidentified
MNVKTSKAKKQVNLDNQAINLLSKEELGKKIEVVEKELKSYIWRELETNGKFAKNDKLSFITDDMLIVGCDVGSETHYIRAIDVRGREVSRGAFEFSNTEEGFENARTWMLILAAENGKNQIVLGLEPTGHYWFALAAWMISNGISVVQVNPYAVKQRKEIEDNSQCKDDRKDPKLIANPVKDGNYGMPYLPEKIYADMRRLSMFRDQLTEDRIRNINRLHRELKIYFPEYMDAFGKIDGAFTLEVLKVSAIPTDIVALGTDDLRNIWHNAKLRGRGYSRAHEIVSCAEKSVGLTDGIDAGCEAMKWYAGQILKLDVQLAAIESTLHKKCREIPYAENILAINGVGENILSGILAEMGDISRFDDVKEIQKLSGMGLVACSSGKHKGQTKISHRGRKRLRYWLFQAAKSAVSHADEFKQLHEYYTTRADNPLKKMQSLIVIACKILRIVYTILKTGTTYDRQKMLKDIKRPVSSQAA

SEQ ID NO: 273915 - protein, 359 aa, unidentified
MHKQGSKIDFSDQDIFVGFDVHLKSWKVTVVTQHSTMKTFSQDPDANVLHNYLQRNFPGGRYHSAYEAGFCGYWIHNKLLSLGIKSIVVNPADIPTTNKEIVQKEDKRDSRKIARSLRNGDLTPIYVPTDKTLGDRALIRLRSSMVKDLTRYKNRIKSFLYFHGVKTPESFSSAQSHWSNRYLLWLESVQLANESETKTLAALLQEVRHLRSSVLDLTRQITKLSKTEPYKQQCLLLQSIPGIGTLTAMTLLTELETVMRFKNVDKLCSFIGIVPSTSSSGEQEKTGSITPRGHSVLRSAIVESSWIAIKHDPALLKSYLDYCKRMESNKAIIRIARKMLSRIRFVLKNNQPYVCSISK

SEQ ID NO: 273916 - protein, 401 aa, unidentified
MKFVLTLDVAKGKSMFMLSSDVGEILLEPTEYTHNKSDFEKIDSNINKLNIKDNLTIIMEATSIYHKAPERFFKENNYHVIVFNPLIGKEITNTIRKTKTDKQDCIKLTNLFWKGSIPDRKYTEDEIYTKLNELSRQYYHLDEGLTRHKNRYKELLHLCFPEFELCFKDGKIYDLTALNFIKEFPHAYIIKGKRVDALAYNMANTNNRHLNYYKRKANVIKEYAINSYPGVSQNSKDVDNLKQLADVVVDLTKRKDEVKNQVIQLAKETKNYECINSLFGIGELSASLIIAELKDITRFNNIKQINASCGLDPTIIQSGKSINYHGPISKRGNRYARKLLFNCSRNIITLSAKCNKENSIYVYYLKKKQEGKHFYACLTACSTKLIRIIYALCMNNSTKQN

SEQ ID NO: 273917 - protein, 497 aa, unidentified
MPTKANIYSDCNPQVLKLFEQAGHPARVLCVALDYAKAQHMALVCNGLGDLLKGAFAVDNTPAGATQLLQQVRQCAKQRRIPTQQVFFGGEDYPTFAENFLRHLRKEKFLVVRVNAWEAKQQRSNFQASSDELDLLGIARCCLNRRGQPVQDLPVAYANLRIATRDRNELVRLATATSNRIHTYVDRLFPGFLSADKSGLAPFCQASLDLMAERFSPAEVRRRPRGALGQWLARRAVEEPHAVAAQLKELARCALGPAPEQTALLQRTLAQLVGLYRGLEGSISGLDRELAYWLARTPGALLTSISGIGITLAAGWMAELGPPQQWRAVRRICSYAGVVTKTKQTGGPDKEPMPSYVQQRCNKRLKNVVLQAVEKVRQYGPEDLRRSAQELEANGSHTEFGMAKRLVRLAKYLVVTGTIYRPKTLLDPDTPKEKLVLYYQTAWDKLLLKWKGKSDLKDVFAPAHPLGQWRQMVKELYALELRLPQQRATPTPGASAP

SEQ ID NO: 273918 - protein, 394 aa, unidentified
MRFAGVDIASETHVVALVDEDGKVLVKPTAFAEDAAGYEKLFAQLGASAELLVAMEATGHYWKNLFAALAARGFSVALLNPVRTHRFAEEDLQRTKTDAIDALGIARFAAQKRPAPTRLPEPATEELRELVRLRDRLLQDFGDRVRQLHRLVDLGFPEFTRYVKGLDSELASAILHDYPTAAAFRGVSAKRLAALRYDGRHQVGAELAGLLIAAAQRSVGHHHGEAYRVQVRYACEDLDILRRRLRQLDRDIAGTLGAHEVGTLLTTIEGIGPNTAARLIAELGDPADFRAPGALAAYVGVVPALSQSGKRKNTRAPTTPIGNARLRAALWMPTLTAVRKNPWLRAHYQRLLARGKLPKVALVACMHKLLLAVYSVAKHRQPFVAQLPTSEPTT

SEQ ID NO: 273919 - protein, 339 aa, unidentified
MSVKSVGLDLAKDVFQVHGVSETGRVIFNKKIKRAKLLSFFEMLPGCIVGMEACGSAHHWGRELRKLGHDVRLMPAAYVKPYVKRGKSDAADAEAICEAVCRPTMRFVEIKSEDQQALLAIHRTRDLVVRQRTQVANVIRGLLREFGHILPTGIQAVAAFSMRHLEGDHPDIPDLANGILGTLCHQFLGLNARIDGFTKMIGQHAWLNADARKLMRMPGIGPITASAIVATIGDARQFKTGRDLAAWLGLTPLNKSSGGKEKLGQITKKGDRYLRKLLIVGMTSRALMAKRHPEKVDMWTAKMLAAKPFRLATVAMANKAARVIWALLTKRVEYRQPVA

SEQ ID NO: 273920 - protein, 427 aa, unidentified
MTGKPEVTVEIRWDEKAGLRTGCGVRSQVIDVLKAQIKRRPAKKKVSTAAAKATKNFSQPKLTIGLDLGDRSSWYCLLDEVGEVLQEQELGTTPKAMRGMFGVMPRCRIALETGTHSPWVSRILIELGHEVIVAHARNVRLIGESRKKDDRMDAQTLARLARIDPQLLCPVKHRSAQAQADLTVIRARAGLVRARTSLVNTARGLAKSYGERLRGCNVRNMNPEKAAGLSPELPRALQPLLAGIESLSERIRECNEGIENLAQKSYPQVALLKQIKGVGTLIALTFLLTLEDPHRFRKSRDVGCYLGLQPGRRNSGQSQPQLHISKEGDPYLRTLLVQGAQHILGPFGVDCDQALGPEAGRAWREEREEAGDHRHGQEAGGVAASSVGKRRSVRTIAQQQPSGAAGSSIKSKHSKGGENQKPKAEFR

SEQ ID NO: 273921 - protein, 348 aa, unidentified
MDHIGIDVHKRESQICILDPGTGEVEERRIQTSAARYAAVLGRRAAAQVLIEAGTESEWVATCLESLGHQVIVADPGYAPMYPRRGRRQKTDQRDARALAEASARGTYRAVHRVSAAQRQVRQHLAVRDTAIRTRTRHIALLRGLVRSTGQRLPPGHADGFGPRLAALSLPPDLAAVLAPLQPLLTAVDTAIAAADTALAAAVAEDPIVRLLQTVPGVGPVTSAAIRATLDTPARFANARAASSYLGVVPRAHNSGDRRQGGHISKAGSSRARWLLVQVAWLVLRSPNPHLAPLRTWAERLAQRRGRRIAVVALARRLARILYAMWRDGQPFDGTRLERRRPAPPPVA

SEQ ID NO: 273922 - protein, 362 aa, unidentified
MKTTNNSSTKLFIGMDVSEKSIEICALSSKSDMSKNIKIANTPKSVNKFIDGYTGDKSFLVFAIETGTHSPWLEELISMKGCKVYVCNARKLRMIWQSDQKSDTRDATMLANMLKFNPKLLYPIKHQKKETRIDLSVIKCRDALVRSRTSMMNCIRGQLRSFGVDTSSLKPYNFSSLAAKIIPNELRCTMDGILAQIKLLELEIRNYDKKIEELCKKYPVTEKFRNIKGVGPLVSLVFALIISNPERFKRGRHLSSYLGLVPRRYQSGATDRQLSITKAGNCLLRRLLVQSANYIMGPFGQECDLREFGMKIRARGNNIAKKKAKVAVARKLAILMLKLWLSEEEYIPQYKKFKKEKLKATG

SEQ ID NO: 273923 - protein, 341 aa, unidentified
MKNLFIGVDFSKEKVDVAIVFADGLTETAPRVFNEFKTTVSGYKQLVKWVEKNSYGIDPSLWLFCGENTGDYSKGLCNFLYGKGYDMWLENAKSIKDASSLRRLKSDRADASMIAEYAMRNHDRAIMYEPLSESLAQLRELFLYRQMVVRHRCSFQVRRGEKKLTMEKSTIKTMISQSGRHIVSELNKEVEKIDKRIAEFIKSDEELTEVFTIVTSVPGIGTQNAVCLMVYTDNFSRFNYDSRKIACYYGIAPFGKDSGTSVHSDPHVHYMANRQIKAMLTQAALAAVKFNPVMARYYMRLVERGKKKQVALNNVKNKLVHLVTAMVRNRKTFTPEYKISA

SEQ ID NO: 273924 - protein, 430 aa, unidentified
MKSNTQNAKIEAITEKTLVLGIDVGSETHYARAFDYRGVEYSKKPFKFSNTEAGFVTFKAWVLDIKEKHGKDKVIPGMEPTGHYWFNLGKFLQDNEMKPVLVNPHHVKKSKELDDNHPTKNDRKDPKVIAGLVREGRYMIPYLPDGVYADLRTASNIRFQLQAELTRIQNRISRWFNIYFPEYKTVYGKPDAKSGMLILKAAPLPEDILTLGIDGVNQIWRDAKLRAVGKARAKTLIEAAEHSVGSKEGAVSARMEIRMLLEDYESRNTRLQEVMVLIEELVRKIPMAEKLLEIKGVGIRTVSGFLAEVGDISRFNNPKELQKLAGLALVENSSGKHKGETTISRRGRKRLRYLLFEVAMSLVSKNPEFRELHNYYTTRRLNPLKKMQSLMAIAAKLIRVFYAMLTKGVDYDPKKMVSDIKRPAVYLQAA

SEQ ID NO: 273925 - protein, 348 aa, unidentified
MNITTVGIDLAKLVFQVHGVNERGKTMLRKAFKRAELIKFFANLAPCLIGMEACGGAHFWARKLSEFGHTVRLMAPQFVKPYVKTNKNDARDAEAICEAVARPNMRFVPIKNVEQQALLGLHRARQGFVWARTAQSNQIRGLLAEFGLVIPKRIYALQERLPEILEDAENGLPGTSRDLFARLFHHFRELDRQVKELETHIKTWHRQSAASKRLEAVPGIGPLTASALVASVGDAKSFKNGRQLSAWLGLVPRQESSGGKERLLGISKRGDTYLRTLLIHGARSVLSALKRRADQTTEGWLGRLAARRNANIAAVALANKNARIVWALLAHQRDYQADYGSLAAQTMG

SEQ ID NO: 273926 - protein, 406 aa, unidentified
MHIIHERCCGLDVHKKTITACIITPKGKVIRTFGTMTGEILELADWIKEHQCTHVAMESTGVYWKPIYNLLELAEIEAMVVNAQHIKAVPGCKTDVKDAEWIADLLRHGLLKGSYIPSRDQRELRELVRYRKSLIEERAREVNWLQKVLEGCNIKLSSVVSDIMGASSRSMIEAIINNISDPKLLSKLAKGSMKSKRENLEQALHGLVGPHQRKILAAQLRHIDFLDEEIKSLDEEVGQRLRPFEEELELLDTIPGVGRRSAESILAEVGTDMDRFPSAAHLASWAGMSPGSNESAGKRKSGKTTKGNKHLRSTLVQCARAASRSKETYLSAQYHRIAARRGGNRAAVAVGHSILVIAYHILKNRQPYHDLGANYFDERKSAAVLKSAVKRIQALGYTVIVEEKVA

SEQ ID NO: 273927 - protein, 350 aa, unidentified
MARNITRTIGCDLGDRYSYLCVLDAAGEVETRARVATSQAGFSKWFKAVGSSRVALEVGTHSRWVAQLLTELGHEVIVANARHVRLIHQGPRKSDKLDAEKLARLARVDSHLLSPIRHRSQQAQSQLVVLRSREQLVRARTELINHVRGLSKSFGLRIPKCESTAFVRRAEQTQMPQSLLPALKPLLTALNALNEQIKAYETLLEEMAQNSKDAQPLLTIHGVGNLTALAFVLTLEEPTRFASSRHVGAYLGLVPKQWQTGRSDPELRISKCGDAFVRKLLVNCAQRILGPFGQDSDLRRYGERLIQRGGKSAKKKAVIAVARKLAVLMHRLWSTGEVYRALRDSVPEAA

SEQ ID NO: 273928 - protein, 320 aa, unidentified
MFSYCGIDVSKDRLDVVVLPDEECFSVRNDSAGWAELIERLRGFSIAAIGIEASGGYERGVMRALLAAGMAVRHVNPFRLRQFARASGVLAKNDPIDARMITSFVAIMPTRPAQRHAPAVERLAEMLAIRRQLSAEKVAAENASRLLENPMLQRLSRRRIARLTADIDMLDKHLVEIVASDAALGHRYQLLTSMPGVGSLLACTLIALLPELGSMSRKQVAALVGVAPYAFESGTLKGRRCIRGGRAPVRHVLYMAAMSASNWNPVLKVFHARLKGAGKLPKVAIVAVMRKMITALNAMVRDDVIWADRHRGRHPVPTAR

SEQ ID NO: 273929 - protein, 349 aa, unidentified
MIIGCDYHPRYQQIAMMDTETGELVERRLEHECGEARAFYASLPKGARVGMEATGYGQWFERMLAEQGHELWIGHASEIRAGVVRKQKTDARDAAHLLRLLLEKRFPRIWIPSPAERDMRQLLRHRYKLVCFRVSVKNQLHGIAMSQGVCRKKKLFTAQGREELEKLSLGPWASRRRRELLGMLDQLNAAIDELDRAVQQEAEKQADAARLMTYPGVGPVTALAFVLTLGPVARFQRSKQVVSYLGLNPKERSSGDKQHTYSISKQGNTMMRWLLVEAAQTAVRFDPELQRVYRRLKFNKGASVAKVAIARKLAVKLYWLLRAPASCAQMAPMQGSSRGTLVPNLGSTV

SEQ ID NO: 273930 - protein, 408 aa, unidentified
METLHRRCAGLDVHQKEIVACRRIALGRKVRSELARFPTTTRGLVELSAWLSEAKVTHVAMEATGVYWKPVWHVLCHDFKLILANASHIRNVPGRKSDANDATWIADLLAHGLIRASFVPPQPIQELRDLIRTRRELTREIVRHTQRIQATLEEANIKLTSVISDILGLSGRRILRAIVAGESDPHALADLRHPRLACPHDKLIAALDGRLGDHHRFLIGQHLKTIEQLEATIAEFDVRLEAALAPFREAIERLKGIPGVSDNVAQTLIAEIGADMSTFPTADHLVSWAGMCPRLDESAGRKRSKRLRKGAPWLKPVLVQAALSATKVKSSSMRARYLSLTPRLGHKKAVVAVAAAILRTAYHMLKDGTFYQDLGPDYRRPKNPQRAANNLAKRIRALGFIVEFKSAA

SEQ ID NO: 273931 - protein, 338 aa, unidentified
MAILTVGIDLAKNVFAVHGINEVGKPELVRPAVAREKLHGLIAALPPCVIGMEACSGAHHWARLFTASGHTVRLIAPKFVTPYRMSGRRGKNDAADAAAICEAVQRPHMRFVPVKNLAQQSQLMLHRARQGFVEQRTATLNRIRGLLSEFGIVLPLKAATVRRRACECLEDLPGWANTVVGDLLSEVSHLDERVTQYDQHIRQEARADTRAKRLMQLGGVGETTATCLLAMIGNGHEFDCGRQFAAWLGLVPGQYSSGGKARLGRITKAGDPYLRSLLVMGARAVLAAAKNKTDSVSRWALAVQERRGYWKAVVAIAAKNARMAWAVLRRGEDFALPA

SEQ ID NO: 273932 - protein, 342 aa, unidentified
MEQVSVVGLDLAKSVFQVHGVSAQGEAVLRRRLTRGQLLKLFEKLPPCLVGMEACASAHHWARELAALGHEVKLMPPQYVKPYVKRGKNDAADAEAICEAVTRPTMRFVGAKSPDQQATMMLHRVRKILTRQRTQISNALRAHMAEFGITAPIGRGGLERLIAVIADQEDARLPDEARACLAVLSTQLAMVKEQILDNDRRILADARKTEAGRRLMKIPGIGPLLASAIVACVPDPTTFGGGRSLSAWIGLTPRQNSSGGKERLGSITKAGNPYLRELLVVGAMAVVRRAKQGSTKRPWVTQLLSRKKPKVAAVALANKNARIIWAMLASGEAYREPELAAA

SEQ ID NO: 273933 - protein, 391 aa, unidentified
MPMYFVGIDISKYKHDCCIISAADQQIISKFTITNDKDGFEQLLTALNSLSNPEDIKIGFESTAHYALNLELFLENAHHSFMEVNPVLIKEYKKSTTLRRTKTDSVDCESIARWLITVEYKPHSKGFYHAYSLKSLTRLRDRLIRQRSFYLVKITNVLDHTFPEFKPFFNERLSKTALYLLENYGSAEKMARMNSASYDKLRCISRGKFSIQQFLRLKELAANTVGVNNSIFDLELNTLLTLYKSLSDEINTLETEIIKLIEEVHPHYMSIPGIGPISSAVIYAEYGDISNFSNPGQMLAFAGIEPGINDSGTESHGGRMVKHGSSQLRYVLLNSCLPLIRFDLTFATYYEKKRAEGKKHRVAITHVAKKLIRVIYALERQDVDFNAQKLR

SEQ ID NO: 273934 - protein, 315 aa, unidentified
MSQIPNTAIAVIGIDLGKNAFHLVGHDHRGAIVLRQKWSRSQVETRLANLPPCLIGMEACVGAHHLSRNLQMLGHDARLMPAKYVRPYSKGQKNDFRDAEAIAEAVQRPTMKFVATKTADQLDLQALHRVRDRWVGQRTGVINQIRAFLLERGIAVRQGLHSLRSELPGILATRTDVLLPRMLRIIEDLAGDWRRLDARIEGLSSEIETLARQDKACERLMTVPGIGPLISSAMVAAIGTGDVFSKGRDFGAWLGLVPKQISTGDRTILGKISRRGKFGSDITPHTPVSLESGHRPTLSGAPCASWTRTVAVLDA

SEQ ID NO: 273935 - protein, 349 aa, unidentified
MTLVGCDLHTRKQQVAVLDTKTGEMDERQLSHAGDAVEQFYRALSGPVTVGIESTGYALWFHELMQRLGHTLLVGEAAKIRAMVVRKTKTDRRDALHLLDLLKHERFPLVWIPDPATRDLRALVTHRMRLVRMRTMVKNGLHAIAMNRRLTLGPSLWSQRGLAQLRDLALSPHTTQRRDESLQLLTWLTARIEALDDRVAAAAQADPGARLLLSHPGVGPLTALTTVVVLGPVARFPDSKHVVSYTGLAPAVHASADTCRLGQITKQGSPLLRFVLGQAGLIAAHAEVDLKRHYRTLLRRRGRPKAIVAIARKLLVRLYIMLRDQIDYEEFRRRGRTPRGQEVPPPALA

SEQ ID NO: 273936 - protein, 323 aa, unidentified
MNEIIPTCLGIDVAKAKLDCALLNGGKYRHKTVANTPEGYAVLVQWLAKQGVDQTHLCMEATGIYWENAAQALAEVGHLVSVVNPALVKAHAQSNGIRTKTDAVDARVLADFCRQKQPPAWLPPPASHRTLRALVMRHQALVEIQTQEKNRLESSREEVRDSLDAHLVWLAEELKRVEQAIAKTLADDPDLRTQRDLLDSIPGLGERSIATWLAFCAEPARFTNARQVAAFAGLNPKHHESGSSVRGKPRLSRIGHAFLRRALYMPALVTLYKTDWGKRFRERLVANGKPVKVFIGAMMRKLVHVAFGVLKSGKPFDPALHRT

SEQ ID NO: 273937 - protein, 435 aa, unidentified
MEEVTDEPLYRDRVCGTGIGKAGVPATIRVPSDENPSRRMQETRAFGTARRQVLALADWLRCWQVPAVVMEATGDYWKPVSCRLEAEGFECVLADARQVKNLPGRPKRDTCDSRWLAQDFERGAVRSCFVATPEFRVIRLHTRYRRDLTGERTREKQRVEKLPEPAAIKLSGVLAGLHGVSGRDIMEHLIAGERDPRALAQLARRRARAKIPRLEEALDGAGFFTGHHAALLDAMLRRIDFLDADVDRVSAVIEELLAPWEEQLQQAEPMPGWRRRAAQDVLAEAGPDMTRFPTPGHLASWAGRAPLDHQSGQRKGRGKRKKGNRYIGAVTGETSVSAGRTRTREGSRYRRIARRRGKQKAQAALGSTQLKVLHKLWSNPGMRYEDPGEDYYDRQASIRRKTRYHLTELEDLGWDVDLRPRAEPSPDHQDATPAA

SEQ ID NO: 273938 - protein, 408 aa, unidentified
MNTLYVGIDVSSKSNVVYLMLPNGDKHSNFSVANSHEGSIQLVKRIHSALTSHSLDTVLIGLEATSVYGDNLVYFLREDATLAPFNRKIHVLNPKQVKKFHDTYNDLPKNDYVDSFVIADCLRFGRINKEVYLGDYHYKALQNLTRARFFAVQNLVKEKQRFMNVLFKKYSTMTQEKVFSDTFSTTALAVYDEFESAEALANMDLHELTDFIMKKGKNRFPDPDAVAKAIQKAARSSYRLPKTVNDSVNQVLSISITSMKALESQIKEFDKAIKAQMELLPNVLISIPGIGPVYSAGIMAEIGDINRFNSQAALAKYAGLAWKQHQSGGFEAEVTRLIPSGNRFLRYYLCEAAFSLVRCDKEYSDFYHLKYKEVNRCQHKRALALTARKFVRLVFRLLKDNRLYGPAK

SEQ ID NO: 273939 - protein, 481 aa, unidentified
MSKKPVNPPGRKAPASKKLDDSLFETFEALHPNAAGIDIGAETPYVSVPEDRADPSVRTFGCFTPDLQAMAAWLKECRITHVVMESTGVYWMPAYQILTEAGFDVRLVDARHAKNVPGRKTDVWDARWLRKLHTFGLLSGCFLPPQEISELRTYWRHRATLVASAAEQILRMHKSLERMNLQLHKVLSDTTGVTGMRILREIVAGERDPSKLARHRQQGVKHSEETFIKALSGDYQPEHLFTLQQSLACYDFFQQQWKECDQQLQVCLAAMQDKEPPAPPSSDGSAPQEGKPDNSLANPVLYRRKNQPHFDLHSELVRIAGVDLEEIDGISTLTFQTIISEIGTDLSAFPSEKRFGSWLGLCPNHRITGGKVRSRRTRKVQNRVAQALRIAAQSLHHSKSALGAYYRRLHARLGAPKAITATAYKLARIVWRMMTYGKAYVDVGVAAYEKKIQERTLNALAKRASSLGYALVAVGTGEMVS

SEQ ID NO: 273940 - protein, 393 aa, unidentified
MHNCLAVDVAKGKSMVTLVSSSGEVLIDPYEVNHSINDFTNLINRINMHKLDNISVIMESTGIYHRPIERFFLENNFKVFVINPIYGKMKKRNLRKTKTDKEDCFNLVNLFMSNTFKEYIKPDQLYLDLNALSRQYFALDELCVNIKNRYRNLVYLCFPEYEEIFKGTLIYSNIALEFIESYPHVDIISNTRIDKLQNFFKKREFRYWKSKANLIKEIASKSYPSVNMNDELVSNLSQIARLVNEYQKAIDIIKYKIISLAKKSKYFEPINSIYGIGEFTTSIIIAELGDINRFNNIKELTAYCGLDPSIKQSGKSINVHGPISKSGNKYMRKILYLACFNIVRIASLSSNEIDIEIYYRKKRNEGKHHYAAIVACSTKLLRKILALCKQLDK

SEQ ID NO: 273941 - protein, 407 aa, unidentified
MNQITSVGIDVSKGFSMVAIRQPGGVIVEPPFRVNHTSLELNALVQRLHILPGEIRIVMEHTSCYWRPIGLTLVNAGFFVSIVNAMLIHDFHDNSIRRVKTDRADALKIANYALTFWTELKPYSPEDELRQLLKMQCRLYERTLSTSVTLRNGLISLLDQTFPEINRMFHPLVKQSNGHVKWVDFVKTYWHKEKIATMTESRFMDSYRRWCKREHYQYYTSHARRIYGLAKETVASMPRSESTRQLICQAVDSLNAVYEALHQLRKEMLRLAQQLPEFEAVMSLPGAGNITGPKLMGEIGDVRRFTSKRALVAFAGVDAMPYQSGIMDSHSRRMSKRGSPLLRKTLFQMCSICLQLSRVDDPVYLFMDRKRGEGKQFYVYMVAGAAKLLRMYYARAKSVFDADKITA

SEQ ID NO: 273942 - protein, 353 aa, unidentified
MSTYYVGLDVHKASICIAVLNADGKLVMESVVETSAATILAFLKGLHGQVQVTFEEGTHAAWLYDALKKTKAKVIVCDPRKNRLLQDGNKSDRVDARKLAQLLRAGLLSPVYHDEHGTRDLKELVRSYEYLVEDSTRVMNRIKALYRGRAIACAGVDVYKLRQREVWLAKLPEAGARARAQRLFSELDHLAGLRREARQALVVECRRHPATKLLLAVPTLGIVRIAQLISAVVTPHRFRSKRQFWSYCGLAVVTKSSADYTVSAAGVRRTKKAATTRGLTQSHNRTLKYVFKSAALTASRCGPFKAWYAELVERGLRPELARVTIARRIAAITLAVWKSGEAFDADKLIKHGA

SEQ ID NO: 273943 - protein, 361 aa, unidentified
MTGTMTWVGLDVHARSTHAAAIDSMTGELVRVRFGAGVEAPLAWLAELPGPVRACYEAGPTGFGLYRAAVAAGIGIQVIAPGKTPRGPSDRVKTDRKDAELLARLLLAGSLTRVVVPPPEVEAARELTRAHDACRRDLMTARHRVSKMLLRHGRVYPKSTTWTAEHRRWLSRQHFDHATSGLVFADLLAAVDGLSSRKAAIALRLSQLATDEQWWPTVARLRCFRGIDTLTAFSLHLELGGDWRRFERAPSLSAWLGLTPSLNQSGESSRQGSITKTVSMLARRLLVESAWHYSRQPRLGATLANRQQGQPDHILQIANRAQQRLYRVNAKMRARGKPHNVTVVACARELSCFLWAAATAD

SEQ ID NO: 273944 - protein, 345 aa, unidentified
MNKPTSTSTSTLFCGIDVSARSLSVALIEPDHSVSQREFANSTSGHKALLGWLVKHNAPVRVSIEATGIYSLDLALALNAAPHIELAVLNPRQVNRFAQTLRRSKTDAADAIVLAEYSQRMPFTAWQRPGVEHLHLRTISRHIESLVVDLAEVKNRLHTIANSSTTPRVILVDLKQAQAAFERRLVKMRSEASKLIQAEPVLRLRFQLLVSVPGIAQVSALHILSELLLLPPGMTVRQWVAYSGLDPVHQVSGTSLHKPSHISRAGNRHLRRALYMPSLSAVRFDPHLRAFYQTLKTRHKTGLQALMAVERKLLHAIYGIFKSGQPYDGKRLFPNIQLEVESIAG

SEQ ID NO: 273945 - protein, 341 aa, unidentified
MTSYVGLDVSLNETSVCVLDERGHVRFEGRVPSLPDAIVQCLRQRAADASRIGLETGMTAGVLFRALTAAGLPVMCLETRHAHRVLSARSNKTDRNDARGLAELMRVGWYRAAWVRGVSAIYVRSLLQGRRLLIQTKRTLENTLRGGVKRFGLIMSSTAGRTFTHRAASVVDRDPAYAAFAQPLLAVLHTILDQIRIYDRQLRAISRSDQTVVRLMRVPGVGYLTALAFTSTIEDPKRFRRSIDVGAYLGLTPRVHQSGEIDRTGRITKTGDILTRSYLVEAANVLLTRIQRATPLREWGVRIMRRAGLKKAQIAVARKLAVMLHAMWSDGTEFEWRSAMA

SEQ ID NO: 273946 - protein, 405 aa, unidentified
MENQHKVYVGIDVHRQKHRVAVISLARLHRSKSGWKKAKFLDIENNSNDFERLDAAIREHIASFDEAAIAIDHTGGHYSESLVYFLQSKGYHVCHLETKAVKAARERLLDEECKSDIIDAASTAFLLYLRDMHGISFRISAVIPELGSQASVLNYLVIQRQQYNKLATQYTNRLHQLLLATFPEGEAKYFSKLLRIMPYYPTPEDIIGSQDLKGVKYVSKPDKEIIISLATKTIGAPAKLYRELIRDNSQQRIEALAKRKAITELIVKEVANHPYGSILLSLPYFGSIAAATIISVVKNIDKWPSKKNLKKALGVYSTLKQSGMSSGRGKMGKEGSRHARRVLFQVVLRSIGNPEKNDFADYYLRQVTRGKPKFKAIVSTMGKLAEIIYYCLRTRELYQYQGRYR

SEQ ID NO: 273947 - protein, 455 aa, unidentified
MPRHRPRLENLPPQLQQVNLNAAAIDIGSTAHFVAVPEGRDQMHVREFATFTADLQHVADWLQQCAVDTVVMESTGVYWIPVFELLEQRGFEVLLVDARKVKNVSGRTSDVLDCQWLPQLHTFGLLQGAFRPSDQIVPLRSYLRQRAMLIRGASTHIQHMQKALQQMNLLLHHVVSDITGLTGMTIIRAILAGERDPQILAQHRDPRCKKSVEVIAKSLVGTYRDEHLFALQQAVTLYDTYQNQMAAVDKRIEDYLASLERVTDESPPPPPKPRHSPTHNQPRFDVRTYLYQLTGVDVTRIDGIEAGSALALISEIGTDMTRWKSANHFVSWLGLCPGTKVSGGRVLSSKTKPTATRAAVILRNSAASLHHSQSALGAYYRRMAARIGKPQAVTATAHKLARIVYSLLKHGTEYTDAGQDYYERQYQERVVRNLHQRAKALGFELVPNAPESAVT

SEQ ID NO: 273948 - protein, 411 aa, unidentified
MQVIYERCCGLDVHKRTITACRLRWLGSEWQKEIRQFGTMTKDLLALSDWLVKEGCTQVAMESTGVYWKPVYNILEGQVELLVVNAQHLKAVPGRKTDVRDAEWIAELLAHGLLRGSFVPPPSVRELRELTRYRSSVVRDRARTVNRLQKVLEAANIKLASVVSDIDGVSARLMLEGLVAGQRDTEQLASLAKGRLKEKHGQLVEALSCRLQTHQSFLIAEHLAQIDYLEGAIERLSGQIEEKLRPFEQQIGWLDTIPGINRRTAEVLWAETGGDMGRFASARHLASWAGMCPGNNESAGKRRSGRTRKGSPWLRHCLVEAAHGAAHTKNKYLRSQYHRIAARRGKKKALLAVGHSILVIAYHLLTRKQAYADLGANYFDERDRQAVTKRCVNRLQKLGYEISLEKLQMAA

SEQ ID NO: 273949 - protein, 358 aa, unidentified
MRIIGVDLHTRQQTVAMLDVETGELIEKTLKHDGDEVRKFYSALPGQVLVGIEATGSMHWFLELLEELGIERQVGHPAKIRAAEPRRQKHDRRDAALLLKLQVENRFPAIWMPSTELRDLRTLLLHRHQWVRMRTRVQNALQAIALSRGLRRGKTLWSQGGQHSIESLSLPPNAAHRRTELQRLYRNLNEQIDELDKRVNGRALQRPGAKLLMTHPGVGPVTALATDVFLGDPARFEDGKAVVSYVGMIPSEYSSGGQQRLGGLSKQGNPFLRFLWCEAAVHAVRRDPELQRFYRRKLAQKGLGKARVAAARKLGIRLWIMLRDQIDYQEFCRRGQMRQKNGGACAGMPEVGHSPAMQ

SEQ ID NO: 273950 - protein, 390 aa, unidentified
MRAGASLTQSRGLPSKALFGSAYMCWEAPVFTERTSVGLDVHARSVVAAAIDGVTGEVFRARLTPGNDDVLGWVRALPGPSAVVYEAGPTGFGLSRALTTAGIRCEIVAPSKIQRPAGDRVKTDARDAMHLARLLRLDEIVSVTVPTVEREAARDLVRAREDVRGDLMRARHRVSKLLLRQGVVYYGGRAWTGAHLVWLQAQHFDAPGLQFAYDAAHEAVLQAEARRGRLDKAITAMAADSEFTPVVHRLGCLRGVSTLTAFGLAVEVGDWDRLTGATIGAYLGLVPTESSSGQSRSQGSITKTGNTHARRLLVEAAWHHRKPYRSPGATMKARWELAPAAARARGHAGNQRLHQRWLTFTDRKKKPVIANVAIARELAGWCWSLAVMDG

SEQ ID NO: 273951 - protein, 371 aa, unidentified
MKKNTIFVGLDVHKNSISVALADAGRDGEIRYYGVIDGGLESVHKVARKLQSTGATLRFVYEAGPCGYGLYRSLTNKGFDCIVAAPSKIPRKSGDRIKNDRRDALTLARLHRAGELTPVYVPTEEDEAMRDLTRGREDAAKALRVAKQHLLAFLLRYGHRYSGKTYWSKAFWNWIADIKMPHRAQQIMLQEYIHAVHKQFERVQRLTDQIRALVPQWRLAPMVKALQALRGLSLIVASTTLAELGDLTRFSKPKQLMAYLGQVPSEDSSGDSNHRESITKTDNSHVRRALTEAAHAYSHPARESRALLKRLEGLPQRVQQIAWKAQVRLCARFRRLMARGKTRNKIVSATARELSAFIWAIAQELQPKNQA

SEQ ID NO: 273952 - protein, 409 aa, unidentified
MTVFCGIDWAERHHDVAIVDDTGTLLAKARITDDVAGYNKLLDLLAEHGDSSATPIPVAIETSHGLLVAALRTGSRKVFAINPLAAARYRDRHGVSRKKSDPGDALVLANILRTDMHAHRPLPADSELAQAITVLARAQQDAVWNRQQVANQVRSLLREYYPAALHAFQSKDGGLTRPDARVILTMAPTPAKAAKLTLAQLRAGAEAQRPHSRLRHRNRAAAGHLPFRVRPPASGGRGRLRSPASGPAQATDATCLAADDLAKAVEAAFREHADSEILLSFPGLGPLLGARVLAEIGDDRSRFTDARALKSYAGSAPITRASGRKHFVGRRFVKNNRLMNAGFLWAFAALQASPGANAHYRRRREHGDWHAAAQRHLLNRFLGQLHHCLPTRQHFDEQRAFASLLQAAA

SEQ ID NO: 273953 - protein, 403 aa, unidentified
MTPHSIVRSLLLLGLRVNATPKGAANVTMIDAERPDTTEVEVVMGVDTHLDFHVAVAVDHLGRGLGELSVPTTAKGYERLLCWAKGFGPVRCAGVEGTSTYGAGLARHLRSRGIEVLEVERPERRRRSSRRNLEKSDPSDAEAAARAVLAGQTSGVPKSSDGRVEMIRALRAARRSAIKARTQAANQLQGLRVTAPEQLLNRLRGLSTKELVSVAARFRLADGPTDVPSATKFALRSVARRYEALSREIAELDVHLDRLVAQAAPELVSLPGIGTENAATLLIVAGDNPKRLRSEASFASLCGVSPIEASSGKVVRHRLNRGGNREANRALYMICLARMRRDLRTQEYVARRTAQGKSKREIIRCLKRYLAREVYRVLISCGAHSSPTGPKEEAQIAAGSSAA

SEQ ID NO: 273954 - protein, 422 aa, unidentified
MKQEIGMNSHLSNTNYKAFVGIDWANDKHDLCVQDPLTGNREFSVIKHDVNEIDKWIKGLHKRFGSPIAVAVELTKGPIVYALQRYDFVVIVPINPTTLAKYRTAFKPSKAKDDPTDAEFALELMLRYPNHFPPLNQQSVDMRKLMFLVEHRRKVVDDKQRVVNQMINAIKQYYPQANEWFCKKDTHIFCDFIARWPSIQQAKKAHKSTLVKFFNDHGIHNDTIVSQRVSLIKKAKQLTDDKAVIDSHTMLVIFYVERIVNSMKCIQEYNKSISELMDKLPDAPIFTSLPGAGAALSSRLLAAFGEQRDRFKSAQEVQQYAGIAPVTERSGQKSWVHWRWQCSTFLRQTFIEWASHSRLKSYWANLYYLQQREKGSSHQAAIRALAFKWIRIVYKCWQDGKPYNETQYLRALKDRGSPLISG

SEQ ID NO: 273955 - protein, 359 aa, unidentified
MESDGKVKNIVGIDIGKKWLEVVRLNGRGTIERIKTKTNHEGESSLYRWLKTGDTVVMEAGNQAFRIAKRIRELGNEAIVLNPGDVATIYASLKKTDKEDALKLAKLVERHPREELPEVSIPTDEEEDARRLTTEQAFWTETATQGKNRLHSLFTQAGLTDITKKHLASHESREKSIALLPERYQKEAKRIVSNLKYLDECLEVVESETIEILKSNMDYTTIAMSMPGIGPVTTLSLLAYIGDCGRFSKGKQVSYYVGLVPSVDISGNMVRYGKIIKRGCVPIRRVVIQGAKSLVRAQYGGELKEFYEKQYHRIGKGKAIVAVARKMMETFYAMITKGELYRGVPLEFIDKKFKLYGLT

SEQ ID NO: 273956 - protein, 411 aa, unidentified
MHNRQNYLYVGVDLHKEHHTAVIINCWQEKLGEIQFENKPSAFSEFLLEVETYVSNGLSVVFGLEDVGGYGRALAKYLVDHEQVVKEVNPALSFLERKSQVMIQKNDSWDAECVARILVNKFNQLPDAKPNDLIWSIQQLISRRNALVKAQSALKNQLHIQLNHHYPSYKKFFSELDGKTALAFWQQYPSPSCLEGANIKQLTAFLLDVSNNTCSVKKASEILKLVKEDGHTMKEYQETRDFLVRSIVRDIEFKKTEMKYIERELKQLVKLLDYQLETMPGIEVVTASALIAEIGDVRRFPNANKLARFAGIAPVYFGSGGKGKTHKSKQGNRALHALFYNLAVQQVQVAKGSKMPRNPVFHAYYQKKLKEGKTKGQALVCIMRRLVNIVYGMMKYKTAYELPIVEEKEVV

SEQ ID NO: 273957 - protein, 341 aa, unidentified
MAKFIRMAIDLGKNYFQVHGLESEGGRSISRKVKRSKMHEVFSQIEPCRVGMEACGSAHYWARQLAAMGHEVVLIPPAYIKPYVKRGKNDAVDAAAICEAMSRPDMRFVPIKSVDQQAVLMLHKTRELLVKQRTMAVNALRGHLAEFGIVAAKGIGRVDELLALAKADAALPPIAMAAVACLDQHLEGLDLSIATVEKEIARSHRQNPISRVLDEIPGVGTLIASVVAASVPDPGVFKSGRDFAAWLGLTPRQNSSGGKEKLGAITKQGNRYIRKMLVTGATSVLRVVGKRKGSFADWINALRVRKPERVVAVALANKLARICWAIMTTGEGFRTDTYVKA

SEQ ID NO: 273958 - protein, 345 aa, unidentified
MKKVIAGMDLHSNNVMIGIMDMDGQRLASRKLPCELKEVVKFLAPFKKRLERVAVESTYNWYWLVDGLQALRYPVVLANPAGMEQYSGIKHADDTNDAFFLAELLRLKILPTGHIYDAALRPVRDLLRRRLMLVHQRTALMLSFKSLYTRTTGQELTLSQLKELAIKEAQELYEHPANQLIAGMQIKHIEQLTESIEKIEKAVLGSARELPYYDKLATLPGVGRILGMTITMAVGDIKRFADPGHFASYCRTVEAKRMSNHKKKGENNSKCGNKYLAWAFVEAANFARRYDEQCRKWFERKVVRTSNVIAIKALACKLAKAAWYLMAEGTDYDSQRMFGQPAKTK

SEQ ID NO: 273959 - protein, 344 aa, unidentified
MRIVCGLDVHKDSVFACILNENGDKFECKFGVLTPELEELHQLLLTHDVKEVTMESTSIYWHPIWRILDDIEDLKLVNPYFIKQLPGRESDVRDAAWIAECTIKDLIRGSFVPSTIVQRMRQYNRRIFDLNKEIVYKLTKLNAVLQRCNIRISNHVSSVDSKSYKEVVRLLSEGVTDANHLACVIHGRTVNRVGKDTIIASLRGVISDVDIDLIRQYREEIELAQRHKQECQHKLTQMCQNEFLKEFKNLQTIPGVKERSGTSILVEIGANMKMFITAYALVSWCGLKPRNEESAGKIKSRRITHGNKYIRKTMIECAWGLVKHRIASSPNLVIHKRSSERKMP

SEQ ID NO: 273960 - protein, 411 aa, unidentified
MRVHHTVCCGIDVHKKSVTACLMWGPADREPEWEIRRFGTMTSQLKVMVEWLKQANCEIAAMESTGAYWKPVWNVLEGKIKLVLANAKHVRSLPGEKTDNKDGKRIASYLRHGLIRPSFVPPRDIRELRDLTRYRQKLLANGAAERNRIQKLLEDANIKLGSVLSDVFGVSGQRMLQALVNQPTTDVEQVAALAHWRLAPKIEQIKHALEGHVTAHHRFMIDLSLGHMQYIEQQILRLDEEIARHIQPYQKQFQLLQTIPGIGGNASAAVLAEIGPDVSPFDDEGKLASWSGMCPGNNESAGKKFSSNTRKGNPHLASTLVESAWASTHTKNCQFKTRYYRLRSRRGPQRAIVGIAHALLRTIYVVLKTGQPYQEPLRPALTEDRRDRKTKRLSRELRNLGYDVILRIKTP

SEQ ID NO: 273961 - protein, 400 aa, unidentified
MLSIGIDVSKGKSTVCGMKPGGEIVYTPFEIQHTREGMSDLVSLLRGSGEEVRAVLESTGSYHCPVVAALLENGIFVSVINSLRMKRFCSQSIRKVKTDRIDAMQIALYGLAYWQELQPTRLPEDTYRELQLLARQYYQMTSMLIKAKVDFNAICDQVLPGMQELMNDHAGRHKLSDFVLRYRHTTHILEMGETRFRKDYCKWAEKKGYRNCERMAVLIFATAQNGIPVLPNAPSTQIVITEAIRVLHTVEASRDAILTQMQALAKTLPEYSLVREMPCIGDTLAPRLIAEIGDVRRFHSKRALIAYAGIDAPPYQSGKFCANNRHISKRGNRYLRKTGYEVMQSYVMHKPANDPIFTFIEKKRGEGKCGKLAMVAGLNKFLRVYYGKVTELYRSSSATE

SEQ ID NO: 273962 - protein, 326 aa, unidentified
MMIIGIDVSKNKLDCALIDHLNVDKLKFKVVSNSEVGFIALIDWLSKHVKTTVSDYHCVMEATGVYHEQLADCLFNMGAKVSIVNPAHIKYYGKSLGVRSNNDKKDSVVIARYGLTQKPMIWQPETHEIKVLKALASRLDAIEKDILREKNRYEKSSSNPCSDTILESIQKMLAVLNEEKTSLERLIDTHINQHIYLKTNYALLQTIPGVGPVVSRYMLIVIGSRSFKSASQCAAYIGLVPIQNESGSSLRGRSRISKAGNPVIRAKLYMAAISALQHNPDIKIQNQRLLKNGKSKMSALCAAMRKLVHICFGVIKHQEPYQVQAN

SEQ ID NO: 273963 - protein, 340 aa, unidentified
MDTIAIDLHKRESQLRTITSDGELIECRIVTSRDQFTRTLGDRPRARILVEASTESEWVVRHLETLGHEVVVADPGFAPMYASRSKRVKTDKRDARALCEALRLGAYREIHRASDARRHLRAQLTVRAARVRTRTRYIAVIKAFVRREGLSMASGEAIHTLTKLAALPLPPHVREELAPLVAVWAPLGEQLAAVDATLTAIAATDPVVTRLRTMPSIGPITALAFVAALDDVARIPNAHQVQGYLGLVPSEHSSGDRRVRGRITKRGDVRLRWLLVETGWRILRAPNADLQGLRAWGLRIAARRGKRIAAVALARRVAGILYAMWRDDAPFHAVPLAEAA

SEQ ID NO: 273964 - protein, 355 aa, unidentified
MNQEKYIGMDVHQATISVAVMDGRGKVIMECILETKAATILEFIRGLHGSLSVTFEEGTSAAWLHDLLKPHVADLVVCDPRKNALLKDGSKSDRIDARKLADLLRLNRLNPVYHGEHGVRTLKELGRSYLTITQDLTRVMSRIKALYRSWAIPCSGTTVYAPRHRAEWLAKIVEPGVHLRAERLYQQLDLLQPVRQQARHDLLVESHRHPAVKLLRQIPAIGPIRAALLVALLQTPHRFRTKRQLWAYSGFALETRDSGEYRMVRGKVRRNRERLTVRGLNVNHNHDLKNLFKGAALSASTRPGPLYDFYVGLLQKGMRPTMARLTLARKIATITLTIWKKGVNFDAQQLNRQAA

SEQ ID NO: 273965 - protein, 442 aa, unidentified
MSREDPVSVRLKAAAKGTSRNPHTKNRMNEYKDHQYFAGFDWASRHHQVVIVNSHGQLVAHFQFDNTAAGWELWQQRAREFAPLAVCFETSHGVLVERLVQTEGCTIYPLDSKAGKAYRDRKAPSGVKTDFRDAWAFADALRSDGHSWKRLEPADPLLAELRMLCRDELALIEERTALINQLRKTLEEYYSVALEAFDDWTLPGAWSFVQRFPTPAALAKAGKRKWEKFLHTHLLFHKKTVAQRRLELFAKALEFTAGDSITEAKSRLAQTRVKQLLLLQREIDGYREKIEGLFARHPDSNLFDSLPGAGPKLAPRLLAEIGQDRAAFKDAQALQCYAGTAPISFQSGQLHKTRIRWHCNATLRATVHLWADLSRKFCSWAQVYYKAARERGKTHACALRCLGQRWLKILWKMWQTNSCYDAELHTQNQIAHGSWLLQIKPS

SEQ ID NO: 273966 - protein, 411 aa, unidentified
MGLLQEALPASTLVVAIDPGKVSNRVWLSTGETGEVVPPLSLPVLRPGLEQLHRLVLDHTGAAGAVFAIEATGGLHQAWMRELNQRFPGSVRLFAPSETTAARAQLGSRRFKTDDRDCAALTYLARQGQGRLVPDQVQDALAAAVRHRRGLIAEHKVAQQRLHDQLHALCPGLAAPDGHGRALQVDSVIGQAVLDCAAAFAGRPPAPRSLRARAHGRVLDREAEFWIDRWRCCLPPPTDAQARAARLGRSLARWRALTADIGAVDSEIAALLAGSDGQVLTSLPGVATSRAAAFAAFSLPIDRFPSAEHLYSATGLAPGSYQSATINRRTPISRQGLPEHRDALMNLAWGLSQHCGPFIDRHHELRARGLRPIPARIALARHACRLAYTLLKTQQPFDEQRYRRARHQSER

SEQ ID NO: 273967 - protein, 354 aa, unidentified
MMIIGCDYHPGFQQIAFVDTESGELQERRLEHREEAEKFYRDLGAQGVQVRLGMEASGHARWFERLLSELQFELWIGDAAAINAKRVRKQKTDRQDAQLILRLMLKDDFPQIWVPSLENRDLRQLLWHRHRMVQARTRLMNQLQAVALNEGLRCKKRLWRDAGREQLEKFRLAPWASRRRRDLLELLDRLTPTIAELTAAIEHEMERCPAAQRLQTHPGVGALTALAFVLIIGRADRFQCGKQIACYLGLVPLEKSSGNQRRLGHITKQGNSLLRFLLVEAAQVTVRSLPEWRSKYCHMALRRGRKIAKVAMARKLAVRLYWMMRKKWDYEQLRKFGSHAGQPGNRHGVKSNTE

SEQ ID NO: 273968 - protein, 387 aa, unidentified
MGKTMSLASPADAVDYDATLIMAVETSNKRWVVAAHVPGLGHIKAKQTIGPTAEALATSIEGYRRRAAASGIAIDRVIVVYEAGYGGFWLARWLTARGIDVHVVQPSSVPVERRKRRAKSDNIDADLLLRTLLAWLRGEPRVCTMVAIPEEAEEDARRPSREREELIRERIMLTNRIGAILATLGIDDYNPLRRDRRVRLEALRTALDHPLPEHARAKIVRIIERLELVLSQIAALESQRDAVLEDEAPEEAKRMIKALVLLRSIGAQSATVLVYEAFIRRFANGKALGCYAGLTGTPFNSGGSEREQGISKAGNRRLRAAMGELAWLWLRYQPESALAKWFRERLAGAKGRLKKVLLVALACKLLIALWRYATDGVIPEGAVLKPA

SEQ ID NO: 273969 - protein, 422 aa, unidentified
MITPQIDSFTAIVGIDWGDSKHDVCIQASTGEGREFDVIAHRPAVVDQWIKSLHDRLGGPIAIALELSKGPIISILQKYDFIVIFPINPSTLARYRSAFKPSRAKDDPTDAEMALDLLLRHPDHFKPLQPQSTDMRTLATLVEQRRQLVADKIRLTNRLRSSLKEYYPQVLEWFDHIDTPLFCSFFTRWPTLAQARRARPNTLQRFFREHNMRFEKVLASRIEAIKNAAPLTLDNAIIMPHRMIAQVLVEQLRLILSAIKEFDAQIDSIAKVQPDYALFRALPGAGPSLAPRLLVAFGEQRDRFKSAEDVQKYAGIAPVTERSGKKHWVHWRWQCSKFLRQTFVEWAAQTINKSYWAGAFYQQQRAKGCTHQAAVRALAYKWIRIIYRCWKTAVPYDEAKYLKALERRGSPLLARQTILKIA

SEQ ID NO: 273970 - protein, 369 aa, unidentified
MGEYSEIFVAFDVAKRKHAVAVAESGRRGEVRFLGEIENSGTAIERTLKKLSGRHGRLHVCFEAGPTGYGLYRQVQALGHACTVVAPALIPRRAGERVKTNRRDAVTLARLHRAGELTGVWVPDAVHEAVRDLVRARQAAADDLRRKRQQLLSFLLRQGRIYGAGGHWTLAHRRWLARQSFEHPAQQIVFQEGIDAIEDAAQRLHRLEKQLAIIVPSWSMAPVVAAFQAMRGASFLVAVTFAAEIGDVRRFDTPRQLMSFLGLVPAESSTGDTIRRKGLTLAGNRRARRALVEAAWTYRFPARVSEALRARLDGLPKGIRDIAWKAQIRLCARYRRLSAAGKKLPVVVAAIAREIAAFLWAIGREVAPM

SEQ ID NO: 273971 - protein, 414 aa, unidentified
MFAVGVDVSNARSTVAVLQSKTKIAIKPFEVQHTAEGFATLAEKLSALDGEARIVMEHTGRYYESFAMSMHQAGFFVSAINPLAIKEYQDGITVRKVKTDKADAVKIARFALDNWEILPQYTPMDTIRYNLKTMHRQFQLSSKTKTALNNNLIALMEQSYPGADKYFDSPVRPDGSQKWVDYIDTFWHVDCVAKLSQKAFVERYQKWCKRHGYNFSEKKAVELYTDAKQKFALVPKSDTCKLLVKEAVSQLNAVSRTVETYRAEMDRLASQLPEYDTVMSMTGVGKSMGPQLMAEIGDIRCFAHQKSLVGFAGTDPIKDDSGDKVSDSKPSSKRGSPYLRKTLFVIMTILLQLQPQDDPVYQFLDKKRSEGKKYYVYMTAGMTKFLRIYYGKVRDCYIKKGLWDRPKMNEAKPD

SEQ ID NO: 273972 - protein, 390 aa, unidentified
MAGQSTSRLAFPRFSNGLRDLADWLAKYSCSDVCMESTGKYWIPVFNILEKTCWVTLAHPKYTKPQKGNKTDRKDAKWICDLYMCGMVKPSFIPPPDIRQLRDLMRYRVKLTNMLTGEKNRAQNCLTVSNLKLDDVFSDVFGKSSRSIIQYILEHPGEQFDVTPFIHRRCKHPVEEIQAAVDGVVSREQAAKLKECLLHIDQLNAHRERIEAEILRLAEPYPYQLELIRTVPGFAAAPLTAVALISEIGVDMSVFPSAKHLASWAGCCPRNDQSNKKVKSTRISRAGCYLKPLLVQIANAVIKSDRHPECRERYRRIKARRGHKKAIIAVCRMLLTAIWNVLSKLEPYSAKGYLADKLTEHSVVISKAEGLALLRKRGYIFKDELAVESG

SEQ ID NO: 273973 - protein, 354 aa, unidentified
MPTVADVVDAVIAVDTHADTLAAALGAPSGVLLGEGEFAASAAGIGELIGWALERAPGPRLLFAVEGTRSYGIGLARALVRLGLPVLELERPARAQRRGRGKSDPIDAALGVRTALGLDADALPTPRADGDREALRILLIARAEMTGDKTAKTNRLIALLRTGHDSDRDLVRGPLTAAVLTRIARRRGHPGDSTEQAVRRTEARRLALAVRELHTALRANKTALADLVEHLVPGLLTSRGIGPVSAAQAIVSFSHHGRCRHEGAFARLAGTAPLPASSGRTVRHRLNRGGDRALNRALHDIAKTRMIHCPRTRNYVDRRRAQGLSDREIRRCLKRYIARQLYRTLTAAPALDNT

SEQ ID NO: 273974 - protein, 435 aa, unidentified
MEQPTRFIGMDVHKDTIVVAVTATGEVGKATAYGTFPNTAAALGKLVMRLRQAGDGPLKFCYEAGPCGYGVHRTLTRLGEDCMVVAPSMIPRKSGDRQKNDTRDAASLAVLHRGGLLTAVWVPDSAHEAMRDLIRARLAAVRNVRTARQQLSAFLLRHERLYPGNRKPWTKAHRGWLADQSFAQPAQQIVLEENIEAVRLGEQRRDRVDDYLRAQIPAWSLFPLVRNLCALRGLDMIAGAGLAAAIGDPSRFTAASNFMAYIGLVPSEHSSGTQRHMGAITRTGDVHARTLLIEAAHCYRFPARVARHKLAALDAVPEAVRVIAWKAQTRLCQRYRRIMAKGKPRQVVVTAIARELAGFVWAIACITSDPPATRSTVTPASEEAAPTSRRATIVSSRNGSQRRNEVARPGIRQDHARHGQPEKPEEMIAHHHSTG

SEQ ID NO: 273975 - protein, 354 aa, unidentified
MLTKVTTTLSEAQHIYVGIDVHKKQYQVQILGEDHNTGPAFSQEASPEILINHLRKNYPGASVHCVYEAGFSGFALYRALTRAGFECLVVHPADIPTTDKEKRTKSDKIDAKKLALQLRSNVLTGIHVPSEHTVSFRNLIRVRKRIIRKRTSCKNQIHHFLFFNGIQRPDEFVGWSKKFIDWLREVPLNLCDRLALDCLLRLLDTYQEIIKDLDRRLVKLSNEAPVKKPIGLLRSVPGVGLTTALVLLSEIGDMNRFKQESQLFSYVGLVPHLHASGDTEHVGGITIRGNHWIKGVIIESAWQAISKDPALFNCYHRYKKRMNGNKAIVRIGKKLLSRIRRVMRTEEPYQMAVN

SEQ ID NO: 273976 - protein, 427 aa, unidentified
MDYNKTGNRKQVNILEASIGVDIGKYQHVAVAQNWNGRRLKPLIFDNNLQGFNKLWEYREKAKECLGVSNVRFALEPTGQYWKALAEWLERKPAEVRMVQPAHTHKAKELEDNSPGKHDIKDAGIISDLDIQRKSLRLVRPQGVFAELRYLTICRQGLVKDLNREVNRLHRLMDVLFPELIGLFRNHIGKGLLELVKTAACPDQMARLGVQTIEGLLKKKSKGKLGLERARAIMDAAANSVGIKEGREALELELRLLLVRMELVRKQLSEIEQTIKGVIKKVPYIEILSSIPQVGQITLATILGEAGDFRQYQNVRQIIKLSGLNLYEISSGQHRGRKRITKRGRPLLRQMLYLAGLRLIKQEGVFSQFYKRLVEKGKAKPQAIVAMGCKLLRVLFAMVRDNRKFEEKDESPLLIVNQVRELSLIGA

SEQ ID NO: 273977 - protein, 368 aa, unidentified
MHPDAAGIDIGNESHYVAVPPSRDSQPVRRFGCTTAELKAMADWLKQCGIRTVAMQSTGVYWIAVYDILEQAGLEVYLVNARETKNLPGRKSDVQESQWLMKLHTYGLLRNSFRPSQEIRRMRTYWRQRNDLVRAAGRHIQRMQKALTQMNLQLANVLSDVSGVTGQAIIKAILAGERHAHKLAAFRDCRVKASEEEIARSLEGNWQEDLLFVLKQEQAGYEFCQKQMTECDRQIEQYLQQREDRSRGASLPEEKRKERLKKKKGNAPQFDLRAELFRISGTDLTRIDGIDVMTAMTILSEEGWDRSKWKTEHHFVSWLRLCPDNKVSGDKVIGKGRLPTNNRVTIALKMAASTLWASNTYLDRSSAD

SEQ ID NO: 273978 - protein, 483 aa, unidentified
MKNKQPEKTKEAPCRPTQGHWHEMNRKQRREMMRKIQSDDLRLEVVHPDAAGIDIGNESHYVAVPPTRDNESVRRFGCTTAELKEMADWLKQCGIRTVAMQSTGVYWIAVYDMLEEAGLEVYLVNARETKNLPGRKSDVPESQWLMKLHTYGLLRNSFRPSQEIRRLRTYWRQRNDLVRAAGRHIQRIQKAMTQMNIQLANVLSDVSGMTGQAIIKAILAGERDPHVLAAFRDHRVKASEEEIARSLEGNWQEDLLFVLQQEQDGYEFCQKQMAECDRRLQQYLKQREDRSAGANLPEEKRKERLRKKKKGNTPQFDMRVELFRMTGADLTQIDGIDVMTATTILSEVGWDMSKWKTEHHFVSWLRLCPDNRISGDKIIGKGRLPTNNRATSALRMAASTLRVSNTYLGAQFRRLRTRLGAPIAIKAMAAKLARLVYRVLRYGMQFVDQGAEFYEAQHRKLQINYLKWKAAKMGLQIIEAPAA

SEQ ID NO: 273979 - protein, 410 aa, unidentified
MRIIALDVHRSFAQMAVLEKGVIRDAGKVDLERSRLLHFAKSLKPDDEVVLEATGNTSAIVRLLSPFVARVVIANLNLVRAIAWAKVKTDKIDARVLAKLHASGFLPEVWMPDEETEARRRVSAERTQLVAQMTRLKNRIHAVLHAHLIPPYPGSLFSKRGRAWLAALPLAEDQRRVLLRHAGELDRLGAELAELDKSLAQKALDGPQVRRLMTITGVNATVAMGVLAAIGDIKRFSSPQKLVSYFGLNPKVRQPGGKPAYHGRTSKQRRAHAQSMLVEAGWVIAGVPGPLRAFFIRIRNKRGKSVAAVATARKLAVIVWHMLSKDEDYTWSRPALLQWKLRHLELAAGYPSHSGGRQKGSTAGYSKKAVRGAEREMVGEAEEAYRRFVASWKRRSPKGCSGAANEVRRS

SEQ ID NO: 273980 - protein, 362 aa, unidentified
MTKSTTIIAFDQHAATTVAAVLCPGQRTPALHALTSENSTILRFVDRVHRQGRVRCCYEAGPCGFELQRALTAHGIFCEVIAPALIPRRPGDRVKTDRRDAGQLAVLYRAGTLTPIHIPTEQEEAARDLLRCREDIRVDLLRARHRLSKFLLRHGRRFTATKKAWTKRHAAWLQAQCWPLPALEQTHRAYVRAVDEALGRLQAVETELRDLLTLEPLRSRIERLRCFRGIDDLTALTVAAELGDARRFPSAPRVMAFTGLVPSEHSSGSKHARGAITKTGNAHLRRVLVESAWHYRHHPFLGRALRLRQRGAPTPVIDQAWHAQQRLHRRYRRLAARGKPKQHIVTALARELAGFLWAALTQ

SEQ ID NO: 273981 - protein, 437 aa, unidentified
MLLCLNPNAAGVDIGATEIYIAVPGDRDPQPVRCFSTFTEDLHAAADWLKGCHIETVAMESTGVYWIPFFQILEARGFKVFLVNAHHVKNVPGRKSDVSDCQWLQYLHAVGLLRGSFRPEQAVCTVRSILRHRDSLVQMASSHVQHMQKALDQMNLQLHHVISDITGVTGVAIVEAILAGERNPHTLAALRDRRIKASADTIAKSLVGDYRREHLFTLGQSLEAFRHYQELIAACDREIAQYLEGFESKVDPPPAPTSPSKDGPQPKDSEPRFDLQTHLHRIFGVDLTKIPGINVLTTQTILAELGPDFSRFANGPALTSWLGLCPDNRISGGRVLSVKTRKVKNRAATALRMAAQSLYRSQSYLGHYFRRMRAKLGAPKAITATAHKLARIVYHMVTTRQAYDETICAQNEVQNRKRLEARLRKQARELGLQVVAI

SEQ ID NO: 273982 - protein, 444 aa, unidentified
MVFFGMILIREVAFAPVIMGISKPAGLKSPSGEVKTMNPLFVGIDVSSRNNVVYLMKPDGSKHSSFSVQNNLGGAKLLSEKIVSALHSMQLIDVVIGLEATSIYGDSLVYALREDGSLGRFRRKIHVLNPKQVKKFKEAYPDLPKNDFVDAFVIADHLRFGRIAKEVYMDDYRYQALRTLTRARFDVIQNLTREKQRFANYLFLKCSGMAQDKDIQNTSATTIALMEHFETVDDLANADLDELTAFIAETGRGRFANPNAVAKVIQTAARGSYRLPKTVNDTVNQAISVSIASMRALKEQVKVLDKAIEQQFEIIPNTLISIPGIGKVYSAGIIAEIGDIHRFDSQASVAKFAGLVWTQHQSGEFEAEHSQMIKSGNRYLRYYLLEAANSVRRCDSEFRRYYDLKFKEVNKYQHKRALALTARKLIRLVFRLLKDNRLYIPPEG

SEQ ID NO: 273983 - protein, 398 aa, unidentified
MNAVGIDVSKGKSTVAVIQPFGVVIAEPFDVSHTESDLNKLVQLIKSLSGETKVVMEYTGAYYEPIANALHNQGIFVSVVNPLLIDDYGTNRVRKVKTDKKDSLKIASFAIDKWLDLREYIPANDIRKTLKILNRQYVQYNKILVMQKNNLISLLDSCFPNANTLFTSPRRESDGHEKWVDFVLKFPHIHSISKLSLSAFKVKYQSWCRKNNYNYSDKKVADIHSYCKTQISVLPMTDSVIKIITEAAVMLNSTLETLCTFRDEMNRLSSTLPEYNAVMGIYGVGKVLCSQLIAEIGYVRKLNNSKSLVAMAGIDPPPNQSGKVDTKSRSISKRGSPVLRKTLFQIMTIIIQNKPVDDPVYQFLNKKRSEGKPYRVYMIAAAHKFLRIYYARVMQALN

SEQ ID NO: 273984 - protein, 317 aa, unidentified
MERSKANTKCAGVDVGKHRLDAAVHGSGDRLEVANDAAGLAQLVRWLQGLGVSRVGMEATGGYERSMRQAFAAAGLEVVLHQPLEVRLFARLKRVRAKNDRIDAVLIAAATAQVDAVKAAGDPRLQDLAERLTAYEQVADQLAELKTFMEHVSLKDVARWLKGHIGALERLKARLAADILARIKAHADLAERLKLLMSLPGVGPIVGASLIVRMPELGQMKRGQAAALLGVAPFDRDSGQFKGQRFIGGGRRRPRRMLYLAALAAKRWDPGLKAFAQALAERGKAPKVIVVAVMRKLAEAANLVLARGQPWTKHAPA

SEQ ID NO: 273985 - protein, 511 aa, unidentified
MSEEEVPALGLEPVGQFLPSARFKSGNNMVHRHRISTRLMIPGTSFFTLYRKGGVMNNYYLGIDVSKGYADFVMLDDKKQPIEENFQLDDTFEGHCCLYERLLRFFDDYPECTIYAAVESTGGYENNWFNALVKFQGTLNLRTARLNPLGVNANSKADLKRNITDKISAQNVAEYMIAHPEKVSYQQQDHLASLRKQWGFINMLTKQSTQLFNQLEPLLYTANPELLAYCKDGIPGWVLKLLLRYPTASDLSKARAVSVSRIPYISSARAQELVTAAKRSVASSTDKITAQLIVETVKQILHLKKIIASQIDLMAKHCSVPEVDLLKSFIGIKDYSAIGLILEIQAAERFLSVKKLASFFGLHPVYKISGDGVGRFRMSKKGRKEPRKILFMVTLTAIRSNPLIRSIYLEHIQKGMEKMAAIGLCMHKTLRIIYGMLKHNMAFDPEIDWKNREKSYQSRTRVNKDKTRRYQDFDSKAPISRRQNSKRKEQRQSHSDNLTKSGIIASAPISP

SEQ ID NO: 273986 - protein, 355 aa, unidentified
MNDAKYIGMDVHQATISAAVRDSRGNLVMEAILETKADTILEFIHGLRGSLSVTFEEGTWAAWLHDLLRPHVTRVVSCDPRKNALLKVGNHNDRMDARKLSELLYLNKLSPVYHGEQGIRTLKELARSYITITRDLTRVMSRLKAIYRSWGIPCAGQQVYAPRYRAEWLAKISEAGVRRRAELYYQQFDALATLRHGTRRELLAEARKHPAIRLLRQIPAIGPIRAALLIALIQTPNRFRTKRQLWAYCGLALRTYTSGEYRFVAGQLKRSKKVLAVRGLNINHNHDLKNIFKGAATRATATAGPLQDCYQACVARGVKPHLARLTLARKIAAITLLVWKKGVRFDAEHLKQQAA

SEQ ID NO: 273987 - protein, 336 aa, unidentified
MEDPPRRSSTDGFAFFLGMGARKTALELALRDGEEIVARTTVSNDPEGHSTLVSWLEDQGARPKKACVCMEASGDFEKAIAQRLYEEDYRVSVVNPRRIKGYASSQLQRTKTDSADAALIARFGQREDPRPWKPPSASESRLQELTRARQALKKEKTRAQNRLDEAEDKAVRKAHENLLDEIERQIEDLEEEIEEHIEEDSELNDRCSLLETIPGVGLQTAAIVVSELGAPEQFENARQAAAYAGLVPRHRESGTSVRGKPQMSKVGNGRLRRAMYFPAMTALRFNSAVKAFGNRLKERGKEKMVVVGAAMRKLLHICYGVLKSGRPFDPSLHPGT

SEQ ID NO: 273988 - protein, 343 aa, unidentified
MDHFAGLDVSVKKTSVCIVDDTGKIVREVKVASEPEALLAVLKNPAYQFKRIGLEAGPLSQWLYSALAEAGLPVICVETRHMRAVLKAQINKTDRNDARGMAQMMRVGLYRPVHVKTLRSQKLRMLLTHRQLLLSKAIAIENDLRGTLRNFGLKVGMVGKVKFEARIRELVETLPDLAVLVEPMLIVRRVLREQIVILHRRLLAVVRDDEVCQRLMTTPGVGPVVSLTYRATVDIPARFRKSKSVGAVFGLTCAKYQSGEVDWDGRISRCGDEMMRTMLYEAAQAMMRSKKWSWLKAWAMQIARRRGIKKAIVALARRLAVILHRIWVDGTEFRWTREQAVAA

SEQ ID NO: 273989 - protein, 414 aa, unidentified
MNKIITGNGISQESLVNYFNRVLNLGLDVHCRQVTVAMQEDGGRIKSAGKIRHVDFLNWVQKKPQEGYLNRVLNLGLDVHYRQVTVAMQEDGGRIKSAGKMRHVDFLNWVQKKLQEGWQINSCYEAGASGYWLHRELVKLGVKNLVVAPKAMGQGGKKQKTDKRDAGELCDCLDRYLRGQDKALSVVGVPTEEQEEKRALIRYHRQIMADLGRCESRGKGLLCAQGIEVDRRWWHGLGWIAVQSDPRLKDWMQEQLIGWRNKILSTDEEQSGLRERIAALAPAILPKGVGAYSAAVLEYELRGFARFTNRRQVGSITGLCPGIHQSDGHGKEGSINRCGIGLVRWTLVEMVWRLTIWQPQYPPVRRLASGLVKGKRARKRLVVQAARRLAIDLWRLSTGQTTPEKLGLIMHCAK

SEQ ID NO: 273990 - protein, 544 aa, unidentified
MVTKTKKCGSKSGFKSRKSGRRTRFIGKPAGQIQQRVQEAGPEHFGVVSVDCAKRRSKWMLCNFFGKVIIEPTEVEHNAGQLRAMTQAVTSTCKSQGLTDLIIAVEMTGVYHKPVQRVFRKAGFDTRIVHPFASKHFRQPLHPDQKTDDNDLEAIFHAAINGYGLATLPVSETYQSLQSLSRHRHNLVKQRSRLMVQMRRLLHMTMPGFADLFEDDKLFHSSIAIQVAVQFSSASEICKAGVDGISSWLNRSKIRFQSRTVERIVAWSATAAEPSELSPMQTRQWKQLDQVRNLFEVQIADVEREMASFLVQTPYVLLLSVTGINVVSASRLAGEAGPIEHYATARAITGRAGLLPSRSQSDEVDHADGSLIRQCNRKLRGAAMLVAENLIKCHPYYRGMSELWKKQKVDPRDRRCRVANRAMRMVFQIVGGGQLWRGKGVDREYMLEKIRQFHLDHHSEMEQLIGDLHEAFKWLPKSAYAEEAKPLATAARKRRRKGVVSIGELLVPLLIRLGVGLKNDGVENDGVASESDVESTTSEARSSD

SEQ ID NO: 273991 - protein, 432 aa, unidentified
MIAASPPLAPDAAAFAAFVGLDWADQKHDIALYDQRGGLPECSVLKHTPEAIDDWACGLRQRFGGRPIAVCFEQSQGGIAYALLKYDFLVLFPLPPARLAAYRASFSNSGAKDDPSDAVLLLDYVLRHRDQLRVWQPDTPATRELQLLAEARRDAVDQRTRLSNQLTAVLKRYFPQAISLVGCDVDTPLACDFLAKWPSLAAVQRAAPATLRKFYYAHHCRHEERIVQRLELARSAFPLTKDAALIQTGVLQVHCLIGQLRALAQAIQKYEQRLSQLMDEHPDAALFLALPGAGPALAPRLLVAFGSDRQRFQTAAELQAFSGIAPVTKRSGKRHTVHRRWACPKFLLQTFHEFAKCSCQKSAWARAFYDLQRSRGKGHHTSLRALAFKWIRILFRCWKTRTSYSEQRYLDALHSRNAPLLAFLSSPATASS

SEQ ID NO: 273992 - protein, 344 aa, unidentified
MEHFAGIDVSLKDSSICVIDAAGRIVREAKVASEPEALIAWFGGLGLAVTRIGLEAGPLSQWLHAGLTGAKFETVLLETRHVKAALSAMVVKTDRKDARGIAQLLRMGWFRPVHRKSADAQEVRALLVGRKLLQGKLRDVELSIRGILRGFGLKVGEISKGRFAARIRELVAGHEMLETVTGAMLAAREALLAEFMRLHRRMLVTVRADAVCRRLMTVPGVGALVAVTFKTAVDDPGRFSSSKAVGAHFGLTPKKYQSGETDVTGGVSKVGDAMVRTALYEAANVLLSRTIRFCALKAWALAVARRRGAKRAKVALARKLGTVLHRMWVDGSTFRWSKEAPAAA

SEQ ID NO: 273993 - protein, 386 aa, unidentified
MKYVGIDVAKQTHYACVTSQNNKVLTPPFAFANDIDGYNLLLSKFKKFPKGEVVVGLESTGVYGENLISFLSEQGYKIALINPIETSGMRRKRIRNAKTDKIDSKGICKFLFQEEYRLLEPQELAVLELRGICRFRQSLKKQNARLKIQLVSYLDVVFPEYHTLFSTVHGKGSYAVLTEFSSPIAISKANITKLENVLKSASRGHFGRAKAEELKALAKKSIGNNNNDKGFQIIHTIAQIRLLESQIDDTEKHLGKLWRNIDTVLKTIPGIGVIDGTMIYSEIGDISRFRKPDQLIAFAGLDPATKQSGNFRAASTRMSKRGSPFLRYALVNSAWNVSMNNATFGEYYNQKLSEKGRHYKALGHVAGKLTRVIFTMLKNNMAFNLP

SEQ ID NO: 273994 - protein, 411 aa, unidentified
METLIRRCAGLDVHQASVVACVRCIDEHGELQQETVTFGATTPQLLKLFDWLSRWGVTLVGMESTGVYWKPVYYLLESEFECWLLNAQHLRNVPGRKTDVGDAAWIAQLVAHGLVRPSFVPPKPIRDLRELTRYRKQLLQERSRETQRLQKTLEDAGIKLSSVVSDIKGKSARAMLNALLAGIHDPQVLADLARGQLRKKLPALEQALTGWFGPVHRILVSEILAHLDYIDETVDRLSAAVEKTIAPFASAVDLLDTIPGINRRTAEVVIAEIGADMTRFPSERQLASWAGMCPGNNESAGKHFSGKTRKGSRWLRQTLVESAQVAARTKGTYFSAQYARIKGRHGHKKAIVALGHSLLVVAYYVLLRNEPYVELGDDYFLHRQQKESYQRRLVQQLERMGYEVNLAPKAA

SEQ ID NO: 273995 - protein, 265 aa, unidentified
MTQYKRIGIDTSKAVFTPRHRRDQPTLRINLRRAQMISFFKKLPPVEVAMEACGGAHHWARELAVLGHAVLLIPPQYVKPYVKRGKNDRNDAEAICEAAGRPGMHFVPAKSLSQQAQGMVLKVRDTLIGQRTLLVNTLRGHASEFGVVAGKGVGRVGSLLAAIEQDATIPAEARDMIALLGQQIEHLDIKIKALEARLNAAHKANAVSRRLATIPGLGPVTALTLATEIDPPAFASGRHMAAWIVPSKNIPGRQAAAGRYQPSWQ

SEQ ID NO: 273996 - protein, 372 aa, unidentified
MGHHTEAFVGIDTSKSSNAIAVADGGRGGEVRYLGGFPATETATRKLVAKLAARCPHLTFCYEAGPTGYGLYRLLKSLGHDCLVVAPSLVPKKAGDRVKTNRRDAVSLAKLLRAGELTAVWVPDERHEAMRDLSRARQAVKKDLQGKRQQISSLMLRLGRIYPGKTTWGPAHMNWLMAQKLEHREQRIAFEELLEGIRQESERVERLENAIREAVPEWSLAEAVVAMQAVRGIDLIAAVGVLAEIGDLSRFQNPRELMGYLGLVPSENSTGDKVKRGGITKAGNGRARRILVEAAWSYRYPPRVSRDKQPKVEAAPRHVREIAWKAQTRLCGRFRSLERKGKRRTVIATAIARELSAFIWAINRELMARRQA

SEQ ID NO: 273997 - protein, 331 aa, unidentified
MNINPQGGAAQRDVRPNAGIDVSKQHLDACWGAEERRLGNDAPGWSELIACLQADNVGLVVVEATGGYERGLMIALQGAGIAVARVNPRQARDFAKSMGVLAKTDGLDARCLRDFADVLARHKDRPKFITPLMDEQRELLLGLMTRRRQLVDMHVAETNRLEHASARAVKSIKSVLRLLDRQLAEIDCDIDAHMERHFKAQRQLLDSVKGVGAVTTLTLLSALPELGTLGRKPIAKLVGIAPLADDSGKRKGQRRIWGGRSQVRAALYMATLSAMRYNPVIAAFYRRLLAAGKPKKVAMVGCMRKLLTILNAMMRDQVKWDPVRHIQASRA

SEQ ID NO: 273998 - protein, 426 aa, unidentified
MDTIGLDLHKRESQLCIGQDDGRILELRIVTSRDRFTAVLGGRPPARILLEASTESEWVARHFESLGHEVVVADPNFAPMYATRSRRTKTDRRDARTLMNACRLGAFRRAHRLSPARRHVRAELAVREALVRTRTRYIAIAKALVRRDGLRVAASDSHLVAQRIAALELSDGLSAELLPLFAVLAPINDQIAAADRRITALVHADATMQLLASAPSIGPITASAVVATVDDITRFPSAHQFEAFLGLVLGERSSGEKRRIGRITKAGNSRVRYLLVEAGWRILRTRRRGRSYGRNRAGARAFLLRGQLRRVTRRQRCGTGHSALPRAAASGSPRSPWRGGWRAFSTPCGATALHMIPRGFVSTYHQSNAPREETLRRIELTESELGERVAAYGRSREPRVSWRRPLQSHIPNAPRPRVSTRARTEG

SEQ ID NO: 273999 - protein, 418 aa, unidentified
MDLDEVVYRVACGLDVHFTFVTACLVTTGPKGKPKVEERRFPTNRKGLNSLREWLTENDCEAVGMEATGVYWMPVYAALEGACTLVVGNPQHMKNARGHKTDRLDARWIAGQVRHGRIRSSFVPPPEFREARRLARCRRQLVEARTSIRNEIQRLLAEVGITLAGVVSDVFGTSGTSILNALAEGKCVRDELSIHLYSSLRKKDKMASIAAALEAPLPEVSRLLLAIHLRRIEALDGNIDEVEDLLFKQLAPHAAKLDLLQRIPGISKLSAHIILAEIGVDMTVWPIAKKFSAWAGVAPGCNQTGGRSKRAAVRKGNPYLCTILMECAGGAVQKLDSHLRTKHRRLCAQLGSKKKARMAIAHKLALIIYKVLGENLEYNDPKPNQPSEKAKRRILQTRVKDLERLGYRVVLEPIEAVS

SEQ ID NO: 274000 - protein, 396 aa, unidentified
MIYVGIDVASEKHDVCIMSNEGEIFGKIFQIQNTKDEYKKLLSKINEAKKFFKDSNVCIGIESTGVYSSTILNYFLNIEQIEVIFINPVLTNMFQLSQSVHYAKTDTIDAEGICNYLQDKRKKLLTYTPPSYHSLQLKSLYREMVKLNKLINQTKNRLNGIIHTVFPEFLKIFPRINGKGVYSLLIEYPLPSSYKGKQLNTIYDFAYRNFKGHIKKESIEQLFAYAKNSIGVFNDLDKILIKQLTSLIKIYEDQKKELIEEMTNIVKKEFPNILTIPGIGGNTAAGIIGEIGDISNFHNADSLLAFAGLNPLVYQSGKYEAQHTRISKKGSSYLRNALTMIAQVIIKHDETFKQYYTKKRNEGKKYLTSISHVRKKLTRVIYSVLKNNVEYKSLNN

SEQ ID NO: 274001 - protein, 342 aa, unidentified
MRLTDAKHSLSKKRCKMQYILGIDVSKDKLDLVLITERGKFHKVISNNSEGYKALDKWLVSRQVEQVHACLEATGQYGEEVAEHLYKQGHAVSVVNPARIKHYGESKLHRNKTDKADADLIAEFCLKENPTLWQPLSPEIKHLRALVRRLEDLKTNCQQEKNRLSSGEKDEWVVKDLSTHVAYLETCIAATEKEIQNFIKQTPNLKKQQDLLNSIPGIADKTSARLLAEIGDISTFESASQLAAYAGLNPKGFSSGSSVHKKTRISKQGRRELRSCLYMPGIVASNHNPVVRSLKVRLHDRRLANKAIIVAAMRKLLHIVYGVLKTQMPFDAEYHKQFNFSA

SEQ ID NO: 274002 - protein, 337 aa, unidentified
MSNKKIIGLDLHSGRSVACIMTTGKKIIKRVELETNEKNLIELAKSNGKDCEIIFEEGTLAGWAYQILLPYCKVVVVDPKENKWIFKADRKNDRIDSQKLAELYIGGFTKEIFHPVGEMSELRDMILFYNKITQNIVRFKNQLKAIFRSKGIATTVGVYEKKYKDFENKLTHQSSKIQANIIYTTIQRLEREKAKILKKLKEMTKNNATIKVLDKIPGIGFISAISYLGIVVTPFRFENKRKFWAYSGFGITESDSNGRSKPQHLSNNYNRILKNITNQAVNTIVNRSSKNKFKKKYVELIKNNIRLSSAKLTIARKLLSTILALWKSGEYYSEAYK

SEQ ID NO: 274003 - protein, 347 aa, unidentified
MTIVEAARGITGGVDTHLDVHVAAALDPLGGLLGTERFETSSAGYKALLAWLESFGDVTKIGVEGTGSYGSGLARYLRRMGIEVLEVDRPDRQKRRRAGKSDPLDAIEAARAALSGRAKGKPKSRDGAVEAIRVLVVAKRSARQARGKALVQMRHLGYSAPEQLRCRMKGLPVPALVAEGKGLRPSRSPDPVTAATKASLSSLAHRISSLDDELAELNERIETLLAATVPDLLELFGVGPDTAAALVMAAGDNPERLHSEAAWAHLCGVSPIPKGSGKNSGRVKAHDGGDRQANSALWRIVMVRIAHDPDTQLYFERRVKEGKTTHEVIRILKRYVAREVYRYLPRG

SEQ ID NO: 274004 - protein, 407 aa, unidentified
MICVGIDVSKRKSTVCFMAPGDKIIRRPFDVKHTKEELQPLVDEIRVQAKYDEIKVVMESTGVYHLSIAYFLQQNGIFVSVVNALKVANFNKAENFRHTKTDSIDSTNIARYGIAYWAKLPQFDLNGDKYFLLKRLCDAYLNFSEERSRILLQLQSQLEQTMPGIFDLFGGFDINSGKDKLLDFLERYCHIEDIIAKPEAEFVASYCGWAKEKGYRSNESKAATIYAQAKNGIPSIPNNPIVRETIMWYVGLLRRADETLMASLTRMEDIAKDLPEYELVGEMGGVGRVTRVALIAQIGDVRRFKNKHSLIWFAGLTPSIHESGKFRASQNHIVKKGPARLRKVLYQVMMSLVMHKIPKDDAVYRFIKKKEAEGKYKKVAKVAGMAKFLRIYYGRVMHLYRDLGLAA

SEQ ID NO: 274005 - protein, 314 aa, unidentified
MQAIFIGVDVSRDTLDIACWPSKDVVNIPNRRSEIRRWLKTVPSGACVAMESTGAYHQALAELARQAELRVYVLNPRQVWHAARGEGRRSKTDRVDAQVIAKFLHDQIQRLHEWCPGTQLQAEVESLQRRHHCIERHCTAMRMSMSHLSGMDAEIEQFEKAARALQQAIDLRVQLLVELDQDMAHKSELLRTVPAVGPVGSATLAALFARVPFARSDSVVAFAGVDVRVSDSGTHRGRRCLTKQGPAYLRRQIWLMGFAAYHAKIYARLREALAARGLAFTEIAMILGRRILRIAWAVWRTDKPFNGALVARAR

SEQ ID NO: 274006 - protein, 331 aa, unidentified
MSMQHVPPHRRVVVGVDTHKHVHVAVAIDELGAVLDRRSFAADSGGYGQLIDWGESFGGKLTFGIEGTGSYGAGLAGAVRRRGIGTLEVMRTDRRDRRLRGKSDTIDAENAARAVLAGLASAIPKSADGTVEMIRQIKVAKDVAVKARTSAMISLKQVIVNAPDDLRQELQPLSKMALIHRCAALRPGQVTTIIASTKHTLRSIARRWEALDAEISEHEKLLAELTTQIAPALAKAFAVGPDTAAEMLIVAGDNPERIRSEAAFARLCGVAPIPASSGMTTRHRLNRGGHRQANAALYRVVIVRMQHHEPPSPTSPAGSPKARRSLRSSGV

SEQ ID NO: 274007 - protein, 343 aa, unidentified
MNIASVGIDLGKTTFHLVALGEHNKVLLRKKFSRPQLLAYTANLEVQLIGMEACSGAHFLGRALRAQGHEVRLMPAQYVKPYVKTNKSDYIDAEAIAEAVQRPRMRFVPIKTEEQLDLQALHRVRERWVMRRTAVVNQIRSLLLERGLTLPKGRRHLDEQLPRILEDAELNLSGSFRVLLAQLKLELEQLAGRIEQMDRVIQKTAKENEACQRLTEIPGVGPVTATALIGAIGNGSAFGKGRALSAWMGIVPGEYSTGGKQKLLGISKRGNKYLRRLFVQGARSVLQQRHKQVPGLRDWLAQLLGRTHQNVVVVALANKLVRMAWAVLCKNERYRAPVLAVAT

SEQ ID NO: 274008 - protein, 424 aa, unidentified
MRSIALDVHRDFCEVAIKDESGLRLAGRVRTSLEDLRLFAQSLAADDQVALEATGPAQAIARILEPHVGRVLIANTRKLRAIAESKVKTDKLDAKTLCELLAAGFLPAVFSPDEFTRALRRRLQRRSKLVRSRTRAKNECHAVLARNLKGRPPMTDVFGKAGRAWLAALELPADESETVEGCLREVDFLDSEVGLIESELARQGLCSGEIRRLMSVPGVSLVSAAAFVAAVGDIHRFHSPKRVVSYVGLDPRVRQSGEAPARHGRISKQGSPEARHMLCEAAWVAVRTPGPLRAFYERVRARRGAQIALVATARKLSVLFWHLLTREEDYAFGRPTLTRRKLRGLELKAKDGRRSWPSGHALSTKSERAREAEFAEQIETAYRRFVQDWQPKPKSGAGATRGRASSKPTSGKQRGRASVPNSAL

SEQ ID NO: 274009 - protein, 317 aa, unidentified
MSVANEVFVGIDVSKAELEVCWLPQRERLQVARDEGALVRLVERLKELGPSLVVLEASGGYEMPVAMALAGASLPCVVVNARQVRDFAKASGKLAKTDRIDAQVIAEFAQAIRPQVRALPDAAAAHLIALVARRRQLVEMLTAEQNRLALSHAAVREDLKQNIAWLKSRLQDLDGELARAVRSSPLWRENDKLMQQVPGVGRVVSAVLLALLPELGRLSPKKIAALVGVCPFNRESGRWNGKRAIFGGRAGVRSVLYMAIVSAIRWNPLIKTFYQRLLAAGKPKKLAMTACMRKLLVILNAMMRDRSDWNPNGAMAT

SEQ ID NO: 274010 - protein, 415 aa, unidentified
MPTSGKEGTLSMTSAAARDTADQDVFGEVDSHADALHVAVISDNGGHLADAEFTTSAAGYAAALAFLNAHGHVIATGVEGTSSYKAGFTRAARSHGHTAVEVNRPDRAERRRIGKSDPIDAYAAACAALSGRASSAPKDDTVAGIRALHNAARSAVKARTAALNQIGSILITAPETIRAKYGLLKGTDRTDALARLRPAGDTVHTAVLTALKSLARRVKDLTAEHQALVKALDTGVSVHNPGLRAAYGVGPDTAAQLLVTAGGNPERMRTEASFAALCGAAPVPASSGRTNRHRLSRGGDRAANAALYRIALVRMSHNPRTREYVARQTDTGRTKKEITRLLKRAITREMFRCLTTTVAVPGIADLRPLRQSKNLTLTAAARHFGVWPATISTLERGVRRDDDLAHAYRGWLQAA

SEQ ID NO: 274011 - protein, 420 aa, unidentified
MDVVLERCAGIDIGKDEVVACVRTPGAGGRGRHKDTRSFRSFVGDLEAMADWFSAAGVSEVAMEATGSYWKPVWDVLEERAFELKLVNAHHLKILPGRKSDVLDAEWIAELLEHGLLRGSFVPPRVIRELRDLTRYRKRLVQTHTQECQRIQKTLEDAGIKLDSVASHVMGVSGRAMLRALIAGERDPEALAELAKGRLRKKTPELRRALQGRFSDHHALLIGMSLDHIDHLEAAMARLDEQIDALFATNTSEAGIPFAQARDHLDTIPGVAKRAAEAIIAEIGVDMARFPTAGHLASWAGMAPGNNITGGKRGSGRTTNGDIWLGQILNQCAWSAARTRDTYLSAQYWRLARRIGKKKAAVAVGHSILVIAWHLISNDADYQELGGDYFTRRNDPDRHRDRLIEQLHHLGYRVTLDRAA

SEQ ID NO: 274012 - protein, 345 aa, unidentified
MSIVGGLDIHRKQITFDYLDTVTGQVRRGQISPADRVHLRAWLARFAGCEDVAFAVEGCTGWRYVAEELAAAGVAAHLAEPADTAFARGRKRHAKTDKTDCRHLRMLLAEGRLPECWIPPGHILECRALLETYHDLRAEHTAWVQRIHAVLFHQGAPALGEGALRTEQGLAALRAAAAAHLSPAGQLQVATALEVTAALETRLHELRHQLLDAARHLAGAKVLAARLYGVGPVTALALTCWLAGEGRFSSSRKAVRFAGLDVTVYSSDRKGPPGRLSRQGPPVLRWAVYEAGKTHARSSAPDHGYYATVKDRCNGKRAALSEARKILRQACHILTELGDDALSTA

SEQ ID NO: 274013 - protein, 401 aa, unidentified
MEGSTFIGLDVHKATISVAIAQGERGGEVRHWGSFPHRPDHIRKLAERLAAGGARLHFCYEAGPCGYGLHRQLTELGHDCMVVAPSLIPMKAGDRVKTDRRDATMLAKLHRAGELTAVWVPDAAHEAMRDLVRARATAVRVAGKARQHLQGFLLRHGRIYPGKKGWTKACRRWLTTVRFTHPAQQIVLQDYIHAVTDAEARIERLTKQIADLLPGWSLAPVVEAVQVMRGVAFIVAVTVVAEVGDFNRFDNPRQRMAYLGLTASEHSSGASVRRGGITKAGSGLARQVLIEGAWRELPDAGPRQPQAARPGREPAASGARHRLEGPAVDVPALSAPDGGGEAEGRGHHGDRARDGGVHLGHRPHRSACPGLTRSTTEKRRLDPSDAQGWGRNAVGNPRALL

SEQ ID NO: 274014 - protein, 353 aa, unidentified
MNEITTVGADLAKEVIVVCAGDAQGRTVYFKQLSCAGFAEWAAKLSPCTFGMEACSTAHHWARLLSAQGHTPKLMAAEFVGPFRKSQSTKNDRNDAQAILAAVRQPDMRFVSVKSVDQQAMLAWHRARAGFGEERKALLNRTRGLLAEFGVWLGRSAAVLIRQLPQLAQDQRLPEHFRPILSYALEHLRRIDQCIADCDIRIHAHVRQSEEAKRIQALTGVGELTASALLATVANPRDFKNGRQMAAWTGLVPCQNSSGGKQRLGVITKRGDRYLRGLLTQGARSTLQVALKREPLRRSRLEQWIVVLHARVGYHKTLVAIANKHTRILWAILAHGESYDPDAWRRYAPQRHA

SEQ ID NO: 274015 - protein, 340 aa, unidentified
MKLKTLAIDLAKNTFYLVGFDDDNRPSWRKKLSRQQLEIFVARQEPSLIAMEACASAHHWARRFRHYGHQVKLLPPQHVKAYLRGQKNDFNDAQAIGEASIHSATRSVAVKTVEQQDAQAFHRIRRQLMGEQTRIINQLRGLLGEYGIAIASGIHQASKAIPLILEDAENGLTPRLREMVYRQYQRYTALRAELVWYDQQLDFAAKVDPDIKRLQDVPGFGPINASVLCSWLGDGTQFSRARDASAALGVIPRQHTTGGRDRLFGITKRGDSYVRTLIVHGARAVVSRAKGKTDKLSLWINQLVERRGFNKAAIALANKMIRIAWVLVTRGERYKPALSM

SEQ ID NO: 274016 - protein, 354 aa, unidentified
MSQTQNAAIAVVGIDIGKNSFHIVGHDERGAIVLRQKWSRGQVEARFANMPPCLVGMEACVGAHHLSRKLNSLGHNARLMPAKYVRPYSRGQKNDFRDAEAIAEAVQRPTMKFVATKTAEQLDLQALHRVRERLVSQRTGIINQIRAFLLERGIAVRQGQRFLRAELPRILAMPPDVLSPRMVRIIEDLAGDWRGLDERVESLSNEIETIARQDAGCERLMSVPGIGPIISSAMVAAIGAGDVFTKGRDFAAWLGLVPKQISTGDRTILGKLSRRGNRYLRVLFVQAAWVVLIKPKIWERHGLKPWIEAARKRLHHNVLAIALANKLARIAWSVLARGRAFEARKIDQAANQSA

SEQ ID NO: 274017 - protein, 371 aa, unidentified
MSTTSMTPQPMVIAIDPHKASWTAAVVDASLQPVATIRVPVSHEGYRALRRFANRWPDPTWAIEGASGLGAPLTTRLRTDGINVVDVPAKLAARVRMLSTGHGRKNDDADAVSVAIAARTAPRLNSAAADATITALRAIVEHRDDLVKTRTQTVNRLHVVLTHLIPAGASRNLTAERAAELLRGIRPRDAAGKTLRTLAADLVTEVRQLDRRITKAAADIQAAVTESGTTLTDLCGIGALTAGKILGRVGTIDRFRSAAAFATYTGTAPIDVSSGDVVRHRLSRAGDRQLNLCLHVMALTQIRQDTPGKTYYLRKRTDGKGHKEAMRCLKRRLSDVVYRQLRRDADRPGAGPGGHSGAALSSSAASSNPAH

SEQ ID NO: 274018 - protein, 412 aa, unidentified
MNQPYRLFVGIDWAKDDHTVCVVDIDLSIVARRTIEHSGAGLQQLIDLLAKVSGDDSACVAVAIEMPRGAVVESLVERGYAVYSLNPKQMDRFRDRHTVAGAKDDRRDAFVMADALRTDPHLFHRVQLDEPLIIRIRELSRAEEDIQREQVRAGHQLRELLNRYYPQMLKLCPAVDESWFWDLIELAPLPSQALKLSRPNITKLLRSNRIQRLDADGIKQALAVPALRLAPGAAEAASEHVLLILPMLRLLQRQRKELARRIETLLEEMSAEGSFAEHRDVRILRSLPGVGRVITATMLAEASQPLAERDYHALRSYGGTAPITRQSGKRKSVLMRQSCNQRLRNAIYHWSRVSTQCDPRSKEHYAALRAKGHTHGRALRGVADRLLAVLIAMLESGTAYDPNRRLASVAHQ

SEQ ID NO: 274019 - protein, 329 aa, unidentified
MHRKRSQVAVVAEDGKVQLNKNTVNGTEPLLRLIGDLPAGTPVAFGAAFGWGWLAALLEDYGFEAHLVHPLRCKAIASARLKNDKVDAAILAQLLRADLLPEAWIAPAEVRQLRALLRHRAGLVRLGTQQRNRIHAVVADFGYDRSGSYLSGPGRGWLAGLDLPAVSREIVTDCLAVIDGLAPVIDRIDGELRTHAKADPRVKTLTTLPGVGQFTALVMVAEIGDITRFPSARKLASWAGLTPTVRGSDRTVRHGHISKQGSAWLRWVLNQAAQTAKRSPEFAATYASIAKRRGKKIATIAIARKLLTRAWHLLNDMQAADAATPPRRP

SEQ ID NO: 274020 - protein, 428 aa, unidentified
MIVEESTRLKEFRQLKKEIRGSTEHLIVGIDVAKDNHHAFFGTATGKTLLKRLVFENDFAGFEKLHMHMEALQVQHCLDKVVFGLEPTANYHKPLAEYLIKCGHMVVLVSGVAVTRNRELLDGRWDKNDDKDSANVADLISQGKCLYYDYPSILLRDLRDLLSLKRRLKKQEHGTKVRIRNHLLAQYFPEFDRYFGKGGSEGLSIVKWCLKPSIIAGMEYDEFVQLVAPRVRTIGQANRLRAIWDVASESIGCSAGEALGFEAKLMVEDLQQVKESIRAVDDNIKDICFGFPEYSYLLTIPGFGPDVSSKVLGAIGDPFRFDSGKQVLKLAGYDLNASRSGTTSDSAVPAISKRGKAYLRYALYQAAFIASTSNRYFIIYYTNKLRGREREKGIKTKMKVKLAAKMLVIAWTLMKKKEPFDPEFLNID

SEQ ID NO: 274021 - protein, 351 aa, unidentified
MIIVGVDYHPSVQQVAFLDTETGETGERRLNHSDGEAERFYRDLQRRQVKVRVGIEATGHARWFERLLAELKFELWIGDPARIKAARVRKQKTDRQDAQLLLRLLIEGRFPQIWVPSPENRDLRQLIWHRHRLVQMRTRAMNQLQAAAMNEGVRRKKTLWSKTGRRQLEALPLAPWATRRRQDLLELVDRLNTTIDELTAAAEQEARKRPEVLRLMTHPGVGPITALAFVLVLGSPDRFGCGHQIGSYLGLIPCEDSSADRQRLGHITKQGSSLLRFLLVEAAQAAVRWDPDWRRRFVHLAMRRDRRIAKVAMARKLAVSLYWMWRKGFDYPQTLQFGSHAGEPGYVHGVK

SEQ ID NO: 274022 - protein, 342 aa, unidentified
MDTMHYIGFDIHKKTIAFCEKTVEGTIIEQGTIPATKTSLLIWTKQRTCTWVGAMEATIFTSWIYDCLLPYAAELKVAHPAMLRAITVAKNKNDRSDAKMISDLLRCDLLPVCYMAPENIRDLRRILRFRNLMVRESTKMKTKASGILMETGVQYNKQKLHGQRYFDELLDNLEDVPESVTELLQFCRLSVTHFTQIQKRLVQKLKSHPDISKRVELLTTIPGVGEITALTWVLEIGEVERFTKIRRAISFCGLCSAQSESAGVNKRGPISKKRNKHLQTVLIEAAKLAPRWNPQLAAVYDKELATGNRNSATLAVARKIVAYLMAVDKNQEAFTAKEAEAA

SEQ ID NO: 274023 - protein, 420 aa, unidentified
MSFKIIRKNCCGLDVHKTWIYACIGIADSHDRVEYKQARFSSFTKGLNELCDWLAKYNCTDICMESTGKYWIPVFNILEKHNLWVTLSHPKYTKPQTGNKTDRKDAKWICDLYMCGMVKPSFIPPADIRQLRDLVRYRFKLTCMITGEKNRAHNCLTVSNLKLDDVFSDIFGKSSRSITEQILQHPGEFFDVTPFVDDRCKTPIEEIQAAVDGAISPEQAVKLRQCLEHIDELEKHKSEIEREIFRLSDKYEVALNLIRTVPGFDKNPLTAIQVLSEIGSDMSVFPTAKNLVSWAGCCPRNDKSDRKIKSTRISRAGTYFKPVLVQIANALIKSKKHPEFTTRYRRIKARRGHKKAIIAICRMILTAIWHILTDLKPYTPEGFLESRPVNEAKVLTASQALNLMRQRGYIIKDDMSPVMN

SEQ ID NO: 274024 - protein, 334 aa, unidentified
MLDPTTGEVINRRLEHENGEAKKFYATLPSPARVGMEATCDAQWFERTLREHNHELWIGDAAEIRAAMVRKQKTDSRDALHILDLLLTNRFPRIWVPSPAERDLRQMLRHRHKLVRFRTSVMNQLHALAMGQGLCRKKKLWTKVGRKELEGLLLDPWASLRRKELLQLLDQLDPWIANLDAAVIQAAESRPPAVCLMQQAGVGPVTALAFVLTIGPVSRFASSKKVVSYLGLNPSEESSGGRQRLGAISKQGNPMMRYLLVEAAQTAARLDPELRRDYQRLKFRRGSAVAKVAIARKLAVRLYWKLREAAQPVSSARMQGSPASPVVGESLSPY

SEQ ID NO: 274025 - protein, 434 aa, unidentified
MICAEIERCAGIDVGKERLAVCVMVGPLAGEPRAEFREFGTIAAELEGLRQWLQAEGVTHVVMESTGSYWKPVFNVLEDSVQVYLANSQEVKNRKGHKTDKKDSWWLAHLLRHAMIRPSFVPPRGLRELRDLTRRRRKMIGVATSERNRVDKILQDANVKLSNTLSDIFGVSGQFMLEALLEGKATPEQIAQFAQRSAKRKIPEIIAALEGHRMTEHHRQMIRYSLEHLRFLEEHILELDQQILAKIKALGYLPQWKLLQTVPAIKENSAASVLAEIGPDMGQFGSEKNLSSWAGVCPGNNRSAGKNKGSKTTKGNRWLRGTLTECAWGAASKKNCFLKEKFWRLATKKHRKPPATMAIAHTLLVLSYQVLKTGQPYRERGLPVMDEKQKDRLICHHMRRLGKLGIRAYSLPMVESPKTPKSKKKKKKMAAKKN

SEQ ID NO: 274026 - protein, 418 aa, unidentified
MKSIKAEKIKTINEKTLVVTLDIGKKVHYGYFRTPKNQDVKPFPFYNTGRSFNKFWEKLCRFKEKHMLDEVVIGFESTGPYAEPIANYLRKKPVKLVQVNPMHTKRIKELTGNSPNKTDKKDPRVIADVISLGHSLTVVVPEGAAAQLRRLTHARERAMERRTAMNNQLQDLVFVIFPELGDIIKPSTKTGMYLIKNYPGPERIVSIGNETLCNIVRKISRGKFGIERAEKLYNAAKESVGITEGKESILLETSHLVSNIETENRYIKSLEEQMIVYLDQIPYSHSILSVKGIGNITVAGLIGEVGDFKKFKTISEVMKLAGLDLFEVSSGMHKGKHRISKRGRALMRKLLFFAAINAVKSHGIMHARYQKMLNNGTPKIKALIAVSRKLLRIIFAIARDNAQYEENYNRKHDYKLAA

SEQ ID NO: 274027 - protein, 443 aa, unidentified
MSKLKNSLTVIKQNTAGIDIGSKEIFIGIDGMPVKSFGTFTTAYQSAIEYLKENNIKSVAMESTGVYWTVLYDMLEEAGFEVFLVKSNAAKNVPGRKTNVKDCQWIQQLHSYGLLKNSFIPPAVIRTLRSYVTLRRKNIQLASDHIRRAQKALDLMNIKLHFVISEIHGISGMKILKAILKGQHDPQILVMLCDKQILKNKKQSVIESLNGNYKDEHLFALKQAVEGYEYYQKKILECDKEIEKLLNTMTKDLPMPDPARLYKPKAIRRNKPHIENLHTMLMQLTGGVDPSRITGFTDSVLLELISRVGLDMSKWFTAKYFSAWTGLAPNQNDTGDKKKNKKLKNKSAAGQIFRVAAQSLANSKYSAFGLFYRRLRAKKGKAFAMKATARKLAVTYYNIMTKGIDFVEEGIISYQKKLKEQRIKSLYKQARYLGLTISNGDAS

SEQ ID NO: 274028 - protein, 438 aa, unidentified
MSEAKALIAAYLAFYDERRPDSRSHGEVDSDRRSGRVRLQTPTLETTMQVRADRPEAPSAIRSDLGAIFVSLELSRSIWLITSLSPGAGEKMSKHNAPAGDIGALLARLSELRQKTFARTGRSFPIIVIQEAGLDGFWIHRVLQNEGIESHVVDPASIATSRRRRRAKTDRIDGEALLRALLAHKRGEPRVCAMVKAPTPEDEDRRRLSRERKTLIAERVEHVNRIKGLLFCQGVSGYEPLHRDRRQRLDVLKTGDGRALPDHLKAQISRELNRLELLLEQIKAVEAERDASFAAAKALATPTPAPVTMLLEIKGIGPEFAAILWMEAFFRSFANRRQIAAYAGLAPTPWQSGSVDREQGVSKAGNPRLRTTLIQLAWLWLRHQPQSALALWFKERVARNGGRFKKTTIVALARKLLVALWKYVTAGVVIEGAAMKAA

SEQ ID NO: 274029 - protein, 410 aa, unidentified
MSRKTSSQTDSVALPMLVHETLYIGVDVGKKAHVAGFLSSTLLTRHQRFEQCPALAFDNSREGFRSLIDRIRTYVPFTQVQAVLEVTGHYHRALLQYLQEVDIPVYVMHVQKRQEGLLKTDKRDALGLANMLYNQLEKGIQVGDPLQAVRRLIPATAAATELRGMVRHRYELIAESTQRKNKLTAICDELFPEFTRLLRDPNLPTALALRKRFSTPAELAVATFGELREARGRTCSVSDAKLREVQRLAAQSIGTKEPARVRGLVVEQKQLIGELDLIAEHITELDTEIIHVVEDSREGKVLTSIPGIGPLAAATLIALIGNIANFERAAQLKSYVGWVPKVAQSGTTLDWTRLSPRGVRQMKQTMYLIVWRAIQGDAEWKEMYERLIARKCRSDERTRRLVGREKVIGR

SEQ ID NO: 274030 - protein, 411 aa, unidentified
MSDSDKLPNAEYAVFCGLDVGKGEHHACALDPAGRRLHDKALPNDEAALAQVFTGLQAHGNVLVVVDQPASIGALAIAVARSLGIDVAYLPGLAMRRISDLHPGEGKTDARDAYVIADAARTMPHTLRRVGTDDETLAGLSVLAGYDDDLAAQSTRLTNRLRDALLHVHPALERLLGKHLDRIGVLDLLAVASTPAALRDLGADHIAEIMRPRSPRLAKTLPTKILTALDAQSVVVPGTTDFGRVIAGVAVQLRDTHIERSALAADLEARLEAHPLAEVLTSMPGVGFRTALKLLTIVGDGTAFPTAAHLAAYAGLAPVTRRSGSSIKGETRSQRGNHALKSALFLSAFASLSDPTSRAYYDRKKDQGKRHNAALICLARRRVDVIYAMLRDRQPYRPPITQDPLPAASAA

SEQ ID NO: 274031 - protein, 349 aa, unidentified
MDRTTYGLDIAKSVMQLHWVDAETGEIGRKKLARAKVSAHFAQLQPVRIVMEACGSAHHWARVFTGLGHEVELLPAAQVRPFVRSNKDDAADARAIWLAAQQSDIRRAPQKSAEQQGVLALHRTRSHWISVRTATVNSLRGLLYKFGVVLRGGRQAGLKALVDQRAAIDEQIPAPMRSLVDGQLRTLAQIGERIDALECEIAALQKQLEGARQLDQVPGIGVLGSTALAATLGDARAWRSGREFSASLGLVPAHAGTGGKVRIGHLSKRGDPYLRTLLIHGARAVIEHAKHKPKWLEDLLARRPKNVAVVALANKMARTAWAIVAHGRTYQRDWKSSRPGSGAAQAAAA

SEQ ID NO: 274032 - protein, 356 aa, unidentified
MNKIIRVGVDLAKHVIQVHAVDVAGKVVTNRALKRDKFLLWCADLPAGCLIAMEACSGAHHWCRKLTERGFDARMIPASSVVPYRIQGRTGKNDANDAAAVCEAASRPHMNFVPPKTLAQQGMLCVHRLREGFKEERTSCINRIRGLLAEFGVVLPQSPDVLRCHLSDVIEDACNDIASIARLVLQRAQDHWRELDAHIKWCDQRIADHQKNDEQVQRAAELMGVGSITASALVATVGDFRQFKNGAQFAAWLGLTPKQNSSGGKSSLGSITKRGSIYLRTLLIQGAKAIALTRQYDNPIFLWVQKLRERAGWQKAVVALANKNARILWAVMTREKRYDAHHISTHPTPVPIMTPV

SEQ ID NO: 274033 - protein, 480 aa, unidentified
MNVKARRTKKQVNVENQAINLLSKEELNKKIEVVEKELRSYTWRELETNGKFAKNDKLSFITDDMLIVGCDIGSENHYIRAIDVRGRELSRGAFEFSNTSEGFENAKAWVMALAAKNDKKQIVLGLEPTGHYWFALAAWMISNGISVVQVNPDAVKQSKEIEDNSQLKDDRKDPKLIANLVKDGNYGMPYFPEKVYADMRRLSMFRDQLTEDRIRNINRLHRELKIYFPEYMDAFGKIDGAFTLEVLKVSAIPSDITALGAEGIKNIWHNVKLRGRGYSRANEIVSYAEKSVGLTDGTDAGREAVKWYAEQILKLDEQLAVVESTLHEKCREIPCAENILEIKGVGENILAGILAEMGDISRFDDVKEIQKLSGMGLEACSSGKHKGQTKISHRGRKRLRYWLFQAAKSAVSHADEFKQLHEYYTTRTNNPLKKMQSLVVIACKILRVIYTILKTGTTYDPQKLLKDIKRPTASQAPMAA

SEQ ID NO: 274034 - protein, 356 aa, unidentified
MRILALDVGKSKSVAYEVDTRTGECGFTKVATRPAVLRRLFVRRRPDRLVMEIGPMAGWIGDLARVSGIRQVQVANVAHEAWRWRNVRRKTDRDDAVKLADLSMAGRLPQVHVPEAATRQWRQVIGYRAKLVGRRTAVKNRIRAILASVGETLPPGQRGWTRQALAQLRSLARPLVETGPQDLWRGELALELETLEHLDAQIATVEARLDALAEADGRVARLRTIPGVGPRLAELLVALIDQAHRFRRANQIGSYLGLVPRQFQSGAMDRHGRITRRGNRLARSLLVEASWVALRYNPHLRGIYERVHRGSRTRRKVAIVAVARRLAVIAWAMLRDETTWQPDRVGVPAAAPAACH

SEQ ID NO: 274035 - protein, 316 aa, unidentified
MNNKIVVGIDVSKKYLDIAKGSRDPSPAHVEYNDEQVRKIVDQMQEWEPKLIVLEPTGGLERPLMAALLEAGQSVACVQPRRVRYFAKSIGVLAKTDKLDARLLAHFGESTNPSPTKLPTAQQQRLAALLTRRSQLVAMRTSERNHLATGSGEVQASIQEHLTYLNAQIKQGEEEIGDLLEDAPEMRKQREILESVPGVGQITAFTLLGYLPELGQINRKQIAALVGVAPFNKDSGTRRGKRTIYGGRARVRTVLYMATLSATRFNPTIKRFYQRLVDAGKPRKLALVAAMRKLLTILNAMMRTMQPWQFSVHTSP

SEQ ID NO: 274036 - protein, 337 aa, unidentified
MASLLVYVGLDYHEDSVRVCVMDRHGQVLLNRDVPNDIEAVRNWVGRCGLPQALAIEACCGAAEFADHLHRRTGWSIRLAHPGYVRRLKQSPDKSDHDDASLLADLVRVGYLPEVWLADHNTRQLRRLVHYRQGLVAERKNIKLRIRGLLREERLSCRHARAWTKAWFQWLTTAPLGEQSAWIMAQHLAKLERLNQEIRAGEERLELATHGDELMARLLVQPGIGLITAATLRAEVGRFDRFRSGKQLSRFCGVTPCNASSGRREADAGLVKAGSPALRAILIQAAQRLARHESRWKELKARLRRTKPANVATAAVANRWLRWLYHQLVSTPQGTLA

SEQ ID NO: 274037 - protein, 318 aa, unidentified
MHLTANISVPQKNFIAIDLHSDNAVICVRRNALNKAGELVGKNIWCGRVSIRDGLDNFIKALLPYCQDFDHVAVVESTYNWYCLADVFEERGWLLRIADPSTVSQANLKVSDDRTDAQYLAERLRVGSLKHYLPLNYSSRALRDLCRYRMAMVQDCASLKIKLINLYRNQLSKNVRVADLLERCQPHMQPNYRFNSDILEEFKDPNIRLRVAFEISRIAMLEEMIEECNAEIQKQCKDQELVKLCKTIPGCGPVLSAVICTEIGTMQRFKSAGDFVSYCRLCSTSKLSIGKSKGLGNAKNGNAYLSWAFTEIENAHPE

SEQ ID NO: 274038 - protein, 351 aa, unidentified
MGKRRTWPRVCRELPNRTWLSSPTVPDDFSAIYSILRTLELKTSRAFPGQCTPGRLGIEAGLATHYVARELAALGHDVKQVPPTYAKPFRQGHKNDFRDAHSVAEAVQRPTTRFVPAKTDEQLDLQALHRVRSRLVSERTAVINQIRGFLLERGIIVRQGLRFLRQALPDILAKRTDVLSPLMVRIVADLASDWRQLDERIEPVTDEIETLAKSDDSCRRVMTVPGIGPIISSAMVAAIGNGAAFARGRDFSAWIGLVPKQMSTGDRTILGRITKRGNGYLRTLFVQAARVILLRPASWPKHSFGVWLARAAQRLHRNVLAAALANKLARIAWTVLAQGRGYEARITKAAV

SEQ ID NO: 274039 - protein, 354 aa, unidentified
MGLKHQKEKRSMDYFGGLDVSVKDTSICIVDDTGGIVREVKVASEPEALLAVLMNPLYRFKRIGLEAGPLSQWLFSALVEAGLPAICVETRHMRAVLKAQINKTDRNDARGMAQMMRVGLYRPVHVKTLRSQKLRMLLTHRKLLQSKAIAIENDLRATLRNFGLKVGVVGTVRFEARIRELVENHPDLTLLVEPLLVVRGVLREQLDILHRRLLAVVRDDNVCRRLMTVPGVGPVVALTYRATVDVPARFRKSKSVGAVFGLTCSRDQSGERDRPGAISRCGDEMMRAMLYEAAQSMLRSKKWSWLKAWAMKIARHRGMKRAIVALARRLAVIMHRIWVDGTEFRWTREAAAAA

SEQ ID NO: 274040 - protein, 332 aa, unidentified
MTHDSAPAADSSQSGSLFVGIDVAKDKLDLARSDGDPVLTVANDPRGIDQIVQSFAARGPTRVVVESTGGLERPLVDALLDADVPVALVNPGRVRHLAIGLGIIAKTDPIDAAVLMKFARLAEPRLAQKRSEQQVELDALITCRRQLVGARTNQANCRLTTRSKSALASIDAVLKTLDKQIELLDEKIRRLIDSDDDFKHLNELLRSVPGVGPVLSSTLLAELSELGNIDRREIGALVGVAPFNRDSGRLRGKRSVRGGRAPVRGVLYMATVAAIRTNPVLGPFAERLKKAGKASKVVIVACMRKLLTLLNAMIRDGLRWEELEVVKALVGG

SEQ ID NO: 274041 - protein, 380 aa, unidentified
MWQAVRPLVSETVLQRWSPRRAFLEELEQSPGRFAVRIGKVEPHQESRHTHIRRDMLTPFENDKMQQIFVGIDVSKARLDGASRPDGSTFSEANDARGIAALVVRLRALGPTSVVLEATGGLEAPLAAALAAAGIPVAVVNPRQVRDFARATGKLAKTDRLDAAVLAHFADAVRPAIRPLPDDQARQFEALIVRRRQLVEMRAAEQNRLGTSTAAAVRRNLEAHIAYLTTQLADLDGELQRAVEVSPTWKAKEDLLRGVPGVGPVVSRTLLASLPELGTLTNKQISALVGLAPVARDSGTLHGRRCIAGGRGPVRAVLYMAALTAKRYNPVLRAFHERLVAAGKATKVALTAVMRKLLTILNAMVRHNHPWDPSMAPGTN

SEQ ID NO: 274042 - protein, 368 aa, unidentified
MQVSTIGIDLSKSVFQLHGVDEKGDVVLKRRLRRGQLLEFFAGLAPCRIGLEACGGAHHWGRELTRLGHEARLLPPAYVKPYVKRGKTDAADAEAICEACARPNMRIVPVKSVENQAVIALHKVRDHLVRQNTRLVNLMRSTLAEFGVVAAQGVPGAEELKAVVRDDQDARLPPLARTALTPVLSELGALQRHLKDLDLLIAARVKKDETCRRLKTVPGAGPIIASAVAARVGDARRFRSGRDFAAFLGLTPKPHSSGLKERKGRTSKMGDRSLRALLVVGATAMIARARRKEQESDGDELVFIRRLLKTKPARLVSLAYANKMARILWALMVRGGTYEPRRRRRATTHIRVADRPQRGPGTAARCDA

SEQ ID NO: 274043 - protein, 350 aa, unidentified
METILAIDLGKFKSCFCMLNTQTGEQTFSTEKSSREDFFHIFRKLQGGNSIVLFEAGSQAGWVSDMLREMRISFKAANVTHPAWRWKENQSKSDKKDAQRMIHMYTSGFFPEVHIPLRQTREKKSLLVYREILVRKIKKIKNFIRALLASHAVELPSGKKCWTKEFRYDLNDVAMQMELIEDVEMLWKGQLYLELKQLDMLENMLANVEKKLDSLAADNKNIALLKTIPGVGPRTAEALVYTIDDPHRFKNSRQVSSYVGLCPRRYQSGNTDHSGGISKRGSNLLRALLTQAAWSSLKAGWSADMYKRVRQGSSKRGTIAIIAVARHILIRSWAMLRDGREWNESKFKAA

SEQ ID NO: 274044 - protein, 344 aa, unidentified
MPSIVGGLDIHRKQITFDYLDLATGEVKCGQVTPADRAQLRAWLARFEDPGEVAFAVEACTGWRYVTEELQRAGIEAHLAEPADTAAARGRKRRAKTDRADARLQRDLLTQGRLPECWIPPEHVLEYRALLELYHDLRAEHTAWIQRAHAVLFHQGAPAFHDLSRADAPAELAALAREHLSPAGQQQVMLYLRMLEVTGGELDGLRRQLIAAARHLHGARVLTESIYGVGPVTGLALTCWLGGAGRFTSARKAVRFAGLDITVYSSDGKRSPGHLSRQGPPVLRWALYEAGKAHARPLAPDHGYYAAVKDRKDGKRAALSEARKITRRACHILSELGDDALAAV

SEQ ID NO: 274045 - protein, 343 aa, unidentified
MKLSRVGIDLAKNVYQLHGVERSGKTILKRRLKRHQWLKVLLDKTEPGCVIGMEACASAHHWGRELQSRGYTVKLIPPQFVKPYVKSNKSDAKDAEAICEAMSRPNMRFVTVKTVAQQDIQATHRIREDLKVRRTAKGNQIRGLVAEYGLVAPKHMSSLRAAIPCWLEDAENGLTHYFRSLLHGLWDDLLMLDDRMCEMDKTIKRLAKDNEDCVRLEQIRGIGPMTSTALIATVGDARQYHKGRQMAAGIGITSRQHSSGNKHRLLGISKRGDVYLRTLMIHGARSVVTGAKHKDDPLSRWVTEIAQRRHPNVAAVALANKNARMAWAMLRNKTDYNPDFAVR

SEQ ID NO: 274046 - protein, 311 aa, unidentified
MYYIGIDVSKKDLSVFDGKDLKFINQEGLTSFKKYLKKKYHLSEVVIIFEPTGVYSLYLKEFCAENSIKAYIVNPKKSHNFTRALGRRSKTDKIDARILYQFHKLIDLKDIKVPKVDQEAKVLSSYLTSYEFALKQRISLSHHLESLRDKRLIALMRKDLKRAKKLEDRIFDDIKEYLGKNQNLKEDYQRLSTIPGIGEKAAIALLTLFKTYQGTNRAQITALAGLDPVKRESGTSVKYKVRISKNGKKIYRKILYLPTLCATVHHQKIRVFYQRLLANHKPKKLAIIASMRKILLIAHAMYRDKTEYVAV

SEQ ID NO: 274047 - protein, 413 aa, unidentified
MNNNKKIELLQNVKTFVGIDIAKKVHFASLINNRGKELSVGIKVHNNRQGFVDLEKHLAPWKKDEVVIGLEPTGHYWKSLGYYFKKNGYIVTLINPYHVKLTKELRDNSRSKNDVKDSKLISHLINEGKFLEPRMPMSTHAKLRNLGNLHMQLTQDCSRVKIRLKTLLDEYLPEYDGNFSDMTCLTSLTLLTKYSLEQLKSDVLIEQKIELITTISKKRISYKKAEYIIKLLSESIGVNEGIEAAQFQLICLLEQLKMYQAQIQEVECKIVAILEANEEAVSLLKIKGLGPVLVGSLLGQIGSFHEFEHYKQILKFAGLNPVENSSGSHKSQIVASKRGRSVLRNILHQIALSLVLNDVEFKKLYEYKINTLKKAKLVALTTVAIKFVRVIFHVIKNKKEYSNKFVLEGLSIN

SEQ ID NO: 274048 - protein, 323 aa, unidentified
MDKYKETFGVDISKDVFDVYGSDCGHSQFNNDSFGFKLFVKTLAPDDLVVMEATGYYHYRLAQFLYKNCIAVSVVNPLSVKRFIQMKLSKVKTDKSDAKAICEYALSNEVPLYNALSDVQAECLQLFRLMDNYLKKRTATKNKLHGEEVLGIPSKYVYKSLKRNLKHLDKEIKGIEDRLLELVKQDQQQQLTLLTSIPGIGIKTALFLVVITDGFSKFEKASQLCSYVGITPTIRESGSSVRGRSRISKVGNKKLRNLLFLCAFNACKHNKACKEIYERIVTKGKSKKLALIAVANKLLKQAFAIAKSGLPYDENYVSVLANG

SEQ ID NO: 274049 - protein, 384 aa, unidentified
MDQATPSTASANILHCALELSKKSWLLAIQFPDREQPSLYPIAGGDAEKLMAKLTQARDRWAKTSGALPMITLCYEVGYDAFWLARCLKARGVECLVIDPGSLQVSRRGRRVKTDRVDVKTLLRTLIAWCRGERHVWSLVRIPSIDEEDLRRSHRERSRLVRERTAHINRIKGLLFAQGIRDINVKSRYKTLAVDELVTGDGHRLPPRLAGEIAREIRRLATVQEQIAEIERERDAAPTTCEATERKRDLLSQLKSIGPAISAFLSREVYYRQFANQRQVGSFLGLTPSPYDSGDEERCQGISRAGSGHARAVMIETAWLWIKHQPKSALSRWFVERTAGQSKRVRKIMIVAVARKLAIALWRYVELGLVPQGAILNPRMKARS

SEQ ID NO: 274050 - protein, 370 aa, unidentified
MEKYKYVGLDVHKETIAVSVAETDGGEVCYLGEVPNTADSVVKLVKRLRKEGAKLSFCYEAGPCGYGLHRQLLDLGQDCQVVAPSLIPRKPGDRVKTDRRDSLNLARLHRAGELTAVWVPDGAQEALRDLTRAREDMKHIQLQAKQRLLGFLLRHGKRFEGKDNWTQAHFRWFEEVKFGQPLQQIVFQEYVDSVQAITRRVAAFDEQMESAARNSVFWPVIEGLMALRGVKLITATTIVAEIGDLRRFANAPQLMAYLGVVPSEHSSGESKSRGGITKTGNGHVRRVLVEAAWQYRYPARKTAVLQRRAERASEQVQEIAWKAQKRLCARYRLLEARGKLKVQVCIAIARELAGFIWAIGQTLPQLAARR

SEQ ID NO: 274051 - protein, 344 aa, unidentified
MSTIRVVGIDIAKSVFQVCVWMVDGSVAWNKKIPRSKLLDTIRQFEPGTLVAMEACATSHFWGRTFASMGYCVRLIPAQHVKAFVRSQKNDANDALAICETAFRPGIHFVSVKTTEQQDIKALRNTRQLMVEQRTALANQLRSLLAEYGFTIPVGSLRLQQQLPELIEDASNSLTFTLRRLLSSLREDMQALNERITSLDNEIAALSSQQTVYRHLLTIPGVGPLIAAAFISEVDATQFSSGRELSAWCGLVPRQHSSGGKQRLSSVTKNGNRSLRTLIIHGARSVMRSVKKRDDSLSIWLQRLEARRGFLKTTVALANKLTRIIWRVLTDGIDFNMQKAVAMN

SEQ ID NO: 274052 - protein, 338 aa, unidentified
MSESALIGIDLGKHTFHLHGQDKSGREVFRKKCSRAQMMQFFASSQSCVVAMEACAGSHCVARQLAAIGHTAKLISPQFVKPFVKGNKNDFVDAEAICEAASRPSMRFVTPKTESQQTLSVLHRMRESLVRDRTRTANQMHGFLLEFGVSLPRGLTIMKRLAVVLAEHELPVRLTVLLQRLHNHFIYLDEQIKAMDKELACQVADDDLGSRLLSIPCVGPITASLLVVEMGDGKQYRCSRDFAASVGLVPKQYSTGGKANLLGISKRGDKHLRQLLVQCSRVYMQRLDHQKGALADWVRSLLSRRHSNVVACALANKLARIAWAIAAHHTQYEAGPGA

SEQ ID NO: 274053 - protein, 416 aa, unidentified
MNAVGIDVSSRKSTVAVLRPLGEVVCLPFDVTHDIAGFASLAEKLKALDGETRVVMEHTGRYYEAVAKALHEAGLFVCAVNPLLIKEYGANSLRRVKTDKADAVKIARYALDNWADLRDFTPMDAIRYDLKTLNRQFQLASKQRTASANNLIALLEQSFPGIRKCFDSPVRSDGTQKWVDFAHSFWHVDCVRKQPFPAFCERYRKWCKLHAYFFKLRNAEKVYALAKSAVVLTPKSKVVKVLVQEAANQLISISRSVEVYRAEMDRLAAMLPEYPVVMAMYGVGKSYGPQLMAEIGDVRRFERKQDLIAFAGIDPMPNQSGDKNVRSNKSSKRGSPYLRKTLFNVIRTYLQCAPQDEPVFQFLNRKRAEGKPFYVYMLAAANKFLRRYYAKLRDYFASLDTLQPVAPIPTILKAAL

SEQ ID NO: 274054 - protein, 313 aa, unidentified
MITEEVHVVGVDVSKATLELGCMSLTLPASIPNTPAGFKTLLKSISKCITPVHIVCEATGPYHGPLVRFLHLAEIRVSVVNPRLTRDFARARGKLAKTDAIDALLLADYGRTMKPDPTTPPEEHVVLLDELVTRRAQLVEDRARERNRLEQSSGPDVTASLRLHIRHLDEQIKKLLKRIAEVVEKHPSLKTKVSLLAQVHGIGTLTASVLLATLPELGTLSKNEVTALAGLAPFNRDSGAFRGKRSIHGGRIGVRCAIYMSALCASRGNPILKAFYQRLRAAGKPHKVALVAVMRKLLIYLNSLLKQHTLSPA

SEQ ID NO: 274055 - protein, 345 aa, unidentified
MKKIVKQVLGIDVAQKELVVCLGRMYDDWSPELYGTKTFANTIKGFIALLLWVKKLTDQRIGVRYVMEATGVYHEALAYFLDEKGYEVSIVLPNKISNYFRTLDVKTVTDKTASETIARFGLERKLDDWQRPKPIFKKLRQLTRERDQLIQARTAAKNQLHAEQSEAEPHESSVARIKKQIALFNKQEQEIKADILELLQQEQDVKKSVTTICTLSGVQVLTAVTVLAETNGFELVRNKRQLTSYAGLDVKEKQSGTSIKGKPRISKKGNKYLRKAMHLPALAAIRCDERFKAVFTRLVLKHGIKMKAAVAVQRKLLEMIFIIYKTNKPYDKDFLKKLESSIAAP

SEQ ID NO: 274056 - protein, 346 aa, unidentified
MNSMNYIGLDIHKKSISCCVRQADGTIMQEGTIPATRDALDNWMKQLPQPWMAGMEATLFTGWIYDHLESCGATVKVAHPAMLQAIAAGKKKNDRVDARKIADLLRCDYFPECHMAPREIRDRRRVLRYRNLLVRQAVQMKNKVSGLLMEAGVPYNQQKVHQKKYFAELLQKQKKEMPPSMPELLRLSRSTVEALTGMQRQLIRALERDALLAARVERLASIPGVGRVVALTWALEMGDIRRFASVKKAVSYCGLCGAEKSSGGKSERTPISKQRNKHLQTIRVEAAKLAPRWSTELALVYEREKQRGNRNRATLAVARKLVAYLMAVDREQRPFDTQLRVAGNAA

SEQ ID NO: 274057 - protein, 427 aa, unidentified
MSQNQPEIQYAAFLAIDWADQKHVWSLQDANSSACEHGEVDAMPEAIEAWIAQMSQRFAGRPIAVAVEQSRGALVFILSKYEQLHIFPVPPAMTANLRKAFYSSGAKNDPTDADLLLDLVQRHREKLRRLSPDTEATRRIQNLVEERRKLVDEKTAQSNRLEAHLKIYFPQIPRWFGDLDSPLVCALLERWPTLEALQKERPGTLRSFFRKHHSRKEDLIESRIKAIGEAMPALKDRAVVEAKVTVVKVVVQLIQVLHEGIEGLNRQIQEAAEAHPDFFIFDSLPGAGAVMAPRLLAAFGSQRERYRNSAEVQTWSGIAPVSESSGKSSWVHFRFACPKFVRQGFHEWASNSITQSQWARAYYGLQCRRGKKHHAAVRALAFKWIRIIFRCWKERVAYDENVYLAALAKHNSPLLAATKIGVAKRAV

SEQ ID NO: 274058 - protein, 463 aa, unidentified
MKRHRRRSSPKPRTSSNALERLHPNAAGIDCGSAEHFVAVPPDRDPTAVRSFATFTTDLHRLADWLAGCRVTHVAMEATGVYWIPVFEILEARGFLVILVNARHVKNVPGRKSDVSDCEWLRDLHILGLLRGSFRPTDSIVALRGYLRHRTVLIESAGALVQRMQKALIQMNLQLPLVVSDITGVTGLRILRDIVAGERDPTRLAQHRDHRCHASAAEIVAALTGNYRAEHVFVLQQNLELFDAYQRQLAACDTAVEAHLARLAATAAPPPTPLPRRRKKTYQNAPRFDVRTPLHQLTGADLSQIDGIGPYNALRLLSEIGTDMSRWPTDKHFTSWLTLAPHNQISGGRLLRSRTQPSANRAATILRIAAMNLGRTQTALGAFYRRLAFRVGKAKAITATARKLAILIYRTLKDGFVYSDPGAEAYDAHHRTHVIRRLHHRAHNLGFALLNLSTGEVVDGSVS

SEQ ID NO: 274059 - protein, 355 aa, unidentified
MNQDKYIGMDVHQATISVAVMDVDGKLIMECLLETKASTIVEFIQGLHGTLSLTFEEGTSAAWLHDLLKPHVSRLVVCDPRKAALLKQGNKNDRIDARKLAEMLRTNQLKPVYHEEHGIRALKELGRSYLTITKDVTRVMNRIKALYRSWGIACGGTSVYAPRHRAEWLAKLVEPGVRVRAEHLYQQLDGLQPLRLEARRELLGESHKHAAVKLLRQIPSIGPIRSALLVALLQTPHRFRTKRQLWAYSGFAVETHDSGEYRCVRGKLQRNRERITVRGLNDNHNKDVKNLFKSAAISASTRPGPLHDFYVARVEKGMRPTMARLTLARKIATITLTIWKKGVSFDPQHLHRQAA

SEQ ID NO: 274060 - protein, 401 aa, unidentified
MVSDFRKGRYNLMKIYVGIDIAKLNHFAAAISSDGEIIIEPFKFTNDADGFQLLVSKLESFDKNSIIIGLESTAHYGDNLVRYLVTELYQVCVLNPIKTCQMRKNNVRKTKTDKVDTYVIAKTLMMQDNLRFVSFFDLDMMDLKALGRFRQKTIKQRTRLKIQLTTYVDQVFPEIQYFFKSGLHQNAVYALLKEAPSPKEIASMHMTHLANLLKVNSHGHFTKEQAKELRVLAQKSVGANDSAISIQITQTIQQIELLDSQLDKIEAEMTDIMKFNDSVIMTIPGIGYINGGMILGEIGDIHRFSNPNKLLAFAGLDPSVYQSGNFQAKTTRMSKRGSRVLRYALVNAAWNVVRNNATFKAYYDAKRAEGRSHYNALGHCAGKLVRVIWKMLTDEVEFNLE

SEQ ID NO: 274061 - protein, 324 aa, unidentified
MDHSTNLPSPETDIRGDCATLFVSLELSRSTWIATSLAPGSKKMSKHTLAGGNGRELLDLLARLKARAEQRIAAPVKVVAIHEVGLDGFWIHRLLEANGIESHVVDPASIAVPRRHRRAKTDAIDGETLLRTLMAWQRGEPRVCAMTVPPSPIEEDRRRTSRERATLLRERIRHTNRIRGLLFGQGITNYNPLHKKRREYLKELRTGDARSLPAHLEAEILREIDRLELVLRQISEVETERDEMLRPAKASSPVALLMRLKGIGAEFATVLYLEGLFRHFENRRQLAAYAGLAPSPWKSGSIDQEQGTSKTGNPRLRTTMVEFA

SEQ ID NO: 274062 - protein, 345 aa, unidentified
MDHIGIDLHKNSSQVCILTEDGELIERRIKTDRESFDKLFAERGPARILVEASTESEWAARHFESLGYEVVVADPNFAPMYATRDRRIKTDKRDARALCEACRLGAYRPAHRTSDRQRDVRAHLSVREALIRTRSKYISLIGALARREGCRIKAGPSPSFASRVEQAGLPAHTLAQIEPLLVMLKLLNEQIKAADRRLEEIVKADAVVQRLCSVPGVGPVVATTFAATLDNSSRFLGAKHVRSYLGLVPREYSSGERQHRGRISKAGSVRARSLLVEAAWALLRWKTERTRALHEWWARIAQRRGKATAVVALARKLAGIMFAVWRDGTEFDPQLLRPRGAPTPA

SEQ ID NO: 274063 - protein, 354 aa, unidentified
MNQNIILTTDYHDQNCVIRWFDEATGTEQVHKVATDTKQLSDMVARAEALAKPRGARVIWIQESTTGWARVEALLGRRVVFHLAHVVQMPLPPKARRRKTDKIDTARLQREYRNGELPLAHRPPAWWRQVRRLAALRENLVSRRTALRNWLTRYLAHETWQDRTGLWSQKGRRRLQRLAEAAPRWDRLVCETKLDELDQLGERLDKVQAAMHAVFKQWPAAQRLDGIHGIGVIAATSIVARIGPISRFKCPEQLIAYAGLAPAVQQSDETRRHGRIGGGGTDRHLRHYLIEATVWARHIPRYRAAYERTSKRRGNKIGRLVVARMLLRSIWRMLRKGETFAPTAPDQARENNQK

SEQ ID NO: 274064 - protein, 312 aa, unidentified
MDKPNIQFEQIVARGCGIDVHKKILVATIRGTGIQEQTREFSSYTSSIEELRDWLKQHEITHVAMESTGVYWKPVYNILEADFEVILVNARHVKNVPGQKTDKKDSKWLTKLLLSGLLKGSFIPPKPTRELRDLTRYRRKVVGTIASEKNRLQKILEDANIKLSCVLSNMSGSVATKIIKAMLDGEEDVSELVKFRHGRMHASEAELMLALQGALTSHHRFMLKMIKRSIEEKEALVTELEEHIEVHLRASEMKLDAELLEGIPGVGKDAAAGIIAEVGNNMNQFPSAQHLASWAGMSPGNNESGGKKKVDE

SEQ ID NO: 274065 - protein, 330 aa, unidentified
MKNWNVILGVDVSKLTLDISCAKRNLHIKIDNNSKGFAEFQKWCKTNGIDLKDTLMVMEYTGGYEYRFLQFCESKSILYCRVPGLEIKQSMGMVRGKNDKADSFRIGRYGEEKSHKLSPSKPLDKNILTLKQLLSFRKRLIREKAGLMSTLKERKHIYEVKETDTIVRIAQAKIKGDEKHIDQVERRIRELIKSNEELLQNYRIITSIKGIGEVNGWMTIAYTENFVSFKDARSYGVYVGVIPFGHDSGTSIKGRKRVSHLAQKELKSELNQAAKTAITHDLEISAYAKRKLQSKNYSLVLNNVKFKLILRMFSLVKRGEMYVDNYKRSA

SEQ ID NO: 274066 - protein, 321 aa, unidentified
MQSQNTVVYAGVDVAKATLQLHVQGQQREFHNTPKGLLQLVAQLQTVPSVQVVCEATGGYERAMVKALHQEQIPVSVTNPARVRAAAQAQGQRAKTDRIDARGLTDYGQRYQPKATPPVSATQEQLVNLTQWLKQLIHGRALAKTQAEHHQDPFVRRQHAKLMTHLESQIEAVEKQIEALIEQDAALQQRVTCLDKIQGVGPRTAWMVLAHMPELGQLNRQEVAALAGLAPWTRESGTMKGMRCIGGGRPEVRLALYMAALSAARCNPVLRILYKRLRAKGKLPKVALTAVMRRLLTYMNHCIKALPSETAGAQTEELKAA

SEQ ID NO: 274067 - protein, 435 aa, unidentified
MEEVTDEPLYRDRVCGIDIGKAQMVATIRVPSDRDPARRAQETRSFGTTRREVLALADWLRSWQVPAVVMEATGDYWKGPFYRLEAEGFECVLADAKQVKNLPGRPKRDPADSRWLAACFERGAVTSCFVATPEFRIIRLHTRYRRDLTEGRTREKQRAEKLLESAAIKISAVLTDLHGVTGRDIMDRLIAGERNPKVLAQLARAAARRKISQLEEALEGAEFFTAEHAALLAKVLARIDRLAAGIDDLTEVIEQLLAPYEEQLQQAESMPGWGRRAAQDTLAETGADMSRFPSGAHLSSWAGRAPQDHQSGKRKGRAKAKKGNRYLGAITGETAVAAGRTQTREGARHRRLARRRGAAKACVATGNTQLKVYHKLLSNPGMRYQDLGPDYYERQRDVRRQVAHHVGKLGSLGFEVTLCRLPAPDPDGTGPIQAA

SEQ ID NO: 274068 - protein, 409 aa, unidentified
MATDPPNVIVGVDTHSDTHFAAIIDEHGKHLAAEEFLAVSSGYRKILAFITHFGLIIGVGVEGTGSYGAELSRVLRTAGLPVPEVNRPNRQARRLRGKSDPLDAYQAAESVLAGRGTSTPKTKDGPVECLRVLRAARSSAMKARTIAINQIKGILVSAPEHVRSRFRPLTTAQLIPALKRSRPMGNLTDTEIATALTLKKLAVRYRFLEREILDTDAVMAEILRDCAPLLRNVPGVGIEVASQLLVTVGDNPKRIATEAQFAALVGVAPIPASSGKTSRHRHSRGGDRAANAAIHHVVVSRLATDSRTRDYAARRSAQGKTKKEIMRCLKRYVARELYRQLTNPQAAPSITDLRTAREDLHITLREAAGHFNTWPGTLSRIERGLSRDDYLASQFRDWLHEQKAVQNIN

SEQ ID NO: 274069 - protein, 400 aa, unidentified
MISVGIDVSKEKSTICILKPYGEIIGRPFEVCHVARELSELATMLLRLDDEVRVIMETTGIYHLPVLSYLKEKGFFVAVINPFEMKEYRCQGLRFVKTDKQDAITISNYGIDHWYRLKDYEAEESVYAELKLLGRQYRHYMRMRVESVLELTHLLDYTMPGIKNLLKGWNETNGKDKLSDFAEEYWHYDNITRQSEEEFVESYVEWAERKGSHRRQDKAEKIYALAKEGIPTVSSSTPSTKMLVQEAVRVLREVDNTLMTILTQMQTLAKSLPEYPVVRAMGGVGNVLAPKLIAEIGDVRRFHSGKALIAHAGIDAPPYQSGQFTGTERKISKRGSSSLRKIGYEVMRCLKTHKAPKDALVYEFILKKEKEGKSKRAAKIAGLNKFLRIYYARVMEVYQE

SEQ ID NO: 274070 - protein, 342 aa, unidentified
MQVGTIGIDLAKNVFQVHGIDAAGAVVFTRKLRRSQILPLFAKLPSCLVGMEACATAHHWARELEALGHDVRLMPASYVKAYVKRGKNDAADAAAICEAVTRPSMRFVPVKSVEQQAALMLHRARDLLIRQRTQLINALRAHLAELGMVAATGRDGVKKLIAIVADEIEEQLPDPMREALQALIAQLEALQQQTGRLECQIHAQHRASDASRRLETIPGIGVIGATAIAATVSDPTVFKSGREFAAWIGLVPRQTSSGGKERLGSISKQGDRYLRRLLVVGATAVLRHARAHPDKHPWPMQLLARRPAKVVAVALANKMARIAWAVLVRGGTYRAPVLAATV

SEQ ID NO: 274071 - protein, 403 aa, unidentified
MNNVAGIDVSKGKSMVSVLRPFGEVVAKPFSVGHTGSELKELADYLKSLDGETRVVMEHTGRYYEPVARFLHEEGVFVSAVNPKLIKDYGNNTLRKVKTDKADSRKIARYGIDNWAELRQHTPMDTIRMHLKTLNRQQSLYTKTKTMMKNNLIALLDQTYPGVNALFDSPVREDGSQKWVDFATTFWHVDCVRNMSLTAFAERYRKWCKRHGYNFSQSKAVEVHAGAQDLIVMLPKDALTKTMVRQAIDALNAVSASLERLKAEMRTLAAQLPEYPVVMAMHGAGDSLGPQLMAELGDVTRFTHRNAITAFAGVDPGADQSGTHEAKSTRVSKSGPPELRRALFLVMDCLLKTQPQDDPVYRFMDKKRAEGKPYLVYMTAGANKFLRIYYGRVKEYLASLEGN

SEQ ID NO: 274072 - protein, 350 aa, unidentified
MNVVHYIGFDVHKKYIYYCAKTADGRIAEEDKLRATHAAVRQWAVQRTEPWRGAMEATLFSGWIYDTLKPFAVELEMGHPALMKAIGASKKKNDKLDARKIADLVRCNLLPACYVLEPEMRELRRMLRYRNLIVQQAVQMKNRMSGLLMEVGAEYNKERLHGAAYFGELVGQLEEVPESVKDLLQLSRGSLESLQRTQQQLVNRLKQHPRLRQRVELLKSIPGVGDLTALTWALEVGEPERLPSINQAVSYCGFTSALIASGGKQQRAPISKQRNAHLQTMLIEAAKVAPRWNPQLAAVHEAEQKKGHCNRATLEVARKLVAYLLAVDKSGKPFQARTATNSPQEVKPAA

SEQ ID NO: 274073 - protein, 413 aa, unidentified
MDLMVERCAGVDIGKDEVVACVRTPDPSGKGRRKETRTFTSFTSQLEAMADWFAAEGVTEVVMEATGSYWKSPWYVLEERGFELKLVNARHVKILPGRKTDVADAEWLAELLEHGMLRGSFVPPVAIRELRDLTRYRKRMIQAHTSECQRIQKTLEDAGIKLDSVASDVLGVSGRAMLAALVAGERDPEVLAELAKGVLRKKIPELRQALRGRFREHHALLIGLCLDHAAHLEEAIVKLDVRVEAVMVPFAEARDHLDTITGVGKRAAECVIAEIGVDMGVFPTAGHLSSWAGMAPGNNITGGKRRSGKTNKGNVWLADVLTQCAWAAARSRDTYLSAQYWRLARRIGKKKAATAVGHSILVICWHLLTNNADYDDLGGDYFVRRGNTARHQDRLVQQLQDLGYQVTLKKVAA

SEQ ID NO: 274074 - protein, 453 aa, unidentified
MEQYYLGGDVSKGYSDFVILDSRKRLVKENFQLDDTIAGHSLLYDRLLNFFEEHPDAELCAALESTGGYENNWHKTLSKFQGSLNVKTARLNPAGVCKNNEASLKRIITDKISAQGVAEYLISHPEKVVYQQQDYWASLRKQWSFIKMLTKQSTQLFNQLESLLYSANPEILKYCQEGMPGWVMNLLKQYPTAAKLGKARATSVARIPYISTNRAEDLVAGAKTSIASATDAITGQLVCATVGQIQHLQQTIKAQTKILATECNLPEVKLLKTFTGIGDYSAIGLMLEIQAVERFSTVKKLASFFGLHPVYKVSGDGRSAVRMSKKGRKEPRAILFMVAMSAIGSNSLIRDLYQKHVAKGMEKMAAIGLCMHKILRITYGMLKNNTPFNPEIDLENRAKTYAQLPKESKDKSRRYQDFDAQAPISRRQRKKREERKLSQNAVSVECGISTPVP

SEQ ID NO: 274075 - protein, 401 aa, unidentified
MQQDQQHDSVDVFVGVDVGKGQHHAVALDRNGKRLYNKAMPNDEAKLRALISELRAHGRLLFVVDQPATIGALPVAIARDEGVMVAYLPGLAMRRIADLHAGEAKTDARDAAIIAEAARSMPHALRSLRLADEPLAELTMLCGFDDDLAAQITQTSNRIRGLLTQIHPALERVLGPRLDHPAVLDLLERYPSPATLAAASEKTLANRLTKLAPRMGKNLAAEIVQALNEQAVIVPGTQAATIVMPRLAQQLAALRKQRDEVASEVERLVLAHPLWPVLTSMPGVGVRTAARLLTEVAHKAFASAAHLAAYAGLAPVTRRSGSSIRGEHPSRRGNKVLKRALFLSAFAALRDPISRAYYTRKVEQGKRHNQALIALARRRCDVLFAMLRDGTIYQPKAADNA

SEQ ID NO: 274076 - protein, 354 aa, unidentified
MKRTTKYVALDVHQATTLASVREESGRVIARTILPTEDGPIVEFFRGMRGAIHVAFEEGTQAQWLHDLVDPLVHRVVVCDRRGEARRGNKGDQVDADALSELLRRGSLRAVYHGSADRATLKELTRAYQNLVEDATRVMLRLKALFRARGIPAPGKRVYHPGARAAWLARLTNPGARCRAEALYAQLDPLRALHPQVKGAMVAEARRDPAWALLQTIPFYGPVRVAQLLATMQTPWRFRTKRNLWAYAGLAVVTHTSAEYLLVAGRPVRRRRAPLTRGLNRNYNRGLKNVFKGAATAATAQPGPFLDFYQGLLARGMREELARVTLTRKLAAVTLRLWKKGERFDPTKLTVPAR

SEQ ID NO: 274077 - protein, 355 aa, unidentified
MGYEVSDELLHNGEWTMSQTYAGLDVSDKTTHVCVVGDDGKVLWRGVCPTDPMALATTLSKHCRGVVRVVLETGSLSSFLYHGLIERGVPVICICARHAKGVLSARVNKSDVHDAEGLAQMARTGWFKVVHIKDSATHLDRAQLKVREQLTKTQRAMANQLRGLLKLFGQRMGKVTTPGKRTERLEALFDERPELRPILTPLIEGLAALEVQIRASSRAIKVRAAADPVCARLMTTPGVGPITALSFKSSIEDPARFARGEDVGAYAGLAPRRSQSGERDVKGRISKAGDPMLRSALYEAANNLLCRVKRPSPLQTWGKTLVATKGAKRARVAVARKLAVLLHKLWRTETTFEWA

SEQ ID NO: 274078 - protein, 411 aa, unidentified
MHNRQNYLYVGVDLHKEHHTAVIINCWQEKLGEIQFENKPSAFSKFLLEVETYVSDGLSVVFGLEDVGGYGRALAKYLVDHEQVVKEVNPALSFLERKSQVMIQKNDSWDAECVARILINKLNQLPDAKPNDLFWSIQQLVSRRNALVKAQSALKNQLHIQLNHHYPSYKKFFSELDGKTALAFWQQYPSPSCLEGANIKQLTAFLLDVSNNTCSVKKASDILKLVKEDGHTMKEYQETRDFLVRSIVRDIEFKKTEMKYIERELKQLVNLLDYQLETMPGIELVTASALIAEIGDVRRFSNANKLARFAGIAPVYFGSGGKGKTHKSKQGNRALHALFYNLAVQQVQVAKGSKMPRNPVFHAYYQKKLKEGKTKGQALVCIMRRLVNIVYGMMKYKTAYELPVVEEKEVV

SEQ ID NO: 274079 - protein, 369 aa, unidentified
MSKLLSPNKIRETMHTQFTKEIDFTGKNLFIGLDVHKKSWSVTIIVDGIEHRTFTQPPSPELLQNYLQRMFPGACYYSAYEAGFCGYGIHRELNSLGIKNIVINAADIPTTQKDKLNKRDPIDSRKIARALEKGSLHEIYIFDRKLEELRTLNRTRFYLMRDLRRSKNRIKSFLQYYGEPIPAEFDNNQWTLKFVTWLKLVNMRTPSGKDAFSYLIQSYEHHRKQLLDLSRLVRQRIREYDHELYSLINKIAGIGPLTASALITELGDINRFDNIDQLGSYVGLVPKIRESGEITHTGGITFRCNSFLRTLLIESSWQAVRMDPAMMQYYHKHLVNNTGHKVIIKVARKLLNRVRYVMKNRQPYIKGVA

SEQ ID NO: 274080 - protein, 364 aa, unidentified
MFVAGLDAHTRYVVVSVVNRTGELLVKPTRVRVEDRQRLLALLAPYRPLEVVMETSSSWPWLCEVLSGADLTFVLAHARRLRAIAEATYKSDDIDAELLARMRLAGCIPAVYVTPAAQREWATLIRHRTALVRQRTMLVNRLHAQLHTRGLHLERGRLLTRSGWQWLKKDAWPHLSAEQRAVVRSHRRLLRELIPLIRAADRHIAAVAATIPEAQRLMTIPGIGAHRALLICAEVLPIARFRTPNHLASYAGLVPITKQSGQGPLRHGPVPGGANRWLRGALVRAIVSHVQHAPRSWLTQYYTQHKARVGWPVARVATARKLARAIHAMLRTQTGWTNDVTPIRLEVSSRETMPHHLVTASQPD

SEQ ID NO: 274081 - protein, 341 aa, unidentified
MEYCGIDLHAEYSQICILDDEGEVMGTSRVRTSQKALEKFFSRDPMRVAMEAGGTSPWVSRLLGSLGHEVVVCSPRRVRLIAESTLKNDKVDAEVLARLVRLDPEFLRPIQHRSEQAQLLRGNLKVRSAMVEARTKWINTIRGLLRGFGYKVSGKAPHSFGDRVDRMKLPSELRAVIEPLLAQLDLLSGEIERRNQHLEEMVKDLPEVAHLREIPGVGPVVATYFVLTIDDPDRFKYSRDVAAFFGLRPSMRESASTTHFGRITKEGDPEMRRLLVQAAHACLLTKADCELKRWALALAERKGKGKAVVALARKLAVLMHRLWVTGEVYQGFPSKQISQAA

SEQ ID NO: 274082 - protein, 596 aa, unidentified
MSTDMPLDRIGVGIDTARYGHRVSFLRPDRRPAAKPFTVLENRTGYQALHERLQQLHQQHPQAHFHVRIDAAGQYAANLEHFLRGLNLPMTLSIGEPKRNKDYQKAHFPKRTSDDTESQAMARFAVVEQPAATTATTPAMVLLREVAGRLQAKVKQSTQAINRLHNLLARVFPELATLTDNVASAWLLQMLDKYPSAERIAQARLHALEKIPYLSPELAQQVQLAAQQSVASLRGDIAEALVRDLVTQVRHTQQTEQSMRQLLTAAFADLPSSAHVQVVTIPGIGTATAAVLVAKIVDIERFATPEKLVGYFGAFPEQDDSGVDKYGKPLPSGRQHMSHKGNDLARHYLWNAARSALQHNPAIRALYRRLRAKGTRGDIAMGHCMRKLLHLVFAVWKTNRPFDAKHFPWEPTGDIAMSVAPSATAGGIPTTATSATTDVLSTSNDKAVGHKRDKPAAEVVTTAVTTVAPTPVPVNPDPPRQRTPPCKVDFAFLRQQVTLEQLLNHLGLRDNLRGRGLQRRGPCPIHSRPDDPQRTFSAHLGKNVFRCFHADCGAHGNVLDLWVAVHHLPLYEAALHLAETFQLRRNREEEPVTGTR

SEQ ID NO: 274083 - protein, 346 aa, unidentified
MEQIIRIGMDTSKNFFQLHGVDTAERAVLRRKLRRNEVLTFFAEQPPTVIGMEACGAGHYWARELGKLGHEVKLIAPQHVKAYVKRNKNDGRDAEGLCEAMSRPTMQFVAVKSEEQQAALMLIGVRQQLMTRRTQLSNAIRGYAAEFGVITVKGLVKVEPLLAQIARDESLPALAREMFALQGRDYARLQVELKAVEARLMAWHRANTDSCRLAKIPSIGLIGATALVMKAPDPRLFPSGRHFAAWIGLTPKDHSTAGKTRIGKITRAGDEMLRSVLVAGATSVIQQAKKGRGRPSPWLVALLARKPPKLAAVALANKTARIAWKLLTTGESYDGARMPVASKLAA

SEQ ID NO: 274084 - protein, 345 aa, unidentified
MKIKTIGIDLAKETFGLHGVDGRGRVVVHKRVTRKQLVGFLGKLEACLVGMEACGSAHYWAREIEQLGHTVKLMSPQFVVPYRKGNKNDPNDAEAICEAVSRPSMRFVPIKNEEQQDLQALHRVREQLVKNRTAMANQIRGLLRERGVVVAQAIARLRVALPMILEDQSNRLSALMRELLGELAERLRMLDDRLRQYDQRIARLCQRDERCQRLIKVEGVGPLVATALVGAIGNARQFTNGRELSAWLGLVPREHSSGNRTVLLGISKRGNRYLRTLLIHGARADTRVAERKRDARSIWLSRLKLRGGPNVAAVALANKNARVMWALLTRGDSYRVRTDRALSAA

SEQ ID NO: 274085 - protein, 373 aa, unidentified
MKQQKKSNDITIGLDLGDRRHRFCVLDKSGGLLEEGSVRNERVFLAQLSERYPGALAVVEAGCHSPWVSRYLQEQGCRVLIANPRKLRAIYQQERKSDRRDAQMLARIGRLDPALLYPVRHGSAEAQQDLLRIKLRDSLVRARVAVINSVRFTLKSLGYTVRNPSSERFHKVAMEGLPAALCQMIAPSVQALDELTARIKALEAEINSLARRKYPHAMQLQQIPGVGPITALYFVLKIEDPTRFQNVRDVGAYAGLCPKRDQSGESDPQLRISKCGDAYLRRLLVSAAHYILGPFGPQSALRAYGLMLAADGTARAKKRATVAVARKLAVLLLSLWKHQRPYQPFPLAGPLNLQQTKEDRRFGTIAVHRLEAL

SEQ ID NO: 274086 - protein, 469 aa, unidentified
MKRKSRRAKCQKGSPFSGDLQLIEPDAAAVDVGSRSHWVAVNPQRDPNPVREFGTFTADLISLADWLAQCEAKSVVMEAIYELWVSLYELLERRGFKVYVVDAHTVRHLPGRSKSDVKDCQWLRRLHSYGLLRGSFRPPAQIRQLRNYLRSRTKIVEAAAQQQLRMQKALTLMNIHLHHVISDLSGLTGLSIVRAIVGGERDPNRLARLRDPRIRASKETIQKSLEGNWQEELLFDLKIALESYDHFQDQIAAYDEQIRQELKEVQSKVDLAHEALPAARLKACRKRPGMSQQDQLDLREELYRISGVDLTRIDGISLQTAQKVFFEIGTDVSAWSDEKKFSSWLGLSPNHRISGGKVLKRSSRKVVNPLSVALRLAARTLRNSHSALGANFRRLIAKIGMPKAITAMARKLAVLLYRMLKYGTQYVDKGMQHYESKYQETKLQYLRAQAAKFGMILLPKQAAATHVAS

SEQ ID NO: 274087 - protein, 306 aa, unidentified
MMLGVDVAKDNLVASDPHGKVRTIANSKDAVAKLLSTLDPGATIAMEATGNYHKLLANAAFSQGFRVIVFNPRDVLYYAKSISPRAKTDQVDAKVIARYALARPDHRPYEPTSAVAQKLLNLSRGRASLVKKRTSLENELRECPELSEYLEPAIDGLCKSVAKLDKELSAVAAKSAEHALMVGVPGVGTLVGAYTLGLLMSGEFTRSDSFVGFTGLDVRIRQSGKKIGKACISKRGDPEARRLLFLAARTAANRPGPFRELYLRYQTNGLSKTAATVAVARKIARTLWAIYTKKQPYRPERVLAQE

SEQ ID NO: 274088 - protein, 340 aa, unidentified
MRQLYVASDLHGNNNLLGIIDGEGKRIFRKKLPNDPLLINDILKPFKEEIVGIVVESTYNWYWLVDALMEEGYKVHLANPAAIQQYSGLKHTDDKHDAFWLAEMLRLGILPEGYIYPKEERPVRDLLRKRGHLVKLRTSLIISLENIISRNFGRKLPVNDVKGLRKDHVTPLFEGKEDLGLAGRVSKETIDFLTHQIRQIEGVVGKRITLKEQYRNLLTIHGVGKILGLTIMLETGPIGRFETVGDYTSYCRKVPSQWISNGKRKGSGNRKNGNKYLSWAYAEASDFARRLHPESRAYYNRKMQQSNPAVAHSALSHKLARAAYYIMRDQVAFCPEKLFG

SEQ ID NO: 274089 - protein, 353 aa, unidentified
MAIVSHAFDQVVGVDTHAKTHTYSLITAATAELIDTQTFPTSTAGLERAISWMTRRATGRLLAAVEGTGSYGANLTRRLHQAGITIVEAKPPSRKDQAGRGKSDPIDAARAATSILGHDLDTLPKPRTVHPSYPELQLLLAERELLTKQKTAAVNSLTAMVRGNDFGVDARHRLGATQITEISHWRPAPSQTLRLIACRRAKAIVHVNASLADNHDRLHQVVDLLAPGLLDQPGVGPVTGGYVVAAFTTPGRIHSEAAFAAMAGVAPLPASSGNTIRHRLNRRGDRKLNAAIHTITQVRLSFDQTTRDYVDRRVAEGKTTREARRALKRYITRDLYRILTRLMAQPGSQALQS

SEQ ID NO: 274090 - protein, 335 aa, unidentified
MFNGSIYVGVDLHKRKFSFVMVNESGQVVTRGTQEATMEGVASFAATLDRQHHVAVEPLDNVFWFVKEVSAYAGSAHIANPYKVRLIAESRMKSDRSDAQILADLLRVGYLPEVYIPSEEIIQNRRVVSHRIRLVRDRVRLKNRILTVIGREGLVVKASDPFGGKGRREITHLPVTAQAREMVTMYLAGYDLLTSQIAQLDRQISELGAGDPIVQLLRSIDGIETFTALAIRSAVGEMKRFRSAKAFASYTGLVPGYRQSADSNHSSSITKQGVTTIRWLLIQAVPHAVRKSDYLRRLYRRICFRASVGHAKVAVAHALARIIYHVWLEARPYYR

SEQ ID NO: 274091 - protein, 382 aa, unidentified
MQASTVDTPTADYCGTIFVAIELSQKSWLVTLHSPDRDRISRHKLEGGDHAALLALIEKTRSRAEQKLGAPLRVASCYEAGYDGFWLHRLLLAAGIMNFVFDAASIPVEQRGRRAKTDRIDGELLLRTLMAHLRGEPRVVRIVKVPSVEQEDARRASRERERLVKEQTAHSNRIKALLRLQGMAVGYPRRRDWLNWLAQQRDWQGQPVSPHLLTEVTREHARLMLVRQQLAALEQAQAAQAAQIPQAMAERRDQLQRLKALGPSFATTLTCELFYKDFDNRRQVAAYCGLPPSPWRSGGIDREQGISKAGNPRARLKAIELAWLWLRHQPESELSRWFNTRTAEAGKRARRIAIVALARKLMVALWRYLTTGLVPAGATMKA

SEQ ID NO: 274092 - protein, 328 aa, unidentified
MRPGPADPASLGIDVAKATFEAALLIHGRLLHRSFAMTAQGFDSLHTWIGKQGVEQAHACLEATGEYGAALALSLYAAGHVVSIVNPARIAAYAKSRLARTKTDKADAGLLAHFCSTQHPVPWTPPPAEVRELQARVRRVEMLQEMAQQEVNRLQSGLHSPAVRASMEATLAFLRQEIDAMQRLVQEQLEQSADLQHKQRLLCSIPGIGRWTAARVLAESDQVRTSVSARQLAAYAGLTPRERTSGTSVRGQTRLAKTGNSRLRRALYLPAIVAIRHNPAVRAFAERLRARGKPPMVIVAAAMRKLLHLIYGVLKSGKAFDPALALAA

SEQ ID NO: 274093 - protein, 355 aa, unidentified
MEEQKKTRAKNYVWFIGIDISKETLDFALTKENEFQRHDRIANLPDVIRGYLTEVKKTHRLQIARTIFCMENTGVYGNHLVRVLEKMKANIVVEPAVHIIRRLGIVRGKDDMVDAKRIAEYAHKYRKTLKFRRPRRPVIERLAQLNTLRTRLLAYHRALAMPVKEEALFIRKSLSQQNLRLCESSLKSLKQDVAAVDGEILTLIKTDEALKHLFDIIVSVRDVGPITAIHILICTNEFLNIKNPKKFACYAGVAPFANESGLRKSKRKVSTMANKKMKALLHTCALHSMRHCPELSTYYHQKVDVEGKAPMMVLNAIRYKIILRIFACVHQNRLYSRDYVRTTVEKLPKTIPEEV

SEQ ID NO: 274094 - protein, 377 aa, unidentified
MSKVIMVGCDLHDRSMLIRFAVGQGDPQQASFSNERLGWGLLIQRLREVADQHQADRIVFAYEASGQGYGLCDFLHDQGVECHVLSPTHLPKTPKSAKQKTDAKDAQMLLEQVRGFVLAGNPLPVVWTPPQRLRDDRELVRARVDASDDTTRIKLQILSLLKRYGIRKPSWYSSWTKRFVKWLREMAASLDEVVAPVLDSLLDRYELFRAEQNKLDKAIKKLSQADRYRAGCEELRKLPGVGLLTAMTFLTEMGDLERFKNRRQVAAYLGLCPSSFESGEANDRKGRITRQGPSRLRKMLCQAAWVAVIHCEQSSAAYHRIKGGKSNRTKKALVALMRRLAIKMWHRAVECGTPDELRGRGGPHEPLVPPSPLRAVA

SEQ ID NO: 274095 - protein, 401 aa, unidentified
MFYIGIDIGKRHHEVGVIDDKGNPIGKTVRFSNSKPGSDKLLDFINQYNLTPENSVIGLEATGHYWLSVFSFVHKLEFKATVFNPLQSDSLRNFYIRKTKTDVKDAYLIAQVIRIDSPDATPFIEEDLLELRHLERLRYSFVDQCSGIKRKVIALLDQVFPEYEQMFSDTFGKTSTELLLHSPLPEDLLDIETEELADMLNQLSKGRYGKSRSNKKANQIRESALSSFGISIATDIFKLQIHLLLEQIQLIEKHLKQIEKVMIEISNRQKHYLTTITGISDITACVILGEIGSINRFERPEQLVAFAGLDASVHQSGDFNSNRTRLSKRGSPYLRRAIWQSAFVACFHDPALSLHYQRLRKRGKAHGTAVGAVARKLTHIIFAILRDNKPYEPRPQIIEKN

SEQ ID NO: 274096 - protein, 415 aa, unidentified
MDSNLITAVGIDVSKGKSTIAIRRPGGEIVRKPFTVKHDQPGIQQLIQLLHEVGGEIRIVMEHTGMYWRPIASVLQQEGFFISVVNAILTHQFSDNSLRKVKTDKADSLKLANYALTYWSELKKYDQEDETRQQLKFQSRLYQRTIQTSVTLRNGLISILDQTFPNANQFFSSSIPTKDGHHKWIDFVERFWHKDCVAAISLHSFAITLEKWCKRNGYRYSDADAEYIHAQARNAVATLPKNDSTKLLIMQAVHTLNTIYESLQVIRAEMQRLASLLPEYPVVMAMKGAGQVTGPQLMAEIGDVRRFTHKGALVAFAGVDAPPFQSGDFEAKSRHVSKRGSSTLRRTLFQICSMSLCRADPEDPIFCFMDKKRSEGKHFYVYTVAGAAKFLRIYYARVKQYLNQMEIASASVSPN

SEQ ID NO: 274097 - protein, 431 aa, unidentified
MNYNQNKKIAQITPCTLIIGVDIAKFKHVARAQDFRGIEFGSPCYFENTKEGFEHFLYWISETKKTHSMEKVIVGMEPTGHYWFNLAHILKENEIKFVAVNPLHVKKSKELDDNSPTKNDVKDAKVIAQLVKDGRYAEPTIPQGVYAELRVAKKIRDLLTEDLQTVQGQVHNWIDRYFPEFLKVFKKWEGKAALQFLRLYALPHEIANFTEDELLIHLRKTVKRSVGANKIRELKRAASQSIGLRQGSEMAKMELKTLLAKYDLIQMELEESDAKIDSLLDEIPGVAQMLAVKGVGRDTVAGFFAEVGDLSDYTHPRQIIKLAGLSLKENTSGKHKGKTTISKRGRKKLRALLFRVCMILVAKNSAFKALHTYYTQRTENPLKKMQSLIALCNKLIRIFFSINKKQFEFSEEKMLKDIPHLSGLKKAELAA

SEQ ID NO: 274098 - protein, 407 aa, unidentified
MVTVGIDIGKEKHAAAAIGAAGEVLMPPRFFDQNAQGFAALLAQLRKLGRPSGIRIGMEATGRYWIPLRHALAEQGYRVESVNPLITSAEIAKDVRGRKTDKADALAIATALLRNRHNPAPAEDAATDALKSLTRHRTFLVRQRSNAKRCLHAALDVTFPEAGKTFGQIFSATALAVLEAFPSARLLSGANLKTLTAIVSKASRGRLGAERARSFRDAARASVSAGIVNEGDEAALVSLIAQIRFADSQIESAEEKIRAMPAPKAAALLASVKGLGTLLPRVIACEIGDMERFRHPPSGKPPRDMDKRILAFAGCEPRLRESGKWKGRTKISKRGSPALRTALWQASAMCRLHNPLFAAVYERQTARGKPHSVALFYVARKLVEVMCGMYKTDMPFSLQTAGATTCQ

SEQ ID NO: 274099 - protein, 345 aa, unidentified
MKQYAGIDVSLEHSSVCVVDADGRIVREAKVLSEPDALIAWFGEHDVAMERIGLEAGPLSQWLYAAMTKAGLAVELIETRHVRAAFKTMPVKTDKKDARGIAQLMRLGWFRPVHCKSLPAQEVRALLTARKLIQGKLHDIEMSIRGILRGFGLKVGPTTQRTYAARIRDLIEGHPTLEAIAASLLKVRDALANEFAGFERKLRAMARQDDNARRLMTTPGVGVLVALTFASAVDAPERFRSSRAVGPHFGLTPKKYQSGETDYSGRISKIGDVGVRTALYEAANVILTRPVKGSDLKSWALAVARRAGPRKARVALARKLAVVLHHMLRDGTNFIPHKAQAAMAA

SEQ ID NO: 274100 - protein, 405 aa, unidentified
MWFVGIDWADDHHDAVVIDDAGKRVAVTRVPHTCEGMAELIAFLHDIGDVAAHPEHLACIVETNRGLLIAALLDADVPVYPVNPTTVDRQRKPSGAKTDAIDAYLLARTGRSDLADLRRLIPDSPLVAEIKMLTRDQDGLIQAQTRLVNQLTACLKAYYPVALELFGKLHQGATLAFLRAFPTPDEARTGTVEQIAAILTTARYATAEAKAYEIHQRVRQPQLTADPVVTRARARLMLTLAAQLQVLVVDIAAYDKEIARVFVQHADSASFASLPRAGKRLAPRLLAEWGDDRGRYADAASVQALAGTSPVVFQSGNYASVHKRYACSKPLRNALHQFAWQSTLQDDWANAYYRRKRREGKSHTKAVRALANQWVRIIHALWRKHEIYDSTVFAAAQQAHAPRAA

SEQ ID NO: 274101 - protein, 403 aa, unidentified
MNAVGIDISKGKSMVAIARPFGEIISKPFEVHHTSAAIGELISYLHILGGDTRIVMEHTGRYYEPMARSLTDADFFVCTLNPKLIKDYGNNSLRKVKTDKADALKIARYALDNWHDLCQYTTMDTLCNQLKTMNRQFTFYSKQKIAYKNNLIALLDMTYPGVNTLFDSPVRSDGSQKWVDFASSFWHADCVRSIELKSFTERYCKWCKRNGYNFQPLKPKEIFETSKDLITVFPKNSMSKTLIKQAIAQLNSVSATVEHISAEMNALASQLPEYQVVMAMCGVGTSLGPQLMAEIGDISRFPRHETLTAFAGVDPGFNQSGTYEARSVHTSKRGSPRLRKTLFQVMDCMIKTMPQVDAVYRFMDKKRSEGKPYYVYMIAGANKFLRIYYGRVKEYLSSLPASK

SEQ ID NO: 274102 - protein, 355 aa, unidentified
MNGTKYVGCDVHTATISIAVLSYEGKLIMESVIEAKGATIIQFIQGLRGELFLTFEEGTWSTWLYDLLQPHVTKIIVCDPRRNALLKEGSANDRIDARKLAELLRANLLRSVYHGQNGLRTLKELARAYLTISKDLTRVMNRVKAIFRSWGIPCAGQSVYHPRHREEWLGKITQPSVRHRAEFFYKQLDALVLLRKQARQELLGEVKKYPAWKLLRSIPALGPIRVAVLMAIVQTPHRFRTNRTLWKYSGFGVVTQTSADQRYVNGQLQRSKKPAFVRGLDRNHNHDLKFLFKSAAVQASTRNGPFLEFYEALVAKGMRPEMARLTLARKIVTITWNVWKKGVAFDAKYLKPQTA

SEQ ID NO: 274103 - protein, 371 aa, unidentified
MMNATTFAGLDVHARSIKAVALDVVTGEVRSATFGYDACAVAEWIRSIDPGARCVYESGVTGFDLQKKLSSLGVDCVIGAVSKMIKPSADRRRKNDRNDAEFLARMLSVGNIVEVWVPDDECEAARDLARALDDAREDLRRQKQRLSKFLLRHGLVFDEKTPSGQRKSNWTGAYWIWIKGISFREKADNDTLAFYVDAVRQAEEDKRRLEKLVADEASRPRWKKRVDSLRCLKGIDVMTAADIVFEAGEFARFRNARSFAAWLGLTPSEHSSGEKVAQGGITKAGNKHLRRVMVEAAWHYLNASPHSKGPAPGQAPDPAARRHASKGVRRLVGRRAALLERGVHKNKANVATARELACWCWAVGSMAEGAR

SEQ ID NO: 274104 - protein, 343 aa, unidentified
MLIIGCDYHPSFQQISCVDQETGEYRELRIEHKNGEAEGFYRELAGRQVRVGVEASGGMRWFERLLRKHGVELWVADPAKVRAAAARKPKTDKEDARLLLRLLLEKRFPRIWVPTVEQRDTRQLVLHRHKLVQTRTRAKNQLQALATNEGIQKRVWTQAGQAELKKAALSPWASVRRQDWLELLADLNQRIDPLDQALVQQAEQRPEVQLLMTHPGVGPVVATGFVVTVCDPKRFANSKQVAAYFGLVPQENSSGKGGQRLGHITKQGNNLLRGLLVEAAHVAVRFEPEWQRKYLRLAMKKNRSIAAVAVARCLAVRLWWMWKLGLNYEQFRAQKKESRSHAE

SEQ ID NO: 274105 - protein, 412 aa, unidentified
MEQIHERVAGLDVHRDSVAACVRLPGSRRGTVTHKQRFSTMTNGLGQLAAWLSEHRVEVVGMEATGVYWKAPYYALEGREFELWLCNAHHVKNVPGRKTDMSDAEWLADVVAHGMVRPSFVPPPAIRELRDLTRYRRTQVDMRSAESQRLEKVLQDAGIKLSSVASKVLSMSGRNMVEALIAGQQDTGVLAEMAIGRMRNKRSELSEALNGHFGPHHAVAARQILDHVDFIDIGVTTLSQQIAVLTKPFASVFDLLDPVPGLGRLSIEVIIAETGADMSRFPSAGHLASWAGVCPGNHESAGKRRRVATTPGNPWLRRALIESAHAAARTKESYFAAQYRRLAHRRGPNKAAVAVAHSLLVVIWHVLSTGERYQDLGSDWFERRQDPERETRRLVGRLEALGHRVELVKPAT

SEQ ID NO: 274106 - protein, 405 aa, unidentified
MGGEAISGLKGGFDSFVGIDVSKDKFDACGITGDAEKLFQCSATMDRKGFEKLKDHLAVVSASSVLIGMESTASYHVNLFSYLVSEGYNVLIINPLLISNYVKMQLRKTKTDKKDAVVIALFLLANGSTLIQRVTPSVISDLRDLSRQRESLVDEMTALKINIKRLLNITFPVLEHMTLIFTKSMLKLLQQYPSAFALRSADLVQLSQMLIADSYGRKREAFATELIKTARSSIGINSPAKEIILKQQVTLLLHLEDALQEITGVLIEMSRKLMEEDINILTSIKGIGDKSAVNFLVEMGGDITQYDDSGKIIAMAGLDPAVYQSGQHEGKGRITKRGNRHLRRIIWMMTTRVIHYSDIFKVYYLKRRKEGLPYKMAVLATAHKLIRVIYAMLTQRTTFCPQVNS

SEQ ID NO: 274107 - protein, 347 aa, unidentified
MNFYNTIHPYYCGIDLHARSLYVCIIDQDGNTCLHKEIPASPDRLLKLLLPYVGNIVVGVECMHCWYWVADFCAEIEVEFILGHALYMKAIHGGKAKNDRIDSFKIANLIRGGNFPLAYVYPRKMRATRDLLRRRTRIVQHGANLKAHVANTTSQYNLPPNKLNLKNQCARDQLRTTFSDPAAQKNIDLDIDILDHYAKVLSKVEWFIEQQAKAHNPVHLQLLKSIPGVGKILSLTILYEIGDINRFVSVQKFASYSRLVKCKAESAGKTYGTQGNKIGNAHLKWAFSEMAVLYLRGNKKAQRYLQNLQKRMSKGKALSALAHKLGRCVYFMLKNETVFDESRFLKG

SEQ ID NO: 274108 - protein, 343 aa, unidentified
MQTVTTIGFDIAKSVFQVHGVDAAGQVVVRRQLKRRQVMAFFEKLPPCLVGIEACASSHYWSRQLQALGHGVRLMPPAYVRPYVKRQKNDRADAEAICEAVTRANMRFVPTKTPEQQSGLMLHRARHLFIRQQTSVINAIRAHLAEFGITAPVGRRGVEDLLRVVADPSDKRVPEVVRACLAALGNQLLSLKKQILNFDRMIMAWHRSNQTSKRLNCIPGVGPLLATALVASVADPKTFRSGRNFSAWIGLVPKQHSSGGREKLSSISKQGDRYLRSLFVAGAFAVIRYAKIHGTKHRPWLTALLTRRPTKVAAIALANKLARMAWAMMATGARYNYPASLKV

SEQ ID NO: 274109 - protein, 411 aa, unidentified
MSEQYRWFVGIDWATQNHEVCIVDCDGGVVDRKTIEHTGAGIAQLVKRLEELTRAEPGLVAVGIEVPRGAIIECLIVHRFAVYSLNPKQMDRFRDRHTVAGSKDDRRDALVLADSLRTDRRLFHRVRLDDPLVMRIRELSRTEQDVQQQQTRLANQLRDLLWRYFPQLIKLSPSMDEGWLWDLLELAPTPEKARGLKRSRIEKILRAHRIRRWSGEEVEAALQVQALELAPGSAAATSEHVLLLLPVLRLLQSQHKEIARRMETVLEEMEQQEQESEHRDVTILRSMPGAGRVVAATMLAEASQALAERDYRALRSYTGVAPVTWQSGKRKVVGMRRSCNPRLRNAVYHWSMVSIQHDERSREHYAALRKKGHSHSRALRGVADRLLAVLTAMLRTGSNYDPTLRSAASRQ

SEQ ID NO: 274110 - protein, 421 aa, unidentified
MRKYRYRATHLQQVNWERVREQAAAEQVVLAIDVAKEDMVAALLRPDRTVLETVKWRHPFEARALIERLLTLGVERLQAVLEPSGTYGDPLRGLLAAAGVAVSRVSPKRVHDAAEVYDGVPSLHDAKAAYVIGRLHLEGVSRPWVEPSAQRRALRAELGLLDWYQERYQVGRNRLEALLARHWPEAPYALDLGAVSLLTLLAQYGDAAAVAAEAEAAAALLRQSGGPGLKAAKIAALLDSARMTVGRPCLAAERRLLQVLAAETLEARRQCARIEQALAAQVESDAGLARQALAVGKTTAAVLRCALGEPAGYADAQSYAKAAGLNLKERSSGKYQGQLKLTKRGPGVVRRYLYFAVLRLIARAGPAQCWYQAKVARDGGRKGKAITALMRKLAKALWHVGCGAEFDVEQLFGVRPRAEAA

SEQ ID NO: 274111 - protein, 384 aa, unidentified
MASITAVVDSIIHVAIELSQSTWLVAARLPQANKPKVFRVPGGQAPALLALLSSLRGRLATRTRRPVKIICCFEAGRDGFWLHRFLTGHGIDNFVLEPTSILVNRRARRAKTDRLDAEGMLRVLVAYLAGDPKACSMVRVPTPDEEDAKRPHRERQHLTRERLRIENRIEALLFTQGIRGRPSLRSWDRDIASLRTGDGRAIPRRLQAELDRLRRQLVLILALIREVDAERDLACRTEPQEPVHSKITDLCRIRGIGNNFAAVLAREVFCRTFANRRQLASYVGITPMPYQSGNLDRDRRIGSAGNPRARTTMIQLAWLWLRYQPGSDLAEWFRKRVGTMAGRTRRIAIVAMARKLLIALWRYVETGTIPTGAEYGGPAMAATA

SEQ ID NO: 274112 - protein, 317 aa, unidentified
MQSAFLFIGVDVAKDSVMVACSQATFAAHTVPNKPTALKAFLRTLPAQSSIAMEATGSYHQCLADLAHQLGLRVYVLNPKDLYHYAKGVGMRAKTDRVDAALIARFLANEGARLRPYQPATAGQCKVDQLLRRRARIVSLKTALQLTCADTPSIRRETASLLKGFAAVLKKIDWQLAELQQAMPERAQELERLESIPGVGPLTACWLANLMDRVKFRNSDALVAFAGMDPRPCDSGQKRGKRRLSKRGPAEGRRLLFNAAMAAARCAVWKKTYAHFREQGWASTEAIMILARKILRIALAMYKTQTTFDPAFIDKRA

SEQ ID NO: 274113 - protein, 428 aa, unidentified
MTDCSKVTTYSSWLAIDIAKDFNVVMLETIDGNKKRFRMANSAKDHDRLIELIHQLPQPCRIGFEATGNYHRTLAYRLVTEGFQVNLISSLASARYREVIYNSWDKNDPKDAGILLELLKQGVTQIYIDPVQSGFHDVQELSKTFANITLSRTRLQHSILNHYIPLYFPEMGAWWNSTRSAWWVNYLLRFPTPAAVTCLDLQEFIKIATPLVGRKVNKAAKLLELYTIAQQSMGLPLSEASPACHTFRLQLQRYQELNRIRQELESQAQSTLERNPDYIVLKTIPGIGPIVALTILAEGGDIRRFAHHRQFLKYCGLDLAKNQSGTFRSQEKISKRGNARLRLALYIASTVAIRQRENSFRDKFDRYTKLTPADADCKRKAMTAVMAKMARVIHGLIKSNQPYQSYFEVSPSGSIPLLGPLGPQGPRR

SEQ ID NO: 274114 - protein, 342 aa, unidentified
MEHYAGIDVSLEYSSVCVVDASGKIVREGKVASEPDALISWLRSLGYELSRIGLEAGPLSQWLFAALRKAGLTVELLETRHVRKAFEAMPVKSDRNDARGIAQLMRLGWFRPVHCKSMGAQEVRAVLTARKLVQTKLLDVENSLRGILRGFGLKVGKTTARSFAGRIQELVKGHPNLEAIGKALLSVHAVLLREFNAFEKRVRAMARSDARTKLLMSTPAVGPIVALTYASAIDDMARFKSSKQTGPHFGLTPKRYQSGETDYSGRISKIGDASVREALYQAAHVMLTKPVKGCSQLKSWAMRIARRAGMSKAKVALARKLAVILHRMLANGTPFNAAAAAA

SEQ ID NO: 274115 - protein, 343 aa, unidentified
MQAITTIGFDIAKSVFQVHGVDAAGQVVIRRQLKRRQVTAFFRKLAPCLVGIEACASSHYWSRELQALGHSVRLMPPAYVRPYVKRQKNDMADAEAICEAVTRANMRFVPTKTPEQQSGLMLHRTRHLFMRQQTSVINAIRAHLAEFGIVAPVGRRGVEELLSVVADPSDKRVPELVRACLATLGSQLLSLKKQILDFDRMIMAWHRSHQTSKRLNCIPGVGPLLATALVASVADPKTFRSGRNFSAWIGLVPKQHSSGGRDRLGSISKQGDRYLRGLFVAGALAVIRYAKIHGTKHRPWLTALLARRPTKVAAIALANKLARMAWAMMITGARYNYPASLRP

SEQ ID NO: 274116 - protein, 325 aa, unidentified
MGLGISSPRATRLTGVDLATRERFDGELCRPGRIAERGLSICVVDQTGKVLCEATVNSTPEAIVEFVKSKAAGAIRIGLETGPTSTWLWTEIKALGLPVICIDARHANAVLKMQINKSDRNDAFGIARIMQCGWFKEVRVKGLNSHATRALLESRALLVKMKHDLENPIRGLLKNLGLMMGIARGQAFHARVQELVKGKPFLAVAVLPLLETRSGIVRQIADLDRKVLMLARNDNKVRSFMTVPGIGPITALCYRATIDEPSRFNRSRSVGAYVGLTTRLYASGEVDWTGRISKCGDAMLRSYLFEAAGVLLTRVHNGARSKRGA

SEQ ID NO: 274117 - protein, 336 aa, unidentified
MAIVTVGIDLAKNVFALHGVDEAGAARLKQPKVARGKLNAAVAALPPCVIGLEACSGAHYWARQFQAHGHTVKLMAPKLVTPYRMSGKRGKNDAADAAAICEAVQRANMRFVPIKSEEQQARLMVHRARQGFVAARTACINRIRGLLSEFGVVLPLKAEVVRREARNHLEDLPGYANTVIGDLLSEVCHLDERIKQYDVHIHAMARDCTAAQQLMQLMGVGEVTATALVALVGNAREFHSGRQLSAWLGLVPGQYSSGGKARLGSITKAGDAYLRSLLGARAVLNAAKGKTDSLSRWALAVAERRGYWKAVVAIAAKNARMAWAVLTKGEAFRLPA

SEQ ID NO: 274118 - protein, 328 aa, unidentified
MIFVGIDVASDKHDCCILGSDGDVLSSFTFANDKHGFDSFLSAVARHCAEHSLADAKVGLESTGHYSINLTNFLLAKHLSVKIYNPLLVNMLRKAQSLRKTKTDKSDARFLAQLLFSDDSKPYSQPLYHITELKTLTRNRYRLVEMRSKLKISVNRLITVLFPELPGVVWSVNQKSCYALLLEFPTARSIAEAHLTKLTNLLSGNSHGRYGRDKAVEIRELAKQSIGLDSRATGFELKQAIRLVQNLQTEIDELEAEIKAVMLEIDSPILTIPGIGFVLGAIILAEIGNVENFDNPAKLLKFAGLEPSVYESGKYKASDTPMVKRGSK

SEQ ID NO: 274119 - protein, 331 aa, unidentified
MNYSHFVGLDVGKKTFDASLMSAAEKELSHKSFDNTPEGIQSLLDWIAGYHLSLSKLLFCAENMGSYVTELSVSSVSMGFSLALVCPLTIKKSIGLQRGKNDRIDAKRIANYAVLHYRKLELYKLPNKDLVRLRGWIIIRDNLVKQKVSSIKLLETFSQMAKLADVTESISFLEEQLKSIKEKILEVEEDMEQLIAASTSLYTNYLLLRSIKGIGIINAIVLLCVTDNFQRFDNPRKFACYCGVTPFEHTSGISIRGKTQTSSLANKEVKVYLTRAAITAISWDPQMKAYYKRKIAEGKHKASVINAVRAKIIARSFAVIRRQTPFVTLAV

SEQ ID NO: 274120 - protein, 314 aa, unidentified
MNQALWVGVDCHKETLACYKNGRFKEFRTTLKGFDSAIKWAGNDSRWAIEGAYCFGRPFTTYLIKNGHEVFEVNPLLTKTWRRGFSVSGIKNDAGDAKTLVQVANTFPLQPVSLITVKLKELLTTRRFLIKQRTRLINHIKMLHYTRGEKLQGNVESKVGLNDLVKSEDLLIKSLALQLQALKHSITEIEKQIDKELPEKAMQLTKLTGVGKIQAAIIYTELKGRLISPEALASYAGIAPIENSSGKSNFHKNNKKGNRILNSVFYQISLCQSRYDSLGKAYYLNKLKEGKSERHARKCLARRLVDIIWKILND

SEQ ID NO: 274121 - protein, 400 aa, unidentified
MRVVFGIDVSKTSSEVAILVNGEKVHSYTMTNDALGFSHLLSDLKSVQNPEIIFEATGVYSRRFQAFLENNGYTYTRLNPLEAKKQLDGLRVRKTDKIDAEKLAHSQFILNRKSSYVQEEVYQQLRDLSRFYQNLTEDIVRTKNRLHKVLQVTFPELEDLLSAPTGEQYWNLVIAFPCKKFVLEWEERDLVDVIRTSTSKRISEKRAAYLAEKLTALAKQSYCAVEKTSPMMEEVRYYAQELLRLSKRRQTVLDEMVALAHPLPEYEILLSIPGIAETTATSIIGELGDIRRFQSANQINAFIGIDLRHYELGNYLAKEHITKRGNPYARKILFKCIHNIASARHTNPCHIADFYEKRKRQSQASSTKPHAIASIHRLIRTMYYLITHNKLYDYDSTQNH

SEQ ID NO: 274122 - protein, 330 aa, unidentified
MYLGIDTHKRYSQVAVVDGDGNLQEESRLPNDRLEELAKQYTGAEAAIEASGHYRPIYEMLDEHLDVTLDNPSKNRIIADAAVKTDRVDAKRLALMLRANMLAESYVPPDEIRELRDLVRTRKSLVEERTAEKNRVRAVLTRTNNTYDSELFGPTGREFLAELSLSDTDRTIIEAHLSVIDEYDQQIERLEEKIERRVLESPAAQRLLTIPGVGQYTAAVIVAEVGEIERFDEDKQLVSYAGLDPVVHQSGDKEVRGSISKEGSAPLRWALVQCASIAVRCDEYLGNFYTRLKQRKNHQIAIVATARKMLVSIFHMFTRKESYDPPGVSA

SEQ ID NO: 274123 - protein, 355 aa, unidentified
MELYVGLDVSMDETSICVVDRDGKIIKECKAPTDPTAIHCSLKAYTDHLQRIGLEAQSFSPWLSKELSAMGLPVIVVEAVHMQKALSAQRNKTDRNDARGIAHMMRVGWFRQVHVKDDDNQRLRVLLSGRRLLKRKLVDIENGLRGSLKAFGIKIGGVSRSNFETRALELVDAAEPLLRDVISGMLSVRRAVWAEYKRLHNALVRVVRQDAVCRRFTTIPGVGPVTALAFKTAIDDPRRFTRSRTVSAHFGLTPKRFQSGTIDYDGRITRCGDPEVRTNLYEAASGLMVCCKKWSALKAWGMSVAKRRGHKRAVVAVARKLAVVMHRMWLDDTEFRWTRVDGSHADDTLAIKMGA

SEQ ID NO: 274124 - protein, 326 aa, unidentified
MEHELHYIGIDTAKEKLDVDVLRPDGRNRNKKFANTTKGHDELVSWLKGHKIDHAHICIEATGTYMEPVAECLYDAGYIVSVINPALGKAFAQSEGLRNKTDTVDARMLAEFCRQKRPAAWEAPHPLERALRALVVRHQALTDMHTQELNRTETAREVQRPSIDAHLLWLEAELKRLEKQIKDLTDDDPDMKHRRKLLESIPGIGEKTSAVLLAYIGLKDRFAHARQFAAFAGLTPRRYESGSSVRGASRMSKAGHVSLRRALYMPAMVATSKTEWGRAFRDRLAANGKKGKVILGAMMRKLAQVAYGVLKSGVPFDASRHNPVAA

SEQ ID NO: 274125 - protein, 392 aa, unidentified
MTIQAQVSVYTQVFVPRDYDVFAGLDVDHHSIAATFTDHDRLMQSLRLPYSARQLLNYVGKHFPGQRLVFVYEAGPTGFGLYDELEAAGHPCLVVAPPMVPRAPGQRVKTNRLDSRKLSTALRGGELKSIHVPAPKYRELRHLVQLRDTHVQQLTATKCRIKALLLYEGIPFPSDEGKEKQWSQRVVNELLELPCSESVRFKLDQLVGTLHFNFNSAAAAQKQIRHFCQKDPELRQSMAWLKSLPGIGEIIATHLVARLGDPLLITNVRQIAGFLGLVSSEHSTGDKQNRGEITRAGDSRLRNKLIQSAWVAIRQDPELREFYQRVYQRHPRKVAARKAIVAVTRKLTTRIYAVLKEHRPFVLRAVSAAPLTTEETAGHRGRLDGQQSEQPR

SEQ ID NO: 274126 - protein, 310 aa, unidentified
MTPRLVYLGLDVAKATLAGHWAGKHFSLPNTAAGHRALLTRIHAGPEPVQVICEATGGYERGLVAALHQAGQPVSVLHPTRARQLASGLGYVAKNDTLDAEALARIGTVLTPAPTPAPPEGVALLAALVTRRDQLAELIRREKQHRETTTEAVLRRDLDQSLAALQKRLEKCEALIRQHLLAHPPLAQKAARLQEAPGVGFVGAVTLLGMLPELGVGSAARITRLAGLAPRDHDSGAFRGARHVHGGRPKIRRILYLCALSAVRHHPQLKAFYQRLRLAGKPPKVALTAAARKLLTYLHSALKNPLFQLA

SEQ ID NO: 274127 - protein, 363 aa, unidentified
MTAKATCLVGLDVHARQTHAALLDSRTGEINVRRLMGMPEAAVLSYLEHLGGGVLAAYEAGPTGFGLAREANKRGLDVRVVAPGSIPKGAGDRVKTDRRDAVRLVRLLAAGELRFAFVPTVEDEAFRDLIRCIEDLRGDLMRARHRLSKFLLRRGRRYEEKSTWGSTHLRWLKAIGFDDGCSQATFVDYLASVQLLGGRRATLLEVLEAQVPGCSYAPTIARMRCFRGIDTLSAAGLCAEVGSFERFPKPGLLSGFLGIVPSERTSDTKRRQGSITKAGPGHARRLLIEAAHQYRRRPAIGETLARRQQGQDPRIIEIAWRAQRRLYQRWQHLREARRKPAGVVAIAVARELAGFLWEAAVLD

SEQ ID NO: 274128 - protein, 407 aa, unidentified
MIASDPNQINPQTLDRFASFVGVDLHKKVVALAAVDRQGNILDRIRCSTQEPHKIHRFLRGLPRQLWMAVEAVGFIEWFIDEFRPAVERIDIADATKLASMRGKRRKNDRKDSLEFAQRLARGECPLGYIADEDLLHLRKLGRHWHRLSERLSRAKTTVRSLLNAANLEGPTSNSLHMRQWLELQGHQLKPATLLTIEGLTQEIEGIEHQRRSLEEAIRQANTSDVFAADIQLLKTVKGIGDILACIIRAEVGPFMRFPNADALEFWSGLTPDNQESAGRTQSGHITKAGPASLRWALGQAAMAQCRSDRRVGGIRRKLANKRGKGKANTAMARRLLRTLYAMMRDGVPYDPKANTGGTRPAKAQATRPHKDKPTARQRADAFFASRPPTGAKGERAKNAYQRSCSC

SEQ ID NO: 274129 - protein, 419 aa, unidentified
MNDNPSVLIGIDWADKKHDYHLIGPDGKSHTGIFLQSPEAIEEMVQKWRKVAGGAPLAIAIEATKGPLINALMQFGNIEIYPINPAAMASYRKAFSHGGSKNDPVDCQLLVQYLSNYIDQLEPLRQDQPLTRQIASLVEERRHLVDRRADLGNELVSVLKMYFPAILALKAAKSYAGFLLALVAKYPTLEATKKAGANKLRRFFNARGLRKHAESRIETLLTSRALSDDETLLQTCSRRAVNLCEQLQLLNKLIKRAEDELKCLIPRHPDHAIAESFPEAAVVTQARMIMAMGDDRSRFPTAESLSACSGIAPVTIQSGRMKIVRRRWACPKFMKQTFHEYAAQSVKGGGWAKAYYDLQISRGKPAQVAFRALAFKWQRVIHRCWLSGQPYCESTYVERLRATGSPVVALLDQSIPKAA

SEQ ID NO: 274130 - protein, 369 aa, unidentified
MGDRITYVGLDVHKDGIVVAVAEGSRRGEVREYGRIANTPAALQRLARKLSQEGVELRFCYEAGPCGYGIQRQLSGLGHECIVVAPSLIPKRAGDRVKTDRRDAASLAKLHRAGELTAVWVPDPGHEAMRDLVRTRLDAVRALRRARQQLSGFLLRQGCHYGRPAWTKLHRRWLAGLKFEQAVHHIVLEDYIAAVEAAEARRDRLTTQIEAMLPDWTLAPVVAALQTMRGMALVNAATLIAELGDLSRFGNPRQLMAYLGLVPSEHSSGASVKRGGLTKAGNSAARRLLIEAAWTYRFPARVSRELRLRQEEQPGPIREIAWKAQLRLCARYRKLARSGKPANVVTAAIARELAGFIWAIARRVPPAAG

SEQ ID NO: 274131 - protein, 377 aa, unidentified
MSKIRFVGLDVHADTITVAVAEPNGEVRSLGAFPNRLESIRKTVAKLGSVKNLKACYEAGPTGYVLYWQLTALGVTCEVIAPSLIPVKAGDRVKTDRRDAAKLARSYRAGDLTPVWVPDASHEALRDLVRAREDARQDQLRARHRLGKFLLRHGCRPPQDIQKNWTRKHMDWVKRQVSFAEPALQATFLDYVHEVEHAADRIQRLEKAIDDALAAAPAEIQEVVQALQALRGVGKIVAVTVVAEVGQLSRFTNPRQLMGYSGLVSSEYSSGNRIQRGSITKTGNAHLRRVIMEAAWAYQHKPWIGGWLAKRQQGLEEETKAIAWKAQWRLCTRYKKLAAKGKNKPQIVTAIGRELLGFIWAIATRVEGKFQNERKAA

SEQ ID NO: 274132 - protein, 405 aa, unidentified
MDGATPARVAGLDWASRLHVVCVLDPDGQVRARFQVPHTGKDLRGLTRRLAKLEVGRVAIERPDGPVVQALLDTGFQVVVIPSRQVKHLRSRYGSAGNNHDRFDAYVLADVLRTDGHRLVPLRPDSPETAGLRAVSRARKQLVDHRVALANELRANLEVAFPGAVSLFAEVDSPIALRFLGRFPSAERAAWLTQARLGGFLRRVGYCGRTTTAERYQRLVDAPDGLGGAEGEARAAVTGSLVATLRAVRAQIDELDGEIVERLAAHADGHIFTGLPRSGRVRAAALLAEIGDCRQRFPDSTALECLGGAAPSTRQSGTHTTVTFRYACDKKLRQAVMDFAGDSRRANPWAAHIYNQARARGHRHPHAVRILARAWLRVIWRCWQDGTAYDPARHGAYQRLIAQGG

SEQ ID NO: 274133 - protein, 332 aa, unidentified
MTSKGQEKMSHPMAQASDEITIGIDISKEHLDIHLLPERIVRQFTNDREGHGKLMAWAAPYQPARIVFEATGRYHRSLEMALGKAGLPAVKINPLQARRFAEATGKRVKTDPIDAAMLARFGAVMRPEIPPAKDETIDMLAELLTARRGLVKDRTAAANRGKSLTLAMLKRQCQQHRKQIDSQIEAIDREWMSVLAANPALKARLDILLSIPGVGPATAIALLVDMPELGTMDAKQAASLAGLAPVTRQSGTWKGKSFIQGGRASIRHAIYMPALVAIRFNPQLKEKYEALRRAGKLANVAIVAIMRKIVIIANALIRDDRKWTLDRMAVVA

SEQ ID NO: 274134 - protein, 444 aa, unidentified
MRAIGLDIHRDFCEVAIAEEGLVRAAGRIGTAPAEIEAFAGGLRPGDTVTLEATGNALAIVRILEPHVRVVLANPKATKAATRLRAKTDRIDARTLAQLLAGGFLPEVWVGDEATHALRRRVGRRVHLVRQRTKAKNQVHAVLLRNLAGRPPVSDVFGTRGRGWLERLVLPDDERETLEACLRTVDFLDAEVAQLDRALAPLVLGSPDMRRLLTLPGVSATTAATLIGVIGEIGRFPTPGRLVAYLGLDPRVRQSGNEPARHGRISKQGASEARHVLVEAAWVATRTAGPLRVFAHRLAARRGWNIAIVAVARKLAVIAWHMLTRGEDYAFARPILVRAKLREIELRTGAPRARGRIIGVAATEAERELERELAAQAEVAYERLVADWVPSRKPVREPPAGRASHDALRQPARQGSAPTLRFGSASLPHHLDYAPGPGPRQDGT

SEQ ID NO: 274135 - protein, 352 aa, unidentified
MFYVGLDIHDKRIAICVLGETGQIVRRAQVRTIDEMMRVLEALPDRFEVCYEASCGYGHYHDTLSPIAARVTVAHPGRLRLIFRSKDKNDRKDAERLAKLLYLGEAPAVHVPAADVRTWRELITCRSRVIAKRTRAKNSLRTLLRCAGVVPPARPALWTKKGLEWLRGLELPTESQRLRRDLLLEEIEALARQAERLEANLNQQAKHSSAVLRLRSIPGVGVRTAEAVAAFIDDPHRFRDAKAVGRYFGLVPSQDQSGDRNRLGHITGEGPAVVRQLVAEATWQAVRRSPTVRAYFERVRRDDPQRKRIALVATAHHLVRVMWALLKHGTDWEEGVAPADEPKGVAPTVAIA

SEQ ID NO: 274136 - protein, 391 aa, unidentified
MDEEGKEMGYPTFPNTLPGARALESQLLQLMKEKGFSTLKIATEATSFLDLHLVDFLASSQDLAPFNPSIYQFNPKLVRNFKRAYPDKDKTDKIDAFVIADRLRFGRLPEPYESHRPYLPLRRLTRYRFHLVKAISREKAYFITHLYLKFSAFSVEKPFASLFGATSLALITEFSPDELVHLPLEDLTQFIIKNGKNRFKAPEKIAEALQRAARESYRLRPALSSSIDLILATILQTLRALGEALKEVDRAIEKEFQAFPNTLQSIKGIGPVYSAGIFSEIGDIHRFSTEDALAKFAGLTWKRYQSGNFEAEETHMSKTGNEYLRYYLIEASNALRVHNAEYKAYYETKFQEVTIHQHKRALALTARKLVRLVFALLKKGQLYRANYQQEA

SEQ ID NO: 274137 - protein, 491 aa, unidentified
MTRRTRICDWEELMIYSVGLDLHKGRHRVYCLDEKAQVCDTFSFQTTPEGLATLEQRIFRDGSSPIIVFEPAGLSWLTVAAYVRSQHPECRLVKAKGQKVAALRRYLRGSAKSDRIDALTLAKMPFIDPERLDELYLAPAETHALQRLTRQRKRLEDDITAHKNRIATIVDGYLPGVRRAFSHPWSAPARAFLHSRVNPFAVVREGEEALHNFLIQAKPQNKEEKAENYLVYRACQNVLALQELCQAAGWVDEDFFVDLQDEIDRELRLMEAEEAETEALDQRIEELYRKLHPSDNLRTMPGVGEHTAPVFAASIGDPARFPGQSAFANWTGVVPGAKQSGETESKGLRMTKAGPATMKWALYQAAQIGRQWDPQLASVYYRQTVHHGKNHKQAMGAVMSHMAARIFAVLGEDRPYELRDTEGKPISKMAARALILAKYQVPQEIRQERRRSKRRKTNAPGSRKKEGMVAGRVHEAAIAPQPAAILPSPGT

SEQ ID NO: 274138 - protein, 340 aa, unidentified
MDQYAGIDVSLETSSVCVVDSGGKVVREAKVASEPEALIAWFRCLDAPVTRIGLEAGPLSQWLYAGLREVGFAVELLETRQVADAFRSMPVKTDRKDARGIAQLLRLGWFKPVHCKSLAAQEARALLTARRQLQAKRHDIEMSIRGILRGFGLKVGRTTPRTFEHRVRELVDGHPTLSTVVEALLRSRSALDMEFRKLDKAVNKAATADWTVRRLTTAPGVGALIALTYKTAVDDPKRFASSRAVGAHFGLTPGKYQSGETDVTGRISKVGDHWVRVAFYEAANVLLTRPVKGGALKRWGLAVARRAGMRKAKVAVARKLAVILHRMMADETTFRFEAVA

SEQ ID NO: 274139 - protein, 351 aa, unidentified
MKKIFIGIDFAKEKFDAAIIEACGLKEFGERQFGTFINGKKGYSQFMKWVKAKAGSTTEQEWLFCGEDTGSCSLGLSKWLYGKGLDIWIENAYNIKHSSGIQRVKTDRADASMIAEYAWRHQDKAMLFEPLSESLTQLREVFLYRHKLVQQRVAMEVRKQDKETAQSSKAISFINRKSKHLITEIDKTIKECDTMIDRIIDADTELKENYSIITSVKGVARQNGACLLIFTNNFKRFDMDARKIACYYGVAPFGKDSGSSIHTPAKTSHFENKLIKSLLSQAAQIAKIFNPEIKDYYQSLIKRGKKHSVALNNVKNKLLRIIVALVKKKVKYDPETYKFYRNRLEKQFAPL

SEQ ID NO: 274140 - protein, 317 aa, unidentified
MQHGKTSTKCAGVDVGKHALDAAVVGEAETVRVGRDAAGLEALVAWLMERGVERVGLEASGGYERIVVEALEAAGLAVVLHQPLEVRLFARLKRRRAKNDRLDAQLIAAATAQVDAVKAAADPRLRELAERLTAYEQISDQLAELRGFMEHVTLKDLAQTLKAQIAALARLKAKLAGEVLKRIAACEDLAARHALLKSLPGIGPIVAACLVVRMPELGQMQRGQAAALLGVAPFDRDSGQMKGHRFIAGGRKRPRRLIYLSALAAKRHDPALKAFAQRLADNGKPPKLIVVAVMRKLIEAANLVLARAKPWTKTAAA

SEQ ID NO: 274141 - protein, 332 aa, unidentified
MSVYVGIDVHRKRSQVAVVNEVGEVLANRNVPNGAEPILSVIGALPAGTPAAYEAAFGWGWLLELLEAYGFEPHMVHPLQCKAIASARLKNDKVDAATLAQLLRADLLPEAWIAPPEVRQLRAMLRHRAQLVRLRTLLRNRVHAVLADHGHGRPAGCWSGPGRAWLAGLELPAVSREVIDDALALMDALQVPVDRLDAEVRQRARTDPRVKVLTQLPGVGPFTALVLLAEIGDITRFSSARKLASWAGLTPTVRGSDRTVHHGHISKQGPAWARWVLCEAAQTAKRHPDFAPAYEALARRRGKKIATTAIARKLVTRAYHLLTDAASAGAPS

SEQ ID NO: 274142 - protein, 416 aa, unidentified
MKPSTHNKTRKRYMRFCGIDVAKRKHVACIIDSDGEFIARSQSFNNDAEGYQCLLSRLKNVGRRGQILVGMEATGHYWYSLHDFLVGKGYEVAVLNPIQTAQQAKKGIRKCKTDKIDAHHIAQLLKNGEHKVTLVPDDFAMTCRQLTRLRYKLIKRGAGIKRLLWSRLHPVWPEYETLLANPFCKTGQKLLITAPVPEDVLALGRSELTELIRKTSRGKYGLAKAEQVWQTAQQTVGTRRGLDGARISIRSLLTQIEAMAPIRKQLEADIDALADQLPAYIFTLPGINRINAVSLFGETDPIAAFDSGSQLVAFAGLDTTVFQTGQYQAPRRRISKRGSPFLRHTLWAMAHRACYQEGDLRNYWLRRRGEGLHHLAAVTATAIKLCHVVWRILTDRRDYLPQPPTVKNTRRRKRAS

SEQ ID NO: 274143 - protein, 356 aa, unidentified
MSMVAHTHPFVIGVDAHARNHALAILACPTGEVLDEGQFPATGAGLQRAVDWVARRTGGDLDTLWVVEGVGTYGARLARAAADAGYSIAEAARMNARANRGVGKSDPLDACRIAQAVLPLDVAQLRRPRTDDGVRAAVRVLIASRDHITVERTAAINALTALLRVAELGVDARRALTGGQIALVAAWRTREEALASRVARAEAVRLAKRVLAADQEIASNAKQMTALLNSSPARKLLDQPGIGPVTAAVTLAAWSHPGRVRSEAAFASLAGVNPIPASSGNTVRHRINRGGDRRLNRALHMAVVTRMRVDPATRAYVEKRTAEGRTLREIRRCLKRYLARQIYRHLNAASDTLRAA

SEQ ID NO: 274144 - protein, 399 aa, unidentified
MDNFPVFVGIDVSKDKFNVCAISNPSSIIFESSFDMSQQGFSSFANKLSAFPKQSIIIAMESTGCYHLNLLAFLSSNDFACAVFNPLTVKNFASLRKTKTDKIDARIIATALFYLQHQIPSSAFVNSELRDIVRARENIIHRIAKVKGNIEKLLNVLFPELERVTNIYSDTILNLLSHFPSAKAIQKARNLDVFFSKDRGRSTKLNAQKLKELANNSIAQYWPMKEKILVQNIKELQFLQQQLEEYDKMMKEYCECSAINLDIEILTSIPGIGENSAMHFLAEVGDISRFSTYKKLIAYCGLDPSIAQSGKSKVEGHISKRGNAHLRRILWLMAVSVVIHNEYFRTYYERKRQQGIPYKKAIMSVVHKLLRTLYAMLRKKEKFNIDYAISHSKQKFNFA

SEQ ID NO: 274145 - protein, 482 aa, unidentified
MKKRNIYQNQSQELLSLFEQAANNAKVMCVPIDYAKKDHVVMFCNGYGDILRKPFSVKNSPAGVDFLTDQVIRSCRQRAISEKHVFFGGEEVGSFADNFVSTLRCQGWLVAGVNAHEAKTQRENLQASNDRLDLMGIAKTLLNRRANCSPAQSGIYLNMRTVVRHRRKLVDITTEVRNRIHAVVDRLFPGFLNETKSGITPFSKSSLWLMQDRFSAPQIRRRRRSTLIEALRRLSTRKPECTADKLQQYATQVLKPPQEYVHMLQLSLAQHVKHFCCLQESIGQLEKEIAVNLAQTQGAFLTSVRGIGIVLAAGVSAEIGNPYEQKPLNNLVSYCGIIPRVKQTGGPQGETKTGKVAKRCNRILKDYAVQSASHLGLHGPADLMTDYKRRDASGQHADFGMTRRYLRMAMCLMRTSQIYLPSRLRKAQVQIEQRADYYLMNWPQLRDKWQKLGALETAFKADHPLGQWRKIVQQFYGIKLTL

SEQ ID NO: 274146 - protein, 402 aa, unidentified
MNAVGIDVSKGKSMVAIMRPFGEIVSTPFEIKHTSSDINSLVKLIKSIEGESRIVMEHTGRYYEVLAHQLSEANLFVSAINPKLIKDFDNDSLRKVKTDKADSVKIARYALDKWQNLKQYSVMDELRNQLKTMNRQFGFYMKHKTAMKNNLIGILDQTYPGVNTYFDSPARSDGSQKWVDFASTYWHVDCVHKMSINAFIDHYENWCKRKKYNFSKSKAEEIYGKAKELVPVLPKDDITKLIIKQAVDQLNSASITVESLRTLMNETASKLPEYPVVMAMKGVGTSLGPQLMAEIGDVSRFTHKGAITAFAGVDPGVNESGSYEQKSVPTSKRGSSDLRKTLFQVMDVLIKTHPQDDPVYQFLDKKRAQKKPYYVYMTAGANKFLRIYYGRVKEYLASLPES

SEQ ID NO: 274147 - protein, 408 aa, unidentified
MTVTCGIDWSETHHDVALVDESGKLMAKRRISDDAHGWRALVELLAEHGDRPDNPIPVAIETGRGLLVSCLRATGRTLYAINPLAVARYRERHTVARAKSDHADAMTLANILRVDADHHRPLPADTELVQAIAVLARAQQDAVWNRQQLANQLRSLLREYFPAALTAFHVKNIGLTSHEARAVLQAAPTPTAAAKLTARRLHALLRTSGRQRNIATWTDRLQALFREEHLRQLPLVEEALGRQAQALLLQLDAACRAADDLADATNEAFHQHPDATVITSFPGLADLTGARVLAELGDDRSRFADARALKAYAGAAPITRTSGKSLVVHHRKVKNQRLAAAGYLWAFASLRAPGPRAHYDQRRAKGERHSSALRNTFNRLLGCLHHCLQKGVTYNEDVAFQPRSKAMA

SEQ ID NO: 274148 - protein, 324 aa, unidentified
MQENLNAKSTTWVGVDVSKLKIDVAVLCGEQKGATFQVARTEKELKPLAKKLLSYGPQGVVLEATGGYEALVMQVFEAAGLTVIRMNPQRVRAFAQAEGIRAKTDALDAYVLARFGVRMQPVAREGSEAERRQLATWVARESQVTRMLAVEKTRLQQVEGDRFLQKSIQRTLTFLEKELAQLVKQIEAGLAASETWKAQEALLLSAPGVGHKVARVVFVLLPELGRANRKEITALVGLAPFARDSGKWTGQRCIQGGRGRVRSMLYLASLTVIRGKNPLADFYHRLVTAGKPKKLALIAVARKLLLALNEMIRTNSPWRLPISA

SEQ ID NO: 274149 - protein, 455 aa, unidentified
MDGSYAGVDWASEKHDVLVADAAGEKLLAATFAHDEPGLRSLCRQLVRLKVRLVAVERPDGLLVERLLDAGLRVLALHPNQFAAARDRFRVSGGKSDHFDAFVLCELARTDHHRFRVLEPDSDATKAIRALTRGREDLVGARTAVVNQLRAELERFWPGPLGLFSDLHSRISLAFLERYPSPADARGLGEARLRAFLARERYSGRRTAAQLLAKLRAAPAGRVGERELATRRGLVRGLVAMITTLNEQIAELEREIAAAIREHPDGRIFTSMFKGSVLTAAELLAEMGDCRGRYPTRDTLAGDAGQAAVAIESGKRKAACFRWGCNKRLRNAFHTLADSSRHHNPWAQDLYAQALARGHDHPRALRTLGRAWSRIVWQCWQERVPYDPARHRALQRHVTVTIPTSSGPVPDIAATQRTAGAAVTRRAARRAERPALDREPTSAKPAGRRAKRQRG

SEQ ID NO: 274150 - protein, 391 aa, unidentified
MIFVGIDVAKDKHDCFILNSEGTVLADVFTIANNRIGFETLLSRIQSCSQCESKIKVGLEATGHYSYNLLGFLLDNGLATYVINPLHTNLYRKSLSLRRTKTDRIDARTIAMMLMSDVDLKSYSNTAYHNEELKSLTRYRFDKVKERAKLKSSVARLVNILFPELEKLVSSLHIAVVYALLSNYPGASYIANANTEELAETLCTASKGRYTKSKTAEIQVAAGVSIGSKMPAKSMELKHTIALIRELDKEISEVESTIDKITSQMDSPIFTIPGIGRHMGAMILAEVGDFSNFASADKLLAYAGLSPSTYQSGQLQNCYAHMEKRGSRYLRYALFNAAKYVCLWCPTFSAYLEKKRSEGKHYNVAISHAAKKLVRLIFAMQRSGKAFLADY

SEQ ID NO: 274151 - protein, 351 aa, unidentified
MDRYIGIDGHKQSCTIAVMGSTGRRLKELRVETNANAIKAALKSVPGERQVCLEEGELSAWLYELCEPLAHRVVVAQPGKRAGSKSDSIDAWSLADELRRGELNRLVYKAPSTYRPLREAVRCYEGMTRDTVRVKNRFQAVFRARGIGVSPEEIYSGTSRTSWLSKLPLGVRRRATLLGEELDGVEDVRAETETWLREEASKVAAVKILSTAPGIGPIRAAQIVATVVSPERFRTSRQFWSYCGLGIVMRTSSDWVKDSRQGWLRKEVMQTRGLNRNRNSMMKRVFKGAAMTVLQRQADHPLTRHYAEMLNRTKPNLARLTIARKIAATVLAMWKKKEEYDPKRHEPPARS

SEQ ID NO: 274152 - protein, 337 aa, unidentified
MADIQILAIDLAKRSFQICATAPGGAVLFNRTVSRAKLAKFLTEQARCVVAMEACATSHFWGRFAQDLGHDVRLIPPIYVKPFVKRQKNDSADAAAIAEAALRPNLHYVAVKSAEHQARAVAFRTHQCFVGQRTQLINALRSHLAEFGVVVAQGPANLKSVAGLLNDDAIDLPDGVKQIVRLYLDQIDVLTARIDELTLKLREATKVNDEMRRLCTVPGVGPVTAGAIMAFAPDLRAFSSGRNFAAWLGLVPRQRSTGGKTRLGAVSKMGQADIRKLLIVGAMSRIRWIVRKGVLPENWLGRVVGRKPRMVAAVALANKMARIIWAMMTRSQNYRMA

SEQ ID NO: 274153 - protein, 370 aa, unidentified
MKEFSKYVGLDVHKEMIAVSVAEGHGSEVRYLGEIANTPEAIEKVVKQLRKSSAELSFCYEAGPCGYGLHRQLTELGWDCKVVAPSLIPKKAGDRVKTDRRDSLMLARLLRAGELTAVWVPDGLQESLRDLTRAREDMKHLQRQAKQRLLAFVLRHGKRYDGKSNWTQAHFRWLETVKFEQPIQQIVLQEYIDTVKDGGKRVASMDRQIEQIAQESASWPVIEALMALRGVNLLTATTVVAEIGDLKRFANAAQLMAYLGLVPREHSSGGSVRRGGITKTGNSHVRRVLVESAWTYRHAARKTAILQRRAERTSETVQEIAWNAQKRLCGRYRTLEGKGKLKVQVCTAIARELAGFIWAVGQAVPAPASK

SEQ ID NO: 274154 - protein, 484 aa, unidentified
MAAKKKDARTGPDRTSAGAAAERGGEGAEVAEDRVQVVEYAAAIDVAKGSGMVCTRVPGSRPDRRRQTVWRVEATYAAVTALMDHLRCEGIQRLVLESTSDYWRIWFYLAEAAGLEVWLVNAREVKHLPGRGKSDRLDCVWHCKLNERGMLRRSFVPPEPVRDLRALTRTRARLAQDQARHQNRVEKILEDAQLKISVVISDLFGASGRRFLDALVAGERSPKALAALGDPRLKATRQQLEDALTGRFRDIHAFEISTHLRIIDAINEEITRLDDKIEEQLALVPRTAPACTACGLAGGGHAPGCADEQVPLLGLAARLDEITGVGECNARAIIAELGTDPSQFPTPGHAAAWARLTPRTRQSGETARPGRTGKGNRYIRGALGQAAMTAAKTDTRLGAMYRRIARKRGKQKAIVAVSRVICEIAWILICDPGARYQELGPDYHTPRSRARQTRDKIREIERLNPGKKVILAPIDPGPEAGAAA

SEQ ID NO: 274155 - protein, 372 aa, unidentified
MDEINNHYQQFQEGPMNYSGIDLHKDNSFITTINDAGQLIRQSRVRNNEVAIMQYFQSIDGPHRTVVEATSGWYWLNDLLEANGIEMVLAHAKYIKAIAYAKVKTDKVDSQTLATLLRMNLVTPAHKISQELRGMRDVMRTRLRFVQKRTACYNGVHRIAEKFNCDTEIVVSERTTPNQLPEYYRLQLRLLYQQIDMLDQQIMELEKSLRNQLIPNEDIQRLLWIPAFGLITAYTVYLEIDGIERFSSERRLFSYCRVVPGASNSNRSLRHKSGNKDGNKYLKIAFTDAAVHATRYYPEIRAYYQKILRRSNQAIARTVIAKELCRIVFHILTDKTEYKGFKGKPISRQKALNWPRLASPVFGLARNSKPLG

SEQ ID NO: 274156 - protein, 356 aa, unidentified
MQTQVTKKIDFTGKDLFVGLDVHKKSWSVTIIVDGIEHRTFTQPPDPEALEKYLQRTFPGGTYHSAYEAGYCGYGIHRRLNDLGIKNIVINAADVPTTQKDKLHKRDPVDSRKLARGLEKKSLRGIHVFDRDLEELRSLNRTRFYLMRDLRRSKNRIKSYLLYYDIPLPVEFDNNQWTLKFIAWLKQVKMQTSGGQDAFSHLIASFEHHRQQLLILSRIVRLRISQHDKELFNLLKTISGIGPLTSSALMTEIGDINRFPHIDDLASYVGLVPRVRESGETTHTGGITFRCNNFLRVLLVEASWQAIRQDPALMQYYHKHVINSKGHKVIIKIARKLLNRIRYVMKNRQPYVTGVA

SEQ ID NO: 274157 - protein, 324 aa, unidentified
MNVIGIDVSKAKLDCAWLKEDEKRKTKVVSNTFDGWKELVEWSLKNTGVAIEQLYFVMEATGIYHQRLATYLFDAGANVSVVNPAQVKFYGQSLGVRTKNDKKDSVVLARFGLKANPRLWQPEALEVRELKALVTRLEGIEKDLQREKNRQEKALCGETPQAVLDSIAQMIALFETEQQKLKKLIEEHIDKHKKFKEDKALLETIPGVGNVIATRMLMVISSRQFEKASQCAAYLGLVPVQHESGSSVKGRVRLSKAGNPAIRAKLYLGAVSAKNYNPDVKALYDRLLSKGKSKMSALGAAMRKLVQICFGVLKHHLPYQPQTT

SEQ ID NO: 274158 - protein, 345 aa, unidentified
MYYIGLDIHKKTISYCIKHGGGEVHAQGVVNATRAALDEWLKTLPQPWTGAMEATLFTGWIYDHLLPHATSLKVAHPSMLRAIAASKKKNDRVDATKISDLLRCDLLPECYMAPVEMRERRRTLRYRNLLVRQSVQMKNKLAGLLMETGVSYNKEKLHQKRYFAQLLKESAELPEALKPLLKIGRETVERATTTEKALLRALERDPVLAARVERLSTIPSVGLITALTWALEIGEVSRFASVKHAVSYCGLCSAENSSAGIQKRGPISKQRNKHLQSVLIEAAKLAPRWNADLALLYEKEKQRGNHNRATLAVARKLVAYLLAVDRREKPFQGGKKKAPLHQAAA

SEQ ID NO: 274159 - protein, 379 aa, unidentified
MDDTIRFVGLDVHKRRTVVAIADSGRDGEVRQYGAVETERSAIAKLAGKLARGGKTLRFCYEAGPCGYSMHRWLTGLGHECEVVAPSLIPRRPGERVRTDRRDAVKLARLHRAGELTAVWVPDPAHEAMRDVVRARAVAVSAVRRARQQLSGFLLRHDRIYSRKAWTGAHRRWLAELKFEHAAQRVVLEDYIDAVGAAERRRDGLTEQIRELLPRWSLAPIVEAVQALRGVAAIAAIIIVAELGDPRRFDNPRQLMAYLGLVPSEASSGEKVYRGGITKAGNRSARRALVEAAWTYRFPARRSRHLLARCQAASPAIQAIAWKAQLRLSSKYRKLVGRGKLATVAVTAVARELIGFIWAIARELPAIPPEPVPSVSSQR

SEQ ID NO: 274160 - protein, 318 aa, unidentified
MRKHSIVCAGIDTGKRKLDVALDGCRDELQVANSEEGHQRLSAWLRQRKVRRVGIEASGGYEQAVVCRLRRDGFTVVVFQPAQVRAYAKFHLQRAKNDKIDAALIAACTAAVRKMHAPPDPRLVRLAEHQTLIDQIVDQIARAKNYLESCRDPRLRRFWQDEIKRFRGLFKTELKALVAAIRRHRDLSERLDLIASVDGIALRTATVILVRLPEIGRVSREQAAALAGLAPYDNDSGEHDGARHIAGGRERLRNSLYGAAFAASFHWNAELVELYNRLVAAGKEHKVALVACARKLLIFANAVVARGTPWEARAAATR

SEQ ID NO: 274161 - protein, 370 aa, unidentified
MNTIYIGVDFHARQQTICYLTTETGELVSCELQHWDKTAVRAFYAQFEGHVIVGLEASGYSPWFERLLEQLGCEVWLGHATEIRRRARWRQKNDRRDAELILDLMLHDEFPRLHRPAVQSREVLRMLPYRQKLTKLRTMSKNSLQSLALQAGLAKRSQLFTKDGLQQLRAAEMSPVMQWQCEHWLQLLQPLNQQLLETMVWFKAQSRDDVCVIRLRTHPGIGLLTSLCLVHTLQPVSRFRNSRKVAAYAGFDPVERSSGERKCFLGISKAGSRLLRYLLVEATHTAVRKDDELKRFYQRLTERRGRPKAKVATARKLLIRAYIMLRDEIDYAEFRHRAVAARLARASRRPNMPESLIGQPASAECQEVTH

SEQ ID NO: 274162 - protein, 419 aa, unidentified
MNTLNTTSFTAFIGIDWADAKHDICIQSTDGDEREFDVIPHQVERIDEWAHTMRQRFGSPIAVAVELSKGPIVYALQKHDCFVIFPVNPTTLAKYREAFQPSRAKDDPTDAEIAVDLIMRHPERFKPLQPQSVEIRMLASLVEQRRNLVDDKIRITNRLRVALKQYYPQMLEWFDHIDTPLFCDFLTRWPTLVQVKRARKSTLRKFFHEHNMRFEYVLERRLNAIKTATPLTLDEAVVVPHRLQALVYVEQLRVMLNAIKRFDIEIESVAKQHEDYALFTTLPGAGPSLAPRLLVAFGEQRERYKSAAEIQKYSGVAPVTERSGKKHWVHWRWQCPTFLRQTFVEWAAQTINKSYWAGEFYRQQREKGSTYQAAVRALAFKWIRILYRCWQTRVPYDEVVYLKALERRGSPLLTAAKVT

SEQ ID NO: 274163 - protein, 339 aa, unidentified
MAIQSENIVQESKSLFAGIDVGAEELILLIRKNGTSYKAQKFANAPVDRVRLVKKLSNLPGIIVCLEATGVYHFDLSIALHDAGVALMVVNPKSSHNFAKVLMKNGKTDAVDAETLAQYAERMDFVAWTRPSDEKIALRSFARRIDALTRQKTAAKNQFHALSASKENPKAVLRDVNLSITQLEKRIDCLGKEALVLIEKHPELERAFLLLTGVKGIAQTSAIALMGELLLLPQGLSPREWVKFAGLDPRAFDSGKSVHKKTRISKAGNRHIRSALYMPALSAKQHDPHVKAYFQHLVDNGKLPLQALCAVMRKLLHAIHGMLKHDKPFDNTRFYAIPA

SEQ ID NO: 274164 - protein, 344 aa, unidentified
MKVSVLGIDLGKNVCSIVGFDETGAVVLRRRAKRETLIGLAAKLPPCIVAMEACCGAHHLGRLFANQGHDVRLMSPEYVRPYIKAQKNDDRDAEGIAEAATRPTMRFVEVKAQEQLDIQTLHRSRDRLVAERTALINQLRAILLERGIIVPQGKRKLEQYLTALMEGQDPNGLSQRIRTLIADVRGQWLELDRRIAVFDKEFAAFAKENEDARRLTTIPGVGVTIASALIAAVGNAETFEHGRDLAAWLGLVPRQSTTGGKSRLLGVSKRGNKYLRKLLIHGARAALPHIAERDTALGRWAKNLRARVHKNVAIVALANKLARIAWAVLRRGEKFTAKGLPLAV

SEQ ID NO: 274165 - protein, 322 aa, unidentified
MSGSSVMVGIDVASTQVEVAAIGAELPATLSRVSNDAEGHSALADGLARLKPALVLMEATGGYEAALACALQAAGLRVAVVNPRMARDFARAMQRLAKTDRIDAGTLAEFAGVLARRTDCDRFIRPFSEPEQQDLAALVTRRRQLVTMQVAERQRLRLARPVTRPSIEALLEAIARQLDDVEAERVRHVEEHHAQMAKLLQSVAGIGRVATATLIAELPELGRLNRRQICALVGVAPYANDSGMSRGRRRIAGGRFEVRRALHMATLAATRYNPAIRAFYERLVAAGKLKKVALIACMRKLITHLNAIARDHLNGRSGLGNA

SEQ ID NO: 274166 - protein, 333 aa, unidentified
MTASSPLLTLPRLGIDISKLTFDVHLCTPGGRTHSAQFANNQEGFAELDAWLKLHRASKTQAGIEATGPYGVLLLWHLHTQGHTVYQLNPRRVKDYARSLGRRVKTDAVDATVIAAYLKGCEDLKPWEPASQALQDLQDLVRRRDQVIISLNAERNRKEKGTNKMVVASLERLIKSLKAEIAKLDSAIEAHVLKHTDLQKSLRLLRSIDGVGRLVAVTILAEVPQISVFERARDVAAFAGLTPSLCQSGTSVRRRGAMTKEGSALLRKMLYMAALHAVKSPRNAFHRCYLSFVERGKSKMCALGAIMHKLIRVAFGVLKHDSPFVKNFAKVEA

SEQ ID NO: 274167 - protein, 432 aa, unidentified
MDQVIIGVDPHKLSVTIEARDSREILRAKGRFGTDARSYRQLLAYARQWPERVWAVEGANGIGRPLCQRLLASGERVLDVPAKLAARARVFDTGQGRKTDPADAHAIVMVALRDKRLRELTADPELTVLRLLCDRRDELSQARAQALNRLHRLFLELIPGGAPVKKSTAQYQALLATVRPRDLAGRTRRRMAAEELADIGRLDAKLKTMKAELTAAVQATGSHLMDIHGVGPAGAARILADVGDVARFPNRHHFASWTGTAPIDASSGQHTHHRLSRAGNRRLNHVLYMAGLVQLRNDTPGRAYYRRRVAEGKTPMEAMRCLRRRLSDVVYRQLAADAQAARQTGPGGHSGATLLSSAADLPPDIGTSDQPLPGPAPQTLPPPPATKATPAARTGALPRRRARGVNVQRPTGRTTLTPTSAGAPSKPPGPPS

SEQ ID NO: 274168 - protein, 339 aa, unidentified
MKLKRVGVDLAKRVYQVHGVDEAEQVVVRKTLTRQQFRRFMAQVEPSLVGMEACGSSHYWARELAKMGHTVRLMAPQFVKPYVKRNKNDARDAEAICEALSRPTMRYVTVKSAEQQAMQSVHRVRQRVVKSRTALVNELHGLLGEFGIVIAPLGVASMRRALPRILEDAENGLPGVMRELVHGLYEELCRVSERMAHLDGQLKQHGQSDERVRRIQQVEGIGPVGASAAVAQVGDARQFLKGRDFASWLGIVPRQHASGGKERLGAISKRGDAYLRTLLIHGARAVVNASVGKTDRRSLWIAALVKRRNKNVATVALANKNARIVWAMLVRGENYRKAA

SEQ ID NO: 274169 - protein, 391 aa, unidentified
MYVGIDVAKHKHDCFIMDADGEVLADVFTIQNSREGFEGLYRRIRSLGPCPSPENTKVGLEATGHYSDNIVGFFRNIGLPPVILNPLHVNLYKKGQSLRKTKTDKSDARFIAKMMMAECFEPHSQPSYHSEELKSLTRYRQRIVRERSRCKVSYDRLLSISFPELEGFVNNTLGVTEINLLLEFPTTKAISGCHLTRLANLVTNYSHGRHDKEWAIRLKELAKGSIGTNSPAKALELKQTIRQIMSLSGDLEVIEKEIKSLVIQSGTTLTTIPGISYTLAAVIMAEIGDVCRFSSPEKLQAFAGLDPTTYQSGQFSGNKNVMVKRGSTYLRWALLLSARTVSQFDDTFKEYLGSKLAEGKHYNSAMGHVAKKLIRVIYRLMTTGEVYQARA

SEQ ID NO: 274170 - protein, 375 aa, unidentified
MTNATARNDILFVGIELSKNSWRLAFSNGAKIRQRTLPAGDQAAMQEELARSKQKLGLSADSAVRSCYETGRDGFWVHRLLSSWGIENVVVDAASIETARRGRRAKTDRLDAEKLVRKLMAWAGGEKTVWRLAQVPSVEAEAERRPMRERQRLTQERTAHRARIASLVALHGVAAKLNGRQEFAVAVEQLRDWQGQPLPATLVAELQRELQRLAVVHQQILLLEKRQERALRSPQTAAEQVAQKLMQLRGVGPISAWLLAVEFFGWRRLRNRRQVGALAGLCGTPHNSGDSAQEQGISKAGDKRVRWVAVELAWCWLRFQPHSALTQWFWQRFGQGSKRMRRIGIVALARKLLVSLWKYLEWGELPAGATLRVVG

SEQ ID NO: 274171 - protein, 375 aa, unidentified
MQEKVRFLGLDVHAETIAVAVAEPDGEVRSLGTIPNRSESIRKMIRKLGPAEKLRACYEAGPTGYVVYWQLAELGVQCEVVAPTLVPVKAGDRVKTDRRDAEKLARCYRSGDLTAVWVPDEGSEALRDLVRAREAGKQDQMRARHRLSKFLLRSGQRPPSGVRPWTRPYLIWVAQLRFTQIAQEATRQDYLHEVEHMRERVARLEQAISEAVKLASPALQQVINDLQALRGIGDISAVTIAAELGQVSRFVGARQLMGYCGAVPSEDSSGKRTRRGGITKTGNAHLRRIVVEAAWSYRRPPCIWYGLRRRQESISEETKEIAWKAQHRLHKRYIKLGAAGKDQRKIVTAVARELLGFIWAIGTRAEATARQQAAA

SEQ ID NO: 274172 - protein, 348 aa, unidentified
MNYIGIDLHKKFSQVTVLGEGGEIKERVKIDNREEVLNRHFNNFDEPSKAVIEATFSWGWLADYLQSRKIEVVLAHPQKVKAIASSQIKTDKVDSLILARLLRADMIPTAYFCPKPLREVKEVLRSRASLVGLKTQVKNKIHSLLHKYNIREDEKFSDLFGKRGKEFLNSLELGEYTTPVLKRYIETLEFLEEEVKKTSVDLKQVFEKDEVARFLERLPGIGFYTALILSKEIGNIDRFFSAKHLCSYAGLVPSTYQSGEHTRHGKIKQGNKYIRWVLIEAVPKTIGKDKVLNAFYQKIKAKKGHNKAKVATARKMLGQIWYLLKTKQSFVDPETGSPVFFSGAFPHH

SEQ ID NO: 274173 - protein, 350 aa, unidentified
MTTIAEPRLVVTGGVDTHLDLHVAAVVTAVGGVLDTAEFPTTAAGYRGLLAWMRTFGDLDQVGVEGTGTYGVSLARHLRTEHVKVVEVMRPNRQVRRRHGKSDVIDAIAAARAVLSGEANATPKTHDGPVEALRTLKLLQRSAAKTRTQALNQLRALLVTAPEELRAKLRELTQRELLATCAGFRVGSDDDSLAGITRFGLRELAQRVLDLNDRLRGVKLRLKRITEQVAPDLTALKGVGPDVASTLLLTAGDNPERLANERSFASLCGVSPVQASSGKTHRHRLNRGGDRQANAALWRITLVRLHCDPRTKDYLAKRVKDGKSKTEAIRCLKRYIAREVFAALPIPAAT

SEQ ID NO: 274174 - protein, 345 aa, unidentified
MFVAGIDAHATYLVIAIVSNTGELVQKPVRVRSSEADRLDALLEPFRPLEVVVETSPAWPWLFDRLEGPGVHFVLAHAKRLRVIAESNYKSDDIDAELLARMRLAGLIPEVHTKSVEQREQAVLLRGRARLVRQRTQMANRIHSQLHNVGLCLERGHLLTQGGRAWVRTEAWPRLGEERRMFITMQWALIDQLEPMIKTLDRRVERMGRDNPAVALLETIPGIGAYRALVIATETLPITRFRTPAHLVSYAGLAPRSSQSGMRPIRHKSIPAGANRWLRGTFVRAVVSHVANAPDSWLSESHEQMKQRLGWQVARVATARRLARAVHAMLRTGEVWRDQPISQKN

SEQ ID NO: 274175 - protein, 371 aa, unidentified
MLLPRQRLKLARGAKDMEHAMSQNPNSAVAVIGIDIGKNSFHVVGLDTRGAIVLRQKWSRGQVEARLANMSPCLIGMEACVGAHHLSRKLKAFGHDARLMPAKYVRPYSKGQKNDFRDAEAIAEAVQRPTMKFVATKTADQLDLQALHRVRERLVSQRTGIINQIRAFLLERGVAVRQGLRFLRAELPRILATPPDVLSPRMVHVIEGLAGDWRRLDARIDHLSGEIAAVARQDAGCARLMSVPGIGPIISSAMVAAIGTGDAFSKGRDFAAWLGLVPKQISTGDRTILGKISKRGNRYLRVLFVQAAWVVLIKPKSWERHGLKPWIEAAKKRLHRNVLAIALANKLARIAWSVLALGRSFEARPATAAAA

SEQ ID NO: 274176 - protein, 438 aa, unidentified
MSDLDQAAVKREFAAHIGIDWADQKHFWTMRTADGRTQRGELDNTPEAVQVWAAELEQRFGGRPVAVALEQARGAVIAMLCKYAHLVLFPIHPNTLTNYRKAFNPSGAKSDPRDADLALELLVAHADKLRRLEPDTVETRKLQFLTEERRRLVNQQTSETQRLIGWLKQVFPQILPWFEDPACAMVGELLLRWPTLPALQKATPKTLRTFFHRQNCRSAERIEERIAQIRQAVAATHDAALLETGILCIQNSVHLLEQMREGIAEFDHQIAETYRQHPDRAIMESFPGAGPALEPRLIAAVGSRRERFESAQSVACFVGIAPVKEASGQQRWVHWRWACPKFFRQTFHEWAGCSIRTCQWAREHYDQQRDKGKGHHAAIRSVAFKWIRIFYRCWRDRVPYSEETYLKAKSARAPKPQPAVSIQWESCGGFAKPSELPS

SEQ ID NO: 274177 - protein, 313 aa, unidentified
MNSQEINVGIDTSSKQLDIYVRPIGHFFSVSNDVKGVKEAIKTLQPFKPKRVLIESTGRLELDFVCIAHKAGLPIVVCNPGQVRNFAKAAGRMAKTDKLDAEDIAHFGEAMKPRLSSIKPEKLRQISDLLTVRSQCLEMSTMQKNRLKRMPKSVHKPIQAILNTAQKEAVKIDKQLDKLIDSLPEWRQKRDLLLSAKGVGKVLTFTLMSELPELGSLNRKQIASLVGVAPMNRDSGGFQGKRYIRGGKQKVRTVLFVSMMSAIQCHPKLKPMYERLVAAGKPKKVAIVACMRKQLTILNTMVKNGTYWDENMA

SEQ ID NO: 274178 - protein, 370 aa, unidentified
MKSIIYVGMDVHKASFTLSCFSVTTQETFATVKISPDAKAIKKYLDGVSLSRSEECEFVCGYEAGCLGYTLYHQLTAMNIRCVIMAPTTILRNSKRVKTDRIDAENLARCLAYGGYKSVYIPTAQDEAVRDYLRMRDDHKLMLKKIKQQINAFCLKHNKIYPGNKSKWTQAHVKWLNALEFDGYLQDAFNEYMITYRELTDKVERLESQIEQLAELEEYRDKVKKLICIKGIKTHTALSLIVETGDFSRFQSAERYASYIGLVPGEHSSSEDQNRLGITKAGNRHMRMLLIEAAQCYSRGVPAKKSKDLKSRQKGASPEVIAYADKASIRLRRKYIRMELVNKKKANVAKTAVARELACFIWGMMTDNIA

SEQ ID NO: 274179 - protein, 431 aa, unidentified
MNYNQNKKIAQITSQTLIIGVDIAKFKHVARAQDFRGMEFGSPCYFENTKDGFCHFLKWISEIKKEQCMDKVVVGMEPTGHYWFNLAHILKENEIKFVVVNPLHVKKSKELDDNSPTKNDVKDAKVIAQLVKDGRYAEPTIPQGVYAELRVAKKIRDLLTDDLQTVQGQVHNWIDRYFPEFLTVFKKWEGKAAIQFLKLYALPHEIINFSEQELLTHLRKAVARSVGLNKIRELKQAASKSIGLRQGSDMAKLELKTLLDKYELIQIKFEELDAKIDVLLDEIPGVPQMLAIKGVGRDTIAGFFAEVGDLNDYSHPRQIIKLAGLSLKENTSGKHKGKTTITKRGRKKLRALLFRVCMILVAKNSAFKALHAYYTQRSDNPLKKMQSIIALCNKLIRIFFSIGKKQFVFSEEKMLKDIPHLSVSKKVEMAA

SEQ ID NO: 274180 - protein, 377 aa, unidentified
MENTAAKKRMQVPKGYLIIGVDPHKKRHAAVAITQDFTTRDKFKFDNTREGLEIMLRRARTEIVKSDCLGVMFAIETGGHYWRNVVYFLDEQGIPCRFINQFTLKRRREGKDLNRRKNDYRDSEVAAQLLCNSEFTESKLPQGIYAELRTAHNAYRRLVKERVRITNLIKGLLDALFPEFTQVFKDPCGLTALSVLSTCAIPRVIAKMTEEKFVTTIEAKHQGRLMRRKLRALHCSARISIGIDAGAWSVSSEISFLVEKLELIIDGIGRIIERTLVRLVDETEEGKYLLSIRGLNYIAVAGLLAELGCFKAYRRAKQMIKMVGSNPAESESAGKRSSHTPMSKKGRPVLRYCAWTAVIPMLRLNSDFRAWAKLRRE

SEQ ID NO: 274181 - protein, 354 aa, unidentified
MRDEQKPVSEAVVWVGVDVSKSTFDAALAEGGQGGCQPLGKLPARCFSRSPEGVAELLAWLRASGVAPESARVVMEATGRYSVELAAWMAQACPPLSPAIASPRQTTAFIKSLGLRNKTDRMDARALALYGVERRPRAYQPPPASEGELRELVRYRDFLVQQKVAAGNRAEEMRDSKFIQREMRRQIRQLERDIEKTEKEMARVKQATPELENDIELMTSIYGVAFLTAATIRAELGDLRRFEKARQLTAFAGLNPSLRQSGSSVRGRTHISKAGNPRVRRALYLSAMVAVRGDNDFRHDYERLRAQGLSKMAALCAIMRKILVLMRALLISGKPYVPLWKNRPQLQEKMFLEA

SEQ ID NO: 274182 - protein, 453 aa, unidentified
MEQPQEIEDEEYERTWERVAAIDVAKGSGVVCTRVPGEDRPGRRRTHVWTVKATKQAVIELADHLRGLQVQIVTLESTSDYWRIWWVVLEAAGLKVQLVNARHVKNVPGRAKTDKKDAVWLAKLTERGLLQPSFVPPPEIRRLREFTRLRTDLVRERTRYWARLEKLLERALIKISAVLSKLTTDTARALIEALIDGQRNPKVLAELAIGKARSKRAELAEALDGDWQPHHGELARILLDQIDALTAQIDALTDRVSELIDQIPAAWGVDADGVTGPQAGAGPDAVILPAVARLDEITGCGIIAAHAIIAEIGLDMTVFGTSGRLVSWARRSPQTRQSGKKTTTGRAGKGNPYLNGMLGEIAASASRTDTFLGERYRRIARRRGKRKALAAIARSILVIIFHLLADRTARFTDLGPGWYDTQIDAQRKTRNLIRQLEALGHTVALTPAGAAAA

SEQ ID NO: 274183 - protein, 418 aa, unidentified
MNGEGNTRDSKRYVALDIHKHYCVVAAVDREGKVVLQPVRVEHEDLEGWLKKNLRASDHVVIESTTNAWHVYDLLSPLVEQVVVANSFKVKQIANARVKTDVRDTLILARLLAANLVPDVWVPPQHVRELRQLLSQRRQLVEAHTQMVNRMHSVAHRHHLKHERGKRFNEKNTGWQKDKRLSKMEQFQLELEMENRAYLEKQTERIGKEVAKLSHQKPWTESMTYLMQMPGFGVITAMTVLAAIGEIQRFETAQHLASYSGLTPGLEQSGTKRHGKGITKEGRKELRWAVVEVAQRAVKSDPYWKKRFEAMQKRMHRNQAIVAIARQILELVWNVLTRRQPYRHFSQERIAYKYLTWGWQMDEEARDGLTRQQFTRYYLMRLGIGQDLTRIALDPKHPRKIASEAEVLALRPELQRIE

SEQ ID NO: 274184 - protein, 392 aa, unidentified
MRFAGVDIAAETHVVAVVDERSEVVVKPTSFNEEAAGYEKLFGLLGTPGDVLVAMEATGHYWQNLFAALAAGGYVVALLNPLRTRRFADEDLERTKTDAIDALGIARFAAQKRPAATRLPDSATQELRELVRLRDRLTQDFGDRVRQLHRLVDLGFPEFPRYVRSLDSELASAILHEYPTAEAFLGLPWKRLAKLCYDGRHKVGEEIAKGLVEAAKTSVGRHHGPAYRVQVRYACEDLDLLRRRLRQLDSDIERTLKDHEVGTLLTTLDGIGPTTAARLIAELGDIASFRSAAAIASYVGVIPGLRQSGKRQTSRAGLTPHGNARLRAKLWMPTLTAVRTNPWLKAYYEGLLRRGKLPKVALVAAMRKLLIAVYFVAKNRKPFIPVLTAVHP

SEQ ID NO: 274185 - protein, 343 aa, unidentified
MQVITIGVDLAKNVFQVHGVDSAGKVVITRQLRRKQVLEFFSKLPGCLVGMEACGTGHHWAREISKLGHTVRLMPPSYVKGYVKRSKNDAADAAAICEAVTRPSMRFVPIKSTDQQALLMLHRTRDLLIRQRTQLINALRAHLAEFGLVAETGREGLAQLGAIITDESSHESLPSAMKQALQAIVDQLAALELQVGALDRAIHAHHRANDMSCRLETVPGIGVIGATAIASTVTDPSGFKSGRDFAAWIGLVPRQHSTGGKERLGGISKQGDRYLRRLLVIGATAVVRQARLHPQKHPWIMRLLAKKPAKLVAVAVANKMARIAWAIMAKGGYYRAPELAAAT

SEQ ID NO: 274186 - protein, 346 aa, unidentified
MLYAGLDLSRKRVDFHLLDAEGATVDVGASPPDADGLRGLSERLDRHREPIRAAIESMNGARFVHDRLELAGWQVEIADAQKVKGLAPLACKTDRIDARVLAELARRDLVPAIWLPDPMVRAERERARWRLHLVRHRSSLKQRVHAVLLTHGKPCPVSDLFGVRGRQLLATLELPEPWQATIEASLRLIDELDREIGECERELRRLGAEHRYVPLLLTVPGIGWVLAYTIAAEIGDITRFASPRKLAGYTGLCPRVYQSGERDLRGPLAKQGPKYLRWALVEAATHACSAAVYRDRYQQTKARIGKQRGAKVAQIDLARRLSEAIWHMLSRGEPFAPKGATDPLAA

SEQ ID NO: 274187 - protein, 410 aa, unidentified
MEVLYARCAALDVHKKTIVACARCADGREVHRHVRTFGTTTKGLLELCAWLEQHGCTHVGMEATGVYWKPVWHVLEGHFELVLGNAAHLKNVPGRKTDKNDAMWLADLMACGLIKASFVPPTPIQQLRDLTRTRKQLVRESTQHVQRIQKVLEDANIKLDNVISDVMGLSGRAILRAMIGGESDPQKLAELGHAQLKCSREELAEALHGKVTDHHRFLLKLHLETYEQLHRSIDELEGHIERHVGPFLEDVELLKTIPGVSDVTAYVLMAEVGLDMSRFPTDANLRSWAGLCPGNDESAGKRKSTRIRHGAPWLKETLVQAAWAASRKRNTFFNARYYRVRARRGHKKAVVAVAAAMLTAAYHVLRTRTPYRELGPKHYERRDVAKTTTHLLRRLHDLGVEVQIVATSAP

SEQ ID NO: 274188 - protein, 409 aa, unidentified
MRYYLGVDWADQEHAVWGIDEVGEKITARTVPHTAEGLSEWGRELDEWRAQGIELWAAIERPEGRVVDFLLDHGVIVYPINPKALDRARDRFRQSGAKSDPFDARVAAEFLRTDHAHLTALQPSSEAAQELKYLTEDCQRLIRQQTRLVNQLTASLKAYYPRALDVAELTTTLARDFLRAYPTPEALTRVTERQWQRWARAHHLSDTRTAELWAVLSRPHLPVPAHVVRAKARLMLTLVAALSPVVEAVATYRKAIDDFFGRLPAATWARTLPVGERGITVPTLWARLGDAPERWTSFRHLQAQAGTVPVTKRSGKQQLVTFRFACDKPLRFVVDQMAFLSLQHSEWARAYYDQQRARGHRHRHALRALGAKWLKIIFVMWQQQVPYDESHHLATMARQALRHPEKKIA

SEQ ID NO: 274189 - protein, 374 aa, unidentified
MRHDITYVGLDAHKNSIVAYALPPGDQPPRRWELVNRSRNVQRMTHKLMDEYSGRVMFCYEAGPCGYALQRQIDKAGAVCDIIAPSLIPQKPGERIKTDRRDAQKLAEYFKAGSLTRVHPPDEDQEAARDLCRCREAALGTLGRHRHQLSKLLLRRDIRFEGGKSPWTYKHRQWLHGLHFDNPIDQIMFDDYLLATEQAEERVWGLEQHLMEVASREPFAEPIGWLCCFRGISTLTAFTIVVELHDFWRFPSPEGLMAFVGLVPSEHSSGDHRRQGAITKTGNAHVRRVVVETAHHYRHKPGVNKHLRERRQGQPPWVVALADKAQRRLHRRYSRLLARGKPYNVATVAVARELVGFIWEVLYTHATRSLEAAN

SEQ ID NO: 274190 - protein, 413 aa, unidentified
MQVMYQRCAGLDVHKRTVVACVLTSTATGAATQEVKTFGTMTRDLEALSAWLVAAGVEQVALESTGVFWFPVFNILEEAGLAVTLVNPRHVKQVPGRKTDVADAVWLADLVRHGLVRASFIPPAEIRALRELTRYRATQVRARAKEVNHLLKTLESANLKLANVATDPVGVSGRQMLAAVAAGEEDPGALAQMAKAGLRRKLDDLEEAFIGRVKPHHRVLIRASLDLLRFLERSIEQLDEAVARALAPFAAQMAALVTVPGIGPVAAAAIVAEIGVDMDRFPSAGHLTSWAGVCPGNKQSGGRRLSSATTKGNAWLGRILGEVAWAAIHERNSIFRARYYRLKPRLGAQQAVVAIMHQLLKVIYHLLKTGEAYHELGADYYQPADPARAASRLTKRLERLGYSVTIAPKPEAA

SEQ ID NO: 274191 - protein, 343 aa, unidentified
MDYFAGLDVSVKETSVCIVDGAGKIVREARVASEPEALLQVLTSTIYRFKRVGLEAGPLSQWLYSALAEAGLPVICVETRHMRAVLKAQINKTDRNDARGIAQMMRAGLYRPVHVKTLRSQKLRMLLTHRKLLQSKAIAIENDLRATLRNFGLKVGVVGTVKFEARIRELVENLPDMAVLVEPLLTVRRVLREQITVLHRRLLAIVRDDDVCRRLMTVPGVGPVVALTFRVTVDVPARFRNSKAVGAVFGLTPSKYQSGESDRSGGISRCGDEMMRAMLYEAAQILLMRSAKWSWLKAWAMKIARHRGLKKAIVALARRLAVIMHRMWVDGTEFRWTREVAAA

SEQ ID NO: 274192 - protein, 341 aa, unidentified
MKHEINVLGIDIAKRVFHAVGMDDRGNVVYRKRLSRHDLMPCIAKLPPVRIGIEACGGAHYWARRFRAYGHEVKLMAPQFVKPYVKSNKNDSRDAEAIAEAVTRPTMRFVPIKDVDQQDIQALHRVRERLMGERTALVNEVHGLMHEYGIVIPKGVSKFRQAVVGKLEAEKDKLTPLSQEMFWKLVEEFAALEKQLAYYQEKLEALATTHPECQRLMTIPGIGPLSATALVAAVSDASTFKNGRQFAAWLGLVPRQYSTGGKERLLGISKRGDSYLRKLLIHGARATLRWVGRKPDRRSQWIRQLVERRGKNRTAVAIANKNARIVWALLTSHQAYEPAKG

SEQ ID NO: 274193 - protein, 370 aa, unidentified
MKEYSEAFIGFDTAKKKHAVAIADVGREGEIRYLGEIDSSPLTIERMIRKLAGRYEKLHFCYEAGPTGYGLYRQVRGLGHHCTIVAPSLIPKKSGERVKTNRRDAVSLARLFRAGELTSVWVPDTVHEAVRDLVRARETASQDLRRKRQQLLSFLLRHGRIFSGRQHWSRAHLRWLAQQKFDHPAQQIVFQDAVDAIDDAAARLRRLDAQVAAIVPSWSMAPVVEAYQAMRGVSFAVAVTFVAEIGDLRRFDNPRQLMAFLGLVPSERSTGERVRRAGLTLAGNKRARRVLIEGAWSYRYPARVSQTLQARLEGLPKAVREIAWKAQIRLCARYRRLNAAGKKLPVVIAAIAREMAAFLWAIARHVALAA

SEQ ID NO: 274194 - protein, 416 aa, unidentified
MDQRRYNVCCGADIHKKFLVATILLLDGTKLTKRFSMDLRSLFEFRDWVNANGCEAVAVESTGSYWVPIYRVLEGHVELIVANAYKIKNVPGRKTDTIDSEWIAELCRNGQIKPSRIFQKDARDLRSLTRARERYVDDKTRVKNRIHHVLDSNCIRLSSVLSNIFGNSGRYILNCLLEGMDIDEIIEAIPVKRIKKKEDQIREALIIQLSCTDIILIRGYLEQIDSIQKNIEGLESEIRKRIAPLRKDMAIVMSVPGIGFISALVILAEIGNYNDFDKAEQLAAWCGLVPSVYQSADKIYMGSITKQGSGHIRRILVEVAHVIARTKGRSKLKSFFLRIKAKKGNNIAAVALARKVLCVLHHLLKAHEMYQEEEKDGDAEVEDLGIPRQGISLDDMIRHLAKAGYEVRKRAPGAGG

SEQ ID NO: 274195 - protein, 346 aa, unidentified
MMIIGCDFHPSWQQVSWLDTETGDCGERKLVHANDDAKMFYRQLTAPVLIGMEATGNSQWFVELVEDMGHEIWIGDAAQIRASYVRKQKTDKRDAAHILKLVAEGRFPRLWMPDREQRDLRQLVLHRHKLVEIRSRVKNELQHLSLNKGMQRKGKLWSQAGQKMLRELPLKPWAACRREDLLGLLAMLNQQVGQLDTAVQHATEENPQAKLLMTQPGVGPNTALAYVLTIGDVSRFPRGKQVASYLGLIPREESSGGRQKLGVITKQGNRMLRSLLVEAAQIAVRFDPEMKKQYLHRCHQKPKGVAKVATARKLAVRLYWMLRTNVAYPEIVRIESSSRVPLVGAS

SEQ ID NO: 274196 - protein, 337 aa, unidentified
MKYSAIDLHSNNSVVVVSDEVDRVLVRRRLPNDAAAILALLAAHRDELVGVVVESTYNWYWLVDALQATGYRVHLANTAAIKRYEGLKHSGDEDDAAYLAHLLRLGILPSGYICPPATRAVRDLARKRMQLVRSRTAQVLSVENMLSRETGAGMRSYAVQRLTAQGVESFGFHQDVGRAMCANVAVIKTLNREIDKLEQRLRQCVGLRPEFRLLTSVPGIGQTLATLIMLEVGTIERFAAVGNFASYARCVDSARISNGKKKGQGNVKNGNAYLAWAFVEAANFTRRYCVEAQRFYDRKKARTNGVVATKALAHKLARACYHMLKENQPFDVKRCFA

SEQ ID NO: 274197 - protein, 410 aa, unidentified
MIEAILERCAGIDVGKKFVVVCVMTGGAKDEPRTQIKKFGTIVSELRRLAEWLVAEGCTHAVMESTGSYWKPVFNLLEANVHVILANAADVQNRRGHKTDPNDSRWLAHLLRHGMVRPSFIPPLAVRELRDLTRRRRQLIGENSRERNRVQKVLEDANVKLGDVLSDVFCVSGRLMLAALLDGRMTAEQIADLAKKKAREKIPQITASVADHRLSDHQRFLIRHALRHLEFLDQEVEALNQEIRRRMEDPALAEAFHLLQSIPGIKEESAASILAEVGADMEQFPTAAQLSSWAGLCPANHESAGVKKSVRTNRGNVWLKTTLTQSAWAATNRKGSRLQSRYHALKARCGNKRAIVALGHTLLKTVHAVFSAKMPYREDPPITRDDRNVERARHHLRCLKKLGYNTFAVE

SEQ ID NO: 274198 - protein, 368 aa, unidentified
MRTNTLEAAPAASAKELKNEKPAKAKRMLVGVDAHLRGYQAARKIDSGVIGVVENFRSEEELELYVAKQTTLAEQVVVVYEAGPLGYTLYRKLSALGVLCYVCAPDSSEQRKKRRKNNKIDARSLTSKLFNYLNGDQNALQLARVPTEAQEQLRMASRQHDQLVEERKRLGAKGNAMLLSQGFGSWSNWWRPKAWADLSSKLPPWLLERLEIWVDVLKVLDEKIAQAKAAFARSCNGPRPKGVGALSQMQLQSEVLDWSLYSNRRKIACLAGMVPSEWSTGDKERRGSITKVGVPALRRIIVEMVWRIIFFQPQYKPVQKWLEVLRGPNPALKKKAVIAIGRQLMVDLWRLQTGRVTAQELNLIMVTD

SEQ ID NO: 274199 - protein, 343 aa, unidentified
MHPTDEKDLYCGADLHGNNVMLCICDAQGVEVFKRRVKANLVSVSGALEPYKERLRGIAVESTFNWYWFVDGLREQGYVVRLANPAKMDQYDGLKATDDESDACWLAELLRLGILPECYVYPQETRSLRDVLRRRQLLVRQYTQSLLSLESLLARYGKPCASAGEIETWTGKDIRALELDEYAVLQVETLLEGFRKTKALAKQIEKKALERVKPTATHKRLQQVFGIGLALGMTIALEAGEFSRFPSAGDYASYCRTVKSERISNKKKKGRNNGKNGNRYLAWAYIEAATFAVRYYPKIRAWYERKKQRRNVAVAKKALACKLAKATWHVMNGKEFDEKMLFS

SEQ ID NO: 274200 - protein, 422 aa, unidentified
MKAFNVSDFAALIGIDWADRKHDICEVNRQTNKQHFSVLSSQPKAINAWANELKRKYNGQLVAVACELKKGPLIYALSKFSHIVLFTINPSTVAKYRKAFTHSGAKDDPTDAAIQVEILQLHMSKLNVIEPDSESVRALAQLVEYRRKLVQDRVNVTNKITTTLKNYYPHVLDWFKEKDTMIFCDFLLRWPSLEQAKRARKQTLVDFFNQHNSRYPAVNEKRINNIKEAETLTNDPAIIKPNLLLIECLIQQLKQLMIAIERFDYEIKALYKCHKDRFIFDSLPGAGPQIAPRLLAAMGSNRERYHSSEEIQKYAGIAPVTERSGKKEWIHWRYSCTKFLRQTFVEWAGLSVRYSFWAKAYYRQQESKGKPHNTIIRALAFKWIRILYRCWKSNSPYDESTYLEALKRKGSPLLKYAVESKF

SEQ ID NO: 274201 - protein, 380 aa, unidentified
MVASNVNAMHYVGVDVHQRRSSVCILDGRGKPVKEFSVKGNWAELLAQVTRSVPRPFRVCYEASCGYGYLHEKFAALAQGVQVAHPGQLRLIYRSKKKHDRIDAKKLAQLLFMDLVPQVHVPAANVRAWRSLIVYRNRLMNRRVGVKNQIRGLLRNLGIVAPAGKRLWSGKGIKWLREQTMGELEALQRDMATEELEDLNGRIRRVEKQLNQIAQASPAVALLKTIPGVGVRTAEAMVAWIDDVNRFSRNKQIGSYFGLVPCQDASADRNRLGHITRDGPAVVRKFLCEASWRAVRSSPTLRAYFDRIVHDDADRKKIALVATAHHLARVMGAMLRSGEVWRESVRPASKDAAKDAGVAPPQDAEPVTALSCAAEVVMRC

SEQ ID NO: 274202 - protein, 423 aa, unidentified
MMKLKYSICCGLDVHKNVIVATIVTTNKSGISEYKQKSFSTINSDIQRFHNWLIENNCYHVCMESTGKYWIPIFNYLENDIDVCLTHPTYVKAIKGKKTDKKDSKWIADLYKFDLVRCSFIPPKDFRQLRELARYRFKLVCMKSSEKNRIQNCMTVSNVGIASVLSDPFGKTATEIMSYLLEHTAGSMDEKAVRKLIKKGAKAKSDEIIEAIRGYHIETDQAKKLELARGHLEYLDNMITQTEVELYVRIKPYYEFVEFVSTMPGMTELSSTIVLAETGVDMSIFDDAKHLCSWCGLSPANNESAGKKKSVRIAKAGDYLKPMMVQCALAAIKNKKQPYFAIKYGRIKKRRGHKKAIIAIARMMVVCIYHMVFEKKPFSPTDYEELMTPHNHVERVVLNEDNVFAYLESLGYDSSKLVKRNDN

SEQ ID NO: 274203 - protein, 387 aa, unidentified
MIYIGIDIAKLNHFAFAMNSDGEILLEPFAFTNDHIGFQKLLTKLSKFPKEDLLIGMESTAHYAENLNYFLFSMDFKLCIINPIQTFGIRKGGIRKTKTDSIDTFIIIKSMIMNNHRIFSQRDMYTLQLKSLCRFRRKLMKSRTKVKIQLVTYVDLLFPELQYFFKSGIHGKACYALLKEEPNPDKIAKMHLTRLSNLLNKTSNGHFGKQTAIALKELASQSVGTKNDTLSLQIFQSIIQIELFTSQLKEVDKDISVIMDSIDSVIKTIPGIGNLNGAMILGEIGDINRFDKPCQLLAYAGFDPSVYQSGNFNASGTRMSKRGSKLLRYALINAAWQLTLNNDTFKTYYNLKCSQGHRHYCALGSTSHKLVRVIHKMLTDELEFNLN

SEQ ID NO: 274204 - protein, 325 aa, unidentified
MVQSTASVDYSWVGVDVSKASLDSYCLATQRTWRCPNTATGLQLLQAHLSTLPHPAVVCEASGGYEQTLVVTLATAGVRVSVVNPLRVRDFARAMGRRAKTDPLDAACIAYFGQVMVPEAVVLASDVEQRIKALVTRRQQLVEMLSAEKNRRRQLQGPLREDVEAHIEWLQERIRQLDAEIQSLATHHQEWAERQALLQSPQGIGPTVSIGLLLYLPELGHLNRKQIAALVGVAPFNRDSGGYRGQRHIWGGRATVRSLLYLATLTAIRYNPPLRAYYQQLLARGKRTKVAIVACMRKLLTCLNAMVRDNTPWDADKVSALSQTP

SEQ ID NO: 274205 - protein, 352 aa, unidentified
MSRKSLPCGITTIGLDIGKNTFHLIGFDRRGAVALQLKLSRAQLERRLANVPPCLIGMEACSGAHHIGRELESLGHDVRLIPAQYVKPFLKGHKNDYRDAEAIAEAVQRPTMRFVRIKTPEQMDLLALHRVRSRLVGQRTAVTNQIRGFLIERGITVRQGLMPLRRALPEILSANSGPLSPRMVALIADLTGDWRRLDERIAGVSADIEALAEQDDGCQRLMTVPGIGPIISSAVVAAIGNGAGFKQGRDFGAWLGLVPRQESTGDRTILGKISKRGNKYLRTLFVQAAHVVLTRRPNTARHALWPWIVRASKRLHRNMLAIALANKLARIAWAVLARGHTYQPRIAADAAS

SEQ ID NO: 274206 - protein, 347 aa, unidentified
MLIIGCDFHPGFQQVAIFDNRTGGIEGKRLQHRWEAEEFYRSLAGQEVWVGMEACGHYPWFEGLLAGLGMELWFGDAARVRASVVRKQKTDRRDAEHLLELLRQDRFPRIWVPSLEVRDVRQLLVHRHKQVQARTRTKNQLQAMALSCGVQKKYKLWTKAGRAELEQLPLLPYASERRKRLLEGLDGLEAEIVELDRRVAEEARQRPEAVRLMTHPGVGSVTALAMVLTLGPAERFGSGKQVGSYFGLIPSEESSGGKQRLGKISKQGSSFLRFLLVEAGQTAARYDPQLKRFYRRLAVRKNRSVAKVAVARKLATRLYLMLREDWTYAQLCQAVMQVSPSHSVAGE

SEQ ID NO: 274207 - protein, 415 aa, unidentified
MKVVFPTCCGVDVHKSFLVATIIKTARDSLQPSYQKKRFSTFNSDLNRFANWLHEHECLDVCMESTEKYWVPVFNILEKRGICVVIANPKWVKAVKGNKDDTKDSKWIGDLFRIGLVKSSFIPAKDIRILRELTRYRYKLTSMKSSEKNRFQNAFTVCNVALDSIVSDMFGKSATAITDYLTSDEDFDPQHCISLLQRSLKKKADDVLASIEGYEILPEQKYRIGIVRDHLHYLEKLIERVDFCINAMVEKYDGAISLLCTIPGIDRSSAITIISEIGVDMAQFGSSKRLCCWADLTPGNNESADKKKSVRISRAGVYLKPALVQVAHAAVKDKTNPYYALKYERIAKRRGKKRAIIAIARMILTAIYSMLSTGEIWNPVDLFKIDMPEHLKEQQLQKAVRQAVHFLESQGLKVS

SEQ ID NO: 274208 - protein, 351 aa, unidentified
MVVVGVDVHKHTHTLVAIDEAGRQRGAKTVKAVTAGHREAVMWVREQFGADVLWAVEDCRNMSVRLERDLLTAGQTVVRVPTKLMALVRSSARTRGKSDPIDALAVARAALREPNLPVACHDGVSREMKLLIDRRDVLVAQRTSAINRLRWLVHELDPEAAPASRKLNTAKHQHALAHWLTTQSGTVAEIARAELADVIRLTAEITALAQRIAERAHEVAPTLLEITGCGELMAAKLVGEAAGVTRFKSEAAFANHAGVAPIPVWSGNTTGRMRLSRSGNRQINRALYVIALTQIRIAGSDGNAYHQRLRDEGKTHAEALRCVKRRLSRIVYKALLTDHTATTKPVHSAAA

SEQ ID NO: 274209 - protein, 231 aa, unidentified
MPEATPSFVGLDIAHASIDVAVRPSGDTWRVTQDDTGLTALVTRLRARQPHLVVLEATGGYEIAAATALAMATVPVAVVNPRQVRDFAKALGRLAKTDAIDAGVLALFARSVPGIGRVTASVLIALRPELGRLSRREIASLVGVAPLNRDSGSRSSPRTTWGGRASVRAPLSMATVVATRFNPAIRACYQRLLAAGKHRKVARVAAMRKLLVILNAVIKHQQPWTLSAVDI

SEQ ID NO: 274210 - protein, 343 aa, unidentified
MEHFAGLDVSVKDTSVCIVDYTGRIVREVKVASEPEALLAVLTNSAYHFKRIGLEAGPLSQWLFSALGEAGLPVICVETRHMRAVLQAQINKTDRNDARGIAQMMRAGLYRPVHVKTLRSQKLRMLLTHRKLLQSKAIAVDNDLRGTLRNFGLKVGVVGTVKFEARIKELVESLPDLAALVEPLLIVRRVLREQIAVLHRRLLAIVRDDAVCRRLMTVPGVGPVVALTYRATVDVPARFKNSKAVGAVFGLTPSKYQSGEINRTGAISKCGDEMMRVMLYEAAQSMLTRTVKWSWLKAWAMTIARRCGLKKAIVALARRLAVIMHRIWVDGTEFSWTRQAVVA

SEQ ID NO: 274211 - protein, 334 aa, unidentified
MENIALIGIDLGKNSFHIHCQDHRGKAVYRKKFTRPKLIEFLATCPATTIAMEACGGSHFMARKLEELGHFPKLISPQFVRPFVKSNKNDFVDAEAICEAASRPSMRFVQPRTESQQAMRALHRVRESLVQDKVKTTNQMHAFLLEFGISVPRGAAVISRLSTLLEDSSLPLYLSQLLLKLQQHYHYLVEQIKDLESQLKRKLDEDEVGQRLLSIPCVGTLTASTISTEIGDGKQYASSRDFAAATGLVPRQYSTGGRTTLLGISKRGNKKIRTLLVQCARVFIQKLEHQSGKLADWVRELLCRKSNFVVTCALANKLARIAWALTARQQTYVA

SEQ ID NO: 274212 - protein, 370 aa, unidentified
MPPPSTLYVGLDVHTDSIAVAYVAKAHDAEVIYLGTIGTRQADIDQLLRNMPSKAKHLVFVYEAGPCGYWLSRDLTQKGHRCWVVAPSLIPKKAGDRVKTDRRDAVQLARLMRAGDLTPVDVPQVEDAAIRDLTRAREEAIGDVKTAKFRLTAFLLRHDIRYTGRAAWGPAHLRWLSEVVCPTPAQQSVFQAYVRAVNEHTERLQRLEQALQEHVNTWRLQPVVEALQALRGVQFTVAVTLVAELGDLTRFDNPRQLMRYLGLIPSAYSSGERRRQGGITNAGHTHARRALVEGAWAYRYPAKGSRHIQLRLEQLPKPIQDISWKAQVRLCQRDRHLMARGKHANQVVVAIARELVGFLWAIAQQVPVTS

SEQ ID NO: 274213 - protein, 361 aa, unidentified
MSESMALVGLDVHQAQTVAAVLDPVSGELRVRRLRGEPAVVVPGLLEALGRPVRAVYEAGPTGFGLARAASERGLDVRVIAPGSIPRAPGDRVKTDRRDAKRLVRLFAAGELSFAFVPSEADERFRDLVRCIDDARRDLMRCRHRLSKFLLRRGLRFPGRAWTQPHGRWLGRLSFDDALSQAVLVDYVCAVDALVGRRRSLIAVLEDAVAASSHAATIARLRCFRGINTLTAAGLCAEVGRFERFAKPSLLSGFLGIVPSEYTSSEKRVQGSITKAGPTHARRLLVEAAHHYRRRPRVSYELAARHAGQDPRVVQIAWRAQRRLHARWAHLGDERGKPTGTVAVACARELAAFCWEAATLN

SEQ ID NO: 274214 - protein, 392 aa, unidentified
MTVVVGIDVAKDKHDCFILNSEGVVLEDVFTIPNTLEGFTRLLSKIQSHTTPQDKIKVGLEATGHYSYNLLGFLLNNGLTTYVLNPLQTNLYRKSLTLRKTKTDRVDARMIASMLLSDVGLKPYTDTAYHNEELKSLTRYRLDKVQDRAKLKSSVSRLVCILFPELEKLVSTLHMASIYALLEEFPGAKQIANANLTHLKNLLSTASKGHYGREKAVEIRDTARASIGSHMPAKSLELRHTIHLIRELDREINDIEAEIQKIMDELDSPITTIPGVGLQMGAMILAEVGDFYNFDSPDKVLAYAGLSPSTYQSGQLKNCYPHMEKRGSRYLRYALFNAAKYVCIWNPTFSAYLAKKRSEGKHYFVAVSHAAKKLVRLIFALERSGQSYRQAA

SEQ ID NO: 274215 - protein, 351 aa, unidentified
MSDFLVAIDLAKNVFELAVADESGAILERRRLGRTQFMRFFENRSFRRVAMEACGSSHHWGRWFMARGFEVSLLPPHYVRAYVRRNKTDRADVTAILEAAKATDIIPVRVKSVEQQALQSLHRLRSAWHSARTARINTLRGLCREFGVIAPLGAKRGIAELGRQVADPDSAVPDLLRRALRQLLAEIRSLEESVHAIEAELAQIAAQSEACMRLRTIPGVGLIAATAIVGAVGDIGRFRNGRCFASWLGLTPREHSSGDIRRLGSITKRGDKYLRTLLVHGSRAVIMSANAAQRKGQPLGAFRQWASETRLRCGHNKANIAVANKVARIIWATWYRQRDFEFRAPAVALAA

SEQ ID NO: 274216 - protein, 410 aa, unidentified
MRRMKGKRSASSIVGCAPKCAEPHAETPEGVLPQAFRGGRPVSKTITSFVGLDVHKDSTAIAEAEAGRENPRFIGTVGSDLGQLLKALKSLGKPETMLVVYEAGPCGYGLARQLRSRGYSCEVVAAGKIARRPNERIKTDRRDALTLARLARSGDLVKVRVPDERDEAMRDLSRAREDAVKARLKARQQLKALLLRHGHRYGGKSSWTLAHERYLATVGFAHPAQDIAFAEYRQAVREGQERVERVTQALRTQTEHWRLQPLVAALSSLRGIDFVAAVTLAAEIGDFSRFAHPTELMGFLGLVPSEYSTGDTRRQGDITKTGNGHARRVLVEAAWNYRFPARISRILQIRQEGQPKAVREIAWRAQLRLAHRYRRLSSRKLHPNKICVAIARELAGFLWDIARQVKVAEA

SEQ ID NO: 274217 - protein, 401 aa, unidentified
MTTTYDVILGLDVGKSAHYGCALTTTGEKLYDRELPQDETALRDVIVQLQGHGSVLVVVDQPNTIGALPIAVARDCGATVAYLPGLAMRKAADLYPGRSKTDARDAFIIADTARTMPHTLRAVDRESDLFSALKVLAGFDDDLARECTRAINRLRSLLVQIYPSLERVFTGTVLTRPIVLELLIRYHGPHGLQAAGKSGVKRWAKNHARKDPSALIDQIFAALAEQTVTVPGAATVELIIPRVAAQIKELKAQRALVATEVEAMVDAHPLTQVLISMPGVGIKTAATILLTAGDFSSFPTPGHLAAYAGIAPVTRRSGTSIRGEFPARSGNKQLKNALFRSAWVASCHDPVSKAYYDKKRAEGKKHNAAVICLARRRLNVMFALVRDGSFYHAPDKVPQAA

SEQ ID NO: 274218 - protein, 337 aa, unidentified
MRFIGVDLHSNQITVCYLTKSGKEKLATFALSKLSEFQQSLRSTDRLAVEATGNTRWFVAQIKELVEQVVVVNPSQFEVIRRSVKKTDRHDARALALFLSKELLPEARMKSASAAEINSLAQTRDKLVKLRTTLVNKLHALCRGRGVASRKSQFLTKKGLRGVLEQEWSLTARVEVEVIVSQIGSLNEGIKRLDEQLSSSGEQLPGQKNLVSIKGIGPRAAAILLGVIGEVEDFPGEENLASYFGIVPRVSNSNETVKHGRITKRGSKLGRTTLVQCTLVAKKYSPYLSRFYERIKARKGGGKAIIATARKFLGIIYRTLKNDWVFEDFPNFVLAEG

SEQ ID NO: 274219 - protein, 387 aa, unidentified
MPQLNDLSRSLVALDQDSTIIAVVELSQSSWLVGGVLPGIERQPRKKLEPSPERLLGLLHRWRDEAVRAGKEVTRIALAFEAGRDGFWLARWLEARGVEAHVIHPSSVAVSREHRRAKTDRLDTELLKRGFLGWLRGERGHCTMARVPTIAEEDAKRPNRERECLVAERTRLVNRMKATLARLGVRNFKPTLRKAAERLATIHTPEGMPLPPNVLAELQRDMARLGFVVSQIRDIEKARQKRLEQEPETGSHAMVRQLARVVGVGIETADMLVHEVLSRPMRDRKAVARYAGLTGSPDESGAKRREQGLARAGNARVRRGMVQLAWRFLLFQKESALALWYRARTADSRVGPRKTMIVALARKLLIALWRFVTTGEALEGVILRPAG

SEQ ID NO: 274220 - protein, 476 aa, unidentified
MKNQNIYRNNNYALKETLSNYKPEQLLYIPIEVGKFNHKASIVNFFGDIVVKLFEFPNKKHGLDFFVKKLNFATTSSNAQKIFLGCESCGHYHLNLVHHLKQLNFPIEIINPRDTRKENPNKNSKTDNIDLGAIARVLISNKGGRQIVPEGVYYNLQRAARTRRKFVQRKTSSKNIITGLLDRIFPGLWDKDAPIFSDRWGKASMLLLERYPHPHRIIRLGEERLARFLRKNNTKLGIDSAHKIIDAAKDSLTKPLAELHMDIFALKSHIKCLNLYNETIAQLEQEIACLLVQTPGIYLLSIDGISVIFAGEFTAEVGDINRFAYANQIISFAGSCSKVFESAEYQAQGLHISGRGSKFLRSTLNQVALALNAWCEPFHLYYTNKALQKPDKPGIARIATGNKFVKLAFALMKYEQLYKPRGLLLDEKNYYSNLWSKIIRKLSGFNLTNISQENNYLLKIKKYLEEKYALTLPTKL

SEQ ID NO: 274221 - protein, 353 aa, unidentified
MAISCDYDKEVDMVTTIGIDPHKATHTAVAIDETETVLGELTVPADRDQTKTLLDWAQNLDGDGRVWAVEAAGGLGYLLSQQLIADGEQVVDVPPVLASRVRLLGSGRSEKNDPNDARSVAIAALRQPGLAVVRPEDHTQALRMLAKRHLELTALRTQAACRLHAVILQLRPGGIARRLSAKQASRMLQGMRNLDVIGEQRRMMARAHLADIRRYDREIKANKVLISKAVVASRTTLTDVYGVGPVVAALLIGYTNNIGRFATADHYAAYNGTAPVEYSSGGKKRHRLSMRGNRVLNHAIHMAAVTQISHDTPGRIYYDKKQAEGKTRKEALRALKRRISDVVYRKLLADQQS

SEQ ID NO: 274222 - protein, 341 aa, unidentified
MKLTTIGIDLAKNVLQVHGADDKGKVVLKKQLKRNQVLPYFANQTPCLIGMEACGSAHYWARKLQALGHAVKLMAPQYVKAFVKRNKNDAADAEAICEAVVRPNIPAVPIKNIEQQAILSVHRARQGFVKARTAQANQIRGLLAEYGIAIPKGIAHITTLVPEVLEDGANELPGSFRLLIQRLVDHLKELDRQEGELEVEIKRWHRENDDSRKLAEIPGVGPMTASAVVATVGDARNFKNGRQMSAWLGIVPRQHSTGGKQTLLGISKRGDTYLRTLLIHGARAVIRVAENKPDADPWIKKLLARRNKNIAAVALANKNARTIWALLAHDRAYEPNYRMAA

SEQ ID NO: 274223 - protein, 338 aa, unidentified
MDVSSQQPPMTAGLDLGDRYSYLCLLDQHSGEVIEEGRLRTSPEALRRRFASERPMRIAIETGTHSPWVSRLLEEYGHEVLVANSRKLRLIYSNKRKTDEVDAENLARLARVDPKLLYPLKHRGEESQAHMAIIRSREALVSCPTQLVNHVRGAVKSFGARLPKCPARSFHKRAKEHIPEALRPALGPVLEQIASLTERIRGYDRKLETVRQERYPETELLRQVEGIGALTALTFVLTLEDPHRFEKSRSVGAYLGLVPATDRSGERDPQRRISKEGDEMLRKLLVSSAHYILGPFGSDSDLRRHGEKIASRGGKRTPRSGRWWPWRGSSRCSCTVCG

SEQ ID NO: 274224 - protein, 364 aa, unidentified
MDPAAKVRWSFEGQLKQGRNVMEIVRIGLDLAKNVFEVCGVDMRDHVVLRKTLRRDAVPQFFAELPPCLIGMEACSSSHYWAKVLTDLGHQVRLIAPQFVTPYVKSNKNDRNDAEAICEAISRPSMRFVSPKSSEQLEIQAVHRIRQRLVSSRTRLVNQIRGLLAEHGVVIGRDISRLRRALSQIVEGSECNLGDLIQELASDIHQELTALDERISSYDRRIRNLFRTNEMCQRIGKIEGIGPITATALVAAVGDQSCFKNGRQFAAWLGLVPKQRSSGGKSRLFGISKRGDRYLRTLLIHGARAVLGKAGGKQDARSVWINRMRERRHPNVVAVALANKNARIVWSVLSRNEEYRGPEMTQTV

SEQ ID NO: 274225 - protein, 402 aa, unidentified
MRRCIGLDVHREFAQVAIWEDGVIWQAGRIQTTPEALRAFAASLCVSDEVALEATGNTHAIARLLERHVGRVVISNPQKTRAIAEAKVKTDKVDAAVLAGLLAADYLPAVWLPDDQTHALRRQVTRRAHLVRQRTRLKNQVQSILHRNLIPRCPAADLFGNKGRAWLAAQDLPPDEHQAVQALLRQLDFHGQELRIVDAELGRAALERAEVRRLMTIPGVDATVALAIVAAVGDFGRFSSPQRLVSYLGLNPRVRQSGGQPAQHGRITKQGRAHARGMLVEAAWVAAKIPGPLRAFYERIRARRGMQVAVVATARKLATLCWHLVVGEQDYAFQRPSLTDKKLRALQLRAGMPPRRGQKGTAAAYSLKEVRRRERALAEQAEAAYRQLVAGWQPKRPATKPQ

SEQ ID NO: 274226 - protein, 412 aa, unidentified
MKQIRERVAGLDVHRDTVVACCRVPGTRRDFKTIKRSFRTTSGELTQLAQWLLEAGVTTVAMEATGVYWKPVYYSLEGLFDELWLCNAQHVKNVPGRKTDLNDAEWLADVAAHGMVRPSFIPPAEIRAIREMTRYRKTQVDARTQEIQRLEKVLQDAGIKLSSVASGVWSKSSKEIIEAMIAGERDPKVLAQMAKSRMRAKIPQLEEALSGHFGPHHAVVCRQVLEHIDFLDRSIAALTAEIATLLVPFDGPVTIISSITGVSRTTAEIMVAEMGVDMSRFPTAAHLCAWAGVAPASYESAGKRRPHGTRHGSTWLQRALIEAARAAARTKGSYFSAQYSRIARRRGPNKAAVAVAHSMLNVTWHLLTTGALYDDPGADYFLRRHDPAVEAMRLQKRIEALGFEVTIAATAA

SEQ ID NO: 274227 - protein, 387 aa, unidentified
MPQRDDLSRSLTAFQQDSTLVAVVELSRSSWLVAGIVPGIGRHPLKKLAPDEEALLRLLQRWRDEAAGAGRTITRLAVAFEAGRDGFWLARWLRARGVEAHVIHPTSVAVSREHRRAKTDRLDTELLERAFLGWLRGEPDHCSMAAVPTLEQEDAERPSREREGLVGERTRTVNRMKGALARLGVRGFKPTLRNAAERLAALRTAEGAPLPPNTLAELRRDMARLRLVREQIAELEAARLERLQQAPEDRPHAMVRLLARVVGVGLETADMLVREVLSRELRDRKALARYAGLTGSPDESGARRREKGLARVGNARVRRGMLQLAWRFLRFQADSQLARWYRARTADARGGTRKAMIVALARKLLIALWRLVTTGEAPEGVALRPAA

SEQ ID NO: 274228 - protein, 406 aa, unidentified
MRVVHERCAGLDVHKSSVVACAMLPEGKQVRTFGTMTWQLEQLAQWLQGLAVAVVAMESSGVYWKPVFNILEAAGFELLVVNARHIKAVPGRKTDVKDAEWIAELLRHGLLKPSFIPNRQERELRELTRYRRTLIEERAHEVQRLQKVLEGANIKLEDVISNVVGLNGRRFLSALIEGDYDPEAVAATANYGLQRKRELLAQSLHGTLGAHQRFLLDQLLSHIDFLEQRIAALDQEVQSRTRPFEPLIARLDQIPGLGIRAAQEILAEIGTDMSRFPTHRHLASWAKVCPGNNESAGKRRSGYAGKGNRWLRSILVECAWCATRKKESYFKAQYHRLAARRGQKRALLAVGHSLLSVIYHLLRDGVIYQDLGPNYFDQRDRSQIARHAVRRLERLGYHVSLTEGAA

SEQ ID NO: 274229 - protein, 356 aa, unidentified
MPKIKQLDFAGQTIFCGIDIHKKNWRVNIRNDQFELEDYTQDPCEDLLMKHLHKKYPGAKYQVAYEAGFSGFALQRSLTTSGIHCMVVNPADIPSTDRDKKRKTDQIDARKISRHLSKSTLRPIHVPDLEMEHARSLVRQRGRLVKDQTRCKNRVLHLLMFSGLKLSLDKPNDHWSRRFVELIRILPCQTEYLRQALDTALEEYLLIRKLVTVTTKQIRALSQQKTLVKTQKLIQGIPGIGLLNSMIIITELQDMNRFKTLDKLCSYAGIVPDTGSSGESNITKGITHRSNHHLRTAIVESSWVIIRKDPAMLHLYKKYCAAMVPNKAIIKIARHLLSRIRYVWNNQIEYEIGLVG

SEQ ID NO: 274230 - protein, 347 aa, unidentified
MFIGIDVHKNTHTAVGVSPFGEKLFEMTIGNYKKDFEILTKKVTEMQGLFSPYFGLEDCHGYGERLSAYLYENGHQLCAVPAIMVDRARSKTTHPEKSDSLDAYGVAKVMLTTSDTLLPYTVSEDAKKAKQIKELSMDREYLVEERTRLKNHLHNLLHRIWNTEYQEKFKDSFALKALKYWSKAKPLCDPFLLHSMKRKVKRLIDIHYEVLDLEKEMETLLNQNYTVHTASGCGVTIAGMIVGEIGDINRFHSPGALAKYAGCSPRECSSGKTHRHRKTRSGNRRLNCAFHRMALSQISRSGNEKARVYFKRKISEGKSKSQALVSLRRHMVNIIWCMMKNKTVYEA

SEQ ID NO: 274231 - protein, 339 aa, unidentified
MYYVGLDVSVKRIAVCVIDTVGKVIHEAAVNSTPEAVAAAIRATGVDVERIGLEAGVSSAWLARGLLAMGLPVIVIDATHAAAALRAGFRNKTDRNDARGIADLMRVNKFRPVWVKSTGAQRDRALLTVREQLRRQSLDARNTIWSILQGEGFQPPKLASLAFEVLLRQMLDDPNIGYLLWSLSIVATQIDQQVAELDGIIAALAKASDACRRLMTVPGVGPLVALTYVSAVDQPGRFRNARTVGAHFGLTPRRYQSGEMDWSGRISRAGDAAVRRALYQAANVLMHHSKRWCALKSWAVRLAKRRGLAKAKVALARKLAVVMHKMWTTGENYRLEAAA

SEQ ID NO: 274232 - protein, 368 aa, unidentified
MTALTIVAQTRPFVIGVDCHARTHTFAVIEASTKRQLASEQFPTTPAGISRALAWVGRRTGGDKGCLWAIEGVGTYGARLARAVVDAGYDVAEAPRMNARGRRGLGKSDALDAAAIGTAVLSVEESELRAPRRDEGTRAGLRILSAARDQLTRDRTLNANALLALLRAHDLGIDARKPLVPAQIATITRWRDRQEQLEVSIAREEAVRLARRVLEVTTQLAANQKRMTELIQQSPAAPLLEMVGAGAVTVATVLTAWSHPGRVRSEAAFASLAGVNPLPASSGNTVRHRLNRGGDRRLNRALHTITMTRMTHDPGTREYVARRTHEGRSYREIRRSLKRYIARTLYRQLNTLYAAAEPAASPAIGTAP

SEQ ID NO: 274233 - protein, 380 aa, unidentified
MGWMAPLRHLSAKLLSNRISIRHLSAKLLSNRISSEWEPSMGEVTTIGLDLAKHVFQVHGVDAEGGTVLRKQLRRAQVLAFFSRLPPCLIGLEACATAHYWARELRALGHEVRLMPAQYVKAYIKRNKHDAADAEAICEAVGRPTMRFVPVKTADQQAAVLLHRGRERLVRQRTGLVNALRGHLAEFGVIAPQGLRNVGKLIAIVRDEGDARLPDLARQVLQVLAVQIEQLEAAVAAIEKQLMAWHKSNPVSQRLASVPGIGPIIATAIAATVVEPSGFRSGREFAAWLGLVPRQNSTGGKHRLGGISKRGNQYLRRLLINGASANLLRSKATNADPWVIGLRQRRPSLVVAVALANKTARIAWAVMHRHENYQRVAAAV

SEQ ID NO: 274234 - protein, 360 aa, unidentified
MRIIGCDLHARQQTLAMLDTQTGEVVNRTLMHEGNQVREFYAQLSHPVLVGIEAIGPMYWFLTLLEELGIECQVGDATKIRAAEPRKQKHDRRDAELILKLLVENRFPAIWMPSKEQLDLRALLLHRHHWVRLRTQIQNALQAIALANGLRRGPGLWSHDGQAKIAFLPLLPHASYRRSVLQTMYRKMEEEIENLTEQVAEQARQRCGARLLTTHPGVGPVTALATDVFLGDPQRFGDGKALASYVGMIPREYSSGERQRLGAITKQGSPLLRFLWGEAGAHAARRDPELRRFYRRKLVQKGLGKARVAVARKLGIRLWIMLRDQIDYNEFCRRGQKQSGAACAGMPETAFGANRHRPVD

SEQ ID NO: 274235 - protein, 411 aa, unidentified
MQVVYTHCAGLDVHKKNVVACVMIPNKSGGWHKQVRTFSTMTKDLLNLSDWLISHECTHVAMESTGEYWRPIFNILEGNFEVMLVNARHMKAVPGRKTDIKDSQWIAELLQHGLLRPSFIPPIEQRDLRDLTRHRSNFIRERVNLVNRVQKVLEAANIKLASVASDVMGVSGRAMLAAIVDGKTTPELMADLAKGTMRKKHDLLIQALEGRVRPHQRFILAQLLCQIDSIDETIECFDQQIEQYCRPFEQAVELVDTIPGIARRTAEIIVSEIGIDMSRFPSAQHLAAWAGLAPGNYESGGKKLSTGTRQGNRALRTILVQAAHALARTKTYLAAQYRRISGRRGKKRAAVAVAHSILTIAYHLISRQEPYKDLGADYFDKQRPESVKKRLIKRLEKLGYQVSVEPIPVAI

SEQ ID NO: 274236 - protein, 336 aa, unidentified
MSHYCGIDLHSNNHVVVVIDDEDKRVFDRRLSNDLSMTLEVLSPYRETLKGIAVESTFNWYWLVDGLQDNGFGVQLVNTAAVKQYDGLKYSGDHQDAFHLAHLMRLGILPTGYIYPKEQRAIRDLLRRRMSLVRSASTQLISVQSQIWRSTGLRIKSTELRKSGFAPPPLDHYTLQAVHAGLMVYQAIQQEISGLEKSAFEAIKLTQSFKILQTITGIGKILGLTIMLETGDIHRFAGAGNFASYCRCVDATRTSNGKNKGTGNAKAGNKYLSWAYSEAAHFAVRFEPLAQRFYERKKAKTNGIIAIRAVARKLARATWMMLKHQIPYDAKLMFPN

SEQ ID NO: 274237 - protein, 427 aa, unidentified
MNDSKYKPTLCVGADVHLDEIVLRAVDKALGHEVLERFRVTNNLPGAQRAAATIAQTAMDLGYARIEIGWESTGMLWIPFHRYLSTEPLLQPFELELVCFNPKLVAKFKEGLVLRAPKNDDRDAFDIAARLRFGELPVSYMPSDFWQGLRRLTRYRYRLSKALSQEKNRFQSYAYLKCSDWKRAKAFSDVFGATSVALLTEFTVAEMVDMTHDQLVDVITHRGRGRFHDPTATARAVRQALHTSYPIDPQMDEMVTATLAAGWDHIRYLKRAMKRLDRLIARYIDLVPNPIITIKGLGAVITAGILAEIVDVLRFPEEKCLAQFMGLTWRKDASGGFVSQNTRLTKVGNVYLRYYFVLGANLLRQHNLEYKAYYWRKYQEVSKYQHKRALVLTARKLVRLVHALLTKNQPYVRPRTTDPDQEDDGLQ

SEQ ID NO: 274238 - protein, 341 aa, unidentified
MDKELYFGVDVSKKTLDLAYYDGEAIDWKNAHIQVSNDDAGFKKIGSWVAKVGKDFATFLFCMEYTGLYNQNFRLWLESKEYIYGMVEPRKMHRFEPDLDDDQRSLDRIKTDELDAFRIAIYCEQNHKKILRNPSKLPSPVYFKLKRLLAERKQNTKQSTLYKQQLHDICAYDTDLSVERKKLLLKNMQENQKAIDKEIDSYMNEDTSIRKNYNLLTSIPGIGRIIALETIVLTENFTAISNPRKYACYIGIAPFKKESGTSVRKKTGVSKKGFSEAKADLSIAVLSAIKNNPSIRDYWIRKRKEKCGGIVLNAIKFKLVLRMFAVIKRGTPYVETDAYKN

SEQ ID NO: 274239 - protein, 348 aa, unidentified
MVVIGVDSHKRTHTAVAADGTGRKLAEKTVAATSAGHLELVRWAARFDERTFALEDCRHLSRRLSSDLLVAGQAVVRVPPKLMAGARRSSREPGKSDPIDALAVARAALREDLPAATLDGPEREVRLLVDHREDLVAERTRAQNRLRWHLHELDPGNEPAARSLDRTIVLASLERDLAAAPGTVARIARELVVRIRDLTRTIDELEREIGRLVAELTPTLLEMVGCGRLTAAKLVGEAAGVGRFRSRAAFARHNGSAPLPVWSGTTVRHRLSRTGNRQLNLALHRIAITQLQRQGPGKTYLEHRRAMGDTKTEAIRALRRRISDEVFRRMRHDEAARAARPTGLAAAA

SEQ ID NO: 274240 - protein, 339 aa, unidentified
MKYTPVGVDIAKHLIQVHFIDEHTGEVIDKQLRRQDFLMFFCNREPCLIGMEACRGSQHWGRELTKLGHKVRLLQAHFVKAFVMGNKNDVMDARAIWMAVQQPGKDIAVKTEEQQSVLVLHRSRRQLVKFRTMQINSLHGTLLEFGKTIHKGRAAMERELPEALERMKERLPPYLITVLGNQYNQLNELDSLIEDIEKKLTSVARQNETCKRLLDIPGVGPLIATAAVATMREASAFKSGREFAAYVGLVPKQTGSGGKIRLLEISKRGNTYLRALFIHSARAAALLPKEPGPWITELKKRRPTSVAIVAMANKLARTVWAIAAHGSKYDKNHVSIRSY

SEQ ID NO: 274241 - protein, 370 aa, unidentified
MIMIGCDFHPGFEEIALLDTSTGRRWQSWLSHAFGLDRVRKFYGELSKPVLVGLEASGYSLWYEEMLEELGIELWVGDPGQIRKAAPRKQKTDRNDARLLLQRLEEKRFPRIWVPDKATRDLRPLLMHRHKLVTMRRAISNQLQAIAINRGLQKKRALWSKEGREQLRSLELPHWTRRRRDELLALREQWDAEIAELDEVVEHQAERNTDARYLMHHQRGEGPITALAVVLSLGPVERFASARKVASYAGLIPAEYSSGGRQRLGHISKEGNPFLRWVLVESATVAVQHDPEFKHRYWRLVERRGKSIAKVAMARKLLVRLYWMLRRRHLSRVGRPKKSQCTAVEALGSATAPQGSSRLDMADGMNRSLQ

SEQ ID NO: 274242 - protein, 369 aa, unidentified
MADKVTEAAVVGGVDTHKDLHVAAVVDQNNKVLGTQYFATTRQGYRQMLAWMTSFGALKRIGVECTGTYGSGLLRYLQNAGLEVLEVTAPDRMERRKRGKSDTIDAECAAHAAFSGIRTVTPKTRNGMIESLRVLKTCRKTAISARRVALQIIHSNIISAPDELREQLRNMTRMQLIRNLGSWRPDASEYRNVTNVYRISLKSLARRYIELHDEISDLDVMIAAIVDELVPDLIKRNAIGYGSASQLLITAGDNPQRLQSESSFAALCGVSPVPVSSGKTHRYRLNRGGDRAANSVLHIIAIGRLRTDDKTKEYAARRVAEGHTKMEAIRCLKRYISREVYTLLRNQKKAGQQHPDNGLTLRRRQWRVS

SEQ ID NO: 274243 - protein, 408 aa, unidentified
MDVVYSHVCGLDVHKKNVVACVITPQAKEIRTFSTMTEDLLSLLDWIKQHGFTHVAMESTGSYWKPIYNLLEMEGLQTLVVNAKHIKNVPGRKTDVKDAEWIAGLLRHGLLQGSFIPNREQRELRELIRYRRSLIEERAREVNRIQKVLEGANIKLSSVASDILGKSGRAMLEAMIAGETDAVVLSELAQKRLKNKKPELIKALNGLVGPHQRLMLQAQLRHIDDLDALIQQLDEEIKRRMLPFEEDLERLDSIPGVARRTAEHILAEIGTDMTQFPSAAHLCSWAGLAPGNHESAGRRKSGRTTKGNQKLRSTLVEAARSVARMKETYLSSQYHRIAARRGANRAAVAVAHRILTIVYHLLKRKQTYIELGPHFYEERKRQHVVKQAIRKLEALGLKVTVEEVIQPA

SEQ ID NO: 274244 - protein, 363 aa, unidentified
MIVIGADTHKQTHTCAAVFAGSGQLAGELTASAREPGFRELLAWGRSLDEERIWAIEDCRHVSGSLERFLVASGEQVVRVPPKLMGQSRRGERSAGKSDPIDALAIARAALREGPETLPAAYLNEDAMQVKLLLDHREDLVKARSEDQCRLRWHLHDLWPELEIPPASLDRIVWLDRIARKLSRAKQSTKVRIARELAREIRRRTRRAVELEREIGALVKAQAPELLALEGCGALTAAKLIAETAGAERLATDAKFARLAGVAPIPASSGKRVRHRLDRGGNRQLNCALHRIAVTQGRIHPPAREFLAKKQAEGKSRMEALRCLKRHLARRVWKLLIDSERGISMTTVDSQRETLSPQIAVAA

SEQ ID NO: 274245 - protein, 331 aa, unidentified
MIKKRDCIGIDISKNVFDVVDEKGVHIVYSNNHKGFKIFLKKLSETSLCVMEATGYYYSQLAYFLLDNEIPVCVVNPLSVKRFIQMKLVKVKTDKADAKMIQLYGESVDLPLWTGESENQRECLQVMRLLETYIKQSTMLKNKLQGEEVLGVPSKEVLRSLKRGLKSLQKEMKVLEAHLELLVKEDHQELLVLLQSIPGVGKKTSMMLAVITDGFNRFGSAGELCSYTGITPVIRQSGSSVRGKPHISKVGNQKLRNLLFLCSFTACERNKACRALYHRIVAKGKSKKLALIAVCNKLLKQAFALAKSKLLYDENHRSTNPEYNKNLAGLK

SEQ ID NO: 274246 - protein, 388 aa, unidentified
MIYVGIDIAKLNHFASAISSDGEELIKPFKFTNDNDGFQLLLSKLDPLDKDSLIIGLESTAHYGDNLVRYLVAKNYKVCVLNPIKTSTMRKNNIRKTKTDKVDTYIICKTLMMQESLRFVTFYDLDLMDLKALGRFRQKTIKQRTRLKIQLTSYVDEIFPELQYFFKSGLHQKSVYALLKEAPTPEAIASMHMTHLAHLLKVNSHGRFDKEMAQQLRVLAQKSVGASDSSLSIQVTHTIQQIELLDSQLERVEAEMTEIMKFNDSVIMTIPGIGYINGGMILGEIGDIRRFSSPNKLLAYAGLDPSVYQSGNFQAKKTRMSKRGSKVLSYTLVNAAHNVVKNNATFKAYYDAKMAEGRTHYNALGHCAGKLVRIIWKMMTDNLEFNLE

SEQ ID NO: 274247 - protein, 343 aa, unidentified
MNEISMIGLDLAKNVFQVHGVDASGKVVLQRQLRRGAVETFFAKISPCVVGMEACGSAHHWARVIGLHGHDVKLMPPAYVKPYVKRNKNDGRDAEAICEAVSRPTMRFVAVKSVEQQAMLSVHTTRALLVKQRTMVANALRAQLSEFGIVAAQGHKGLHELMARLQAPSEAIPEMMRRALLALVGQWQALDANERALEKQIVKAARCDREACRLMGAPSVGPIIASMVLAKVPDASVFRSSRDFAAWVGLTGRDHSTGGKHRPGRISKQGDRVLRTLLINGASAHLRQQKRRGVSDPWLRELLARRPYKVAMVAFAAKTARIIWAMLTKGEAYRDRASAPAAA

SEQ ID NO: 274248 - protein, 342 aa, unidentified
MGGEKMKQNNNFNTATFVGIDAHPTTHTALAINRFEEEKGMFTFDNTKEGISRFLCWLPIIDSRQDNIFVGIEGGGNSRHGLIANLLKDYRNIYEVNPLYTKQRRQFGTKADKSDPRDARLIAEVLTRKLAELPKITAHDLSSHMLVLKKTVWFYEQATGQGTAIQNQLHQLKREMSLSIDTVEKKTLRMMISELDKQLKNIRKTQKKCQQQLTILLQRQGKNLTTIKGIKTILASKIVAHSGGIERFANLDSFIQYAGIAPREKSSGKTKRHSKSKTGSRKLNNAFYLAAMVQLRWNPKAKVYFDKKIQEGKTKKHALKCLMKRTACIVYGMLKSGENYRG

SEQ ID NO: 274249 - protein, 422 aa, unidentified
MEVIHSRCGGLDVHKETVVACVRLASGDKVTREVRTFETTTSGLLLLLAWLTELGCTHVAMEATGVYWKPVWNILSDGDFELVLANAAHIKNVPGRKTDVSDAAWIADLLAHGLIRSSFVPEQEIQEMRELLRTRKQLGRQQSSHIKRLQKTLEGANIKLDSVITDIVGKSGRAMIQALIAGETDPVKLAALADRRIKASTQELREALRGRVTDHHRFLLHLHLQYIDFADAEIQDIDRKVAALITQMDQEVEAGRAFQTLIALLITIPGIDLLAARIILSEIGPDMSRFPTAGHLVSWAGLCPRNDESAGKRRSTRLRKGAPWLKTLLVQCAWAARRKKGSYFNAQFYRITGRRGPKKAACAVAASLLTTIYHMLKDGTQFEDLGADHFDRRSKDVRAKRLITQLAKLGFEAKLTPLAQAA

SEQ ID NO: 274250 - protein, 437 aa, unidentified
MMKKIRKNTAGIDIGAKEFFVALKGQKVKKFYTFTEDIAELIAYLTAHKIESVAMEATGVYWYILYDMLQAAGFDVWLVDGRSTKQVPGRKTDVKDCQWIQQLHSYGLLSRCFIPEDAIQELRTFERLREDHIRSASMHINHMQKALTQMNIRLKEVINQIHGASGMKIVRAILSGERDPEKLAALCHTSILKNKKDNVIKSLKGHYSANHLFALEQAVECYDFYQDKIIACDKKIEGSLKRMNRDKGIDEDQKNKRKPIRHHKPEIPHLDQYLLGIFDGKDATVLPGISDYNWLQLLSETGTDLRKWKTEKHFTSWLALAPKQHNSGKKNRNYKSKGSPLAGLIFKQAAAGLLNSKKIALGVFGRKIRAKKGGAVAVKAVARKLAVLYYRLQTKGLDYVEKGIQEYEEKLVEQKQRNILKAARNIGLELAVKQIVT

SEQ ID NO: 274251 - protein, 415 aa, unidentified
MNDLIRIGMDTSKSVFVLHGVDAAEQPVLRRTLRRRQVIEFFARLPPTQVGMEACGAAHHWARELGALGHEVKLLPAQRVKPYVARNKNDTADAEAVCEAMSRPRMRFVPVKTAEQQAALMLAGMRDQLIARRTQLSNTIRGYAAEFGLVAAKGLDKIEPLLARIAADESQPALARELFAALDAEYAELKPKLRKIEAQLLAWHRQNELSRRLAEIPSIGPIGAALMVMKVPNPQAFRSGRDFAAWLGLTPKDHSTAGKQRLGVITRAGDEALRRVLVLGATAVIQQVRRGRGHPSPWLVALLRRKPPKLAAVAFANKTARIAWKLMVSGERYRGARATGAGHGNACSEGASPQPRKDRAVLATVKARPGSTAARRAGNATAGLDGGCARRVTAIAVGTKKRSAVEQRNESQGHV

SEQ ID NO: 274252 - protein, 326 aa, unidentified
MRGFWGIDVAQADLVIAEAGMAAVATEPNTAAGCQAIVQRFTTESGQPSGQLSVQLIVLEATGGYERNLVAALGAAGLPVVVVNPRQVRDFAKATGRLAKTDAIDAQVLAEFGAKVQPELRPLPTTEQEELRALLLRADQVQQMLVAEKTRLLQALGRRDRQPLRKKITRHITFLERELRELDRDLDDQLRQSPLWRAQDDLLQSVPGIGSKTARTLVALLPELGQVSERAIAKLAGLAPLNRDSGRQRGRRHIGGGRPRLRAALYMATLTAVRCNVVIRPLYQRLVAAGKPKRVALVACMRKLLIILNAMLKTHTPWQPHLAATT

SEQ ID NO: 274253 - protein, 443 aa, unidentified
MSIWRFVMAVEFVGGPEQAKFMHRVRGFDPGQVLLVPVDVGKSEAMAMVTDLRGEIVTAPFKFALTISGVDVLRKRTATAVAERSAVVCRVGVETAGHYHRTLVTSLVGDSVEVIELNPAAVKHARAQQLRSRQKTDERDLAAMADLMARGAGRPPLARAEVLAAQLAWVGHRRRKVLIYRRMRQQIHAQIDLVFPGLSGCFSSLFETQSGRLMLSELCCPDRVVRLGPTRLTRFAANRGVRMTRLKANQIVDAARDSLALPTPERAVLAEILAADVALFERVEADMVRAEAELARLLPDTPAMVLTSLPGVSTIRASAYGAALGDPHRFKNADAAYAFAGLSPASYDSAGKVRSGLGITKAGSIHLRAAILELGLGLGQFEESFINYRAQLIARGKPRQVAAVAVAHRAHRLAFAMLRTGQPFNPTQSADRSVMTTRSPATT

SEQ ID NO: 274254 - protein, 372 aa, unidentified
MAERIKIHVGLDVHKDSISVAAAEPGRAPGRWIGKVVHDVAQLLKVLAKIGTAEQLHIVYEAGPTGFGLQRVLKAKGYVCEIIAPSQIPRRPGERVKTDGRDSVQLAECSRAGQLRAVWIPDPEDEAIRDLSRAREDAVNSRVQARHQLKGFLLRHDVRYTGKTSWSGAYYRWLATLNFGAGAAQTAFTEYWQAVTSADARVERLTTALHGGITGWRFEPVVGALQALRGVAAITAIGLVAEIGDLGRFAHPRKLMGYLGLTPSEHSSGDRVRRGSITKTGNAHARRLLTEAAWNYRFKARIGKQAQVRQQELSEPIRVMAWTAQLRLTQRFTALNARGLQANKACIAIARELAGFVWAIGQQAQREEAAKH

SEQ ID NO: 274255 - protein, 347 aa, unidentified
MTIVADTYDHVIGVDTHARTHTYALVNARTGGIEKTKTFPTHPAGLARALTWISQVTGTVLIACEGTGSYGRQLALLLADAGLQVTEVRPPAKTSRVGTGKTDNIDARTAARGILGTDTDQLITPRAPGARHALAVLLAARLRLDAHRTRLKNSLTALCRDTNLGIDARTGITNAQITTIAAWRTRTTDDLDTTTCRDEARRIAKEIHHLTAELAANRERLATIITDTTPALLDINGVGPINGAKILNAYSHHGRIRTEAAFAKLAGTAPLPASSGNTTRHRLSRYGDRQLNSALHRIAMTRLAHDPATQAYRDKRTTHDASNRDIHRSLKRYIAREIYRNLEHITA

SEQ ID NO: 274256 - protein, 381 aa, unidentified
MNTIIGIDVSQKSSSFHLLAAGGKGTDGSFPMNHSGFAALLQKTEGLENPRFVMESTGRYHITLANWLLHHGQSAFIVNPVLVKQFSRAHTLRRTKTDTVDARVIAQFAAQDTKALAHPGREMDDERLSVARRREQIAEDIARAKTQLKADLTVAFPEILELNVFTAGMLDLLVHLPSAQAVWQASDTELAGFFTGTRGRSLTFGPERVRGLAVDSIGVASYGPLVSDSAKNLLSLLARQKLLTQRLIDLVSRTQADDLAIITSIDGIGQVTAAHFLAEIGSIGRFERYQNLIAFCGTDPGIYQSGNTSKQLRISKHGNPVLRKYLYLMADSCKRHNIVFNAYYHKKRDAGFPHRKAMVATMNKLVRTLHALLTKDEMYSL

SEQ ID NO: 274257 - protein, 468 aa, unidentified
MKNYYLGIDVSKGYSDFVLLNEKKQTGLESFQLDDTFEGHNKLFKILSEFFTQQPDTKIFAAVESTGGYENNWYHLLHKYQGQLNLSVARLNPYGVNYNSKADLKRIKTDAISAVSIAEYLISHPEKVSYQTEDPFASLRRQWTFIKMLTKQRVQLLNQLESLLYVANTEILYHCRNKVNLWTLKLLKQYPTAKHLAKARVSTISKIPYITETLAKELINKAKHSVASETDETIAEIITATVNQILSLRKTICLQVKKLQSSCNLPEVALLKSFSGIADYSAVGLIIEIGSVERFSSVKKLACFFGVHPVFSQSGDKISGYRMSKRGRKEPRQILFNVARFAIVHNPLIKEIYIDHLKKGMSKMAAIGAIMHKILRIVYGILKNNTPFNPEIDRANRLRNLSKKKDESLVVNKMLEPIDCKAPVSRRQLKKRKEQEKSQNLKPLNAEQIVSVFAGSDSRSFPFASTQT

SEQ ID NO: 274258 - protein, 422 aa, unidentified
MAYRIAGVDVHKKMLAVAMADVEVEGEWRFGTSPTQLRAVAEWFIERDVEEVVMESTAQYWRPVWDALEREWQPVRQARAEAGPTSGALHLAQAQSNKGPRGRKRDFPDAERLVRRLVAHELTLSFVPDVTQRLWRTVTRRKYQVTRNRVQLQNRLECLLEEMHIKLSSLVADLLGPSARRMLRAVADGATDPAAVAALGSLRLRATPDQLRDALGAATELHPVYRRLLAMILDELTGIEAQIHQLDAELAQLLRAHQEAVERLAAVPGLGVDSAQQIIAEVGPSAATFATAKRLASWVGTCPGHDENAGINHSHRAPNGNRQMRRLLNQAANAAVKAKGSIFELVYRRLVVRLGHAQAIGAIAHRLCRLVWKILHDAVVYEERGPAVTRHRAQRRAAKMIRELRSLGYRVEPGPVPASTLA

SEQ ID NO: 274259 - protein, 414 aa, unidentified
MQNINIFVGIDLAKDTSKVCILESSGKVVLKPFSIPNNIEGMGEMLSKLKTYTHDEVIFGMEATSNYWENVLSFLSLKGYAAVLLNPYQVRKFCQALGNKIKTDTSDSVAIATLLKTKDFEEITVSTEDAINLKELVKTKYSLETRVKDCKKAILSMLNLVFPEYSQHVAHPFSKVSMHILKEYPTATHMTRDGSVSRLLKIFRKYQGCNFSKDKAKALIDSARASFYSGKASPARGLSLKVHIEEIAFLQDKIAQIEAQIIAILCPKDKDTGPTDYEILNSIKGVGINTIAAFMACVGSVERFSNSAKLISYIGFYPRIFESGSYRKQNPSIQKAGPKELRYMLYLTSVASIKHNPQLRKYYLDRVSAGMPAKKALIKVAVKIAKIMYSLLKEKQIYDPVKVFYQNDICPLVA

SEQ ID NO: 274260 - protein, 381 aa, unidentified
MQRIDPHQIRTAAEGYDTTIYVALELSKASWLVAINAPGGDKVSKYTVAAGATTALSAILTRARAQAERWCGESVRIVAIHEAGMDGFWVHRWLEAQGIESHVVDPASIAVDRRKRRVKTDRIDVEKLLRTLMGWARGERRICSMVRPPHPEQEDERRLTREREILVGERTRHVNRIKGLLMTQGISYFQPLRRDRRARFEALRLWNGTTLPSRLKAELLREFDRLELVMNQIQVIEAERDRALQTRSRDSIGALLVRLRGIGPEIASVLCGEMFHRDFVNRREVASYAGLAPSPWKSGTIDIDQGISKAGNPRLRKTTIQLAWLWLRHQPGSSLSRWFHARVGDRRGRIRRITIVAVARKLLIALWRYVTLGLVPEGALV

SEQ ID NO: 274261 - protein, 342 aa, unidentified
MKFYCGIDLSARDSQVCVIDEQLQVMVQQKLRNELPRICRLLAPYQANLKIVVESTFNWYWLIDGLQAAGFEVVLAHTLGLYLITGAKVKTDRRDAYSLAKLLLVGAVPAAYIYPVETRPVRDLLRRRARLVQVRAGEYGSLRRLLLRQGILSSKQQEIKTASETELEQWFEHPLVRLHASQELRRIELYSQQIAELEKTILELAQPERSYQLLLQLPGVGQTIALTILYEVGELTRFANVKVFSSYCRVVPGIAQSGNVTRRGRASKQGNHYLKAAFSQAAVHAVRCYPKVRRYYERQLKRHQGRGRQMICYNIIAHKLAQAAFHVLKEQTEYREELLFGR

SEQ ID NO: 274262 - protein, 308 aa, unidentified
MKKISSAAAQKIEKVEGQKLTIGLDVGDRSSWYCVLDEAGDVLLEQKVATTPKAMKEVFGGMPHSRIALETGMHSPWVSRLLSEVGHEVIVAHARTVRLIGESRRKDDRFDARTLARLARIDPDLLGPVQHRSRKAQVDLMVIRARAGLVRARTALINTARGLTKSYGERLRGCSPRKMNRELAEGLSPELQSTLQPLLDEIESLSERIAEYNDRVQQIAQESYPEVARLEQVKGVGTLIALTYVLTLEDPRRFRKSRDVGCYLGLRPGRRNSGQSEPQLHISKEGDPYLRTMMGQSAARSGAFWSRQ

SEQ ID NO: 274263 - protein, 349 aa, unidentified
MEKITTVGIDLAKQVMAVCAMDAEGRMVMRKVLRREQLLRWAAAQPSCVMAMEACGGAHYWARELTQQGHTVRIIAAEFVQAFRKSGKNDANDAEAICTAARQPNMRFVAMKSVEQQAALCVHRLRQGLVEERTAVINRLRGLLTEFGVVAPLSPEKLRRELARCQDPDDLRLPATVRQLVGDQVMALDQLDARLASYAAMIAAQAQQSEMAQRLQTIAGVGPTTAAAMVATVGDANDFRNGRQFAAWLGLTPRQHSTGGKTRLGRITKRGDAYLRTLLILGARSTLQSALRKPPEARHRLQQWIVAVLGRIGYHKTLVAIANKHARIIWALLVKGGGFDVRRLAQHTV

SEQ ID NO: 274264 - protein, 387 aa, unidentified
MAQVNDLSRNLTAFDPISTLVVVVEMSKASWLVSGAVPGVERQPLKKLEPDATALLRLIERWRNEAVRAGRPISRITLAYEAGRDGFWLARWLIARGIEAHVIHSASVAVSRERKRAKTDRLDAAMLMRVFLGWLRGERGHCGMVAIPTMEEEDARRPSRERESLVNERSRITNRMKSALARLGVRGFKPHLRKAPERLADLRTAEGTGLPANIIEEFRRDMARLALVREQISSIEKARAERLERAPDTGPHAMVRLLARVIGIGIETADMLVREILSRKLRDRRAVARYAGLTGSPDESGLKRREKGLAKAGNARVRRGLIQLAWRFLMFQKDSALARWYRTRTEGPSGARKTTMIVALARKLLIALWRLVTTGEVPDGVELRPAA

SEQ ID NO: 274265 - protein, 408 aa, unidentified
MNTLYVGIDVSSKSNVVYLMLPNGDKHSNFSVANSHEGSTLLVKKIYSALTSHSLDTVLIGLEATSVYGDNLVYFLREDATLAPFNRKIHVLNPKQVKKFHDAYNDLPKNDYVDSFVIADCLRFGRINKEVYMGDYRYKALQNLTRARFFAVQNLVKEKQRFMNVLFKKYSTMTQEKVFSDTFSTTALAVYDEFESAEALANMDLHELTDFIIEKGKNRFPDPDAVAKAIQKAARSSYRLPKTVNDSVNQVLSISITSMKALESQIKEFDKAIKALMELLPNVLISIPGIGPVYSAGIMAEIGDINRFDNQASLAKYAGLAWKQHQSGGFEAEVTRLIPLGNRFLKYYLCEAAFSLVRCDKEYSDFYHLKYKEVNRCQHKRALALTARKFVRLVFRLLKDNRLYCPAK

SEQ ID NO: 274266 - protein, 501 aa, unidentified
MTAPTTRRQPSSSPASAQEARDHRQAYNRRKNRAKVKSEARRQQEAAQVEALPVQHPHAAGIDIGSRTHWVCVGFTTDAASCLIREFPAHTAGLKAIAAFLREHQVTTIALESTGIYWVPLYELLQAEGFEVLLVDPSYSHQLRGRPKTDRRDCQWIYRLHSVGLLAAAFRPDEQTCQLRAYLRQRANLIRSGSRHVQHMQKALEQMNLKLTEVLSDITGLTGRTIIRAILRGTRAPEKLAKHRDKGCKASEAEIAQALTGSYREEHLFELKLAYEAWQFTLGQVAKVDGQIALQLGRMKCDRALPPLKPKARPKRRVNSPGFDVRTALYYVVGLDLTEIEGISELTALTLISELGPSVSRFATVKKFCSWLGLCPNWQKTGGRVKSSRTRRGVNRAAQALRLAAQSLHHSQGALGGFLRRMKGRLGAQAAVTATAHKLGRIVYLALKHGMTYVRQNQEEYEAQMKEKQIKALRRKARLLGLEIIEKTSGSEATGAAAAQG

SEQ ID NO: 274267 - protein, 450 aa, unidentified
MRSTYAGVDWASEKHDVVIADETGEEVLAATFAHDEAGVRALCRALVRHEVRLVAIERPDGLLVERLLDAGLRILALHPNQVAATRDRFRASGGKSDRFDAFVLCELARTDHHRFRVLEPDTDQTKALRALTRAREDLVGTRTALVNQLRAELALFWPGPLGLFTSLHSRISLAFLERYPSPADARGLGEQRLQAFLARQRYSGAQKPARLLAKLRRAPEARVGELELGVRRALVLSLVATIKTLNEQIKQLDRQIATAIREHPDGAIFLSLFKQPNSVITAAELLAEIGDCRGRYLTRDTLAADAGQAAVAIESGKRKAASFRWACNKRLRQAFVTLADTSRHHNPWAQDLYAAALARGHDHPRAIRTVGRGWCRIVWRCWQDGVPYDPARHRALQRHVTVTIPTSSGPRPDTAATQRMAGAAVTQRAARRDERAALDGKPTSATALGT

SEQ ID NO: 274268 - protein, 411 aa, unidentified
MDVCFPRCCGLDVHKRVVVACIRLLDASGCTEMTRSFGTTVAALRELAAWVTAHGCTHVAMESTGVYWRPVYHVLEGVCTLWVVNAQHLKQVPGRKTDVRDAAWIAQLLQYGLVRPSFVPTGAQRALRDLTRSRARRVQERVRVINRLHKMLELGNIKLAAVISDITGKTGRAILDGLVAGVTDVVALANRAVGRARVKRAELAEALAGTVTPTQRLVLQELLTQLDQVDASIGRYSAAVVERTAAWSAALARLQTIPGVGQRLAEVILAEVGIEELATRFPTAARLVAWAGLCPGLAESAGKRRATRTRPGNPWLKQALIEAAQAAARSQTYLGARYHRIARRRGRKKAIIAIAHSLLEIAYYVLTREEDYRDLGANYFDERDRQAVTHRMVRRLQNLGYEVTLTVAEAA

SEQ ID NO: 274269 - protein, 338 aa, unidentified
MSIYAGLDVSDKTTHICVVDVDGKVLRRDVVASDPDVLAKWLHKHCADLARVVLETGTLSTFLYHGLVERGVAIECICARHAKGILSARVNKSDVHDAEGLAQLARTGWYKRVHMKASATHIDRAALRIRAQLITARTSMANQLLGLLKLFGLRMGTARTPGRRAERLTAFYAQRPDLKTLFAPLIASMEGIEEQLRVYNRLLNDRAKADEFCTRLMGVPGVGPITALTFTATIEDPRRFARSEDVGAYAGLVPRRSQSGERDVSGHISKAGDPMLRKALYEAANVALTQVKRPFALQEWGRKMAEAKGASRARTAVARKLAALLHSLWLNETEFRWV

SEQ ID NO: 274270 - protein, 351 aa, unidentified
MQCIAFDAHKHYTWALVEDEKGSVLCECRIPHEKGALREFLEGCEPGSPVAVETIGSWYWIVDEIEAAGMEPRLVHAGKAKAMSGSLNKTDKLDVRGLNRLQRSGTLPTVWIPPGELRDARELPRTRMVLVRQRTQLKNRIQATLAKYGLTSVTSDPFGVRGRAVLEKQLSELPVETRYATGLLLEGLDHLKEQIVAFEERMREAFGETRDLELMRTVPGVGFILGVVILCEMGDVRRFPAPGQFASYAGMTPRVQASGGKTRYGSTRPDVNRYLKWAYAEAANVVAIHRRRHPQRHVSRLYERVARRRGHQKAIGAVGRHLAEASYWVLRKGEPYKDPVANQEVLSTREA

SEQ ID NO: 274271 - protein, 415 aa, unidentified
MLVQSNQRSYDPTEFDLFLGMDVDKKSIDFTCADAKRIIRAVHIPNDVEHLVRYVRKHFPEKRVLFAYEAGPTGYGLYDGLTAEGFGCVVSPPSMIPTAPGQRVKTNRLDSKKITEALRAGQLKSIHVPSPTYRHLRHLTKIRDLVVRQITGTKCRIKALLLFEGIPFPEAPQKSHHWSRSVIAQLQKLPCSGAVRFRLDRLLEALEFQRQQFLKITREIRNFCRQDPELSRCLSYLTSLPGIGQVVAPHLLARIGSWQNLQEHRVDELAGLLGLVPTEHSTGDRVHRGSITHGGDGRLRSKLIQSAWTAIRQDPELREFYRSVYRRHPQHLAARKAIVAVARKLTTRIFAVLKEQRPFTFRSQVHSRPLLPGEIGPRERLDASQKEEDRNLPSFVPETETLPGPPPKWGASKQV

SEQ ID NO: 274272 - protein, 354 aa, unidentified
MAMMLIGVDPHKSTSTATAVEPESNREVASIRIEATLREYRRLLTWAGRWPERRWAIENAEGLGRHLASWLLARGEQVVDVSTNATARVRQLSRGGGRKNDRIDAAAAACVAALQGDARQLEAEGAADAIGVLDERRANLSQARVRSVNQLHAVFRALLAGGAPTGLTAGAAAALLRTVRPVGEVERVRKHIASDLVAEIRSLDARLKGNAEVMAELVKASGSTLEQTVGIGPVTAGRLIGRTGSPSRFPTPAAYAAYTGVAPIEVASGERSRHRLSRSGDRQLNATLHTIAVTQIRTAGSLGNIYYLTKIAERKTPREARRCLKRRLANHIWRTMIADEKRQRAKTSNVADAA

SEQ ID NO: 274273 - protein, 306 aa, unidentified
MLRPDGRHRTKKFANTTKGHDELVSWLKGHKIDHAHICIEATGTYMEPVAECLYDAGYIVSVINPALGKAFAQSEGLRNKTDTVDARMLAEFCRQKRPAAWEAPHPLERALRALVVRHQALTDMHTQELNRTETAREVQRPSIDAHLLWLEAELKRLEKQIKDLTDDDPDMKHRRKLLESIPGIGEKTSAVLLAYIGLKDRFAHARQFAAFAGLTPRRYESGSSVRGESRMSKAGHVSLRRALYMPAMVATSKTEWGRAFRDRLAANGKKGKVILGAMMRKLAQVAYGVLKSGVPFDASRHNPVAA

SEQ ID NO: 274274 - protein, 416 aa, unidentified
MNAAGIDISSRKSTVAVLRPFGEVVEVPFDVQHNAEALTALAEQLKSIDGETRVVMEHTGRYYESVAKTLHEAGLFVSAVNPLLIKEYGNNSLRRVKTDKADAMKIARYALDNWVELRDYTPMDTIRYDLKTLNRQFQLASKQKTATANNLIALQEQSFPGIRKLFDSPVRSDGTQKWVDFTHDFYHVDCVRSGSQNTFTERYRKWCKRNHYNFNAGKAAEIYALAKSAVVLVQKTPLTKTLLQEAANQLTAISRSVETYRSEMNKLASQLPEYPVIMEMYGVGESLGPQLMAEIGDVRRFERKQSLVAFAGIDPMPNQSGEKNVRSNKSSKRGSPYLRKTLFNSMGIYLKCSPQDEPVYQFLDRKRAEGKPYYVYMTAAGNKFLRRYYATVMNYFATLENLPPVDTDSTGLQHTE

SEQ ID NO: 274275 - protein, 387 aa, unidentified
MYFVGIDISKYKHDCFICTETGEVIESNFSFPNTSDGFEQLLNLLKSIDNFKEIRIGFEATGHYGMNLKLFLEKNNYSFMEFNPKLVKEFISGQTLRKTKTDKKDAYQITKYLISVDYKPHPKQFYHKYSLKSLSRMREKLVKQRSYYEVALTNVLDHIFPEYKPFFNNTFSASSIFILSKYKSPDKIKNMKDYDSIRKISRGKFTSAQFFLLKDLAKNTIGTSNEIFELELETLLILRSQIEVEIKKLESNIEEIIKELNSPILSIKGIGYILGAGIVSEYGNVSRFKSADAMVAFAGIEPSICQSGTESHTGHMVKHGSGHLRYYLLNAADCIFLHEPIFTEFYYKKRNEGKSHRVALNHVAKKLIRIIYKLETENITFDSSKVK

SEQ ID NO: 274276 - protein, 415 aa, unidentified
MDVVHPRCAGVDISKRDAKVCVRIQGAGRARARSTVTTWEAVTNRILALRDHLIAEEVTLVVMEATSDYWKPFYYLLEDAPFEVMLVNARHTKGIPGRKTDVSDAAWLAELGAHGLVRGSFVPPEPIRQLRDLTRTRTAITRERGREVQRLEKLLEDAGIKLSSVASDITGVSGRAMLEALIAGDRDPARLADLAKRRMRSKIPELTEALTGRFGEHHSFLARLHLDLIDGHSRAIEELDERIEEAMQPFRATRDLIVTIPGISTVVADVIIAETGGDMSRFPSAGHLASWAGTCPGSNESAGRVKSTHTRPGNPYLKGVLGTAAMSVAHSKNTYLAAKFRRIASRRGPVKALVALEHAMLVAIWNMCSTGTYYADPGEDFFTRLHPDRARDRALEQLHRMGYAVTLEPLPAQAG

SEQ ID NO: 274277 - protein, 400 aa, unidentified
MSVIIGMDPHKRSATIEVIDQGGRVLEVGRFDTNEAGYAAMLAAGRGHGVIGERVWAVEGCNGIGRHIAHRLVHDGERVVDVPTKLSAQVRVFATGNARKTDPVDAHSVALAALYAPAEPGLRPVVVEDDLVVMGLIVDRRDELGRARTQTVNRLHRLLLELIPGGAKTFLSAPQARVLVATVKPRDLVGKTRRRLVVELIGELEVIDRKIKTAEKELTALVQERGSTLLELTGIGPTGAARLLADVGDIHRFRDKDRFASWNGTAPLDASSGAQQRHRLSRAGNRRINRTLHIMAVVQLRNPTPGREFYDARKAGGTPSLMAMRSLKRRLSNVVYARMVADQTRRELALRTGEVTGPGGHRGNDSDSSVTGSQPHTGSSDKPLPGPVTTQRRTPVLATS

SEQ ID NO: 274278 - protein, 324 aa, unidentified
MSAIAFLVAIGIDIAKAHFDVARLGADGKYKHKKFANTQEGFALLAEWLAGFCPEAAHLCMEATGAYSLPLAEFLVEQGFHVSVVNPAKIAAFGKSELSRAKTDKADAKRIARYALAMRPAPWTPPPTEIRELQALLRRLESLLEMQRMEANRQDTASPVVVGSIQAVIATLDKEIEAVREAIRRHLDGNPGLKQRAGLLESIPGVGTATAAWLLTLLSEHHGFGDAKQAVAFAGLAPRLRQSGQWAGKTRLSKTGDPLLRKALYMPALAAMTFNPAIRAFCQRLKANGKPGKAYVCAAMRKIIHIAFAILKSGKPFDPNYGLA

SEQ ID NO: 274279 - protein, 420 aa, unidentified
MSKDLTTLFVGIDVSKLSNQVLIMNFNQDIIHQFKAPNNHVGAETIEAHILNVLHDGNYSHIVIVLESTGIYSAHIATFLSASQTLFPYHPLVYTINPKISKNYRASFSDMDKTDPKDAFILADLARVGRTKTLNPFKGSQKVALQRLTRHRVHLVENLTKEKTYTLNNIFLKFSEFGKANDEGKFLSNDFSKTATAILENYHDIDDILNTSLEDLTSFIIEKSRNRFANPHQTAKMIKTAARASYRLDKMAYEPINMAISSSLVLIRCYEDEIKKIDKAIETLVKGFNQNEYLSLRSIPGIGPVYAAGILSEIGSIKQFDSNEALSKYAGITWRKTQSGNFDADETKMTKTGNHYLRYYLIQASNLVRKYAPEYTEFYQKKFNEVTSHQHKRALALTTRKLIRLIYGLMSKDQMYSSNY

SEQ ID NO: 274280 - protein, 401 aa, unidentified
MNTTTILYVGIDVSKDKSDICIKDQSGNDLIQRFKIANTKADLGKLYETIERIKSKTQGNSDVVFGMEATGIYSLPLYSALRRDGYKVMLYNPIQTNGFRKMKVRKTKTDSIDAGIIADMLRNSEPPQVNEIKDLNLYQLRELVRIRHRLIEKQTVCKVQMIRNIDMVWPNYISSMPKVFGTTSITVLKKYTVPTKMVGKSFEQFYELVHKASRSKISRTKAEEIYANAGNILTIPEIEPIISIEIKTLITQLELYDEQIQSVEDKIDQMMKLIDTKIMSIPGIGGILGPIILGEIGNIGRFSSAKKLVAFAGLDSVVSESGRFKNMTGRISKRGSPLLRQALFLAANVARMNDDVLKQFYDKKRSEGKHHYSALNAIAAKLLRIVYSVLKNNKEYQPQKN

SEQ ID NO: 274281 - protein, 313 aa, unidentified
MKEYLGVDVGKKNLDISSDRKVDSIPNTPKAIQAYFEKFQKKKKVYLVVCEATGGYEQTLTNQLQKLDIPVLVEHPNKIRAFAKSKGLFAKTDQMDAKLIFEYARTMKVNPKQQYLSQEIEGVRALLKRREQLINTKTQETLRLDPCVSETIKQSIAKHIQFLEKQIESINQEIEALAKQSEIQKKVQLLTSIPAIGQQTALMILAYLPEVGYLKSKSLAALVGVAPFNRDSGKFHGKRFVLGGRKTIRKALYMSAISAIRCNKTIKAFYTRLRSKGKPPKLCLIAVMNKMIAIINSVYKRSAPWVESLTAFA

SEQ ID NO: 274282 - protein, 348 aa, unidentified
MIIGVDYHPSFQTIAFFMEETGECGEQELNHSDGQAEKFYRDLKQRGISVRVGMEATGYSRWFERLLAELGFELWIGDPAEIKAKRVKKQKFDREDARLILRLMRENNFPQIWVPGPENRDLRQLLWHRHRLVQMRTRIMNQLQALAMNEGYRWKKKLFSEQGRAQLEKLTLAPWASRRRQELLELLDRMNPTIEELTVAVDREARKRPEAMRLMTHPGVGPLTALAYVLIIGTPTRFERGKQIGTYVGMIPCEQSSARKQRLGHISKQGNSLLRFLLVEAAQAAVRKDPDWRRRYIHLAMRRHKSIAKVAMGRKLAVRLYWMWRNGCEYSPLLEFGSYAGQLGTEMA

SEQ ID NO: 274283 - protein, 352 aa, unidentified
MQHFIGCDVHTRNQFVAWIDEQTGEIKKRRLEHESQKVKEFYAQFPRGSVVGIEATFPAHWFERLLGELGHELWVGDAARIRASEVRYQKTDARDAEHILDLLRTNRFPRIWVPSLEERDLRQLLVHRMKQVRARTQVKNQLHALAISQGVCRKGKLWSVKGRKELESLTLLPWAARRRKELLETLDRLDEQIRELDRAVEEAGREREDVALLRTHPGVGMVVGLAFALTVGPVERFRNSRKLVSYWGLNPRENSSGGRQRLGAISKQGNPMMRWLLVEAAQTAARLDPQLGRIYQRLKKKKVSGVAKVAVARRLAVRLFWMLRTRNNYAQLVHMSGSPSSAVVPPTAEPKL

SEQ ID NO: 274284 - protein, 353 aa, unidentified
MNLLRQVVGIDVAKDELVCTYGVIKSDFIVEFKSSMVFKNSLTGFEKLSNWALKLSLESSELYYVMEATGVYHQKFAYWLHGKSYKVVIVLPNKISNFARTLEIKTVTDKTASEAITKFGLSRSLDSWQPPLELYRNIKQLTRERDQIVAERTVIKNQIHAENSEAYPNKRTLERLDARKKLLNVQEAQIKKEIEELIASNQDVKESIENMTSIPGVGRLTAAVVIAETNGFELIRNKKQLSSYAGFDIKEKQSGTSVKGKPKISKKGNKYVRKAMHLPSLTAVRHCQIYKDIYARLVGRHGVKMKALVCIQRKLLELMFILFKNQTTFNAEYEEMKKVLLHNATEPSNLALS

SEQ ID NO: 274285 - protein, 342 aa, unidentified
MSISYVGVDLGSSNFHQVAVNHSGRPTRNREFTTSEANLIKAFADLHGEIHVHLEAGELAPWASEIIRPLVTRVVCSHPQTNAWIARDRDKCDRIDAYKLASLLRLNEFKEVHYPREPLRRDFKTLVHHYDELTQQQARWKTKLKARLRMQGIIVRGEEVFSARGRQAVLEQVKSPVVRTAIKQLYAVLDQSISSQSEAQMLMLRAAQALPEMKILRTAPGVGPIGACRFSAYVHTPQRFSSTRKLWKYCRLSVSHRSSNGKPLRRPRLDRMGCGLLKDVSRKTFEAALRRRDNNGFKRAYYRALETTHDATRARLTVQRKIVSTLRAMWINQTPYCDELMR

SEQ ID NO: 274286 - protein, 452 aa, unidentified
MTTPNCEPRFVGLDVHKREITYCILDAAGAVVSQGKFVLNRDKLKNFATKNLLAGDRVALESTTNCWAVAEIVQKHVARVVVSNPMATKAIAHSKIKTDKVDSRVLAHLLRCDFLPEVWQPDVATRLRRQLSGRRASLVGGRTQLRNRIHSVLAMRLIEPPVKSLFGKEGRQWLDRLSEKQIDRDGLGMIESDLRQIDALQLEIDRFDQRLAELAYEDDRVKLLMTMPGVSVIVAQSLVAAFGDITRFATADKAASYLGLVPSTKQSAKTCHHGPITKRGNSNARWMLVQAAQHMLRQSGPLGHFFRRLKRRKNHNIAVVATARKMAMIAWHMLHANEPYRYSSPRSTETKLARLRVTVTGKRRRNGVAKGEKATAKLPGGSRTIQSLDTIYAQEGLPPRQPSPPGEAKHLAQTDTTDFVQAIAQKQVIPRRKGVKRQASSDNPTKPQKQNC

SEQ ID NO: 274287 - protein, 377 aa, unidentified
MTTTDAATEARETVYVAIELSKKTWVLGIAHPDRDRPSIHRVSGGNIAELVSRLRVAARNNRRILVCYEAGYDGFWLARALAKMGIECRVLDPASIQVNRRARRVKTDRIDVLALLRALIATDRGERHVCAIVRVPSVEEEDARRSHRERQRLVRERTGHINRIKGLLFAQGIRDIKPKLRRSRIDFAALETAEGHPLPDRLRRELEREYARLSLIATQLREVEKERDTADAQDPVVEQRRQLLVALHGVGATSAAILAREVFARSFASRRQLGSYLGLTPSAYDSGSTTRCQGISKAGNSWARRILIEVAWLWQKYQPASPLSIWYIQRTAGQSSRIRRIMLIALARKLAISLWRYVETGLVPEGVAIAKAKLRPA

SEQ ID NO: 274288 - protein, 373 aa, unidentified
MPRYSTAFGMDVHLRSTTVCALDAETGETVTRRFRGNPWGEVAEWMSGFPGPSLAAYESGYLGFAPQRELSGLGVDCVVAAVSKVPRSAADFSSKNDRNDAARMAKAILSHDISPVWVPSPEIEGLRDLAGAHDAATARLAAAKQRLLAFLARRGYAYGGTTPAGNPRKYWTYDFLRWLDKVRPADDGGIRALAALRSEVEAASETRDDLLAEYRAAVAAGPLSAEVEALQSIKGCGFALAAAFASEVGDFSRFRSGRQVTSYFGLAPKQRSSADSVRLGGISGAGNALVRRLAVEGSWSYVQAGHQPKLMPKGSGVPLEVRMHGRKGSERLLRRREEMLARGMPQAKANAATAAELVRWLWALGAMCREATE

SEQ ID NO: 274289 - protein, 324 aa, unidentified
MHILGIDIAKEKFDVTLLGGPQPVSGQFDNDAAGFDRLQRWLQKRQVEQLHACMEATGAWWEALAFFLHEAGYRVSVVNPKLIKRHAESIMQRNKTDRQDAATIADYCLRQTPELWSPPPEANRRLRALVRHLQSLKEDRTRETNRLKAHVSEPAVHDLIEQHLRFLDQQIATLQQEIADHIDHHPGLKEDKMLLTSIPGIGDLTAALFLAEVPDVTRFPQAGQVAAFAGLTPAQQQSGSSIRKPARLVKWGNRHLRSGFYMPALSAHRFNPLIADLRERLLLRGKSKMTVVVACMRKLIHLAYGVLKTRLPFDPHHTVNVQTT

SEQ ID NO: 274290 - protein, 357 aa, unidentified
MRYIPTDAAGITLGVDTHKDFHVAVALDALGRRLGTLSIPTTPSGYEKLAEWANGFGPLESVGIEGTGSFGAGLTRFLRAEGTRVFEVDRPRRRDQYRSGKSDPIDAELAARAVLAGTATTQPKDADGEVEMIRTLRVTRRSAVKARAQAVNQLKNLLITAPEGLRSELRGLSTAKLVAKVSGFRPGANPSDVEAATKFALRSVARRHRRLSEEISELDEQLDRLVAEAAPELVALEGVGTDTAASLLIAAGDNPERLKSEAAFAHLCGVAPIPASSGKSVRHRLNRHGNRDANRALYVIALCRMSREERTRAYVAKRTTQGKTKKEIIRCLKRYIAREVYRIPASVSLSKPPILAP

SEQ ID NO: 274291 - protein, 398 aa, unidentified
MKKNSKRQNVKKQNDVTAQKKHDYSADVQRLLLKLGHKSMAVEGVAYFIGIDLGDRKSNYCFMGRGEGFLAEGQMPTTLEGFAAYFKAIPRSRIALEVGTHSPWVSNLLEGLGHEVYVANPRKMESIRKSKRKNDKSDARTLTRLVRADPQLLHPIRHRGIQAREDLILLRARDALVGARTKLINCVRGLVKSVGGRIPRCSSESFARQAEAAIPQSILETLLPIVEQIAAMTAQIRKLDGQVKKMGDEKYPETALLKQVAGVGDLTALALILTLENPERFAKSREVGPYLGLVPRQDDSGESSRQLRITKAGDMMVRKLLTGSSQYILGPFGPDTDLRRFGLKLAARGGKNAKKRAVTAVTRKLAVLLHRLWVTAEQYEPLRNTRLEDAALAAVANA

SEQ ID NO: 274292 - protein, 352 aa, unidentified
MAKNDFDELMSVGVDIGKDVFHLVGFDKDGQLVLRKKIKRMALIATFEGLPKCVVGMEACLSAHFVSRTLRNMGFEPRIIPAIYVKPFNKGQKNDYNDAEAIAEAALRPNLKTVSEKTQDQLDLQALHRVRSRLVSRRTATMNQIRAFLIEQGITVRKSVAALRTSLQAILDNRSDEISLRMRKLILGLQQDWIWTDKRIEMTTSEIKSVSESEASCQRLMTIPGIGPIISTAVVAAVGTGEAYDRGRDFAAWLGLVPRQHSTGGRTILGRITKRGSRYLRMLFVQAAQVIMMRPKNWHKFSFGAWLEAAATRMQHNKLGVALANKLARIAWSVLNSGKNFDWKEEELATAI

SEQ ID NO: 274293 - protein, 428 aa, unidentified
METSIANSPVVAWAGLDWADQRHEVRLQAVGSEQIESCTVEQKPEALHAWVAQLPARFPQGRIALALEQSRGAVIYALMNYAFLELYPVPPKGLARYRQAFFTSGAKSDVSDADLLLEMVRSHRDRLRAWQPDDALTRQLRLLVEHRRETVADRTRLTNRLGALLKTYFPQALEWAGELRSLAACEFLSTWPSLEAWRAAGRSTQRKFYRRHRRLPAAELEALLDAIAQAQPLTRDRALVEASVLMTQTLVEQLRTVLAALARLDQTLEKLFDQHPDQQLFRRLPGAGDALAPRLAAGFGTDRQRYLKAEDIQQFSGIAPVTEASGKQRWVHWRRACPKFLRQTFHEFADASRKKSLWARAYYEQQRQQGASHHGAVRALAYKWIRILYRCWQSHTPYDESVYLAALRRRHSALWLAAGSLSTQEAQA

SEQ ID NO: 274294 - protein, 401 aa, unidentified
MQDTQQHDAVDVFVGVDVGKGQHHAVALDRNGKRLYNKALPNDEAKLRALIAELKTHGRLLFVVDQPSTIGALPVAVARAEGVLVAYLPGLAMRRIADLHAGEAKTDARDAAIIAEAARSMPHTLRSLRLADEQLAELTMLCGFDDDLAAQVTQTSNRIRGLLTQIHPALERVLGPRLDHPAVLDLLERYPSPAALASTSEKTLANRLTKLAPRMGKSLAAEIVQALSEQAVTVPGTQAATIVMPRLAQQLAALRKQRDEVAAEVEQLVLAHPLWPVLTSMPGVGVRTAARLLTEVAHKAFASAAHLAAYAGLAPVTRRSGSSIRGEHPSRRGNKVLKRALFLSAFAALRDPVSRAYYSRKIQQGKRHNQALIALARRRCDVLFAMLRDGTIYQPKSAPNA

SEQ ID NO: 274295 - protein, 317 aa, unidentified
MENSLQSTWIGVDVAKRHWDVVVAGQTQVHHFPADQEGCQQLQQFLAQHQVTHACLEATGGYERMLADFLREQGIVVSIANPRQIRDFARAQGQLAKTDRLDALVIARYAVLMQPKKTKKPSENERKLGSLRTRRQQVSDALTREKNRLGTQHDDLVRQSIEEAIDFYQRQLEQLDQQIQQLLQADDQFRERSALLTSVPGVGATTAAALIAHLPELGSLNRGEASRLAGLAPINRDSGTLRGKRMIGGGRAVVRKMLYMPTLVATKHNRVIREHYQQLLQRGKAKMIALTACMRKLLLILNAMIKTNSTWNDPRET

SEQ ID NO: 274296 - protein, 353 aa, unidentified
MLIIGCDFHPGFQQVAIFDNLTGECQERRLGHREEAEQFYRSLAGQQVRVGMEACGHYPWFERLLEELGFELWLGDAAAIRATVVRKQKTDRRDADHLLMLMRENRFPRIWVPSLEERDVRQLLVHRHKQVQARTRVKNQLQAMALSQGVQKKRKLWTAAGRPELEKLELLPYAAERRKQLLQALDGLDAEIEQLNRRVEEEAQKRPAAVKLQTHPGVGPVTALAMVLTLGPAERFPSGKQVGSYFGLIPSEHSSGGQQKLGHISKQGSSFLRFLLVEAGQTAARYDAELGRFYRRLAVRKHRALAKVAVARKLAVRLYLMLREDWTYAQLCRAVVQASPSHPVVGRQNRALE

SEQ ID NO: 274297 - protein, 321 aa, unidentified
MTYIGIDVSKDSFVVAYSPEKNSRTRTFKNTTKGIHEFIQTISKDEHHCVMEATGNYSALLVYLLSEAGITTSLENPLKVKNFARAMLSTVKTDEIDARLIALYGEKMQPAPYKLRSDAILTLKQKRTVIRQLKKQLIATRNLKGSMEVLPFFDAKCKKSIERTIAFLEKQVKDLEEDLSSLARSEYKKQIDLLTSVKGIGVTLAAALIMTTGGFTYFDNAKQLTRHLGLSPTYQQSGTSVNFKGHINRNGDSSLRSQLYVAAFASLRCNTECKACYDRLRSNGKPGKVAVIAVANKLIRQAFAVVTQEKPYVDGYVSSKK

SEQ ID NO: 274298 - protein, 324 aa, unidentified
MSDPIKNNYTMIGVDVAKLKLDIAIDDKKVLTIDNKEESFKKLLKIIPDIDQVCFVMEATGGYERKLVSFLQSKGIAVAVVNAKRVRDYANSMGAYAKNDHIDAQMIRHYAQAAFAKNRLKLRESRTEIAQQLEDLLRRRNQLVGQRAVEKQHLEATINKESVRSITRMIKQFEKEIERIEVKIKAYIEADDNLKKSMEQLIQVQGIGEVTVLTILTQLPELGKLSNKEIVALVGLAPYCKDSGKKTGRRAVFGGRMLIRSTLYMATLSAVRYNKPIREFYQRLIAHGKLKKVALVACMRKLLTILNSMAKTESEWNPDFAKTA

SEQ ID NO: 274299 - protein, 341 aa, unidentified
MQVTTVGLDLAKHVFQVHGIDQNGQVLIRRQLRRGELIGFFRRLPPCLIGMEACSTAHFWARELAALGHEVRLMPAAYVKPYIKRGKSDALDAAGICEAVTRPTMRYVAIKSPEQQAVLMLHRTRELLVRQRTMLVNALRGHLAEYGIIAPQGLPSVPKLREVAEKARGAALPDLAWRCVRLIIAQLEEAHVQITEAEQEILAWHRTNEVSQRLETIPGVGIITASALAATISDPGSFRSGRHLAAWIGLVPRQSGTGGKVRLGHISKQGDRYLRRLLVLGATTLLRHARGKASAAAGWINALLARRPAGIVKVAIANKLARVAWAVLQGNQGYRAPTAAA

SEQ ID NO: 274300 - protein, 422 aa, unidentified
MASEPSRVIAGIDTHADTHHVAVINEHGKPLADREFLAVGSGYRKIIDFITSYGTVTAIGVEGTGSYGAELARTLRGEGLTVLEVNRPNRAARRLKGKSDPLDAYQAAKSVLEGRTKAIPKAKDGPVECLRILRSGRASAIKARTAAINQIKALLVSSPDNVRAKYRALPTSALITALQRTRPSGHLADPEYVTLLTLKALAARCQSLGTEIEAADAALKEVLDSYAPMLCDLPGVGTEVASQLLITVGDNPDRLGNEAQFASLVGVAPVPASSGKTTRHRLSRGGDRNANNALHQVVLVRMGSCQRTKDYVLKRTTEGKSKREIMRCLKRYAAREIYRQITNPRPAPDNSDLRRMRTDLGLTITTVAGELGQWVSIISRLERGHIRNDELAATYRQWLTQQTAAHLHVREAGAEVGGSLVS

SEQ ID NO: 274301 - protein, 349 aa, unidentified
MIRNKPRGATVYGIDLGKNIFHVVGTDSAGNVVQRVKFRRDTLRAFFERAERAVVGMEACPGSQWLARKLQAMGHTVRIIPAQFVKPYVKSHKNDTIDAAAIAEAVTRPTMRFVQVKQPEQVDLQSLHRIRDQMVGSRTRLICQMRAFCLEYGVAIRQGAGLFKSDLPRVIADECNDLTPTMRRLLNELFEDLMRLEKRIAQVTREIEALAARDEKARRLMTIPGIGPLGATALLAAAGNGQQFKKARDMAAWLGLVPQQYSTGGKTQMFGISKRGNRYLRRLLIHGARSCVMHLDRSRDRLGAWLRQLHSRMHVNKVTVALAAKIARIAWVVLNRPGAIYERRDPALV

SEQ ID NO: 274302 - protein, 437 aa, unidentified
MRRKKNKASKSVNLQVLPLVHRNAAGIDVGAKEHVVAVPCDRDPRPVRTFQAFTPDLQELAAWLKRCGIETVALESTGIYWISLYEVLEQYGFEIRVVNARHVKHVPGRTKTDVLDGQWIQKLHSFGLLNGSFRPDQQIRKLRTYMRLRDNLGVASTQAVHHMQKALFEMNVQLSNVISDITGETGLQIIEAIIAGERDPKQLAALCSSRIKASRETVAKSLHGNWEEALLFALKAALETYRFNQTKIQECDCRVQQHLAQFESRSQLTNTLQNLRTQLHRVCGVDLTKIPGIKEQSAQIIISEVGLDMTKWKTEKQFCSFLGLCPDNSISGGKVLHRATRKVYNRAADTLRLCAQSLTHSKSALGAKYRRLKARLGAPKAIVAMAHHLARLVYRMLRYGQNYVEQGIHQYELKFQLQRIKWLKKEAKSLNLQLVPA

SEQ ID NO: 274303 - protein, 418 aa, unidentified
MTEEIEWFVGIDWASENHQVCLVDARGKCLGERTVSHSGAGVEELCDWLLARTGAKPEAVAVAIEMPHGPVVEALLERGFRVHAINPKQLDRFRDRFTVAGAKDDRRDARVLGDSLRTDRHAFRPVSVDDPVIVELREWSRIAEDLSQERSRLTNRMREQLWRYYPQMLTLGTDDCAAEWLLDLWSQAPTPAKAARLRESTIERVLKAHRIRRWQAAAVLQVLKQKPLPVAPGVAEAASAHIRTLTARIRLVNQQLRAAHRKLDELCDRLIAPAESKPEQRSEQHDVVILRSMPGLARIVLAVLLSEAWQPLRRRDYHVLRCLSGVAPVTRRSGKSWVVVRRHACNKRLANALYHWARVATQHDEISRQRYAALRARGHSHGRALRTVADRLLSVACTLLERQTAFDPAYKLPQAAAA

SEQ ID NO: 274304 - protein, 367 aa, unidentified
MNKLYIGLDVHKASTSVALAFSGSGEPEHYGKAPSDLNGFMRVLRRIEKRHLLTKEQIRLCYEAGPTGFVLARRLRHLNYDCMVTAPSLIPTRSGDRVKTDRRDARKLAGLLRAGELTAVHIPDADDEIIRDVCRARTDAVAEQTRCRQQLGALLLRNGYHYTGTSNWTEEHMRYLRELVLPDPAQKMVLEEYLQRLDASVQQVARIDLQMTQLLEHWNRRPMVEALQGFRGFQQTAAMILVSELGALNRFDHPRQLMAYVGLVPSEDSSGGRRRQGSITKCGNSHARWILIEVAHHYQLPPKVSKELSKRQEKLSREIRDLSWRAQNRLSSRYHHLSRRGLHPNKIKTAIARELLAFIWELAQMMH

SEQ ID NO: 274305 - protein, 312 aa, unidentified
MEKLSYGGIDVSKDRLDVVVLPEGWFFSVSNDTAGWTELVARLRPLAVCAIGLEPSGGYERGIIRALLAARLSVRRINPNKLRQFARARGVLAKNDRLDARLMAEYVAIMPTRAVQRDDAVDRLAEVVTMRRQLCDEHVTVENQTAHLEDAMLRRLSKRRLVRLEADIRLLDKRLAEMVATNAAFARLYELLTSMPGVGPVLAFTLIALLPELGKMGRKQIAALVGLAPYDFDSGKLRGHRSIYGGRMPIRNVLYMAALSASRYNPALKSFSNRLAHANKKSKVIIVAVMRKMITTLNAMLRDNAVWQPQSN

SEQ ID NO: 274306 - protein, 348 aa, unidentified
MTKLARIGIDTSKSVFQLHGVDEKEQAVLRKQLRRRQFVVFFAKLEPTLVGLEACGASHHWARELQQLGHQVMLIPPQYVKPYVGRNKNDKTDAEAVCEAMSRPKVQERLVPIKSVEQSAAQMLLGVRESLVKRRTQLTNTIRGHAAEFGLVAAKGLDKIEPLLARIAADAGLPALTKEMFAVLGREYAELGPRIAQIDNKMLAFHRSNEVARRLMEVPAIGPIGACLLVTKIVDPHAFRSARRCAAWIGLTPKDHSTAGKQRLGGITRAGDERLRAVLVSGATTCIQHARNRRGRPSPWLVELLKRKPPKVAAVALANKTARIAWKIMTSGERYDPNRCAARRGLAA

SEQ ID NO: 274307 - protein, 386 aa, unidentified
MYYVGIDVAKDKNDCIIIDSEGKPVIDVFTFENNKMGFEKFYRSVASLLPIEVRVGLEATGHYSLNLIDFIDSKQLPLIVLNPLSVNLYRKSTTLRKTKTDKIDCLIIAQMIHSGEHKSYSPVSYPLRELKTLTRHRYRLIQDQSRIKVSITRLVQILFPELPNHFWSIHQKSSYELLKRYPSASLIADLHLTTLTNILAKSSRNKYSKDKAVEIRDAARNSIGSERTSFQLELTQNIAIISAFQKELKIIDSEIKKSMDEINSVILTIPGISYTLGAIILAEIGDISTFDNPSKLLAFAGLEPGISQSGNFISDNQKMVKRGSKYLRWAILQAARLIAMRDPVFNEYMHKKLNEGKHYNVAKSHVARKLIRVIHKLLSSNTEFER

SEQ ID NO: 274308 - protein, 415 aa, unidentified
MALKIVYKICCGIDVHKTFVVACIASTNKQGVTSYERHRFSTYTKGLKNLLQWLLDRNCKDVCMESTGKYWIPVYNILEKDCSIVLAHPKYVKAIRGKKTDKKDAKWIADLFKHDLVAGSFMPPADIRQLRDLMRYRFKLTCFKSSEKNRLQNCLTVSNIQLGNVVSDTFGKSAQAILDKILENPEDTSFDLEPLVFKSLKKKLPELRDAIDGYITPEQVGKLKVIKAHYESLESRKAELEELILALAAPYQQELAILQTAPGIRSDFTAIGIISEIGTNMEAFPSAKHLCSWAGLTPTSNESAGKKKSVRVSKAGCYIKPLLVQCANAVVKSSKHPEMRNRYLRLKKRRGHKKAIIAIARMLLTALYHMLKNGENYNAELYRKSDLPPVDREITVEQAILIVRNQGYKIKSATA

SEQ ID NO: 274309 - protein, 407 aa, unidentified
MDLPAIFRTVVGLDVHQAQISACVMIELPDGTLTVEHQEFGAFKRDRQSLAEWVRTLNPDVVVMESTGIYWKSPYAALEKVGIAAWVVNARHVKNVPGRKTDVADAQWLATLARAGLLRASFIPPSDIRHLRLIARQRQKLVGMLASEKNRLHKLLTDAGIRLNVLVSDIHGQAGRAMVKALIDGKPIPVILDLAGRLRASRAELFEALQPEDLSNHHVFVLSEIMAHIEELEARIGRFEQALLAGLSTCEPQLVLLQTIPGIDRIGAAMLLVEVGTDMESFGSAERLASWVGICPGNNESAGKRKSGKTRKGNAWVRRLLCEFAQAASRSRCGLKDKFKAMSLRKGHKKAIVALAHKMLRIIFAMLKNNTPYQDQAVDYEALQVQRNAPRWIKMLVKHGFIPTVST

SEQ ID NO: 274310 - protein, 389 aa, unidentified
MLLDHLSDGLTAIRTQFGAIFVSLELSRSNWLVTSLSPGKGEKMSKHSVKAGDVAGLMKLFADLRRKAEARTSESYPIITLQEAGLDGFWLHRVLQQNGIESHVVDPASIATPRRHRRVKTDRLDGEMLLRALLAYRRGEPRVCAMVVAPSPEEEDRRRICRERRSLIAERITHVNRIKGLLFAQGISDYEPLRRDRRARLEALRTGDGRQLPAHLKAQIGRELDRTELLLEQIEAVETERDAMLAAARKPASEEAAPDVVTMLLALKGMGANFAAVLWSEAFYRQFSNRRQVAAYAGLAATPWQSGGIRHEQGVSKAGNPRLRTTMIQIAWLWIRHQPQSALTRWFKERSPQGRKRAIVALARKLLVALWKYVTQGVVIEGAVMKPAA

SEQ ID NO: 274311 - protein, 426 aa, unidentified
MSEVEPKQEPQFVVFVGIDWADEKHVWCLQAAGSQKRESGELEHTPEAVEAWVGQLCQRFGTGPIAVAVEQSRGALVFMLSKYEPLHLFPVPSTMSASMRKALYPSGSKDDPRDADLLLDLLLQHRDKLRRLSPDTEATRRIQNLVEERRKLVDEKTAQTNRLTGDLKIYFPQMLDWFERLDTEQVCALLERWPTLEKLQRVPPRELRTFFRKHHCRDQELIEHRILAIRQALPAIQDRAVIEAKGMVVKVIVQVIAHLVQGIADLDKKIEEAAEAHPDFFIFDSLPGAGAVLAPRLLAVFGSQRERYDSARELQCYSGIAPVTQKSGKMKWVHFRWACPKFLRQSFHEWASHSIAYSVWARSYYQQLRSRGKGHHAAVRALAFKWIRVLFRCWKDGVAYDEGKYLASLARRGSPLSAIVATGKTL

SEQ ID NO: 274312 - protein, 343 aa, unidentified
MEHYVGLDVSLKQTSICVVNQAGSVLREGVVDSDPDAIGAFVRSNAPDVVRIGLETGPTATWLWTELKQLGLPVICIDARHARAVLKMQINKSDRNDAAGIARIMQTGWFKEVRVKDLDSHSVRALLASRALLVKIKRDLENQIRGLLKNLGLVIGRAKFNVFAVRAEELIEDRPELIAVVGPLLKAREAIEQQIDDLDRKVLKLARYDAQVRRFMTVPGVGPITALCFKATIDDPTRFKRSRSVGAYVGLTTRRHASGEIDWTGRISKCGDAMLRSYLFEAAGVLLTRVPKWSALKAWGMRLAKRNGLRKATVAVARKLAVILHRIWVDGTEFNWSKKEVAA

SEQ ID NO: 274313 - protein, 364 aa, unidentified
MEAPVKVQRTSIGLDVHARSVVACGLDGDTGEVFRRRLCPDHGEILDWVQGLPGPVAVTYEAGPTGFGLARVLIAAGIDCRVAAPSKLQRPPGDRVKTDARDAAHLARLLHLGQIVEVTVPSPAQEAARDLVRAREDCRGDLMTVRHRISKLLLRQGIVYYGGQAWTGNHELWLRSQRFDALGLQLAYDTAMDAMIAGVHRRDRLDKAIVAMAADSEFTPVVQRLGCLRGVSTLTAFGLAVEIGDWHRLTGRSIGAYLGLVPCEYSSGDTRVQGGVTKTGNGHARRLLVEAAWHHRAPYRPSRDLRARWTAAPAAAQARGHAANHRLHDRWTGFDARKKRSVVANAAIARELAGWCWSLAVLDD

SEQ ID NO: 274314 - protein, 362 aa, unidentified
MARLALHREDVIVGVDTHKDAHVAVALDGLGGWLGQQTVAASPDGYAALVAWATQLGAVSRFGVEGTGSYGSGLARFLRRHSHVVIEVSRPPRKGERRRSGKSDAIDAEHAAREVLAGTARAVPKLADGAIEAIRLLKIARDTAVKAHSQAMITLKATLVTASDALRAELEPLSAFRLIQACAALEADGPIADPAVAMRQVLRSLAQRWLVLHDEIKMHGAHLKTLTKAAAPELVAAFGIGPDIAAELLVTAGENTDRIRSEAALAKLCGVCPIPASSGKTSGRHRLNRGGNRQANAALDRAVVVRMRWHPATMAYVERRTTEGLSKKEIIRCLKRYVVREIYRLLPAPSSSTGFTSDDRTT

SEQ ID NO: 274315 - protein, 346 aa, unidentified
MEYIALDVHKKYTWARVENTKGDRLYESRLQHAHGTIKNFVNRWSAGSPVAVETVGNWYWVVDEIEAGGGQPQLVNARLAKLMMGSVNKSDKLDAKGMNRLQRTGTLPVVWIPPSSVRDARELPRTRMVLSRQRTQLKNRVHATLGKYGYTVEGASDAFGKKGRQIVAELMAKLPPHTEQALGRVLDQLDHVCENLQWIEAKMREVYAPCPQTTWLKTLPGVGDILAVVIWTEIGTIERFGRAEQLASYSGLVARENSSGGKIRFGAVRRDVNVYLKWAFVEAANSALLNGERCGYGHISRLYQRLKPRRGHGKAKVAVARHLSEASFWVLKKGEPYREPMSSTQR

SEQ ID NO: 274316 - protein, 385 aa, unidentified
MAPPARPRVVIGLDVGKSAHWACVVTREGELLASRPIPNRENAIDRLYAQYPGALVVVDQVRNIGSLALSRAKLAGMPRAYLPGLAAHGASRLFAGDAKTDERDAMVIAKTALGIPDALLAVADRPPEVEAARSLAAQRDFLTCENTRSKNRLRSILLESCPEFEAQADLSDPATLKLMAAVGGPWSISEASPQSVGALTRGCRRAKVAALAGSVESSSRPHPAAVACEDRAVRLLARRISENDAEIGSLTSEISALLSADETYRCLLTVPGIGPRTASELVISIDIADFPSHDRLASYCGLAPRNRRSGTSISSVSASRQGNKRLKNLLIFSCNCLARSRNRWGEYYARCRDRGMPHGKALKAVARKRLKVIYAVMRDKVPYAA

SEQ ID NO: 274317 - protein, 366 aa, unidentified
MPPMPQPAQPDHDTIATGEVILGVDTHKDIHVAAVITALGAVAASRSFPTTMAGYHQLLAWARTFGTLRRAGVECTGSYGAALARHLRAAGSNVIEVNQPDKATRRRRGKTDTIDAQAAAQAVLSGRATATAKTGDGPVEMLRMFKLAKGSAIKSRTQAINQLKAVLVAADPAVREALSGLSNPILIRQCAQLPADPPGDASSAAAWTLRLLARRILELTAEIDDLNQQLAHAVNRHTPKLLARPGVGPDCAAALLIAAGDNPERLGSEASYAALCGASPVQASSGKTIRLRRNRGGDRQANAALYRIALSRLRWDPHTRAYLAQRITEGKTRREALRCLKRYIAREIYQLICEPKPDPTASPIAT

SEQ ID NO: 274318 - protein, 405 aa, unidentified
MDAAISSRVAGLDWASRLHAVCVLDPDGQVRARFDVPHTGSELRGLTRRLVRLGVGQVAIERPDGPVVEALLAAGLEVVVIPGRQVKALRGRYGTAGNKDDRFDAYVLADALRTDGHRLAPLQPDAPQTVALRVVSRARKSLVATRVALANELRANLEISFPGAATLFSDVDSPIALAFLRRFPSVTQAAWLTEARLAAFLRRMGYPGRKAAAELLGRLADAPAGLTGPEGEARATVTLGLVAALDTVRAQIDEFEGEVVERLGTHPDAAIFTALPRSGRVRAAALLAEIGDCRARFPDAESLTSLAGAAPSTRQSGKHKKVVFRFACDKKLRAAVMDFAGDSRHDNPWAAHLYQQARARGHRHAHAVRILARAWLRVIWRCWQDHTPYDPARHGSYQRLIAQQA

SEQ ID NO: 274319 - protein, 411 aa, unidentified
MEVLYRCCCGLDVHKKTVAACLLTQEEKGVKKEVRTFGTMTAELEVLREWLRQAGCTHVAMESTGVFWKPIFNILEGSVDVLLVNAQHIKAVPGRKTDVADCEWIAQLLRHGLLRGSFVPSAGVRELRDLTRHRTKLVQEQTSVANRIQKVLEDANIKLGSVATNVLGKSGMAMIEAIVSGVTDVESLAALALGRLKGKTEVLRLALEGHVTEHHRFLLKELLEQWRYLEQAIERVSEKIKEKRRPFEEAVHRLDTLPGIDECTAEKMIAEIGADMSQFPSEKHLASWAGICPRNNESAGKHKSGKTRKGSRWLRGALTEAAWAASRTKHTYLKAQYHRLAARRGKKRAIVAVGHTILIIAYHILRDEVSYQELGEGFFDHLHTERLTRSLVNKLESLGHKVTIEPCSVAA

SEQ ID NO: 274320 - protein, 366 aa, unidentified
MQKVSTMRTSGKSVFEGQLTIGVDLGDRSSAYCVLNEAGEIVLEHKLATTPEAMKQVFGSMPRCRIAMETGTHSPWVSRLLTALGHEVIVGHAQKVRLITKSRRKDDRLDARTLARLVRIDPELLSPVKHRSAQAQLHLAEIRARAVLVSARTALVNAVRGLVKSYGERLRKCGTQQFRRETISGLSAGLREALEPLLREVESLSERIQEYDRRIARMAKQTYPETALLKQVKGVGDLIATTYVLTIEDPHRFRKSRDAGCFVGLQPGRRDSGDSEPQMRISKEGDEYLRTLLVQGAHYILGPFGEDSDLRRWGQKLSARGGKNAKKRAVVAVARKLAVLLHRLWVSGEVYEPLRNSQKKVVRTAA

SEQ ID NO: 274321 - protein, 339 aa, unidentified
MQLYAGCDLHSTNNYWSIIDNDSKQIFSKKIPCHPQKILKMLEPFKPDLAGIAVESTYNWYWMVDLLMDEGYPVYLANPVAMKKYSGLKHSDDNHDAFWLAEMLKLGILPQGYIYPKKERPIRDLCRKRLQFVRIRTSLILSLQGIISRNTGQKISASKIKSLPQEAITELVNKDDNLMLSAAMSKVAIDNTTRQIKDLEKILTNQHKLKPQYQNLLTMPGVGPILSLTIMLETGPVSRFKQVGNYASYCRKVDSKWTSNNKNKGKGNKKNGNKYLAWAFSEAAEHARMFSEPAKRFFEKKMSQKNRMVAHGSLAHKMARAAYYIMRDNVPYNPQRMFS

SEQ ID NO: 274322 - protein, 429 aa, unidentified
MNEVDSIRLEQFRQIRKEIRGSIEYLIVGIDVAKFKHYAFYGTANGKTLLKRMIFENTLEGFQKLRVQEDALKVRYGLEKVIYGFEPTANYHKPLGEYLIRCGRNVVLVAGTSVKNNRKTMDGRWDKNDTKDAAVIADLICQGKFLFYEYPSMPLRDLRNLLSLKRRLKKQEHGQKVRIRNHLLAQYFPELDAYYGNWGKEGLAIVRWCLDPSVIAGLEYEDFVRRVAPDARGSSYKQERLRAVWEKAVNSIGCRAGDSLDVEAKLMVEGLAYIRDSIREVEDNIEEVCSCFPEYRCLLSIPGFGPDIASRVIAAIGNPFRFDNQRQVLKMAGMDLSANRSGKTSDNATPRLSKNGNAYLRYALYQASMIASYRSTPFIQYFTDKLRGREKEKGIKTKMRVKLAAKMLIISWTLMKKREEFDPKYLSID

SEQ ID NO: 274323 - protein, 457 aa, unidentified
MPARRKKPRSGPVSPAHTIDPNAAGIDIGAAEIYIAVPSDRDPHPVRRFATFTEDLMAAADWLQQCGIQTVAMESTGVYWIPLFQILEARDMKVCLVNARHVKNVPGRKSDVCDCQWLQHLHSAGLLRASFRPEQQVCAVRSLVRYRDSLVQLSAMHLQHMQKALDQMNLQLHHVISDLGGKTGMAIVEAILAGERDPHQLATLRDPRSKASQETIAKSLVGDYRREHLFTLRQSLTGFRQNSQLIADCDVEIESLLKEFPSGDGPGAEAVPEPQADLKRKPRRNEMSFDLRTQLHRIFAVDLTEIPGINTLTAHTLFTEVGRDLSKFPNVAAFTSWMGLCPDNRVSGGKILHAHTRKVNNRVAKALRMAAQALSRSHCWLGQYYRRMRAKLGGPKAVTATAHKLARIVYHLLTTGQTYDETVFTQQEAQNKQRNESRLRRQARQLGYELTLIPTEM

SEQ ID NO: 274324 - protein, 452 aa, unidentified
MEEPQEVQDEEYERVWERVAAVDVAKASGVVCTRVPDEARPGRRRTRVWTVTAAVNAVTELADHLRGHQIQVVTLESTSDYWRIWYVVLEAAGLRVQLVNARAVKNVPGRAKTDKKDAVWLAKLTERGMLRPSFVPPYDIRRLREFTRLRADLVHERTRYWARLEKLLERALIKISAVASSVDTQSVRAMIEALIAGQRNPKALADLAKGRMRAKRAQLAEALHGRFEDHHGELARIILDQIDALTTRTGQLSARISELIEAIPAAQGVDADGATGPGAGTGPGAPVLPAVARLDEITGCGIIAAQAVLAEIGLDMTVFGTPGRLVSWARRCPQTRQSGTKTTTGKAGKGNPYLNAILGEIAASAGRTDTFLGERYRRLARRRGKRKAVTAVARSVLVIIFHLLADPQARYHDLGPDFYDNRISTERKIANHVRQLQALGLTVTLTPADAAA

SEQ ID NO: 274325 - protein, 418 aa, unidentified
MKKHSNSGKKSEPTTKRAKSRGPVQRDTKEVLAELVGKLKEKLDPTKVAATSAREKHRRGELRPNLDRLTVGVDLGDQWSHYCILGLEGETLAEGQLRTTQEDLAEFFQALNAARVVFEVGTHSPWVQEVIGGCGHEVLVANPRMMDGSKRRKRKNDRIDANKLARLGRVDPQSLHPIQHRSREVRQDLVVLRARDALVAARTELINATRGLVKSMGKRLPKSSSPSFAQKAEEAVPVEIREALLPLVRMAAALSDYIQGYDEKIEKLGRERYGHTALLRQVKGVGPITALAYVLTLENPDRFVKSRDVGPYLGLVPKQEDSGEIQPQLGISKTGDTMVRKLLVGSAQYILGPFGPDTDLRRYGLRLCERGGKNAKKRAAVAVARKLAVLLHCLWVSGEVYEPLRQGTSATIAPAVAA

SEQ ID NO: 274326 - protein, 342 aa, unidentified
MKITTIGIDLAKIQFQVHGVDERGNATLKKPLRRGQMVTFFANLPPCLIGMEACGSAHYWANKLQALGHTVKLMAPQFVKPYVKTNKNDAADAEAICEAVSRPNMRFVPIKSPEQQAVLALHRARQGFVKARTAQANQIRGLLAEHGIVIPRGIAYIGRHLPEIREDGENGLPDLFRQLIARLSDHLKELDRQVCELEAQIQAWHRESAASRKLAGIPGIGPLTASALVASIGDAGQFKNGRQLAAWLGLVPRQHSSGGKQTLLGISKRGDSYLRTLLIHGARAVIRVAERKAQHTGSWLAGVLERRHKNIAAVALANKNARTVWALLVHDREYRAESRVTA

SEQ ID NO: 274327 - protein, 368 aa, unidentified
MVPTMPKRIALSNPDRAGEPLLVFGGVDTHADTHTVAAISHLGAMLGHQSFPATAKGYRQLYGWLAGHGTLMRVGMEGTSSYGAGLAAALTGHGVELVEVNRPARTTRRARGKSDPIDAEAAARAGLAGVATAVPKTHTGVVEEIRVIFVARRGAVQARTAAINTLHQMIITAPLQLRAQLQPLTRTQQITACAALHTGDITSPTRATKLALRRLARRIGHLTAEITDATNDLTTLVQAHAPHLLTQVGVGSLSAAQLLITAGDNPDRMTSPASFAALCGTSPIPVSSGKTNRHRLNRGGDRQANCALHTIVLSRLRYHPETQAYAAKRQTEGKTERDIRRSLKRYLARRLFTLILTASQATDNTLAA

SEQ ID NO: 274328 - protein, 355 aa, unidentified
MNDAKYIGLDVHQATISVAVLDSAGKLMIEAILETKAETILQFIHGLHGSLHVTFEEGTCAAWLHDLLKPHVTQVLVCDPRKNALIKAGNKSDRIDARKLADLLYLNKLNPVYHGETGIRTLKEVARSYLALTRDTTRVMNRIKALFRSWAIPCAGQRVYAPRDRSEWLAKITETGVRRRAEIYYQQLDALRSLREQVRRDLLAEGRKHSAMKLLRQIPSIGPIRAVLLIALMQTPHRFRTKRQLWAYCGLALKTSTSGEYRIVEGRLKRSKKFLAIRGLNQNHNHDLKNIFKGAATRAAAVPGPFQEFHAGLVARGMKPTMARLTLARKIAAITLIVWKKGVGFDAEYLKQQAA

SEQ ID NO: 274329 - protein, 411 aa, unidentified
MKKTLRRVGIDWGSESHQVCRIDGEEEPKQRSFPHTGEGLSALVAFVVEGEIDGEQIAIAIEVNHGAVVEALLAKGLRVYSINPKLLDRLRDRFSPAGAKDDRRDAFVLASCVESDAHAFRRIELGNEENTRLQAATRLREDVKSELRANANRLWNELREYRPALLTLCPGADESWLWVLIEKAPSPSEGAKLTSSRIGAVLKKHRIRRLTAKEVRTALRGDVLSLRSVYIESHVARVLVLIARLKLAQAQIVTIEKQIKTALAERVKSEEQTERRDLTILLSLPGFGSLTVATALGESGDAFERRDYNALRSICGAAPITKQSGGTRYVVMRQVCQPRLRVALHLSALQAIRVDPKFRDLYLRARARGQTVGRAIRNIADRLLFLAVQLLKKNQLYDISLRQIADVAATA

SEQ ID NO: 274330 - protein, 357 aa, unidentified
MRTIGLDLAVQTAHKAVVLDEGGHFCSPILTVHTRPSDLDQLLARARDGAPSTDVQIVMEPTGMAWFPIAVYYARQAVPIYLVNSQEVADLRRYYKRHAKSDRIDARVLARLPLVNPDKLHRLVLPAATAFACQRACKQLDHFATQITAVKNRLQALDRFAWPGLEEAVFADPFAPAARFFREHYYDPRQVVQAGANTIRQQWEVSGLDGDDGGAWVERLLTLAQQVLTLYGTDGQYLDFEQLQTEVQRDQAWLMWLEQQHHTVRMHTVRPLYRAVHPSRNLETLKGVGQDSAAVYASFIGDPRRFRSMRLFRGWTGMVPASEQSAESEAKGLHVSQAGPDLIKKYAYLDADSRHGS

SEQ ID NO: 274331 - protein, 336 aa, unidentified
MNIIGIDVHKEKCELSRINNEGKEVDHLILNTSLNELIYYVKKVKSKTKNEVHVIFEEGELAGWLYRGLKSHAHKVVSSDPKKNSLIYNHGDKTDIVDPLKLARLYSGGFINPVHHIDDEERARFKDIVYTYHQVSKDVIRNKSRLKSLFRRNGIMVKGHGIYNPNNRNEYLSKIDNKECAKVQFEILEMLLDKKATLKRMIKRRSKKYPVIKRLKTIPGFGDIIAPTVFVIIDNPYRFRKKSQLWSYANIGRRRAQSGDKEKSKKQKTGNRLLKKVIGNACSVAMKGDNKLFRKYIELITIKGKDSRIAKRVVYRKILTTAWHIWKNGTSYKDTY

SEQ ID NO: 274332 - protein, 344 aa, unidentified
MDNDTLVAVDLAKSVFEVLVSLRPGKVHKGQRLQRDQVLPFFAQQPAATVIMEACSSAHYWARAIQKLGHKVVLLPAQHVRPYVLRNKTDRTDTKGMLEAYRNDAIRPVPVKSVAQQTLASLHRIRSGRVSDRTAIINRLRGTLREYGLVIPVGAEKVVSYARAYLADADSGIPDALRDLLGELCDEIRMLQTRVREVERKLEILGAETVAVQHLMTVPGIGLLIATSLVAFVGDSHRFPSGRHFASYLGLTPREYSSGSKRHLGRITKRGDVYIRMLLIHGARSVLAHAHRAAQPDRLRSWALELEKKVGANKAAVALANRIARIAWAVWTHDRDFETRTLVA

SEQ ID NO: 274333 - protein, 412 aa, unidentified
MRYIGVDLSDKFFDSCIINQYGDVLDRNQFDFNHDGFASFVKLIQKHYQELQTQHQECIIGLENPRSRLVDFLNQRGYTVMLTQPNAISNYRKSRTPSGAKSDPGDAHLIADYVREHHKNLRKLTIADEDIRELSLLLEDRDRLVEQKVRFSNQLTSTLKEYFPQVLEAFGSIDSKSTIQFLKVIDTFDQIKGTPRKKLEKLLDESGIKRKDSRGRFYQAMKKPGYKVSPALIKAKVRLKNALVNHLELLVNQIQEYEKRIKDLMDNSTDGNIFRSLPGADYILGGKLLVLYSTRDFRNASEAQQLFGTVPYTSMSGNSRYVGFRKGANRLGRNTFQQLARCSIRFSSWANKQFFKKRDQGKSPHHAFRCLANTWVKITFAMWRSKTPYDEDKYLASIARHIINQPAFVNSD

SEQ ID NO: 274334 - protein, 441 aa, unidentified
MNSKSLEAKRHFINGKTIIGIDPAKKKHQAVIIDPVGVPVGNTFKFNNSFYGFHQELFHKLNSYISELSPDKVVFAVEISINLWQKLCCFLCNKGFTVLMVSPLFTHHERPKINNNFSRTDPKDALAVANCARQGYFNFYRQYPSDQNAMHRLSITYDKLKVHMTQTKQRIRSQIELIFPEFINALEIDTDTARYLLSKYLSPKDFLGINIFLEIPEVMKVSGRQHGEATLKALKEAAKQTIGINLTDEELLSERITLNCWLGEYILLKEQIKYVLDQLVALAEETPYFSIVSSLKGISDITAARFIAELRDLSYFDHYKKIEAISGINLKLSQSGQYTGYRRITHIGNHRLRAVIYSMAEETKNHIPEVRIRYLKRQMKQPRYRKNVIASCSNLLKLIVALVKEEHKYEYKQEKQKELAVLELKYKEFKEKKKKNYKKSA

SEQ ID NO: 274335 - protein, 367 aa, unidentified
MKKVSIAATKQSRNISQQKLTVGLDLGDRNSWYCVVDEAGQIRLEQRVRTSAKALQEVFGAMPRSRIALETGTHSPWISRLLSELGHEVIVAHARKVRLIGESRNKDDRMDAQTLARLARIDPQLLSPVKHRSAKAQADLTLIRARAGLVRARTALVNTARGLAKSYGERLRGCNVRNMNPEKAGGLSPELQRALEPLLACIESVSEQIREYNERIEDLAQESYPQTALLKQVKGVGTLIALTYMLTLEDPQRFGKSRDVGCYLGLQPGRRNSGKSEPQMHISKEGDPYLRTLLVQGAQHILGPFGIDCDLRRWGLRLAERGGKSGKKRAIVATARKLAVLLHHLWVSGEAYEPLHNSNRTTVAAAA

SEQ ID NO: 274336 - protein, 348 aa, unidentified
MRFYTQQHKYYCGIDLHARSMYICILDQAGKNVFHKNVRSNPESFLAAIQPYREDVVVAVECMFVWYWLADLCHRESIPFVLGHALYMKAIHGGKTKNDKIDSKKIAVLLRGGTLPTAYVYPEGMRSTRDLLRRRNHLVHKRTELLAHVYNTKSQYNLPDFEKKLSIASHRKGLADRFPDPAVQKSMEVNLQLSELYDRLINDLELYIVRQAKGHNARSFHLLRSIPGIGKILSLIILYEAHDISRFDRVQDFVSYCRLVKCPRESGGKKFASKNSKIGNVHLKWAFSEAACLFLRDNEQAQSYHDRLVSKHGKGKALSILAHKIGRAVYFMLRRKEPSNMDTFFARA

SEQ ID NO: 274337 - protein, 342 aa, unidentified
MSKEGVFMSNDQKNTTTQRSKNETTFVGIDVAKDELVVHILPTNKQLTVSNSKEGIKEIVKLFKEIEPKQIVLEATGGLERALLTNLVANGLAAVAINPRQARDLARGLGQLAKTDKVDAKMLARFAQLECLPVRPVPSEETQEMNDLVTRKEQLIQMRVMETNRSHRATQKAIQKSIAKTIATFEKEIATIEARIEQMIANNPDWSEKDKILQSVPGVGPKTSQVLISALPELGTINRQEIAALVGVAPFCDDSGKRTGARHIKGGRASVRSALYMAAFSAIKHNKTIKEFYERLVADGKKFKVALVAAMRKLISILNVMVQKKTHWKEKNTAKETIKKKI

SEQ ID NO: 274338 - protein, 441 aa, unidentified
MAKVKSKLEITNPNAAGIDVGSAVHYVCVPEGSDEQRIQKFSCFTEDLYNIAKWLKKCKVNTVAMESTGVYWIPLFQVLESHGFEVKLVNAKHVKNVPGRKSDVQDCQWIQQLHSYGLLQGSFRPDDQMCVLRSYVRQRKNLIENASTHTLRMQKALTQMNIQLHRVISDTTGVTGMQIIKAIIDGESNPEKLAELRDGRIKSDKSVIAKALAGNYRKEHLFTLKQEFELYNIYQEKVAECDRSIEEYYKTFETKSDESKKLGEEKNKHRKSKPNFALHEELYRVTGIDFTKIPGLDILTVQTIISEVGVNYNKWRSEKHFTSWLGLSPANKITGEKVFSTRTRKVINRAANAFRMAAHCVSRSNSGIGAYCRRLKKRLGAPKAITATARKLACIFYSMLKYGQEYVERGIDYYETRYKERVVKNLIKKAQEFGYILVQQE

SEQ ID NO: 274339 - protein, 402 aa, unidentified
MSERENKKACIGIDVSKGSSHFQAFYSAGVPASEPTYIEHTKRGFSHLYSIVSDLEKELGYAPYVIFENTGTYSKPVEVFCQRNNLRHYIIAPLLSAKMRKSEIRPTKTDKIDCATIANIYYLKRLRVADKDNELYSELKYLCSYYNYITGVMVSMKVKYREYLDLVYPRIDTLFGVYTESFLKLMTRYPNPHKLNRKSKKDLASFFHKSDYCGLRKAERLAILVKGYFKETEIPVLENDILITLFSKHLKDLIKVMNENQEILDQIILLGMKTKEYPYLISIPGIQKNTAARIAAEIQGIERFESASKLCAYAGIDPTVHSSGKYDGQHLSITKKGNKRLRSLLYLVVAGTSKSKAPNNPVRDFVQKKKSDGLAPKAAIIAGCTKLTRIIFAVCSNETYFV

SEQ ID NO: 274340 - protein, 361 aa, unidentified
MHDSITWIGMDVHKERIHVVAVNEAGHTESRWEAPNTTKGKERLATRLAGLGKARCAYEAGPCGYDLRRFLDRKGIPCDVIAPSLIPTKPGDRVKTDRRDAEKLARMHRMGELTPIHVPTPAQEALRDLVRAREDATEDLVRCRHRLQKFLLRQGRRFEGKSWTRDHWRWIRALSFEDANSETVLAEYLLAVDQQLERVARLDARIEEEAQKPGIAPAVARLKTLRGVRTLTAMTILSELIDLNRFASPRELMSFIGLVPSEYSSGGKQRRGSLTRAGNAHLRRVLVEAAWHYRHPPHRTGETIRKRREGQSPEVIELARKAETRLYRKFTRMVMRGKRTTVAAVAVARELTGFVWAIGRI

SEQ ID NO: 274341 - protein, 360 aa, unidentified
MNRNANHSMSAGQIIGTMNGLQVFGLDIAKQVFQVHTVDMRTGEIINEQLKRAKVLEHFANRVPCVIGIEACGGANYWARELRALGHNVKLIPAANVRPFVTGNKTDATDARGIWLAIQQPGVKFVAVKTVEQQATLTLHRQREQLVKMRLMQTNALRGLLYEFGATFAKGTAALFKEVQATLEGLQSQLPQMVADSLREQVQRIKVIGEDIAKIEKRLRVQLTGDKDMQRVLAIPGVGTLTATAVIATMGEASAFKSGREFCAWLGLVPKQTGSGGKVRLGHISKRGDKYVRTLLIHGARAALCRAKEPSAWLVALKERRPTNVAIVAQAAKMARTIWAVTAKEQEYQRGHQSVRPAMA

SEQ ID NO: 274342 - protein, 343 aa, unidentified
MQSISTIGLDIAKSVFQVHGVDADGQVVLRRQLKRRQILAFFQKLPPCLVGIEACASSHHWSRQLQALGHTVRLMPPAYVKPYVKRQKNDTTDAEAICEAVTRPNMRFVPTKTVEQQSCLLLHRARHLFIRQQTGIINSIRAYLAEFGVVAPVGRRGVEQLLEVVADPADCRLPEVARTCLAALGSQLRALKAQILEFDRRIMAWHRSNATSKRLDAIPGVGPALATALVASIADPKAFRSGRDFSAWVGLVPKQNSSGGKDKLGSISKQGDRYLRSLFTAGALAVIRYAKIHGTGHRPWLTALLARRPTKVAAIALANKLARMAWAMMARNERYKEPAALTA

SEQ ID NO: 274343 - protein, 475 aa, unidentified
MNLKGTKKKNQVSNVNIFEQQELLKKIEVVRENLTASTWRELETKGKFDKNAKLSFICDDMLILGCDVGNETHYLRAIDTRGRELSKSAFSFSNNADGFNKAKEWAVKIAAEYDKKQIVLGLEPTGHYWFCLATWMISNGLSVVQVNPYAVKQTKELEDNSQLKDDTKDPKLIANLVKDGNFGMPYLPEQLYADLRRLSMFRDQLNEDRIRSINRLHRELKIYFPEYKEALGKTEGTFSLELLKQAPFPDDLAALKEDGIRQIWHNAKLRGRGYSRAGEILEYAKASVGIREGKETGKLVVQWFVQKILELDEELALIETQINQKCLEIPHTDKVLEICGIGENTLSGMMAEMGDISRFDDVKEIQKLSGLGLVASSSGKHKGETKISHRGRKRLRYWLFEAAKSAVVHAEEFKELHVYYTTREQNPLKKMQSLIAIACKLLRIIFTILKKGIKYDPRKMLKDIRRESRQESLAA

SEQ ID NO: 274344 - protein, 411 aa, unidentified
MLEVKVERCAGIDVGKKFLAVCVMTGPANRKPVTEVRRFGTNVQELERLRVWLQESECKEAVMESTGSYWKPVFNILEGSIKIILANPEQVKALRGKKTDPQDSRWLASLLRHGLVQASFIPPRDIRELRDLTRRRRALLQDGTAERNRTQKVMEDANVKIGNVLTDVFGVSGQAMLEALLENKRSAKEVAELAHWRLEREIPQLVEALEGHRMSDHHRFMIRQSLDHLRQIEKMITELDEEIQRRLKPYEKQVELACTVPGIGHAAAASILAEIGMDMSPDGPFPGCHHLASWSAICPGNNESAGKRGNGRIRKGNRWLKATLIQTAWAGAAKKNSRFQIRYQQLKLRRGAQRAAVAIAHAQLIAIYWALRNGKPYEEQVHQFGENRRRTQIGHHLQQLKKLGYDFPATG

SEQ ID NO: 274345 - protein, 388 aa, unidentified
MDFSKDFFSAVGLDKEGKELFSGTYEMNSNGFSEILRTLSFHGQRGDEVMVAMESTGCYHINLFSFLTVEGIRTVVVNPLLISNFAKLSLRKTRTDKKDASTIAKFLLAHQEGILQLSVSQDLQDLRDLSRERESLCHLIAATKVEIKRVLRATFPELESIGNLYTRVMLRFLQEYPSARRVRVAKPRAIAKALKGPYVGNKLRFSSEDILRAARSSVAVVSPAKEVILQGKISTLLHLDERLREVTKLLTDLCKATRKENLKILRSIKGVGPKTAAPFLAEMGQVENFTSHKKLIAFAGWDPSVRQSGNFVGMSKITKRGNRHLRRAIYLITASVVSQNAFFKAYFLKRKKEGLPPQKALFATAHKLIRVIFAMLTQRTYFKPKEVI

SEQ ID NO: 274346 - protein, 408 aa, unidentified
MTVVGIDVSKGKSMVAAMKPGGELVAAPYEVRHSDIELSRLALDVLCMEPDTRVVMEATGRYHEPVAALLHSEGIFVSILNPLLIKQSGAGSLRKVKSDPKDALKIAKYGLDNWSTLREYTPTEAIRQQLKLCERQCDLYSKNIVMLTNNLISLSDKTFPGVNELFSSPEKADGHLKWVDFYRTFWHCDCINRMSPDAFGERYKKWCKKKGYHFSADATDALYAASCGLYTTLPRDNNAKLLVTVAADQLIALRENQSKLEAEMLNLCKQLPEYETVMAMYGVGKSTGPHLMAELGDIRRFPHRSSIVAFAGVDPGVVGSGKMQLSSVATSKRGLPQLRKALFQVVSTYVKRKPENEAVYQFYAKKRDEGKPFFVCTTAAANKFLRIYYARVKECLNAAESAVQTEEG

SEQ ID NO: 274347 - protein, 429 aa, unidentified
MNFRPITGIDVGKFFSEMAVLSPSNEVIARLKIHHDSTDDMERAIKLLKKAEKDFASRPFIVMESTGHYHKILFHSLCKAGFEVSVTNPIQTDSIKNIGIRKVKNDKVDARKIALLYRFQELKTTNIPNEDIECLRNLCRQYYKLSDELTAYKNRLTGIVDQLMLNFKDVFSNIFSKAAMAVLEGYPTPAHILKANRNKLISLIQKNSRRSLKWSTAKYEILVSKARDFAPLSIQNSSNIAMLGIYISMIRILQENLEKVLKAINQLITEDMSKDIPMLALTLELLQSLPGIGLLTAATILAEIGDFSAFSKPGKLVAYFGIDPSVMQSGEFTGTRNKMSKRGSRLLRRVLFTVALANIRTKRNKQACNPLIMEFYKQKCQSKPKKVALGAVMRKLVCIIFAVLRDRRPYQLRSPQEHAQMLAAKHTAA

SEQ ID NO: 274348 - protein, 374 aa, unidentified
MRMSIGVDLHKTQFTVCMLSEDRKIEIFKEYPTKEEGYEAFIKKIDSMVEEGYEVSAAVESTGNTRYFMNRVVKAGVLVKVVNTLKFKVVNESVKKTDRHDARTLAEFLEKDMLPESQLCSQESEDIRRVIKSRAVLVRAVVSLKNQVHALLLSYGVESKRGQLQSKKDRQRILSGLEDHKVYGSAAKAIKPLLDTINEVHAEVKKLEKVLEELVKDDEVVELLKTIPGVGPITASTIRAFTDDIDRFESAKKYAAYTGLVPWVQNSNESIHHGKITKRGPVELRTAFVQVVLGMVRAQKKTHAYRIMSKYGRMKSQKGSGKAIVATARKMSTIVYTMLKNKEPFDELKMAFTKEYMDMQAAALGAALAEDKPA

SEQ ID NO: 274349 - protein, 422 aa, unidentified
MLEEDQQTEEIIERVAALDIGKAELVCCARVPHEGKPGRRLQDVETYSTMTRSLLGMSDHLRCLGVTRVVMEATSDYWKPVYYLLEAAGFETWLVNARDVKHLPGRPKTDKLDAVWLAKIAERQMIRPSFVPPPEIRRLRDLTRYRVDLIEARTAEKQRVEKLLEDAQIKLSVVASDIFGVSGREMMAALIAGQTNPQQLAQLARGRMRAKLTALEEAFTGFFTDHHGFLLAKMLARVDALSADIAELDTAIEEMIAPFAQAVERLDEIPGLGAIGASATIAEIGLDMTRFPTPAHLCSWARFAPGVKESAGKKKGRGGTGHGNRYLARVLGEAAVAAGKTDTFLGERYRRIARRRGKKKAIVAVGRSILVIIWHLLSDPEARFTDLGSDFYDKRIDPERRKRAHIHQLEALGYNVTIEPAA

SEQ ID NO: 274350 - protein, 369 aa, unidentified
MNHTTSIGLDVHARSIAAAALDPLTGEVVTKTFAYSPGEVASWALGFDSPKAVYESGVTGFHLCRELNALGLECAVGASSKMQRPPADVKRKNDLSDAQFLARLLATHNVTEVFVPDAETEAARDLVRAHADARADLTRARQRLNLFLMRHGHVFCEKGPTGAPVGSWTKAHWAWIRQISFPDEADEGAPAFYIAQVRHMEGQKRELEKFIRAHAREPRWRGRVDALRCLKGIEEITAFALVAEAGVFSRFDSARAFSTWAGLVPSEHSSGPRRRTGGITKTGNSNVRRLLVEASWYYARATAARKPAPSPDVPLRIENHAAKAVKRLVARRREMSARGKRPSVANCATARELACRCWAIGRMAEGADA

SEQ ID NO: 274351 - protein, 448 aa, unidentified
MTTNVSLSVMDPLAAFVDVGSEQMHVSIAGGPPEVFGTFTTELHRLREWLKERGVKSVAMEATGVYWLPLYGVLETAGLKVSMVNGKQTRNLPGRKTDMKDCQWGATLHAHGLLQAGFVPPAQIRRLQDYLRLRGDHLSCAVACVQHQQKALERMNVKLHDVISSLVGESGIRVIQAILAGERNPDRLLALCDQRIQKKKAQRVKESLRGTWAEEHLFALRQAVENWQHYQRQIAACDQQIEAVLHQMSGPEETEGTEVKTKALKRGGVNAPQIENLHHILCKLCGGKDVTVLPAHTDYSLLQLIGEVGTDLSGWKSEQHFSAWLGLAPGSHQSGKRNGSVRRKRNRAGRLFCMMARSLAKSKNIALGGFYRRMAARRGGLVANIALARKLAELFWRVMVKGLDYAEAGLKAYEEQVLETKRRTLCRLAKQLGRVVLPSLAELQTTET

SEQ ID NO: 274352 - protein, 313 aa, unidentified
MSELYIGIDVSKERLDVAFSDGREGQFGNDPAGHSQLREVLSEQPPQLVVMEATGGLERSAAAVLAAAGLALRIVNARQVRDFAKASGRLAKTDRLDARVLVKFAQAMKLEPRELPSEQQQGLQALIARRQQLIEMLVMEKNRLRTAHKDVKRGLKKNIDWLEQQIKHADQDLGSALRECGVWREKVELLESVPGIARITALRLLAGLPELGTLNRREISALAGVAPFNCDSGGWSGKRCVYGGRAFARSALYMSALVGVRYNAVLRAFYQRLRAAGKPSKVALVACMRKLLTIINSMIRHRQCWSPKLVELA

SEQ ID NO: 274353 - protein, 347 aa, unidentified
MRFYTKQHPFYCGIDLHARTMYVCILSQGGEVVLHRNMKAGPDALLKALAPYRDQIVIAVACVFTWYWLADLCAREGIPFVLGHALSMKAIHGGKAKNDKIDAQKIAVLLRGGMLPQAYVYPAEMRATRDLLRRRMSLTRKRAELLAHIQNTNSQYNLPEVGKKLAYKANRTGVAERFPDPAVHKSMDVDLALIGSYEPLLRDVELTIVQAAKQHDAQTLYLLQTIPGIGKILSLVLLYEMHDIQRFPRVQDFVSYCRLVKCAKESAGKRYGFSGTMIGNAYLKWAFSEAAVLFLRENPPGQKYLTRLEKKHGQGKALTVLAQKLARAVYYMLTHEKAFDMQKFLQS

SEQ ID NO: 274354 - protein, 417 aa, unidentified
MEYARLSLPAAPPGGVTAGIDWASADHAVCVVDAAGKVMARFVVEHTAAGLAELIRRLRAAGACEAAIERGDGPVVDALLDAGVTVVVISPGQVKNLRSRYGSAGNKDDRFDSFVLADTLRTDRARLRSLEPDSPATLTLRAAVRARRDLVAHRVAVCNQLRAHLQAAFPGAVGLFRDLDSPISLAFLARFGCQDRADWLSPRRLAAWLKSQGYPGRKDPAALHARLAAAPRGAVGDDGAAKAHITRALLAVLASLVQQIKALDAQIAEQLALHADAPIFTSLPRAGTIRAARLLAEIGDCRARFPTPEALICLAGVAPSTRKSGKTTYVDFRWAADKQLRDAVCDFAGDSRHASPWAARLYDDAIARGKDHPHATRILARAWLYVIWHCWQNRTAYDPARHKALQRILTGQKPAAA

SEQ ID NO: 274355 - protein, 418 aa, unidentified
MKVVYPICCGVDVHKTFLVATIITSQGITPHYIKKRFSTFNNSIRQFKQWLVENNCFDVCMESTGKYYVPVYNLLEDTIRVTVANPKWVKAVKGNKDDTKDSKWIGDLFRLGLVPGSYIPEKPIRILREYTRYRSKLVSCKSSEKNRFQNAFTVCNVALDAVVSDMFGKSATSITDYLISSDTFNPEYCTSLLQKSLKRKADTVVESIEGYQMTQTQKERMIIIRSHLNYVTKSIDELDEKLDKMVEPYESAIKLLCTIPGVNRASAITIISEIGTDMSQFANSKRLCCWAGLTPGNNESAGKKKSVRITRAGVYLKPALVQVAHAAVKSDKAPYYKIKYERICKRRGKKRAIIAIARMILTAIYNMFVTGEVWNPIDLYKIDMPQEMLEKQKEKAIKQAIKFLISNGVIKDTDISVA

SEQ ID NO: 274356 - protein, 335 aa, unidentified
MQIKHFIGIDVSKDTLDLSVVVNGIVLSHYCIGNNPKEIKSTVNKIMKAVDGSFDDTIFCMEHTGLYNRPVVQWLHKNLGKMWLESGVHIRRTLGLVRGKNDKVDSSRIAMFAYTNRHQVKLWAPPRHVIERIGALLSQRSRLVKAKKQLSTANKEQKKFLDKNIMHSLNKYTNRAITVIDKQIEDIEKEIIGIIKDDGKLKRMYQIITSINGIGLVTASYILVTTNEFINISDPKKYACYSGVVPFEHTSGTSVRGRNRVSHIANKSIKSLLHLAAISTLNTPGEIQDYYNRKIAEGKNKMSIINAIRNKLILRIFACIKQNREYENNYCYKLA

SEQ ID NO: 274357 - protein, 343 aa, unidentified
MQIRSVGIDLGKTTFHLVALSAAGTVLLKKKFTQKQLITFTATMQTSLIGMEACSGAHFLGRVLRDQGHEVRLIPAQFVKPFVKSNKNDFLDAEAIAEAVDRQNMRFVPIKTDDQLDLQALHRVRDRLIARRTSVINQLRAFLLERGMTFARTPAKLKMAMPEILENADANLTPRMRNLISLLWGEWKDLEQQIVTVNAEVEQIASSDAACVRLRQIPGIGPLIATAIVAAIGNGAAFHKGREFASWLGLVPRQHSTGGKARLLGISKRGNSYLRKILIHGARSAVLRMKRERAPFGAWLDALQTRAPINVVVTATANKLARIAWAVLSTGNEYRAIPNPTPA

SEQ ID NO: 274358 - protein, 339 aa, unidentified
MAQVTTLGVDIAKNGVCIHGVDAHGHVIVKKRLARQKVLPFVAQLPPCLIGMEASGGAHYWAREFTKLGHTVKLLSPQFVKPYVQSQKNDPNDAAGICEAVARPRMRGVPVKSVAQQDIQALHRIRERHIKARTALINQIRGLLMEYGIVIPQRASQVRHKLPFVLEDAENGLTITAREWLQALAEELQVLDQRLAATDHRIEQVFEADEACQRLAQLGGIGPLTATALVAAVGDATGFKNGRQFAAWLGLVPRQHSTGGKTTLLGITKGGNRYLRMLLIHGARAVLRVVDRKTDAWSRWLQGVQVRRGTNCASVAQANKTARVAWALLAKGDRYRRAA

SEQ ID NO: 274359 - protein, 417 aa, unidentified
MGSMKKCCCGVDVHKSFIIAVIAKFINEEVVFSKPMRFSTFTHGLREFKEWLRQNNCYEVCMESTGKYYMPVYRVVSDEQFHVDVVHPKYVRAPRGKKNDKRDAKRIADMYMRDHIAEYSFIPPADILAIRDVARYRRKTINTMTAEKNRMSNCLTVSCIKLDEVLSDLYGKTGMALIGQIIETGGCNFDPAPFIDKRVKASVELFKQALDGDVTPATLTKMRIIQERLGYLEKQKTEIESTMESLSQGYSRQIELLVSAPGIDTISAMTIISEIGVDMSAFGSVKNFLSWVGLVPQNDESAGKKKSTRIGKGNHWLKPLIVQCANAAKNSKNHPEIRNKYLALKKRKGYGKAIVTIAKRIMTAVFYMLLRNEAYNPHVCVDRAPSKGKIHLQNLINYYISKGYVLINDDGELLEIA

SEQ ID NO: 274360 - protein, 343 aa, unidentified
MHVNTIGVDLAKNVFQVHGVDSAGKVVITRQLRRKQVLDFFSKLPGCLVGMEACGTGHHWAREISKLGHTVRLMPPSYVKGYVKRSKSDAADAAAICEAVTRPSMRFVPIKSTDQQALLMLHRTRDLLIRQRTQLINALRAHLAEFGLVAEKGREGLAELSAIIADEMNREALPSAMKQALQTIVDQLAALELQIGTLDRAIHAHHRANDMSCRLETVPGIGVIGATALASTVTDPSGFKTGRDFAAWIGLVPRQHSTGGKERLGGISKQGDRYIRRLLVIGATAVVRQARQHPQKHPWIMKLLAKKPAKLVAVAVANKMARIAWAIMARGGYYRAPALAAAA

SEQ ID NO: 274361 - protein, 351 aa, unidentified
MSRTTSAVAVSTIGIDTGKNTLHLIGLDERGTIVLREKLPRGRIGGRLANVPPCLIGIEAGMGTHYVARELMSLGHDVRQVPPAYAKPFRQTHKNDFRDAYAIAEAVRRPSTRCVPVKTDDQLDLQALHRVRSRLVGQRTAVINQIRGFLLERGIAVRQGLRFLRQQLPEILAKRIDVLSPRMIRMVEDLSGDWRHLDERIEQVTDEIEVLARESESCRQLMTVPGIGPLIASAMVAAIANGAAFTKGRDFAAWLGLVPRQMSTGDRTILGRISKRGNRYLRTLFMQGARVILLRPANWTKHSYGPWLTTAATRLHHNVLATALANKLARIAWTVLAQRRNYETRVIAEAA

SEQ ID NO: 274362 - protein, 373 aa, unidentified
MTTPKEVYVGIDVAKLRNAVALADAGREGEIRYMGEFDASADSMKKLVQRLAAKYERLHFCYEAGPTGYGLHRLITDLGHDCMVIAPSLIPRKPSDRIKTNRRDAISLARLLRAGELTAVWVPDPAHEAMRNLIRSRTAAVETIRVHKQQISAFLLRHSRIFPRQKHWGARYRRWLQEQSFEHPADQIVLQEYIEAVRLGEARLVRIEKVIDEFLPKWHLAPVVEGLQALRGIDLVVAVSFVVEIGDIRRFSSPSNLMGYLGLVPTERSTGETVRRGSITKMGNARIRQLLVESAWTYRFPPRVSARKKKKLDQVSPKIREIAWKAQSRLTARYRAFVARGKKSTVACTAVARELVGFMWAVAMEVQPSPPTT

SEQ ID NO: 274363 - protein, 449 aa, unidentified
MNASFVLGIDPGKSFFAATLMHMSGERVWKEKKVDMSRDGFDALRSNIPVGNLTVGIEASGRIDDNLLAWFCQWKSICSDRKITVIRVNPGQSARFGGPKPRRDQTDGSDSDHIAEFVRVYGQRLEAFDHDPKAQAMTRLINERQRLVEELAATKCRIHEQLLICFPEFTKVFADPFGELAREVLRKAPTARQAGQLRPISLARVKAARKKRSLGKDQAKELIQLARRSMASAGEFQDGATMVFLLDQLELLERRLAGIEETLEAYAAQAKEKGGPGEQGVSAARQIQLLDSLPGMAIIAASTLVLGTRGLARFESGSALSAQWASCPQRTQTGTSLDKTRLTPHGDHKRRAMLYLSTQIACMFDPAFAFHKWRMIQRGLCPQQAICAVMNRMARVAWALVAHNRAYNVNLMIEQIQIHHAELWKTFIRLHRNNGTLWKKVDVKYKKVT

SEQ ID NO: 274364 - protein, 319 aa, unidentified
MPTQNAVMYAGVDVAKASLQVHLQGRQSEFKNTPSGLRQLCLELRKTSGVHVVCEATGGYEHALVKALHKEQIPVSVTNPAQVRAACQARGQRAKTDRIDAQMLTDFGQRYQPQPTAPTTPSQDQLVALTQWLQQLIHGLALAKTQAEHHQDPFVGRQHSKLMTHLESQIEAVEKQIKALLEKDPVLQQRVDCLDEIKGVGARTAWMVLAHMPELGRLNRQEAAALAGLAPWTRESGTMKGMRCIGGGRPEVRVALYMACLSAVRSNPVLRPLYQRLRAKGKLPKVALTAAMRRLLIYMNHQLKHLASDVPASGGDKTK

SEQ ID NO: 274365 - protein, 302 aa, unidentified
MFIGIDVSKNSVDVASSCGTLKLQGVNPLRAAEILCKNDTQLVVVEATGGYERPIVEALQAKNIPVAIVNPRQARGFAKAMGRFAKTDGIDALVLAQFAEKARPQAAQPVTLQMKQLQALVARRRQLQQLLTQEKNRRHQAVDTGVKSSLKVVIDALQKTLKQITASILQMLRQNPEWQKTQALLGQIKGVGLITAATLIAELPELGRIGRKQIAALAGVAPFDRQSGKWRGKSFCQGGRKSVRTALYMAALTAVRFNDPLKAFYANLVNAGKPKKLALNAAMRRLLTILNAITRDSMQKTT

SEQ ID NO: 274366 - protein, 410 aa, unidentified
MDVLVERCAGLDVHKDTVVACVRTPGPNGARSQQTREFGTMTNELLGLRDWLAACGVTLVGMESTGVYWKPIFCVLEDELECWVLNARHLRNVPGRKTDVKDAEWICQLVEHGLVEPSFVPPKPIPELRNLTRYRKAQIEERTREAQRLDKVLQDAGLKLSSVASDILGKSGRDMLNALAEGTRDPEILAELARGRMRDKIPLLQQALEGRFTRHHGLLVGGILSKLDFLEELIGHLSAEIDQVIAPFEEAVELLDTITGVDRRTVEGLIAEIGVDMSRFGSSERLASWAGMCPGNHESAGKQRSGKSRKGSKWLGSYLTEAAKAAGRSKDTYLGAQYQRLRGRRGSAKATKAVGHSILVAAFHILDKQVPYQDLGADWFVKRRPEAQARKLIQQLNTLGYRVTLDPIPV

SEQ ID NO: 274367 - protein, 346 aa, unidentified
MHYIGMDCHISTLDFAVVNEAGRLVKAHRVATSVNGFMEFVKKVPPPRTIYMEEGTLAAWALETCVHFKERLVISDAKNNHWIGSSGQKDDSIDALKLAQLARGGYIKEVHHPVGQRRRFRELMIAYHDTVRSTTRIKNKIKAKFRQNGIRCTGTTVYSETYREEWRGKLPQEGTLLLILDGLWRQLEQSERTEKELLAAAKAQGKQYPEIKRFEALPGIGFVHGATVSAILETPHRFSDKRKVWMYAGLGLMKRSSGGKLYSEKLTADYNRLLKYALKQAAEAAIQAKDNPFRRKYLDMTLLHGIAPHRAKLTIARDMLAVMWAMWRKGEKYNPQIREKTAYKQG

SEQ ID NO: 274368 - protein, 364 aa, unidentified
MSLEGLNRLKRRAPVERYIGLDVHSQSTAMVVVSQSGKRVASHVLETSASSLINAIKTVPGTRRLILEEGTQSAWLSEVLRPHVHELVVTSPKPAADRTKNDMQDAFIRAEELRRNAVYKRIYKPGTRAMPLREALRLYTAFNNDVVRAKNRFKALLRGRGVTGLGEDVYDPKPELLQQLMKGVPSSVALSCEAMLEQIYLMEDLRTRASEVLIDEARKSLAFQHLLTVPGFGPQRAATFLAIVVTPERFRKSHHLWSYAGLGISTTVSSEFYKQGKQWRRQRTPMTRGLRVGHPLLKMIFTGAALTVVKMPEHPLGHHYKKLLSKGMKESLARLTLARKLAAIALAVWKNQEDYDSTKHHFFR

SEQ ID NO: 274369 - protein, 316 aa, unidentified
MENPQPFVGIDVSSQRLDVDTVPVSQPFSKPNTEDGIASLVVRLQALNPQIVLLEATGGYEIPVAYTLYEAGLPVVITNPKAVRYFAKAIGRLAKTDKLDAQVLALYAQRVHPSVQPLRHQEQLELANLMTRRRQLQGMIVMEENHRRTCTPRVRHNIDQSLAHLRQLLKDLDREIHDSIRRSPLWHENSEILQSVTGVGPKVSASLIADLPELGLLPANKATALAGLAPMNRDSGQYRGKRMIQGGRPAVRQALYMAALVASRHNPVIREFYQRLRLAGKPPKVALTACMRKLLVILNAMLKNRTYWNPQLPLAA

SEQ ID NO: 274370 - protein, 330 aa, unidentified
MTMTPTQQTYNHVVAFEVSKEALVVHTLPADEQCTIANKSQSVRRLLKSQLKHNRKQHLGPILIVCEATGGYERHVLDAAIDLGLRVHRAHGARVRFFARYCGLIAKTDPIDARVLAHYGVKTDKLRLYVPPPPETAALRALHARRTEIQQMMIAETSRLDQTHHKSIVKSLKAHIAQLKSALEAIEDEITHLLQENASLKKKVELMRTVIGIGPVSAMILLAYLPDIGSMTKGEVARLSGLAPINNDSGKKRGARHVEAGRTAIRRALYMAAVVAMRANPVIKRFADRLRSKGYPFKYVAVAVMRKLVVILNAVLRDGQPWKGAQAACA

SEQ ID NO: 274371 - protein, 346 aa, unidentified
MRFYNRQHHHYCGIDLHVKTMYVCILDAAGQVLVHRNVPSTPAFLEIVAPYRTELVVAAECMFTWYWLADVCAAEGIVFVLGHALAMKAIHGGKAKNDTLDSSKIASLLRGGLLPQAYVYPAAMRSTRDLLRRRLHLVRKRGQLLAHIQNTRAQYNLAAFARRLAYPANREGVAERFSDPSVRKSIEVDLVLVETYDGLITDLELTIVREAKRHDADAFHRLRSVPGIGKVLALTILYEIHDITRFDRVQEFASYARLVKCAHQSAGKKLGTGGAKMGNVHLKWAFSEAAVLFLRHTTDGKKLLAGIEKKHGKGKALSILAHKIGRAVFYMLSRGTIFSMEKFLAA

SEQ ID NO: 274372 - protein, 310 aa, unidentified
MDAIVVGIDVSKDRLDVHVHPSGEAFGVARNAEGLEELTARLAPLGAWAVAVEATGGFESVVAASLGGSGLPVIVVNPAQVRAFAKALGKRAKTDPIDAAVIARFVEATKPQIRPLPDADTQLLAELVTRRRQIIQMIVAERQREKQMANRRLKKSVARLILALSKELNELDAGIDEAVRGSPAWREKEDLLKSVPGVGPIVSRTLIAEMPELGQLDRRQVASLAGLAPWTRQSGKWRGKSFTGGGRRTVRTVIFMAAMVAKRCNPVLKDFHQRLINAGKPKMVAIIAVARKLLTILNAILRDKKPWQPA

SEQ ID NO: 274373 - protein, 321 aa, unidentified
MRYIGIDVSKATLMVAYPQDNKKYKTREFQNTSNGIHTLIATLQADDHCVMEATGNYSYLLLYLLNKAGICTSMENPLKVKNFARTMLSVTKTDKADAQLLSLYGERMKPEPYKIPSEALLLLKQKRAVLRQFKKQLLANNNLKKALEAMPEQDQKAITAIEKVTITLEEQIKTVETELTTLTQAEFNQQMSRLTTIKGIGTTLAAALIITTGGFTYFDNAKQVSRYLGLCPTYQQSGTSIHVKGHINRNGDPYLRAQLYTASWSMIKYNTACRELFTRLKERGKSGKLALVAVMNKVIRQSFAVVKHNTDYQDGFVSKKP

SEQ ID NO: 274374 - protein, 489 aa, unidentified
MSTAPNNSKEKKDPTLNAQASKRKARGSHCPPGQGNRRRSKLRIAHRDAAGIDVGARVHYVAVPEERAEVPVRNFGAYTARLDELVQWLKECAIKTVAMESTGVYWIPLYQKLEEAGLEVLLVDARQAKHVPGRKSDVQDCQWLQQLHSYGLLSAAFRPQDSICRLRTLQRHRKNLVEYTAMWIQHIQKALNEMNLHLHHVLSDISGQSGLAILDAIVAGERDPRKLASLAHHRVQKSQAQIEAALTGDYRSELLFVLSQSLQNYRQIQQQIVQCDLSIEKQLAKMANCPNPSQDSEPRQQSAASAGGKPPKTKPKEALEISLAGHLKRILGVDLTTIPGLNVLTILTLLSEIGTNMAKWRNERAFVSWLGLSPNNKISGQRVLSSRTRKVVNRAATALRLAAMILGKTNTPLGSFYRRKRAQLGAPKAITATARKLGCLIYRLIKNGQSYQEPDLHIYELKYKDQILNSLRKRANSFGFDLVEAPKAA

SEQ ID NO: 274375 - protein, 327 aa, unidentified
MKNVYVGIDISKATLDFCVVEPKRISFHKIKNNVAAIGKLLKTIKEIDPQAYLCMENTGYYNFNLYEVLEKFSFRTYVIDPKHIKRSIGLVRGKNDKIDAKRIAIFIERNHQDFESWKPIGESVKAIKILLSQRRFKIKQRTGLKQQNSDLKSVTFSKTTDKLIRINEKSIKEINKHIVEIETLIKKEINADHQLRTEINRIKTIPGIGDITAWTIAVKTEGFKRLCDPRKLACFAGVVPFEQQSGTSLRTKPRVSKMADMTLKSVLQMAAMRAVRMQNDLRIYYLRKVEEGKNKMSVLNAVRNKLLHIAMALIKNQTNYKNRLELS

SEQ ID NO: 274376 - protein, 351 aa, unidentified
MKVTTIGIDLAKSVFQIHGIDERGNVVLRRQLRRAQMVPFFSKLETCLIGLEACGSSHHWARKLAALGHTVRLLAPQFVKPYRKNDKNDGNDAAAVCEAVGRPSMRFVPVKSPQQQAELSVHRVRQRLMRQRTALINQLRGLLAEYGLVLAQGATHVRSQLPALLEDASDSLPPLALELFRELYEELCQLEQRLAHYDRRVERLYRGNPLCQKLGELQGIGALTATAFVATVAHAAQFKNGRQCAAWLGLTPKQDSSGGKTRLLGISKRGDVYLRTLLVHGARSIMRHTPKLDDPKSRWVEQLRKRRGENIAAVALAAKHARILWALMVRSEPSAQPIAAHRIEPPAQPNL

SEQ ID NO: 274377 - protein, 337 aa, unidentified
MIIIGCDFHPSFQQIAMLDTETGATEEHKLMHTSGEAEGFYRKLASPAIVGIETVGNDQWFVELLQKLGHEVCVGDAAQIRASYVRRQKTDRRDAKHILQLLVEGRFPRIWIPDAEMRDHRQLLMHRHKLVQIRTRVKNELQHLMLNQGMQKKQKLWSPEGRAALASLPLQPWTDRRRKDLLNLLTMLDAQLESLNDAVMRVAKEYPGVRLLMSQPGVGAVTALAFVLTLGDVHRFPRGKQVASYLGLVPREHSSGGKQRMSGISKQGNRLLRFLLVEAANIAVRFDPELRKEYLHRCHQKHFTVAKVATARKLAIRMYWMLRTQTPYPQVLSSRVA

SEQ ID NO: 274378 - protein, 370 aa, unidentified
MLDTTIFVGLDVHARSIKAVSLDVMTGEVRCATFGYDAGAVAEWVRSVDPKAKCVYESGVTGFDLQKRLSSMGIDCVVGAVSKMIKPSADRRRKNDRNDAEFLARMLSVGNVVEVWVPDDECEAARDLTRALEDARDDLSRSKQRLSKFLLRHGLVFDERTPTGRRKGNWTRAHWSWIESIRFAEGADNEALAYYVDAVRRAAEDKARLEGLVEAETRKPRWRKRVDSLRCLKGVDTATAADLVFEAGEFSRFRNARSFAAWVGLTPSEHSSGESDRRGAITKAGNKHLRKALVEAAWHYLTCSARPKEPARGQAPDPGARRHAAKGVRRLVERRGALLARGVHNNKANVATARELACWVWAVGLMAEEA

SEQ ID NO: 274379 - protein, 407 aa, unidentified
MDLLKTVFGIDVSSRKSNVCIMVNGQKVNDYAISNDMVGFNQLLDDLKQVTNPQIIFEATGVYSRRLQAFLDMHDLRYVMMNPLEAKRKTKDDLHQNKTDKLDALYLAKLQSEHPQRLAYVQSKEYQELMANNRIYEQASHDLITNKNRLHKAIQLTFPEIEHLLANPRGKNYWSIVLKFPHPNIVLETKEADIIDFLKGLSGIGKKRANDITQSLIRLAKLACPAVKKSSAHIRGLEMAINNILSAEETCQTALKEMAKLAPKRDLEILKSIPGIAENTALRIISELGDIRRFNKPNQLNAFVGVDPQVYESGNLTAHLSISKRGTAIGRKVLYLAINQIQSAKKAGNPCHIADYYEKRKRSSETASHKKAAIASIHKLLRTIFALITNDQLYSYDIAKHNQRLLS

SEQ ID NO: 274380 - protein, 391 aa, unidentified
MLYIGIDAAKDKHDCCIVDSDGEFKCDGFTFANSKEGFEKFLEIVKQSLSSKDEIIKVGLESTGHYSTNLLSFLNSQGFEVVVFNPLSVSRSRTANSLRRTKTDKNDSRYIVQLLMSGNFKPYHKQSYHILRLKSLSRARFRLVKEIQPLKNRYRRLIHLLFPELQGFFCKLDIPAVITLLTALPGAKDIAACNITKLANILSTASRGRFKRAKAEALKQLAKNSIAEYNRGDAFELKLTLQRIQFLENQKAEIEAEIRNVMSEIKSPVTSINGVGDVLGAAILAEIGDINTFSSSAKLLAFAGCEPSTYQSGKFTATNTPMVKHGSRYLRNALYLAVKSAYLHSPSFRAYIDRKRAQGKHFYTAMSHGIKKMVRVVFVVLKRNITFTEPI

SEQ ID NO: 274381 - protein, 427 aa, unidentified
MKYTQNERIMQITEKTLIVGIDVGSETHYARAFNFRGLEYGKLLKFNNDAEGFSRFEDWVRKLVNNNGFKDVTIGMEPTGHYWFNLGEYIERQSGMRIALVNPHHVKKSKELDDNNPSKTDRKDPKTIAMLIKDGRYIEPYLPEGVYKELRTAMDSRWRIMKELSAIKNRISRWLCIYFPELTKVFKDWEGKAAILVLKEYATPTKIKEKGIDGIIAVWKEHKIRAVGRNRAKMLLEAAVSSVGTTEGLISAEYELEMLLEDYESKKRQYDKTMELVERLTKEIPGFEKLLEIKGIGLVTAAGFIAEIGDIKRFSHPKQIQKLAGLSLKENSSGKHKGKTTICKRGRKRLRYYLTFGMMPLLSKNEEFRALHEYYTSRKENPLKKMQSLVALSNKLIRIFYAILTKNVAYDPQKMMSDIRRPETKAA

SEQ ID NO: 274382 - protein, 357 aa, unidentified
MAALSIADVPANATVGVDTHKHSHIARAKDGLGRHLGQLEIETNPRGYAGLLDWAQGFGPVVTFGIEGTSSYGAGLTRFLRGNGQTVIEVLRPARRDRRFGGKSDPIDADAAAGAVLSGKATAVPKAGDDGVEMVRALKIAKQTAIKARTQAVNAVKGLIVMAPDPIHEQLRHLKTPALVRTCSAYRVGAASDPTAAIKLSLRSMCRRYVVLDQEVRSLEKELDALTLRLVPQLRQLFGVGQDVAATLVLAAGNNGDRLRSEAAFSMLCGASPIPASSGMVQRHRLNRGGDRQANAALHQIVVVRLRFDDTTKAYFAKRKADGKSKKEIFRCLKRYVARQVYRTLVDPRDEVALTGA

SEQ ID NO: 274383 - protein, 482 aa, unidentified
MTPDSTRVMIPGIDCERVFTRKGVVMENYYMGIDVSKGYADFVILDAKKDVVEPNFQLDDTFGSHCKLFEILKRFFDCHSGSVLFAAVESTGGYENNWLHSLGGFQGTLDIRSARLNPLGVRANSKASLRRVITDKISARDVAEYLIAHPEKVTYQQEDSLAGLRRQWGFVRLLVKQKTHILNQFESLLYTANPELIAYCQSGVPAWLLKLLKQYPTAANLAKARATSVARIPYVTAGRAKELIEQAKKSVASATDETTGSLITAMAEQIIRMEETIRIQSQQMAKRCAIPEVTLLKTIPGISDASAIGLMLEIQSVKRFSSVKKLAAHFGLHPAFKTSGDGTSGVRMSKQGRKEPRKILFMVAMVSLTANPHIRKIYEEHTEKGMEKMAAIGLCMHKILRIVYGMLKNNQAYDSQVDQKNRENRMARKATHTVKNVNRRYEIFDQQAPISRRQSNKRKEWKQSQGDNITQHGIGVPIPSAA

SEQ ID NO: 274384 - protein, 430 aa, unidentified
MEIVYPRSCGVDVHKSFIVAVICISESVKPKYIKKRFSTFNNQLIQFRDWLIENNCQNVCMESTGKYYIPVYNALEGYISNVVVANPKWVKAIKGEKDDNKDAKWIADLFKFGIVRSSYIPEKDIRILREFTRYQYKLVNMRSSEKNRFQNALTTGNCKLDIVFSDIFGKSASAIVDTILSNNPYTSEDILSKVHARCKASHEDILSAVDGIQLTQFQKARIRIVQKHMEYLDSLLDEIQHHIDLMVANYEEYIQILCTIPGINRKSAITIISEIGTDMSQWSSHRKLAAWAGLAPGCNESAGKKKSVKISKAGVYLKPCLVQVAHAAVKDKECDYYADKFNKISKRRGKKRAIIAIARKILIAVYHLLKTGEVFNPTDMADVETTKKQRIEYVKNNLRNAYNQLSRTGLSEAEILQLIRKESTNSPQIE

SEQ ID NO: 274385 - protein, 313 aa, unidentified
MSTSSEIFVGIDVSKNHLDLALRHSQKSWRFSNDPEGIRKLTDLLLKHQPTLIVLEATGGYEQAAFRSLSTRQLAVSIVNPKRVRDFARANGRLAKTDRIDAHNLAHFAQVVRPHPQPPSTEAKQLLAGLIARRRQLHRMITAEKNRLRNAQPVVQLQIQQHIDWLRQDLKELDAQIKELIQSNPDLKAKFDLLCSAPSVGMVTAASLLADCPELGTLDRKKIAALVGVAPMNKDSGRKSGRRRIMGGRAPLRAALYMAALSASRFNPAIRPFYARLLGSGKVKKVALTACMRKLLTMVNAMMRDNKHWNPAL

SEQ ID NO: 274386 - protein, 366 aa, unidentified
MKKLTRRMKRFKGLTVGLDLHKKFIQYSVLDARGNEVEGSRVEAKRGALLELVRRLHKRGKVQVSLEACGTFYWVFDTLVEAVGRERVHAAHPGGMRAATRSGEKSDATDAWWLAYLLWDGRLPQARPAEGQMRELRIVGREFHWHKQVRSDLFRRLRSHAAQAGLKLPAQWHTSKVKRGQVRELLRQVCGERGRAMKGLYVEALRLGKIVASWRQKLAELCGAFEIVKLIQREIPGMKDTTCGLAFAELGDPRSFRAAKSYANATGLTPKNQGTGGKQERGGITRAGSPLSRWAYTTAVVACRRCKQGPGVCIKEWVAHRCQFKPKKKVITAAGRKLAEGVWRLCALGEAFDLKRAFPAPKRKVS

SEQ ID NO: 274387 - protein, 349 aa, unidentified
MSHQLVQKGKSMAIVTVGIDLAKNVFAVHGVDVAGKPALVRPSVARGKLLELIATLPPCLAGMEACSGAHYWARLFTAHGHTVRLIAPKFVVPYRLSGKRGKNDAADAAAICEAVTRPNMRFVPGKSVQQQCELLVHRARQGFVQQRTATLNRIRGLLSELGIVLPLKAATVRREALLQLEDLPGWANTVVGDLLSEVTRLDERIAQYDRHIEQIARHSTPARQLMQLPGVGATTATALVAMIGRSQEFKCGRQLSAWLGLVPGQYSSGGKQRLGRITKAGDPYLRMLLILGARSVLQSAGTKTDPVSRWAVQLAARVGYWKAIVAIAAKNARMCWAVLARAESFKLPA

SEQ ID NO: 274388 - protein, 344 aa, unidentified
MTITTIGIDLAKNVFQVHGVDQNGKTVLKKKLKRHQLSNFFANLTPCLIGMEACSGAHYWARVLTKQGHLVKLMAPQFVKPYVKTNKNDAADAEAICEAVTRPNMRFVSIKSPDQQALLSLHRARSGFIKAQTAQINQIRGLLTEFGIVLPVGKVAISKHIPSILENADNDFPDTFRQVLSRLYDHLTELNDHIAEFDQSLKTHFEHCELSQRIASLPGIGLISATAIVGTIGDGSEFKNGRQLSSWLGLVPRQHSSGGKNILLGMSKRGDAYLRTLLIHGARSVLIARSHQISSESWLGGLINRRNKNVAAVALANKNARTLWAMLTRGEDYNPQQYPDAFAS

SEQ ID NO: 274389 - protein, 402 aa, unidentified
MKAYKQYLRFCGIDMAKQKHVACIIDDNGQYLLKPKSIRNDADGFETILNCLKQTGRTKSILTGMEATGHYWYSLHDFLTRNGYDVIVLNPIQTALQAKQAIRKCKTDKYDAFHIANLLRTNQYKAAVVPDELAMTCRQITRLRYRIVKQAAMIKQLVNSRLHPAWPEYEGFFSNIFGTTSMKLLQTASTPKELMEIDPDDLSELIRRTSRGRFGPEQTQKLLHSAQNSVGMQRGLYGISTGIKFLLEQIEVLEPVRKKMDAEVAKLAAKVPEYLFTLPGATKLTIVSLYGEVSPIEAFEKPSQLVAFAGLDPRVFQSGQYDAPRRRISKRGSPYLRRSLWQMAYRALCTEGDLRDFWRRKHRQNKHHLVAVTAVANKLCHIVWRIMTDRRDYVRKGYNPKS

SEQ ID NO: 274390 - protein, 370 aa, unidentified
MLDTTTFVGLDVHARSIKAVSLDVMTGEVRAATFGYDAGAVAEWVRSVDPRARCVYESGVTGFDLQKRLSGLGVGCVVGAVSKMIKPSADRRRKNDRNDAEFLARMLSVGNVVEVWVPDDECEAARDLTRALEDARDDLSRSKQRLSKFLLRHGLVFDERTPTGRRKGNWTRAHWSWIESIRFAEGADNDVLAYYVDAVRRAAEEKARLEGLVEAEARKPRWRKRVDSLRCLKGVDTASAADLVFEAGEFSRFRNARSFAAWVGLTPSEHSSGESDRRGAITKAGNKHLRKTLVEAAWHYLTCSGRPKDLAKGQAPDRGARRHAAKGVRRLVERREALLARGVHGNKANVATARELACWVWAVGLMAEEA

SEQ ID NO: 274391 - protein, 341 aa, unidentified
MQITTIGLDIAKNVFQVHGIDAAEKVVVRKQLRRGQVMKFFAALPPCLVGMEACATAHYWARELTKLGHEVRLMPARDVKAYVKRNKNDAADAAAICEAVRRPTMRFVGVKSAEQQGRLMQHRTRDLLLRQRTQLINALRGHMGELGMVAAQGREGLKTLLAIIAKGADERLRVDARASLIVLAAQLEALQTMIGAIEKRIVTQHRANEKSKRLATIPGIGVLGASAIMATVTDPSVFRSGRDFAAWIGLVPRQDSTGGKQKLGPISKQGDRYLRRLLVVGAHSVLRRAKQSPQNYPWLTQLLARRPFKVVAVALANKMARVAWALLARGGTYRVLQLAAA

SEQ ID NO: 274392 - protein, 476 aa, unidentified
MSSNEPKQAQTNQSRREKKRRKGMCLEDRPILENNAAGIDIGAREMFVAVPPDRDAYPVQIFDSFTEDLHRLADWLVACGIRTVAMESTGVYWIPLYDILEVRGLKPCLVNARHMKNVPGRRTDWHECQWLQYLHSVGLLRGAFRPEADIGAVRVLIRHRGELVQSASQHVQHMHKALTQMNLQIHHVISDITGLTGLAIVDAILGGQRDPTELAKLRDPRVKADEETIRKSLVGNWKAEHLFTLKQSRELYRTYLEQIVQCDQEIERLLGGFEPWADPSQKPLPPDRKRNRSDKKRRKKNGNLATEFDLRTEAYKLFGVDITQIPGVETIALPLFSEVGRDLSKWPTAAHFASWLGLCPDNDISGGRVLWRGARKIKNRAGQLFRLAAHSLHRSLSPMGDYLRRMKAKLGPAAATTATAHKIAVLFYTLVRRQIEYDETIWATRNAERQKRKEFHLKREAKRLGYRVIPLEEPTA

SEQ ID NO: 274393 - protein, 367 aa, unidentified
MEKSSKVYVGMDVHKESIEVTLAEQGGGLRRLGQIGGDRGSLLKLARKLQSKGGERVFVYEAGPCGFWIYRELAALGEHCMVVSPALVPKRAGDHVKTDRRDSERLASLARAGELEAIHVPDIRDEAIRDLVRGRDDAVIAQRRVRQQLKALLLRNDIRYVGKTSWTGAHRRWLSELKLPEPAQQIMFEEYVDAIAVATGRIERLTRAIETETLSWRFAPVVAALQAMRGIQFVHAVTLIAELGSLTRFGSARQLMGYLGLVPREASSGEQRRQGSITKAGNSYARRALIEAAWAYRHPARVTRIIATRQTGLPKAACDIAWRAQLRLSAKYRRLNARHLHHNKIVVALARELSGFVWAVGQCVKPQ

SEQ ID NO: 274394 - protein, 351 aa, unidentified
MEMIAMLDHQPLFAALDVSLEKTTVCVMSLDGAITKEAVVATDPEAIATCLSDDLGRLERVGVEAGPMSEWLVRGLADLGVSVVLMETRQVRAALSAMIVKTDRKDARGMAHLLRTGWFRPVHLKTVDAREQRAMLSARTTLVARLKDIENSVRGLLRGFGLRLPKALRGRWDAGVREAVAGHPTLLQILEPLLVARGALREQLILLDKRVRDAAKADRVCRRLMTAPGVGAIVAMTFRAAVDQPDRFRSSKQIGACFGLTPRKYQSGETDRAGAISRAGDASVRVALFEAAHVIMTRSAKWSKIKAWAMNVAKRRGAKRAKVALARKLGVVLHRMWVDETDFRFGQPAQA

SEQ ID NO: 274395 - protein, 451 aa, unidentified
MDYAKNDHLVMFLNGHGDILRKPFSVKNTPEGIAYIDDQVTRFCRRQGIKKKHVFFGGEDANSFAKNFVSTLRCKGFVVANVNAHDAKKQRSNVQASTDRIDLMGIATMLLSCRANCCAAQSGIYRNLRTLVRHRRRLVQMLTEVKNRVHGIVDELFPGFLNEKNSGIVPFTQSSLYLMQDRFSPKQIRRRRRQKLIEILKRSSTSKAEHTAAKLQQYAGKVLHAPVEHVDTMQLSLAQHIKHIRCLKESVAQMDKEIALNLAQTQGAFLTSVRGIGLVLAAGVTAEIGDPNEQKPLNNLASYSGIIPRVKQTGGLDGKTYTGPVAKRCNRILKDYVVKSAYHIGLHGPPDLMADYKRRDASGQHADFGIGRRYLRMAKSLMRTSQVYLPPNLRKADSTRQDRPGYYLMSWPYLREKWKKVGALEAAFANNRPLGRWRQIVQELYDIKLKL

SEQ ID NO: 274396 - protein, 355 aa, unidentified
MKQQAIQYVALDVHQATLVVSVRDEQGSIVMRATVATEAKAIVGLLRGLGSRVHIAFEEGTQAQWLHDVLTKHAERVVVCNTRGRGEIGNKSDRVDADRLSELLRLGALKPVYHGASSLLTLKELVKSYVALVADGTRVMLRIKALFRARGIKTPGTSVYRPSKRKEWLARLGERGARMRAEALLTELDVLQELRPKAKAAMIAEARRQPGWKLLRSIPFLGPVRVAQILAIMATPWRFRTKRQAWPYVGLAVVTRSSADQEFAEGKLRRRKREPLTRGLNRNHHPLLKSVFKGAANAAAAQDGPFKEYYDACVGRGVREEMAKLTVARKIVAIVLRLWKTGEMFDATKLKMQAT

SEQ ID NO: 274397 - protein, 347 aa, unidentified
MSMLADRVDYVIGIDCHKERHVAAVADRLGGLQATLSVTSDAQGYRSLLKWADKNAGGRRVWAIEGAGSYGAGLSDWLAEKQERMVEVDRPKRPKRKAGIKSDELDALRAAKDALAAKRLAEPRRRGGLEAIRVLKISRKQAVQVSAVAVVQLKALVVSAPEGLRARLRHLSGAELVATCAGLRNQPSHSAEWAATLFAMRSLARRAQAAAADAAALDRELSVAVKAQAPPTLLGEVGVGTVVAAELLSVWSHKGRLHSEAAFAMVAGAAPIEASSGQLIRHRLSRSGDRQLNSALHTVVLTRWRHDERTQVYIARRRAEGKSDREIRRCLKRHIARHLFRLMEAAA

SEQ ID NO: 274398 - protein, 428 aa, unidentified
MIANSAAAPRGTFVAIDVAKLVHEVLVEPPTGRRQRWRVGNCLPDFVTLRDRLCAFPSPIVIGFEATGNYHRPLAYYLGQCGFELRLLSSLAVARTRDALYNSWDKNDPKDTQVLLHLLKTKVTQRYHDPLVHAVNDLQELSQTHYQVSLRKVRIQHSIMTHYLPLYFPEADRYHTNSRAQWFTRLLHRFPCPAAITRYPHEVFEQEAWPIVGRKVNKHGFLCDLYVTASHSVGLPVSEESEAIQMFRVILAEHQQLCATRAAIEQQADQALRAHPDYQRLRTLPGVGPILALTILTEAGDLRRFSHHRQFLKFCGFDLSTQQSGQFRGTSRLSKHGNARLRYAFWMAANGAVRMRQNTFREKYARYIKPDPQNPDRKRKALCAVAAKVARVAHGLIKTGTNYRPYFEALPPSGTLRSRGPSRQILTS

SEQ ID NO: 274399 - protein, 319 aa, unidentified
MTRNLGQFECYVGVDVSEGRLDVCLLPGGERAAFSRDRRGVARLVAWLASQARLLVVVEATGGLERVLTVALEQVGIAVAVVNPRQVRDFARAAGLLAKTDRLDAYALALYGERMCPVPRPPRSAAGHALAALVLRRRQLAQLVEAERNRARRSEEPAVLASIEALLGWLRTALAQLEDQIATHLARTPVWQERAALLASVPGVGRVTVSTLLALLPELGALDRRTVAALVGVAPFARDSGLMKGRRTIWGGRAPVRAVLYMAALVAVRHNPALRAFYDRLVAAGKAKKLALTAAMRKLLTILNARLRDRQPWRAPQSA

SEQ ID NO: 274400 - protein, 388 aa, unidentified
MPQQRKPNDLGRSLISLAMDTTLIVVVELSLSSWLVAGIVPGVERQPLKKLKTDENALLALLNRWRDEAVRSGHKISRIAVAFEAGRDGFWLARWLKARDIEAHVIHASSIAVSREHRRAKTDRLDTELMKRAFVGWLRGERDHCKTASVPSLWEEDAKRPSRERESLVGEQSRLINRMKATLIRLGIRGFNPKLRHAEQRLETLRTPEGEPIPPNTLAELKRDMQRRRFICDQIRSIEQDRLERLERTPDTEPHAMVRLLARITGIGIETADLLVHELLLRNMRDRRAVARYGGLTGSPDRSGGTNREKGMARSGNARVRRGMIQLAWRFLLFQKNSALAQWYRRRTEHAPKARKTMIVALARKLLIALWRLVREGVVPEGVAMRPA

SEQ ID NO: 274401 - protein, 361 aa, unidentified
MVLFIGADVHKKSHTLVAVDPVGKQIGQLQVMATKAGHEKAYRWAKKFKDQDRLWGVEDCRMLTGHLERDLLAHGEAVVRVKPKLMAGQRASARTYGKSDPIDALSVARAMAREQDLPLARPAGPEREVRLLLARREDVVAERTRAVNRLRWHLHELDPELDPSHGALNRATTRRQLRAFLDGTEGVVAEIAGMELEDIDRHCQQVKDLDRRIRHLVAELAPELLQIPGCAELTAAKVLGETAGIDRFATAGKYVMFAGCAPVPVWSGNTAGHVRLNRRGNRQLNCAIHRIAITQARLEGPGQDYYLRLRASGKGKMEALRCLKTAIARTLWRTMTRAQDHQAKAGAPPPLTETTPLPQAA

SEQ ID NO: 274402 - protein, 324 aa, unidentified
MERQGFVGIDVSSGWLDVAFRPGTELVRVNNEPRAITRLVRMLERRQPELVVLEASGGYEMAVLERLLAKEIPVALLNPRQVRQFARASGRMAKTDAVDAEVLAHFAEVMKPQPRRWADLETRQLRALVNRRHQLVQMVTAEQNRRRLALAVVRDGFGATLRCLKLQITAINKQLAALIRQVPGLRQKAELLCSAPGVGEVATATLLARLPELGSLDRKKIAALVGVAPFNRDSGRFNGKRAIWGGRGDVRTVLYMSTLVAVRRNPSLRDFYRRLRGAGKTTKMALTACMRKLIVTLNAMVKHETPWRCPPSISSKASRYATQR

SEQ ID NO: 274403 - protein, 324 aa, unidentified
MNKYNETFGIDISKDVFDCYGSVQGHLQFTNRETGFKKFQELLSKDSLVVMEATGYYHYRFAQFLYKKKVAVSVVNPLSVKRFIQMKLAKVKTDKSDSKAICEYELTQDVPLYNALTDTQSECLQLFRLMDSFLKKRTATKNKIHGEEVLGVPSNWVYRSLKRDKKHLDKELKGIEQKLLSLVKQDQQQQLTLLQSIPGIGLKTALFLIVVTDGFTKFETASQLCSYVGITPTIRESGSNVRGRARINKVGNRKLRNLLFLCSFTACKHNKGCSDLYQRITNKGKSKKLALIAVSNKLLKQCFAIAKSGHPYDPTFVSVLAVKS

SEQ ID NO: 274404 - protein, 438 aa, unidentified
MSNKVIFNLDELFISVGIDVGADFSWMSIALPNQQFVGKPYKILHNSIDSLTTAVSKIKEAEELYSLESRIFLESTGIYHYPLFCYLRDKSFNCSVINPIITKNSTNINIRKVHNDRFDSKKAALVGLKPDLKVSLMPSDLALNCRNLCREYYDLMDNRSAYVNKLQGELRMAFPQYLGIFSKITINTSLTLLETYTSPSAFLEADKQEIIDIIKSTARFGLTYAQNKYNAIIQAATDANQFGYIIESNIKRIRLYISFIRKYDEEINNILESLHELVDANEDADFVKQIHLIETIKGAGFLSAVSIMGEIGDFSAFSKPKQLFAYFGLDPAVKQSGKFEGTKVQMSKRGSSIARRVIHTLALQSISISRNGRAKNPVLREYYLQKCDSKPKLVAMGAVSHKVCNMIFAILRDNKPFEIITPQEHIKQYNAAKCDIAA

SEQ ID NO: 274405 - protein, 373 aa, unidentified
MNNTITYVAMDTHKKEHKVALHYPCNEEIVRFVVKNNARDIKRMVNKIKKRAPADIKFCYEAGVCGFTLKRRIEALGCQCTVIAPSLTPIKPGDHIKTDRRDALKLLTMFKAGLLTEVHAPNAEQEAARELTRCRQTAQENLKRIRHQVLKFLTRHGYVYTDGDHWTQKHLRWLRGLEFDQFLLADVFDNYFTQMNHCLQRLDSLDKDVKKLAESDTYKEVVGLLRCFHGIDTLTAITIITEIFDFGRFSSPGQLMSYLGLTCSENSSGENQKKGSITKAGNKRVRRLLIESGWHYRHPCKLSKALRMRRKDQPQWVIDIADRAGQRLRKRYRHLINNGKMPCKVTVAIARELTGFIWSVFNEYQIRNQEKVA

SEQ ID NO: 274406 - protein, 343 aa, unidentified
MEHIAIDLGARESQVCVRAADGTILLEGRHPTVALRAFLGQRPSSRVVLETCAEAFGVAAVARELGHEPVVVPASLARALGVGTRGLKSDVRDARHLSEASCRMARLPAVHVPALQSQARKGECALREALVTTRTKLVNTVRGWLRGQTAGPLRRCTPPRLPARVRAHLAAHGQAVPDAVERVLHVIAALNGQIRAADAALTALAQEDAVCRRLMTVPGVGPVTAVRFAAAVDDVQRFPRASAVQSYLGLVPGEDSSAERRRITGITKAGPSRVRWTLIQAAWCVRRLRPQDPAVQWARRVESRRGRPVAAVALARKLAGILYAIWRDGAVYDPQHSATRRAA

SEQ ID NO: 274407 - protein, 335 aa, unidentified
MSLKLLAIDLGKRSFHCHGIDSDGVIFSRKVSRSKLIETIKELAPETIAMEACASAHFWGRLLLADGRRVLLINPRFVKPFVKGSKNDAADAEGIYEAALRPTMRFVPVKSIEQQDLQSLHRARERVVCARTALINHMRGLLGEYGVILPQGAWRFLTQAADAIATAELSDLTRELFGDLLEELRVLDLRLDKLDRQLLGICRTNEACRRLSKLPGVGPVIATALVAAVDDGHHFRSGRELAAWIGLVPRQYTTGGKPRLGGIGRRANHYLRRQMIHGARAVMFRLAKHDDPRSQWLKGLAARRGFNRAIVALANKTARIAWALLTRKEDYLAAA

SEQ ID NO: 274408 - protein, 323 aa, unidentified
MQNHVIGIDVSKKTLDICAIFDGKIKKKSFTNTESGFKNLAAWIEKLELVSPHICMESTGCYSEASAEFLYKKGFKISVVNPLPIKAFRMSKMVRQKTDKSDSEVIAQFCMQNNPILWSPKPRENKELHEINVRVDALKAELNRLINALEMEYINETVKKSIDEEIKFVKKAIKDLEIEAKKIVKENEKLKKHFDILTSIKGVGAKTALTILADMPDVDKFENAKQYAAFIGVTPSHFQSGTSINGKSRISKLGSKRIRKILYMSALVAKNKNKHFEKFVRKLEKKGKAAKVIIVAIMRKLMHLFYGMLKKNNDFNENLAFKD

SEQ ID NO: 274409 - protein, 321 aa, unidentified
MQGKKLLGQSAERVYVGIDVCKDRLDVYLHPIGQEVSVANTIDGLRKLKRVLQKHDVALVVVEATAKYHWLAHRVLGAAGFRVAQVNPLRTRLYAQVRGQLAKTDKIDARTLAIFGETMSPEARPPAPEAMADLHEIVRARQEISDDLVVLKNRRGAAQCDFLKREIGRAIKSLQAHEERLEVEIKRRIERDPALKRRYQILTSIPGIGSAIAAVLLIGLSELGTSSGKSMSLLVGVAPIAADSGETIGVRHIRGGRGYVRRALYMAALTAVAWNHDLKTFYKRLLKTKEKKVALTAVIRKLVVLANTLVKEDRPWQPIRP

SEQ ID NO: 274410 - protein, 344 aa, unidentified
MERYAGIDVSLKWSSVCVVDATGKIVRETKVPSEPETLVAFFRQLGLPLTRIGLEAGPLSQWLHAGLTRAGFEVVLLETRQVKAALSAMVVKTDRKDARGIAQLLRMGWFRPVHCKSLPAQETRALLAGRKLLQSKLLDLEFSIRGILRGFGLKVGPVSKGRFVARIRELTTGQPMLERVVEPMLRAREALSKEFHALHRAMLDLVRDNSLCRRLMTVPGVGAVVAITFATAIDDPARFRRSRAVGAHFGLTPKKYQSGETDVTGGISKVGDGTVRVALHEAANVILTRSGRFSALKRWAMEVAKRRGMKRATVALARKLAVVLHRMWLDGSEFRFGKEEAAAA

SEQ ID NO: 274411 - protein, 372 aa, unidentified
MNYNTVYVGMDVHKESFTLCSCKYEDEKASHYQRTPASYKNVLRYLAFLRTIYGEYTRFVCGYEAGCLGYSLYHQLENFNVECVILAPTTMLEQRSKRRIKTDKRDAEIIAKSLAQHNYSPVHIPTETDNQTKEFIRMRDDHKAELKKIKQQILAFCLRQGYQYDGSGNWTAKHVKWLRSLKTEGLYKEILDEYLLTYTILTDKLNRLDQRIEELASKEEYKESVSKLTCFLGIKIHTALSVIVEVGDFQRFVSARKFAGYLGLVPGQHSSGDDRNGLGITKAGNTHVRRLLVESAQSYTRGKIGYKSRVLRSRQAGNSPQVINYADRANERLRRRYYKMVLKDGKKYNIAKTAVARELACFIWGMMTDNIY

SEQ ID NO: 274412 - protein, 346 aa, unidentified
MRFYNGQHRYYCGVDLHTKRMYLCILDHEGNKLLHRNVRAKPREFLSAIEGFRDDLVVGAECMFTWYWLADLCLVEKIKFLLGHALYMKAIHGGKKKDDKLDSEKIARLMRGGTFPLSYVYPREMRATRDLVRRRMFLVRRRSELLAHVQMTNQQYNHDPFEKMLQYASNRDVLDRFEQPSVRLSVEADLKTVDHYDKLLAQLEKDLVRQATLHDPRACRLLRTIPGIGKILSLVLLYEIHTIDRFPSVGDFLSYARLVTPKQTSDGKVTGHSGAKIGNVHLKWAFSEAVLWMLRNSDDAKGFLKRKEKKYGKARAMTMLARKIARAVYQMLKRKEPFDAMKFFAC

SEQ ID NO: 274413 - protein, 361 aa, unidentified
MLYSGVDLHRRSIVICTVNDSGSIVARKSMKTQPDLVAAYFRQWPDQHRAVVECTTGWYWFSDLLRSLGVNVVLAHAKYLKAISYAKVKTDAVDALTLAQLLRMGYIPEAHQLPPEYRAMRDLLRQRMVMEHKRTNIIQRVTSILAQFNITELSLSPYQSGFADFLKNCDIPEEYRMTLMLYHQQCLQVTEHRKQLEKHFKARLRPTPVVQLLMSLPGIGDITGSIIAMETGDIHRFADAKHYCSYCRLVPGAKDSGGKHSHRPGSKDGNQYLKYAFTESAIKAMRFYPEIKHFASRLERRATKAIARTVVAKELAKISYYVLSRQQEFKTFKGIEINKLRNWPRSRKPVRLTGGITPPSV

SEQ ID NO: 274414 - protein, 364 aa, unidentified
MDVHLRSTTVCALDAETGEAVTRRFRGNPWGEVAEWMSGFPGPSLAAYESGYLGFAPQRELSGLGVDCVVAAVSKVPRSAADLSSKNDRNDAARMAKAILSHDISPVWVPSPEIEGLRDLAGAHDAATARLAAAKQRLLAFLARRGYAYGGTTPAGNPRRYWTYDFLRWLDKVRPADDGGIRALAALRNEVEAAAETRDDLLAEYRAAVAAGPLSAEVEALQSIKGCGFALAAAFASEVGDFSRFRSGRQVTSYFGLAPKQRSSADSVRLGGISGAGNALVRRLAVEGSWSYVQASHQPKLMPKGSGVPLEVRMHGRKGSERLLRRREEMLARGMPQAKANAATAAELVRWLWALGAMCREATE

SEQ ID NO: 274415 - protein, 366 aa, unidentified
MKKISTVQTFGNEIFKEQRLTIGLDLGDHWSFYCVLDEAGKIILEQKLPTTPEAMKQTFERIPQSLMALETGTHSPWLSRLLKELGHQVLVAHAQKVQLISKSNRKDDRHDARTLARLARIDPELLGPVRHRSAQAQIHLTVIRARAELVSARTALVNAARGLAKSYGERLRKCGTEQVSRELAAELSVELREVLEPLLKEIESLNERIKEYDARMEKIARESYPQVALLKQVKGVGTQIALTYVLTLDDPHRFAKSREVGCFLGLKPGRRDSGESQPQMNISKAGDRYLRTMMVQGAHYILGPFGEDSDLRRWGLKLAARGGKNAKKRAVVAVARKLAVLLHRLWMSGEVYEPLRNSHQAMRAVA

SEQ ID NO: 274416 - protein, 412 aa, unidentified
MEILYRSCCGLDVHAQTVVACLIKDGRKETRTFSTMTDDLLGLLDWLTAEGCTHVAIESTGVYWRPVFNILEGDMEVILVNARHVKAVPGRKTDVKDCEWLADLLRHGLLKASFIPPLEIRELRELTRYRRTLVREQAAVANRVQRLIESGNIKLAQVATDTLGVSGRQMLRALAQGESDATKLAELARGRLRGKKVELQRALTGRLTAAQRFVLRELLDRYDELEAAILRATEQIKQEVAEGPDPFVREAMQLLQTIPGVGERVAEAIVSEIGVDMSRFPTDGHLASWAGMCPGNNESAGKRKSGKTTKGNIHLRAALTQAAWAASHTKQTYLAAQYRRLVKPKGKKRALVAVGHSLLVIAYHLLSRRASYQELGGDYFDQHNAEVQRTRLIRKLEALGVKVTIEALPVAA

SEQ ID NO: 274417 - protein, 428 aa, unidentified
MNYTQNKKIKQIKSTTLVIGIDIAKKQHVARAQNYRGIEYDKPLKFKNTQNGLERLLNWIKKVKIENEKEEVVIGMEPTGHYWLNIAQFITEEEIKLVLVNPHHVKKSKELDDNNPTKNDVKDAKVIAQLVKDGRFSEPNIPEGIYAEMRVAMTHKEKLTQDLTRVKNRVMRWLDIYFPEFNEVFKDWTGKAALATLKYFPYPDQIAKMEAEEIVAKWREEGIKRGVGIKRAKKLKKAAVRSIGVTEGFKMGKEEISYHIKQYCFINEELEVLMEKVEKLLEKIPGVEKMLTVDGVGVKTIAGFISEVGDLWDYEHPKQIISLAGLNLKENSSGKHKGETKITKRGRPKLRALLYRVAMPLVAQNDEFRQLHKYYTTRRENPLKKKQSLIVLCCKLIRVLFTLGRKQVEYDGKKMLNDIKRPNVKNAA

SEQ ID NO: 274418 - protein, 496 aa, unidentified
MKKQASHDVEPQASISAASKPRRRAKGVRINAAKLEGLEQINLHAAGIDVGAAQNFVCVPAQAVKPGQPNVRSFGAFTQQQDDLVEWLKECGVTTVAMEATGIYWMTLYDKVEAAGLEVVLVDPHSVKHVPGRKSDVLDCQWLQQLHTYGLLRGGFRPEAAVRRLRVLCRHRADLVCEGASHLQQAQKALVQMNLQLPLVVSDINGETGLRIIEAILQGERSPQALAKLRDPRIKKSTVAEMEAALTGHYTDEHLFVLQQNIEAWKFYQQQMEKCDQQIEAALKAMPSAAPANVPPVPPKPVPPAQPGSPGAKKKRSRPLHGNNAPKLDFSEQIRRVCGVDLMKVCGLNLLSVLMLIAEIGVDMGQWRSAKAFSSWLGLCPGSKISGGKKLSRRTRHVVNRASVLLRLAALAAGQTDTWIGRFYRRKKAHLGAPKAITATAHKIACVIYHMLKYQEEFIPLDIALYEVKAQERRMRHLRKQAEELGYQLVERQQTA

SEQ ID NO: 274419 - protein, 421 aa, unidentified
MQTVAGLDPVALVGIDWASEEHAVCVLGVDGRRRAAFTVTHSNDGLAGLIRQLGSFGDRSRIPVAIERPDGRLVDALLEAGHPVVPVSPNAIKAWRESEVVSGAKDDPGDAEVIAEYLRLRTHKLTVAAPFSEETRALRAVVRARDDLVAQRVAAHNQLEACLDAFWPGAKAIFADVTSEIALNFLARYPTPGSARGLGEKRLAAFLTKHGYSGRRPAGELLARLRAAPAGVGDGPEAEARHDAVLGYVAVIRALNASIKSLDRSVAAHLGEHPDNEIFTSLPRSGHINAAQMLAEWGDCRQAYDGPDAIAALAGMAPVTKRSGKHQAVHFRWACNKRFRTAMTTFADNSRHASPWAADVYQRARDRGCDHPHAVRVLARAWIRVIWRCWQDRVPYDPARHGNASRLIPLPVVTAADQEAA

SEQ ID NO: 274420 - protein, 387 aa, unidentified
MPQPNDLSRSLVALDHNSTIIAVVEMSQSSWLVGGMLPGIERQPRKKLEPSPERLLALLHRWRDEAVKAGRTITRIALAFEAGRDGFWLARWLEARGVEAHVIHASSVAVSREHRRAKTDRLDTELLKRGFLGWLRGERGHCSMARVPTLAEEDAKRPNRERDCLVGERTRIVNRIKSTLVRLGIRNFKPTLRKAAERLATVHTPEGTPLPPNTLAELQRDMARLGFVISQIREIEEARQKRLEQQHETGAHAMVRQLARIVGVGVETADLLVHELLSRPMRDRRAVARYAGLTGSPDESGARRREQGLARAGNARVRRSMIQLAWRFLMFQKESALALWYRARTADSRSGTRKTMIVALARKLIIALWRFVTTGEPLEGVVLRPAS

SEQ ID NO: 274421 - protein, 342 aa, unidentified
MQIAVLGIDLGKNSCSVVGLDSTGHVVLRRRLQRGGVTRLTAGLPACVIAMEACCGAHHLGRLLEQQGHRVRLMSPEYVRPYVKAHKNDDRDAEAIAEAATRPTMRFVELKSETQLDIQSLHRARDRLVGQRTALINQIRGLLMERGIVVPQGRRKLETHLEALMTERTVAITPRIRLLMVDLCAEWRDFDRRIAAFDDEFTLLVRTDEGARRLTTIPGIGVLNATALTAAVGNAQTFRRGRDLAAWLGLVPRQMTTGGKPRLAGISKRGNKYLRKLLIHGARAALPSLAKSETALGAWLRGLLVRAHVNTVVVALAAKLARIVWAVLRHGGRFDMKPMPAS

SEQ ID NO: 274422 - protein, 460 aa, unidentified
MKRHKMKQAQRIRSHLKQVNLFAAGIDIGSRSHFVAVPEELDEQPVREFAGFTGDLHRLADWLVEMGIQTMAMESTGVYWIPVYEILESRGLEVLLVDARHVKNVPGRKTDVLDCQWIQQLHTYGLLRGAFRPPEEMVALRSYLRQREGLIASASDCIRHMQKALRQMNLLLENVVSDITGVTGLAIIRAILAGERDSKQLAKLRDKRCRSDERTIAGSLEGHYREEHLFALQQAVECYDFYQQQIKACEGGIERHMREIEGDNDNDQDVPPASKPKGHNKNGFDFDVRSQLYRLAGVDLTEINGMSESNVLTIVSETGLDMNAWPSEKHFASWLGLSPGNKITGGKQLSGKTKPSPNRAAAAFRLAAYSLANSKTALGAFYRRLRNRLGAPKAITATAHKLARLFYRLLKNRTPFIDPGQDYYEQQYQERATRNLKKRAAALGYKLIPESTGGLQESMC

SEQ ID NO: 274423 - protein, 356 aa, unidentified
MTSNIKYVGMDVHKESISIAVRNAAGKIVMECVIETKANTVLQFFDGLRGDVQVTFEEGTWAAWLHDLLKPHVMKLVVCDPRRNALLQDGNQNDRVDARKLSDLLYMNKLKPVYHGDHGLRTLKELVRSYLTITKDLGRVMTRVKAIYRSWAIPCSGKQVYSSRHRAEWLGKINEPGVRQRAEFYYQQLDALRSLRQTVRRELLAESKKHKAWKRLCQIPSIGPIRAAVLLGILQTPHRFRTKRQLWTYSGLGIEVHSSADHETVKGQLQRKKKHVEIRGLNENCNHDLKNLFKGAAVLASTKPGPFESFYVTLVAKGIRPEMARLTLARKIATIVLMVWKKGVCFDANHLKPQTA

SEQ ID NO: 274424 - protein, 347 aa, unidentified
MPARGPVWTALNDRRRSVLVRMTEDGRKLATVRITNSVARLAAEIRRAGLHPQVVLEACYGWYWAADVLAAAGAEVHLAHPAGVKAFSHRRVKNDELDARDLADLLRMGRLAEAWIAPPEIRELREITRYRQKLVQLRTSCKDQVHGVLAKLGIEVTCSDIFGAWGTRWLDELPLPQPYSWKVASLRQLTGWLTAEITVLEQVTAELLAGHDAYRAVQQLPGIGPVLAAVIVAEIGDITRFRHPARLCSWAGLTPRHYESDTTVIRGRITKQGSPALRWALIEAVQRTPAGTPIRQARDAIIARRGIQARNIAKVAAARKLLTYVFYAMRDGHVRSLDTPAAEQEAR

SEQ ID NO: 274425 - protein, 401 aa, unidentified
MNDEYGVYLGLDVGKGDHHAVGLAPDGKRLHDAALPNTEARLRQLFDKLARHGRLLVVVDQPASIGALPVAVARACGHQVAYLPGLAMRRIADLHPGSAKTDARDAHVIADAARTLPHTLRRVDTGDETLAEMEVLVGFDDDLASEATRVSNRIRGLLTQIHPALERVLGPKLHHKAVLELLSRCGGPVGLRKAGRRKLLSIAAVHAPRMGQRLVEQIMTALDEQTVTVPGTTAAETILPRLADSLRDVLRQRDQVATQVERMLDAHPLAGVLTSMPGIGVRTAARILLEVGDGSSFATPGHLAAYAGLAPVTRRSGSSIRGEHPPRGGNKNLKRAFFLAAFAALADPVSRAYYERKRAEGKRHNAALICLARRRCDVLYAMLRDKIPYQPRPRDQAPVPA

SEQ ID NO: 274426 - protein, 363 aa, unidentified
MHESTTVTVGLDVHARSIRLAAVRADELLEERTLPYDEQAVERLLRRWPVVRCCYEAGPTGFGLYRHLIEGGIDCAVVAPGLVPRRPGDRVKTDPRDARKLARLLAGGLLEPIHVPSPEQEAARDLVRAREDARLDRMRDRHRLSKFCLRHGRLLPTSSWSVVRRKWLSEQRFGFVAEQLTFDTYLHALDLVGARIEALERAIRETAEQGPWRELVARLRCLRGIDTLTALALVAEIGDFGRFRTAEQLMAFVGLVPSEHSSGEHRRQGSITKVGNSHVRRLLIEAAWHARRRPKVGYELARRQRGQDAEVIERAWRCQQRLYQRWQRMAGRGKPQQKIVVACARELAGFIWAIATEQPLRTT

SEQ ID NO: 274427 - protein, 501 aa, unidentified
MKAKQRKAKGNDHSSSMASKQRAKIAKAMQAPEQMEIVNRHAGGIDCGSEEHYAAVSPESVEEGEPFVRCFSAFTEGLDALVEWLKDCGVTTAAMESTGVYWVALYQKLEAAGIEVFLVNARHLRHVPGRKTDVKDCQWIQRLHSFGLLSASFRPEDMICRLRSLQRHRLNLVSAGAAEIQHMQKALQQMNLHLHHVVSDISGLSGLRIIEAILAGQRDPSQLAKLRDPRVRKSTVAQMEAALVGDYRPEHLFVLDQSLQAYRFYQARIEECDHEIEPLLQQLAERFECSSSPLAAESSQPEVIQDQAAQSQTARPIKPKRKRKPKANQPKIDLAGYLQRICGVDLTQVVGLDVLSVLLIVSEIGVDMSKWRNAKAFCSWLGLCPGNKISGGKVLDRRTCKVINRVATTLRLAAQAVGRSNTCLGIFYRRKKAHLGPAKATTATARKLACLVYHLLKYKDQYREPDPVTYQLKVQKTILNKLQKQAAALGYQLLPTALVPA

SEQ ID NO: 274428 - protein, 428 aa, unidentified
MKYNTQNAKIKSITEKTLIVGIDVGSETHFARAFDWRNYEYSKKPLEFSNTEAGFMTLKAWMADFAEKYGKNVVIPGMEPTGHYWFNLGAYLQDNGMKPVHVNPHHVKKSKELDDNNLNKNDRKDPKTIAALVNEGRFSYPYIPTGIYAEIRSLSNLRLQTQEEITRIKNRIARWFSIYFPEIKDVYRNPDSVSGLMILKEAPLPQDIVKLGVDGINKIWRDAKLRAAGLKRAKTLVTAAEHSIGSQEAPDSARIELKNLLNDYEIYKNREEDLMSLTEEKLSEIPHIDKLLEIKGVGLKTVSGFVAEVGDITRFDNPKQLQKLAGYAIVECSSGKHKGESHISYRGRKRLRYVLYEAAISLIARNEEFKEVHRYYRTRKENPLKKMQSVIAVACKVLRIFYTILTKGVTYDGAKMMQDIKRPQMLAA

SEQ ID NO: 274429 - protein, 340 aa, unidentified
METSIKFYLGIDISKSWFDVSVLKVVNHEKQPMLTEQFVNTKDGIVSFSKWLKQQEVPFDENTLIVIENTGIYHRPVWEFCSKHNLPLHIGNAAHIKWSLGITRGKNDQIDSKRLCNYCYKQSDELKATPVLNPVFMNLKDLMTSRTRLVAQLQSTKSYIKELLCTNDKALLKTLEKAHKAAIDGIEKSIAQIEKAINDLIVADEKIYRNHELIKSIPGIGSITAIYIICCTNNFANKPSGKQLASYAGVVPFEHSSGSSVRGRNKVHKMANKELKRLIHMCAVSSIRYSSEMKAYYERKKAEGKPGLSVVNAIKNKLLLRVVAVVNKQEKYVENYQKVA

SEQ ID NO: 274430 - protein, 392 aa, unidentified
MVYVGIDVAKDKHDCFIVNSDGEVLYDVFTIQNNMDGFEDLLFKIKTVSKNPDKIRVGLEATGHYNCNLLGFLKNKGLTTIVINPLYTSLSRKSTSLRKTKTDKVDARTIASIIMSDASLKPYSDTLYHNEDLKSLSRYRFDKVSDRAKLKQSVSRLVCILFPELEKLVSTIHAKAVYELLSEFPGAYQVASANLKHLTALLETASKGHFGRDKANEIREAARQSISSYLPSKSLELKHTINLIRELSSEIDEIEAEIKKIMDAIDSPILSVPGISYAIGSMIVSEIGDFSRFDSPDKILAYAGCSPTTYQSGQLYSSHAKMEKRGSKYLRWALINAARYVCNWEPTFAAYLEKKRSEGKHYYVALSHAAKKLVRLLYHLETTGEKYKTVSV

SEQ ID NO: 274431 - protein, 332 aa, unidentified
MYLGIDVHKRYAQVAVMDEAGKIVEEVRVENANLDDLAQRYAGAQAVLEATSNYYHIHDTLSEHLDVTVAHPKKLNQIADTDKKTDRVDAKELARMLRLNSVPESYVPTEEVREARALVRGRQSLVENRTKYANKVHGLLSDHGITEDVKPLTVKRREFLRELSLPTPFDALLESYLDLIESLTEEIQKLEKTIEERAGSLKETQLLMTIPGVSYYTALTIYAELGGIDRFDGDKEVVSYVGLNPVIRESGDSRIEGSISKRGSGRVRWLLVQAANTAVHTCNDKYLSRFYDRLASRKNSQKAIVAAARKMLVSIYYMLDRGDVYDPPGVSA

SEQ ID NO: 274432 - protein, 428 aa, unidentified
MLKINPLSTLYVGIDVSSKSNYVCALDFYKNKYINSSFANNQPGAEELAKKILECLKEHPELNTIVAALESTSVYSIHIANFLSSCEELMHFKPYVFVLNPKCTANYKKSYIGLGKSDPIDAFVIADYARAGNIETEPWRGSQFLALKRLTRHRLHLVECMTREKTYLVSNLYLKFSELQMLEGDNQPFCDIYGATSSSVLTEYLSPEEIIDSPEEDLISFLAEKSRNRIKDISKTAELLRKAARDSYRLDKALYEPLNVSIASSFNCIETFKKEIKLIDTAIEREIKGLNPNAFIILQSIDGIGPVFAGGIVAEIGDISAFHSSDALAKYAGLMWKSNQSGDFDGEDTPMSKAGNRYLRYYLGEAANSMRKHNVEYGAYYRKKYNEVPKHQHKRALALTSRKFVRLVYGLLAKNQLYSGVSLDTSNE

SEQ ID NO: 274433 - protein, 338 aa, unidentified
MNKFSGIDLHSNNSVVVVSDEADRIVYQRRLPNDPVQIRAALAPHREDLVGVVIEATFNWYWLVDELMEDGYCVHLANPAAIRQYDGLKYSGDFADAAYLAQLLRLGLLPEGYIYPAQGRQVRDLSRKRMQLVQCRTAQILAIENLFSRQTGGQMQGERVKRLDEAQVSGFGFAPDVLLAMQANLAVMQTLQEQIGIVEKRLMERVKQHPDYALLNSVPGIGPVLATTIMLETGTISRFAKVGNFSSYCRCVDSRRESNSRKKGEGNTKNGNKYLAWAFVEAANFAIRSCPEARRFYERKKRARNRIVAIKALAHKLARACYYMLREHKPFEVTRCFG

SEQ ID NO: 274434 - protein, 458 aa, unidentified
MSKRSKKTKSQSFKAPSLPRHLQHINLNAAGIDIGSEHHLVAVPEGRDEISVREFGTFTADLEVLAAWLKQCGVTTVAMESTGVYWIPLFELLERRGFEVKLVDARHVKNVSGRKSDVLDCQWIQQLHTYGLLAGAFRPPDEVCVLRSYLRQREMLIQTASMHIQHMQKALQQMNLLLHNVVSDITGLTGMKIIKAILAGERDPRVLAGNRHERCQNDAATIAKSLVGNYREEHLFALRQAVDLYETYQAKIADCDQAIIKQVEKQPDISDDEPPTPEKQVQARDRIRDGVDVRDLLFKKSGVDLFAIPGLAADTLLTLVSEVGFDMKPWKTEKHFASWLGLCPGTKKSGGKVLNNKTKRNPNRATQAFRMAAASLYRSQTALGAFYRRIKSRAGGQQAVTATAHKIARIYYAMLTKGTIYVELGQQAYEQRYKQRRIDHIMTQAKSLGFQLVPCVTS

SEQ ID NO: 274435 - protein, 410 aa, unidentified
MDTIYPNCAGLDVHKDTVYACVRHMSPGGQVRQEVRVFQTTTRALLEMSDWFAQEGMTHVAMESTGVYWQPVWNVLEDRFNVMVVNAQHIKNVPGRKTDVKDCQWIAQLLQHGLLKPSFVPKRPQRELRDLTRQRAQLIQEKSRVANRVQKTLEQANIKLGSVASDVLGVSGREMIQALIDGNKTPEQMADLARRKLREKIPQLCEALTGKVTDHHRFMLKELMDQVRQVEQRIESFDSRIEQVMSPLDRTAVAMLDEIPGIDVRAAQNIVAEIGADMSRFPSSSHLSSWAGMCPGNHQSGGKRKSGKTTQGNNWLKRTLMQCAWAASRTKNSYFQAQYRRLAGRRGKKRAAIAVAHSLLVVAYHMLRDGTAYKELGSNHFDSLAASQRTAPLVKRLEKLGFRVTLEKAA

SEQ ID NO: 274436 - protein, 345 aa, unidentified
MKRITIGLDIAKSVFQVHGEDSSGKIVLQKRLRRSQVLVFFAGLEPALIGIEACGSAHYWGRGLRALGHDVRLIPAAYVKPFVRRNKNDARDAAAICTAVGRPDMRFVAIKSVESQASRGLERSRELLVRQHTQLMNSVRSQLAELGIVAAPGRRGFAELSQLVAVSDERIPAMLLSVLSLMLQQIDQLRVASAAIEAKIMAVAKADPAMRRLATIPGIGGLTAHAIVTAIGDGKQFASSRDFAAWCGLTPRGASSGLKRRQGGISRQGDIRLRKLLALGASTIIRSARSRADRATQWQRGILARRPVKVAVLAQAAKTARIAWAVLTAGTTYRQPAAAAQPQPV

SEQ ID NO: 274437 - protein, 415 aa, unidentified
MPVKVFCGIDWASDHHDVAVVDGDGKLLGRARIGDDAAGLQQLLSLLAEHGDGPGERIPVAIETSRGLLVAALRATGRPVYAVNPMAAARYRERHSVSRKKSDHLDAMVLANILRTDADAHRQLPADSELAQAVAVLARAQQDAVWDRTQAGNKLRSHLREYFPGYLAAVQPVTGGLNAPLARTLLAAAPAPGQAARLTRTQLKAVLKRAGRQRGIDAEVERTHAALRIPQMRQLPQVETAMGRQALALLGKFEAACNAADDLAEASVELFEQHPDAAVITSFPGLGALSGARVLAEIGDDRSRFADARALKAYAGSAPITRASGKSHAVMVRRVKNQRLAAVGYVWAFASLTASPGARAHYDRRRKAGDRHSSAQRNLYNRLLGCLHHCLTTGRPYSENTAFPAPPKLELAIAA

SEQ ID NO: 274438 - protein, 340 aa, unidentified
MRLIGCDLHASQQSIAMLDRDTGAVIEKTLRHEGETVRTFYASIPLPVVVGIEATGSMGWFLRLVEELAIECRVGHPTAIRKAETRRQKHDRRDAALLLQLLVEDRFPAIWMPSIEYRDLRSLLLHRHQWVRMRTRVQNALHAIVLAHGVRRGHTLWNRDGQALLASLPLPPHTADRRSELQALYQHLAEHIDRLDDRVRQVATERARAALLMTHPGVGPVTALATDVFVGDPARFLDGKALASYVGMIPREYSSGTRQRLGALSKQGNPFLRFLWCEAAAHAVRRDPDLQRFYRRKVVQKGFAKARVAAARKLGIRLWIMLRDQIDYAEFCRRGLARRS

SEQ ID NO: 274439 - protein, 325 aa, unidentified
MDEKGKVHINCRMVNEKVSFDALKRRLNGNEPLKAVIEAGRNWGMMYDLLEEIGIDTTVAHPLKVRAIADAKIKHDSIDARTLAHLLRADLIPEVHVPPKDIREQKNLLRHRFWLVKLQTMTKNRIRQIIDRNHVRTPDVTDLFGKTGTKFLKALKLPGIDGKLLKDHLEILYELSEHIKKTEAWIDEVLNDNLYVTILDTLPGFGKIFSALAALEIDNINRFPTKAKFASYCGLVPSTFASGGKVYHGNLIPTGNRWLKYVFIEASWPAIRTSNYCRAYFNRIKYRKDGNVAIVALARRLSEIAYKCLKEKRYYEERPYIPYTR

SEQ ID NO: 274440 - protein, 428 aa, unidentified
MLKINPLSTLYVGIDVSSKSNFVCALDFYKNKYINSSFANNQPGADELAKKILECLKEHPDLNTVVAALEATSVYSIHIANYLSSCEELMSFKPYVFVVNPKCTANYKKSYISVGKSDPIDAFVIADYARAGNIETKPWRGSQFLALKRLTRHRLHLVECMTREKAYLVSNLYLKFSELQMLEKDDQPFCDIYGTTSSGVLTQYLSPEEIIDSSEEELVAFLAEKSRNRIKDISKTADLLKKAARDSYRLDKALYEPLNVSIASSFNCIETFKKEIKVIDAAIEREIKGLNPNAFIILQSIDGIGPVFAGGIIAEIGDIAAFHSSDALAKYAGLMWKSNQSVDFDGEDTPMSKAGNRYLRYYLGEAANSMKKHNVEYGAYYRKKYNEVPKHQHKRALALTSRKFVRLVYGLLAKNQLYSGVSLDTSTE

SEQ ID NO: 274441 - protein, 380 aa, unidentified
MKKELYLGLDVHKDCIITAVAEEGRKGEVRETGALSNDLHSVEKWIGRLRKTHGKEVILRACYEAGPCGFGLARRLKQLGVECEVVAPSLTPKRSGERVKTDRRDARKLARLLRAGELTAVYIPEATDEAMRDLCRARSDAVDDRRRSRHRLKGFLLRHGYRYQGKSSWSAAHERYLRELVLPHPAMKVILEEYLQGIATAGERIERCEEAMGDLLEQWRLAPAVRALMAMKGFQSVAAMILVSELGEVHRFGHPRQVMAYLGLVPTENSSSDRRRQGHITKCGNAHARWLLVECAQHYASPPKVSKELSRRQQGQSHEVRSISWRAQNRLHHRYTRLLARRLQRNKAMVAVARELCGFIWELLRTQPCYQTQSQIGLKS

SEQ ID NO: 274442 - protein, 410 aa, unidentified
METVVERPAALDVHKERVTATVRVPAVGGGREQHLAEFPTTVAGLLTLRDWLAAFGVQQVTMEATGVFWKPVWAILEDEFECVLVNARHVKQVPGRKTDVSDSAWLCQLAEAGLLRASFVPPKPIRALRNLTRYRKTQIQERAREANRLHKALEDTGIKLDCVATNILGKSGRAMLDALVCGTTDPEVLADLAKGKLRAKLPALREALEGRFDHLHAVWIGAILNHIDFLDEQIAGLTEAIGEQIAPFEQAVELLCTIPGVQRRTAEVIVAEIGVDMSVFPTAKHLASWAGLCPGNDKSAGKRRSGKTRNGSKWLDWALEEAALAAVRTKDVYLAAQYQRLRPRRGHKKALGAVKHSILVASWHMLTTGELYNDLGGDYFQRRDPERITKRLVAQLEALGHDVTLEAAAA

SEQ ID NO: 274443 - protein, 355 aa, unidentified
MSQEKYIGMDVHQATLSVAVMDAEGKLIMECLLETKAATIVEFIQGLHGTLSLTFEEGTSAAWLHDLLKPYVSRLVVCDPRKAALLKEGNKNDRIDARKLAEMLRTNQLKPVYHGEHGIRALKELGRSYLTITKDVTRSMNRIKALYRSWGIPCSGAGVYAPRHRAEWLDKLVEPGVRVRAEHVYQQLDSLQPLRLQARGELLRESSQHPAVKLLRQIPSIGPIRAALLVALLQTPQRFRTKRQLWAYSGFAVETHDSGEYRWVRGKLQRNRERITVRGLNDNHNKDVKNLFKSAAISASTRPGPLRDFYVARVDKGMRPTMARLTLARKIAAITLTMWKKGVSFDPKQLHRQAA

SEQ ID NO: 274444 - protein, 432 aa, unidentified
MEVPQMNYTQNEKIMSITERTLVVGVDIAKSIHYARAFDYRGIELGNVFKFENTREGLEAFKEWMDGLTKENGKSSSIVGMEPTGHYWLNLGHFLKDEGMRLVLVNPFHVKRSKELDDNSPTKSDRKDPKTIAKLMIDGRYSEPYIPKGIYSDLRIAMDVRDSISKSLIRIKNRVIKWLDKYFPEFFDVFGDWEGKAALITLREFPTPEKIIAIGIDDIVTTWRKEVSRAVGVKRATKLMEAAKRSIGIKEGLRMAQKELRAIIEQYDLYMAQLSEVETDMEELALQVPGVKEMLTIKGVGIATAAGFMAEVGDIRRFSHPSQIQKLAGLNLVENSSGKHKGQTTISKRGRSRLRSILFKVMMPLVAKNDEFKMLHKHYTTRRENPLKKKQSLILLCCKLIRIFYALINKRVAYSPERLLKNISYLQLQDAA

SEQ ID NO: 274445 - protein, 345 aa, unidentified
MTTMNYIGLDVHKKTISYCVKDVSGRIQQEGKVGSTRRELDCWMKSLPQPWTVAMEATIFSGWIYDHLLPHAAQIKVAHPLMLRAIAAAKKKNDQIDASKLADCLRCDFLPECHMMPAEIRDRRRTLRYRHLLVRQMVQMKNRVSGLLMETGVEYNKQRLHKVSYFRELLSTNTEVHPSIRPLLKLSRETIERCQKTEYALVSSLQRDPVLAGRIKRLRTVPGVGPITALTWALEIGDVSRFRTIKNAISYCGLCGDERSSADKAMRMPLSKQRNKHIQRALVEAAKLAPRQSHELAVIYDNERQKGNGNRATLAVARKMVAYLLAVDRQQRDFVPAEERRTPAA

SEQ ID NO: 274446 - protein, 354 aa, unidentified
MEHYVGLDVGLEETNLCIVDSEGKTVREVKVSTEPAAIRSALECFADRLSRVGVEASSLGLWLYRELQAGGLPIIVVEARHMRVSLSTMHNKTDRNDARGIAQMMRLGWFRAVHVKNVEMQKMRTLLTNRKLLKRKLVDIENHIRGALRTYGLLVGAVSRGQYEARVRELIERTDIVFSTMIETMVDVRRAIFDGYAKLHRVLLQVVRHDQTCRRLMTVPGVGPVAALSFKVGVDDPLRFTRSRTVGAHFGLTPRRHQSGTSIDYEGRITKQGDVSVREALCEAAASLLLRVRKWSALRAWGLRVAKRSSMLCAIVAVARKLAGILHRMWIDGSDFKIGFGAKVTQRLKLKPAQ

SEQ ID NO: 274447 - protein, 357 aa, unidentified
MVDVSSEAKSSATGVTNPYRRTEHCDKIHEYRCDKEVGVIGIDISKEHLITSRGRVRRYENSKKGYEEILKMKPCTIVLEPTGVYAIRPSQYFKEKGIKVLQVSPNVLSGEKELRGKKTDFYDTEKLENMVNKAKEYDYNPLKEMTTLYLFLKDIETKYKNRLKRALFLVSDNDKVNKDRLERLAKGDFTREELYQLEYTPLVLEEIKILAKNLLETQERLKEVRRMIEGQVPQDHVLLTIPGVGGLAAGIIIGIVGDIRRFPKPESFVAYCGLDPVVERSGRAVVSRGISKRGNKYLCSLLYFLAVRNYSRNPTLLKFYETHKDRLKGRKLYVALARKLARVVWSVWYNNKPYEPK

SEQ ID NO: 274448 - protein, 312 aa, unidentified
MTHVICGVDVSATTLDARIGRDGEHCRFDVSTEGLDDLVAFCHAHQVSLVVMEATGGYERRPAGHLWAAELPTAIVNPRAVRDFAKAMGWLEKTDRIDCGLIAWYAETKRIQPTPPASATQARLTALVRRLRQLTDLRTQQTNQRRLITEPAVLDSFGPILAAIVTQQRQIETLIAQAIGDDPLWTRLDAAFRTIKGVADRTVARLMAEMPEIGTLSNKAVAKLAGLAPIARDSGQHSGKRRVRGGREPVRSILFVIAEVVRRYDPDFVAFHQRLSRAGKPNKLIRIAIARKILVRLNAKAREVRNNTALPA

SEQ ID NO: 274449 - protein, 356 aa, unidentified
MSRDIKYIGMDVHQEAVVIAVLNSGGKLVMESIVETKASSILQFIHGLRGELHVTWEEGTWAAWLYDLLQPQVERVLVCDPRRNALLKEGSKNDKVDARKLADLLRTGMLRPVYHGEHGLRTLRELGRSYQTLSQDLNRVMNRIKALYRGWSIPCAGTQVYAPRYREEWLRKIEHAGVRRRAELLYQQLDGLQQLRRTLRPELLTESRKHKAAKLLRQIPCIGPIRAARLIALMQTPHRFRSKRQLWTYSGLGIETRDSAQYRYVRGELQRTKKPQQIRGLNQNHNHEMKEIFKGAATRASCGVGPLRDFYVALLAKGMRPEMARLTLARKIAAIALTLWKKEERFDAEQLKPQAA

SEQ ID NO: 274450 - protein, 386 aa, unidentified
MHQATTLPAPQRTCSRGDCATLFVSLELSRSTWVATALAPGSNKMSKYTLVGGDGHKLLDLLARLKSRAEQRIAAPVKVVTIHEVGLDGFWIHRLLEANGVESHVVDPASIAVPRRHRRAKTDTIDGETLLRTLMAWQRGEPRVCAMTVPPSPSEEDRRRISRERAKLLQERVRHTNRIRGLLFGQGITNYNPLHKNRRKNLEQLRTGDGRSVPAHLKSAILREIDRLELVLHQIGEVETERDEMLQLAQPSSPAALLMRLKGIGAEFATVLYLEGLFRRFDNRRQLAAYAGLTPSPWKSGSIDQEQGISKAGNPRLRTTMVELAWMWVRYQPASALSCWFRQRVGSKRGRIRRISIVALARKLLIALARYLSHGEIPAGAVMTAG

SEQ ID NO: 274451 - protein, 331 aa, unidentified
MDIKEVIGIDVGKLINEVRIHTNQKTHEFDNSKEGFGKMETWVLKNTVCSKDQLIYAFEHTGLYSHPLSVFLSEKKYPFILIPGLELKRSMGIVRGKNDKIDAKRIALYTYEKREKIKPYQMPQDDIIQIKRLLSLREKLVGQRAGYKSTLGEYKHFLKKKDNKMLFDVHEKMIIELTKQIEKIESRLDDVIKGNNQLKKMYNLIISVKNIGPQTALFLIAYTNGFTRFKNWRKLASYCGIAPFPYQSGISIRGKEKVSHLANKKLKTLLDLCAKSAIQYNTEMKNYYEKRTKEGKAKMSTINIIRNKLLARVFAVVQRGTPYVNIDKYAA

SEQ ID NO: 274452 - protein, 343 aa, unidentified
MYYVGLDVHQRSSAVCILDQNGKRVKQMQVRGHSSKVVELLGGLKERCAVCYEASCGYGWLHDRLRRVASRVVVAHPGHLRLIFRSKRKNDRVDAEKLAKLLYLDEVPTVYVPSVDVRSWRNFIEFRNRLVGKRTRVKNGLRSLLRGHGVVALSGKRLWTAKGRFWLAQVEFPTSQAALQRDLLLDELSTFDTQIARVEKELNAMGRKHPGVYLLRTIPGVGPRTAEAVVAYIDDGKRFSRNKAIGSYFGLVPSQDQSGDLNRLGHITRQGPATARKLLAEAAWQGIRRSEHIRAYFERVQQGDRKRKKIALVATAHYLARVMLSMLCTGECWRWDQKQQEAA

SEQ ID NO: 274453 - protein, 337 aa, unidentified
MEITTIGIDIAKSVFQFHGVDAAGQTVLQKKLRRNAVLDTLAKLPPCLIGMEACATSHHWAREITALGHDVRLIPPAYVKPYVKRQKNDAADAEAICEAVTRPNMHFVAIKSVDQQAAMMLHRVRDLLVRQRTMLINALRAHMAELGIIAPQRPQNVLGLIQQLEEDSNGGITEVARSALLSLADQLIRLTQEIRALDRKILEWHRSSETSQRLATIPGVGVLTATAMAASVTDPSLFRSGRQFAAFLGLVPRQNSSGGKERLGRITKMGDGYLRKLLVVGATAILRRVADTQTRTANWIRSLLERKAPRLVSVAMANKTARIVWALLARGGTYRAA

SEQ ID NO: 274454 - protein, 395 aa, unidentified
MRFAGIDIGSEGHHVAVVEEDGAVATKATRFAEDAEGYGRVRAILGTPEQVLVAMEATGHYWQNLFAVLAAHGYQIALLNPLRTARFAGEELARTKTDAIDALGIARFAQQKRPATTPLTDSATLELRELVLMRERMVQELGDKVRQLHRVVDLGFPEFTRHVKKLDTELALTLLHELPTAEAYERVTPAWVAKRVYDGRHRVGPELGKALFEAAKVSVGQHHGETFQLEVRYLCEAIRLLKRQLRELEERIETKLGDSEVGKLLTTIDGIGPQTSARIIAAVGDPSRFHSAAAFAAYLGVVPSLKHSGKHTPSRAGCSPLGHARLRKALWMPVLAAVRRNPWLRAFYQRLRAAGKLPKVALVAALRKLAHAIYSVAKNRTPFVPRLAAAIAEAA

SEQ ID NO: 274455 - protein, 367 aa, unidentified
MKDSITVVGVDSHKNSMEIVTADNFGAMEVRRFGTIGGTMDALDRAVRKLASRGTTLHFIYEAGPCGYEIYRHLTRKGFSCQVVAPSKTPRKSGDRIKNDRRDAETLARLGRAGELTAIHVPSEEDEAMRDLTRGREDVVRALRTARQQLSAFLLRYGKRYPGKKPWTPAHLRWLADLSLPHPSQQIVLQEYIATVREGTERTVRMTDQILQLLPGWRWNPVVEALQALRGVAPLVAVTTIAEIGDLSRFENPRRLMAYLGLVPSEDSSGETTHRGSITKTGNGHVRRVLMEAAHAYAFPARVSRHLLKRQEGLPEPVRAIAWKAQVRLCGKFRRLTARGKLPNKVVTAIARELSGFMWAIAREVKV

SEQ ID NO: 274456 - protein, 408 aa, unidentified
MAIIGMDIHRAFAEVVALEGKSRRRLGRIAMRCDRLAAFAAGLTKDDIVVVEATGNATAVAEVLAPHVGRVVIANPKQVRVIAHAKIKTDKIDAAVLAELYASGFLPEVWIPDKDTLALRRQVTRRNQIVRQRTRLKNIVQSILHAHLIPAYPAGNMFGRKGRAWLAAQKLPEDERMAIERHVREIDRLGEDLKVIQRDLAQYGLADLRVKRLMTVPGLDMIVATALVAAIGDVGRFGSPQKLVSYLGLNPSVRQSGSGPAYHGRISKQGPGRARGLLVEAAWAAARAPGPLRAFFLRIRGRRGQHVAAVATARKLAVLVWHLLSKEQDYLWVRPGLHATKLRRLELTAGHAPARGQRGSAYDYNIKATRDQERRRVQQAEKIYERFVAGWNRSGPRVRTSAAKEERQ

SEQ ID NO: 274457 - protein, 362 aa, unidentified
MFTERTSVGLDVHARSVAAAAIDGVTGELVQAKLTPSYEHVRSWIQELPGPVAVAYEAGPTGFGLSRSLNGAGIRCEVVAPSTLQRPSGDRVKTDAKDAVHLARLLRLDEITAVAVPTVEQESARDLVRAREDARGDLMRARHRLSKLLLRQGLVYSGGHAWTGAHDTWLRQVGRELGSAATQMTFESDYDAVLTVKARRDRLDDAIAQMALDCEFTPVVHRLGCLRGIGTLTGFALAVEVGDWDRFTGKTIGSFIGLVPSEYSSGQSRVQGSITKTGNSHLRRLLVEAAWHHRPAYRVGKTMRDRWELAGPAARARGDEGNRRLHHRWNTMRARHKRHVVTTIAIARELAGWCWSLAVLEE

SEQ ID NO: 274458 - protein, 365 aa, unidentified
MVNKNKKMSKTVLKQALGIDVSKDSLSMSLGVLRSDLSKDFMTREDVANDTDGFVILEKWLRKSSAEGTTPIIVLEATGVYHESIALYLHNLGYKVSVMQSGRVKRYAQSLDQRSKTDALDSRMLAMLGCERSLDVWEPPSETMQELRALSRERSILIRERSIERNRIHAIEISTISNKGYIKRYKKRISLLDKQIEEVKSEMLKIVGEDEYLSTKMEYLVSIPGVSFISAITVVAETYGFSLIKSGKQLVSYAGYDVVHRESGTYRGKTSISKKGNRHIRAVLHMPSMTCIRLNPTLKPFYNRLKPNKVKPLIALVAVQRKMLILMYSLWKNEKYYDSEYEIKKAVKNKSFTAQDRCKLELTTS

SEQ ID NO: 274459 - protein, 350 aa, unidentified
MIIIGCDFHSRFQQIAMLDPQTGEVIERRLEHENGEARKFYAGLATPARVGMEATGYAQWFERMLAEQGHQLWVGDAAEIRAAMVRKQKTDSRDACHILDLLLKGKFPQIWIPSTEERDVRQLLRHRYKLVCLRTSLKNQLHAMAMGHGICRKKKLWTAVGRKELQGLSLGPWASRRRQQLLDLLDQLEPVMEELDRAVIQEAEKRPAAVRLITQPGVGPVTALAFVLTIGPVERFQKSRKLVSYLGLNPSEESSGGRQRLGAISKQGNSMLRFLLVEAAQTASIYDPELRRDYHRLKFRRGSGVAKVAIARKLAVRLYWKLREAAQPVPPAPMQGSPAHSVVGESLSSF

SEQ ID NO: 274460 - protein, 340 aa, unidentified
MFYVGLDIHTTHITICVLDKKGEVFQRCQVRQVGEVMAVLERLPGRFDVCYEASTGYGRFCELFRPVARRVAVAHPGLLELIFRSKQKNDRRDAHKPARLLYVGEVPQVHVPSADVRAWRELITFRRKLIEQRTRAKNGVRALLRTVGVKPPKRPGLWTRLGLARLKQLPLEQSLPALKRDLLHEESEATSAQVARVETELKRYSRDHPAVWQLKSIPGVGLRTAEAVVAFLDNPHRFPGSKQVGAYFGLVPSQDQSGSTNRLGHITREGSPTVRHLLVEAVWQGARRSPTIRADLERIQRNGRDRKKIAVVATAHYLVRVMWAMLEHGTLWQESVEAAA

SEQ ID NO: 274461 - protein, 349 aa, unidentified
MSNKLNSGIAVIGIDIGKNWFHVVGQDRRGAMMLRQKWSRGQVERRLANLPPCLIGMEACVGAHHLSRKLRMLGHDARLMPAKYVRPYSKGQKNDFRDAEAIAEAVQRPTMKFVATKTAEQLDLQALHRVRERLVSQRTGIINQIRAFLLERGVAVRQGLRFLRAEFPRILATPCDVLSPRMVRIIEDLAGDWRRLDERIEGLSSEIELLARRDAGCERLMSVPGIGPILSSAMVAAIGAGAAFSKGRDFAAWLGLVPKQISTGDRTILGKISKRGNRYLRVLFVQAAWVVLIKPKSWQRHGLKPWLEAAKKRLHHNVLAIALANKLARIAWSVLAHGRTFEASKIQRA

SEQ ID NO: 274462 - protein, 358 aa, unidentified
MSKPTPMSGRDKAFEAIDFHGAFVGLDVHKKTIHAAVWAAERIAISWVMPANVAKVVAMLTRYRDKIAQVVYEAGPTGYGLARALRQAGLVVEVVAPGRSPRPATQRNKADRLDAEQLAQYAAKGLLVAVAVPTETEEADRQLMRLREQLVNKRRRVKQQIKSFLLQHGVAEPYGLARWSRAAVAALRALALGSTLRLCLDVLLDQLGELEAHVRRIEGALRELAATARHAEAAAIARTHPGVGPVVAMSYLLEVHRGGRFDTPRQVASYIGLAPRVRQSGQMRRDGPILRTGRASVRALLVEAAWRWRMHDPRARRLFARLVANTGSVKKAIVALARRLAVNLWAMLTRREAYRPAA

SEQ ID NO: 274463 - protein, 328 aa, unidentified
MFYLGIDVAKAKLDCCLLLDSDSTKRKSKSVANTKTGFITLLEWLERKGFSLPQLHAIMEGTGVYHEQAALALVDAGVTVSIVNPAQVKDFGRGLAVRTKTDGIDSFVLARYGALVKPGAWQPPPPEVRVLRALLARREAIAQDLQRELNRLEKADATNTPTLIRQSINDSISFLRKQIAKLREDIDTHIDCHPNLKRDMDLLASIPAVGRQTGCNLLAIIHSYHFTSAEQLAAYLGLVPVERQSGSSIMGRARLSKAGPPRIRAVLYMAAIVATKYNPHVKMVYDRLVARGKAKMAALGAAMRKLVHLCFGVLKTRMRYQANYAKNC

SEQ ID NO: 274464 - protein, 331 aa, unidentified
MEEVRRFVGVDVAKARLDVFIQPSGESFSVANDERGISELLRRLEPADFVIIEATGGLEVPVASALATVGIAVAVVNPRQVRDFARATGQLAKTDALDAQVLARFGEAVKPQVRALRDAQAQALEALVMRRSQLVAMLTAEKNRRANSPKVIHKSIDEHIRWLEKRLSGIDDELAGLVRETPIWRARDELLRSVPGVGKVLSTTLLAHLPELGALNRKQIAALAGLASFNRDSGSLRGSRCIWGGRAQVRRVLYMAVVAAVRSNPVIKNFYAQLRARGKYPKSALTACMRKLLVILNAMLRSKMSWQTPALAASTATFSPRLGAVPEHGCC

SEQ ID NO: 274465 - protein, 295 aa, unidentified
MEQYIGLDVSLKLTAICVVDRTGKIEREGVVHSDPEAIAAFIKSCAPHVARIGLETGATSTWLWTELNKLGLPVICIDARHAKAALKMQINKSDRNDAVGIARIMQCGWYKEVRVKDLDSHAVKALLVSRALLVKIKRDLENQVRGLLKNLGLVIGPAKMNAFALRAAELTEDRPELAVAVTPLLTARVAIEQQIADLDRKIMKRARNNAQVRQFMTAPGIGPITALCFLATIDDPGRFRRSRSVGAYVGLTTRRYASGEIDWTGRISKCGDKMLRSYFAFGIADHVRRDGASSC

SEQ ID NO: 274466 - protein, 314 aa, unidentified
MQILNFGADVSAEEVITARPDSVLGKLPNRRAELTAWLKTLPPGSRLAMEATGRYHTLLADLAHQLGFTVYVLNPKDVHYYAKGLGRRGKTDQVDAQVIARYLAKEHDQLQVYRTPTPQQRELDQLLLRRARVVTLRGALQASLRDLPLVCQQLAETLERFEALLLEMDRRRDALIAACSERHQAQQRLQSIVGVGPVVGAGLGQALERIRFRDADAFVAYTGLDPRPWDSGKKVGRRRLSKRGPSELRRLLYNAAMSAAKTKVWKPFYERQRAKGLSTTAALVVLARKIARVAWSVHRHHTTFDPQMLASGLT

SEQ ID NO: 274467 - protein, 403 aa, unidentified
MSQRFAGLDWASQTHAACVIDEHGSVAVQFEVKHDAAGLAELCRRLRGAGITAVAIERPSGLIVDALLEAGFTVVPIHPNVVKATRPRYRSHGGKSDASDAYLLADLLRTDSQRFKPLAPQNDDIRALRALVRGRDELIATRVQLANQLRSLLESFWPGAADVFADVDSPVALAFIQRYPTPESASRLGPKRMAAFCAQHAYSGRRSADELLARLHQAPAVALGELEIEAKGELTLSLARTLHRLVAQIRLLTSRIEHHVGSIDDGRILMSFPRAGRVCAAQILSELGSVRERFDSDEHLAAEAGVAPVTYASGKSRAVTFRWACNHRLRAALTCLADNSRHANAWAAHVYAKARARGCDHPHAVRILSRAWLRVIWRAWTDRKPYDPMLHGSAQLLLKTARG

SEQ ID NO: 274468 - protein, 342 aa, unidentified
MEQVSVVGLDLAKSVFQVHGVNAQGEAVLRRKLTRGQLVKLFEKLPPCLVGMEACASAHHWARELISLGHEVKLMPPQYVKPYVKRGKNDAADAEAICEAVTRPTMRFVGAKSPDQQATMMLHRVRKILTRQRTQISNALRAHMAEFGITAAIGRGGLDRLIAVIADQEDARLPDEARACLGVLSAQLEMVKEQILDNDRRILADARRTEAGRRLMKIPGIGPLLASAIVACVPDPSTFDGGRSLSAWIGLTPRQNSSGGKERLGSITKAGNTYLRELLVVGAMAVVRRAKQGSTKRPWVTQLLARKKPKVAAVALANKNARIIWAMMTTGEPYREAELAAA

SEQ ID NO: 274469 - protein, 487 aa, unidentified
MHPRTTNIPTPTSNVRRFSFESAGALALDNEYSGFAVLPAHYIAFAERKRARPWTSIYHFGRCEVKPLATQQFTAYVGIDWADTKHDVCLQVPGNELREFDCIRHQMADIDQWAQSLHQRFGGQIAVALELAKGPIVYALQKYDFFVLFPINPLTLAKYREAFTPSRAKDDPTDAELALDLLMRHPERFTPLQPQSVKMRTLLSLTEHRRELVGDKTRFTNRLTNTLKQYYPHVLDWFEQHDTLLFCDFLTRWPTFSQVKRARRASLEAFFYAHNGRRAHVISTRLDAIKAAIPLTEDLGVIAPCRLQVLVLVEQLRITLQAIYRFDREIAELAPQLPDYCLFHDLPGAGPHLTPRLLVAFGEDRQRYQHVDELQKYAGIAPVTERSGKKSWVHWRWQCPTFMRQTFVEWAGQTINKSFWAGAYYRQQRAKGSSYQAAVRSLAFKWIRILYRCWQTRTPYDESKYLNALRKRGSPLLKHLEPNAQNP

SEQ ID NO: 274470 - protein, 331 aa, unidentified
MCQKPRHGAPRLDWAVFDGSNIVMQTQSINSETAIRATLKLIRALSHFSSQTCIVCLEHTGIYNALILSELTKASFPIWLESSLQIKQAGGLQRGKSDKIDAQRIANYAFRFKDRIRLWQPPRQLLQDLTHLSALRQRLLSVRTQLQQPINEQVRFVDPKRQKLVVKNCQASLKAINSDLTNVEQQIEQLIQQDEQLKQLFALMTSIPGVGNATATEVIIATDEFKIIQEPKKLACHAGVAPFEYCSGTSVRGKTRVNQHARKRLKSLFHLAAMSAIRSKGELQDYYQRKIATGKNKMLVLNAVRNKIIHRIFAVIRRGEKYDKNYAPMLV

SEQ ID NO: 274471 - protein, 395 aa, unidentified
MNKIVHYLGLDVHKESIAVSIAPQNSTEVRRYGIIGGTLDAIDKLIKKLASPNVELRVVYEAGPCGFVLCRHLRSKGIHCDLVSPSLIPKKASDRVKTDRRDADQLARLSRAGELTAIHVPDQEDEAIRDLIRARTTAVNDQRQARNRLKGLLLRLGFRYTGKSSWNEAHKRYLSGLLMPQPAQQIVFQECIHAIDDATERVQRLTQAVEDALAGWKWEPVVRALMSLRGFQVLNAMTIVAEVGDLARFTDPRSLMHFFGLTPSEHTSSDKRVLGGITKCGNAHCRRVLTEAAWHYRLKPLVSEAMQKRQEHQPKEVRLIAWKAQQRLHKRFKQLSVRKKSVVAVTAVARELAGFVWAIACKVKPSERPPAPEIIRTCRGKVYVLKPQTKDQKKP

SEQ ID NO: 274472 - protein, 330 aa, unidentified
MNSICLSTDQLTAALPVLGLDVAKKSVQAELRTNGKRVRFGFENNAKGFAQLARMLKEQGAPKVWAGLEATGPYSHALALWLHGQGHRVSLLNPRRVKQYARSAGNRNKTDLLDAAIIADFVCAHLPAAWQPPTLEVAQLQALVRRREELSLMLQAEKNRLEGVASHVRCSLERIIDTLSAEKTRLEKLITQQIRSHQQLSRDHQLLCTIKGIGSLTAAILLAEMARPGQVERARQAAAHAGLAPRREQSGTSVRRNRGLGKEGNRYLRKALYMPALVAIKYNAPLRHFASRLRTAGKPKMSIVCAVMRKLIHIAFGVLKHQKPFNPSLA

SEQ ID NO: 274473 - protein, 413 aa, unidentified
MEKQKNIVCGADIHKKFIMATILSRDGNKIRGRFGMTLDEILRFKNWVISNNCEAVAIESTGVYWIPIYTVLEGSVEVILANAYKVKHTPGKKTDKRDSKWLAELCLNGMIEPSRIFPKDDRDIRALTRAREKLVNNSTQMKNRIHKELESACIKISSVLTDIFGVSGKKIINGLLEGKNIDEILKMITSKRILTKEQEIRQAVTNSLDPARILLIRTYLELIEKIESEIEILNKEIMNRMQKLKEDSEIAMSMTGMGFTSASTILAEIGNVKDFETAEQLASWCGLTPKVSQSADKLVTGSITKQGSKHVRTMLVQVAHAISKSKNSKLKRFFLHILAKKGKKKAIVALARKVLCILHHLLVNREKYQDSEMSKTKKVKLNWASSPVQMTEQDMINVLVGAGYTVQKMKEGV

SEQ ID NO: 274474 - protein, 420 aa, unidentified
MKVVYQTCCGVDVHKSFLVATIIKTTSGVEPSYQKKRFSTFNNSILQFKEWLVKNQCRDVCMESTGKYWVPVFNLLEDEINITIANPKWVKAVKGNKDDTKDSKWIGDLFRLGLVPGSYIPCKPIRILREFTRNRYKLTSCRTSEKNRYQNALTVCNVALDSVVFDIFGKSATSVIDYLIEQPDNSINHEEIASRLLRSLKKKSDSVIESIEGYQMTDSQKYRMRLVRAHLDYITSTINDIDTMLNSLIAPYENAVQLLCTIPGVDRNSAITVISEIGTDMTPFSNSKRLCCWAGLTPDNNESAGKKKSVRITRAGVYLKPALVQVAHAAVKSDKSPYYKQKYERIMKRRGKKRAIIAIARMILTAIYQMLSTGEAWNPTDLFKIDMPEPMKEKQKEKAIKQAMKLLIREGKISESQLAS

SEQ ID NO: 274475 - protein, 363 aa, unidentified
MKIMTGIDLHSNNALCGLMDESGRRLVHKKLPCELPAILQLLEPYKDHITTVAIESTYNWYWLADGLQDHGYPVVLANPARMKPYDGLKHTDDVSDAYFLTELLRLGILPTGHLYDRKHRPVRDLLRRRLLLVRQRTSLILSFKSLNERTLGQRLPLSRVKTLSAEDARARFTEPADQLLGGQQIELMGQLQQAITKIEQHVLGVAGKWNSYQRLQELPGIGKILGLTIALETGDAKRFAGAGNFASYCRCVKSLRQSNGKKKGENNRKCGNRYLAWAFVEAAHFACRYDERCRRFYDRKAKQTNPIIATKALACKLAKAAWHVMKDDVPFDADRVFGPGRKEAFGETGREPAKGSGRTSPQD

SEQ ID NO: 274476 - protein, 368 aa, unidentified
MKNITTYVGVDAHKKDLFIAMLVGDQTTPVTWQLANEPNAVRRLVRKLERDAPGPVHVCYEAGPCGYALQRQMTTPRVSCQVIAPALIPRKPGERIKTNRRDARKLGELLRAGLLTEVRPPTPEEEAVRDLCRARDDAREDFQRCRHRLGKFLLRRGLHYSGRNWTQAHRRWIDSLEWTQPAERAVVDDYLLAIDHTEARLIELDARLTEIAQADPYREPVGWLRCFRGVDTLTAILILAELHDFRRFHAPRALMAYVGLVPGEDSSGEKHRRGRITRTGNALVRRLLVEAAWHYQHRPGVGVALTRRRKGQPGRVIAIADKAQQRLCRRFRRLAEHHKPAPKIAVAIARELAGFLWAALQPAPARTN

SEQ ID NO: 274477 - protein, 344 aa, unidentified
MDATTVGIDLAKNVFEIALADERGHIVERQRLSRARFDRFFVNRPACRIVMEACGSAHHHARRLSSQGHEVVLLPAQYARAYVRRNKTDAADAAALIEAARCPDIRPVPIKSVDQQALQQLHRLRSQWMSARTARINFLRGCLREFGVGIPVGAKRAIQAVRDSLCSGGSVVPVLLHESLLELLAEIDALEQRCQQIDRELVRLNEHDPIIERLLTIPGVGPLTATALRASVVDIQRFPTGRHFASWLGLTSREHSSGERRRLGRISKQGDPYLRTLLIHGARSVLLAARSAQRRGSRLDRLRTWALELQERRGHNKATAALANKLARIVWATWRHERDFGSKI

SEQ ID NO: 274478 - protein, 414 aa, unidentified
MLSPEIRCVVGIDVAKSAHVVCALEAPGGPLRLKSTPIPATATGHAQLLAWLGEWGAGEPTTLLIGVESTGSLWEPLYDRLTQAGYTVVLLNPHQTAAWATSLGLRAKTDGSDAHTLARGLLAGGARTSSGPDETVQALRTLTRTRRDLVVSQSAARQRLHDELVTLFPELVGHLPDHATLGTPAVLRLLTVYSSAYALAQVPLDDLVRVMADVSAGRWGPTHAAALRELAQQSAASTRAVAARTVVVRTLAQHLLDLHARIAELEAALADVLRADPPSQHLQGQVPGLGPTWTATIRAEVGDAARFSRVDQLVAYAGLEPRTHESGRFVGQRHLSKRGPGELRHARYMATLVAVRFRPEWRVHYHRLLDRGRAKKEALTILSRKLLTVIYHLLRTGASYDPACLNPALTAGQG

SEQ ID NO: 274479 - protein, 477 aa, unidentified
MKLKPPEKIQKATNPSTRGHWNEMNRKQRRQMMRQIQSEDLSLEVVHPHAAGIDIGNESPYVAVPPTRDGQPVRHFGCTTVELKAMAEWPKQCGIRTVAMQSTGVYWIAVYDILEATGLDVYLVNARDTKNLPGRKSDVQESQWLMKLHTYGLLRNSFRPSQEIRTMRTYWRQRNDLIRAAVSHIQRIQKALTQMNIQLANVLSDVSGVTGQAILKAILAGERDPHKLAALRDPRVKASEEQIARYLEGNWQEDLLFVLKQEQEGYEFCQQQMAECDRQLEQYLQQREDRSQGASLPQEMRKGRPLRKKGNKPAFALRAELFRITGTDLTQVDGMDVITAATILSEAGWDMSKWEDEDHFVSWLRLCPDNRISGNKVLGKGRLPTNNRASIALRMAARTLRLSNTYLGAQVSPIQDQARRPHCDQSHGRQAGAIGLPHAPLRHEIRGPGRQNLRGPTSPATDRTAQMERRQVGISRC

SEQ ID NO: 274480 - protein, 349 aa, unidentified
MTEQRISYAGEQVYVGIDVHKETYTVTCVCHKQIVKTATVPAEPASLAASVLRWFPGATLTSAYEAGFSAFVLHRTLTQVGIPNIVVNPASIAVAANDKVKTDRRDSKRLARDLADGRLRGIYVPTEAEELARLLPRTRAQIVKHRATIARQIKAKLHQFGLIAPSHRRLISSRYLREIATWPLPRELDVSLTLLAEQWRFATRQLIEMRRLLRDQAKAQEGIEKVYRSVPGIGEVVARTFATELGDMTRFANERALFSYTGLTPSEYSSGTSVRRGHMSRQGSSRVRHLLVETAWRALPRDAVLKEIFDRIAATRGKKRAIVAIARRLTSRIRAWFRQGTTYAVGTYA

SEQ ID NO: 274481 - protein, 338 aa, unidentified
MVYGAIDLHMRYSQIRIVDEDGAVVRDQRVVTSRERLTQAFASHGPMRILLETGTESEWVAQALEMAGHEVIVADPNYAPMYGELRRKVKTDRRDAAALAEANRRGWYRRAHRSSPAQRETKQMLRSRRFLVQTRSGAVSLLRSLLRQSGHRLGTGSCETVPTRVSRLAVAPELGETLAPLCRQIATLTTEIHALDARLQTRTATDAIVARLRSVPGIGLIVATTFRAFVDRHERFGHAGQVSAAIGLVPREDSSAERRHRGHITKAGPREVRSMLIQAAWVCWRHPGSATLRGWTDRLAARRGRRIAVVALARRLSRILFALWRDETTFDGRTLAAA

SEQ ID NO: 274482 - protein, 417 aa, unidentified
MQDAPKDVLPAAGPSHRTAGVDWARDDHAVAIVDASGQVVERFTVAHTAAGIRDLVRRLTKLGTHEVAIERPDGPVVDALLEAGLTVVVISPNQLKPLRSRYGSAGNKDDRFDAFVLADTLRTDRARLRPLVPDSPATVALRMACRARKDLVAHRIALANQLRAHLQRALPGAVGLFAEIDSPISLRFLARFDCQERADWLSPRRLTAWLASVGYCGRVAPTTLHARLAAAPRGATGAEGAAQAHVTRALLAALSTLVEQIKVLSEQIDEQLALHADAHIFTSLPRAGSVRAARLLAEIGDCRARFPTPDSLACLAGVAPSTRQSGKHRAVGFRWAADKQLRDAVCDFAGDSIRANPWAADLYGRAIARGHDHPHAVRILARAWLFVIWHCWQNGTPYDPAQHHALQALVQPHQQVA

SEQ ID NO: 274483 - protein, 353 aa, unidentified
MQTQSKRIDFSGQNFYCGFDTHKKTWTVTIETDEIALKTFTQNADADLLVQHLRKNYPGGNFIAGYEAGYFGYGIQRKLESMGVHCLVINPADIPTTNKDKDQKRDPRDSRKIAKALKNKEVSAIWIPPAALEEDRQLLRTRYALAKDQTRTKNRIKAFLQIHGIKYPEIFSQSGSHWSARFVKWLQAIQLNETSGTEALQSFVRHLQFLRSEILVISRKIRVLTKNNRYEKTYTRLIKIKGIGMITAMTLITEIGDINRFKNPDNFRSFIGLIPSSKSSGEKDYQGRITNRANSHLRYLLVEATWIAIRNDPYYLHHYKQYRKRMKDNNALIRTAGKLANQIYYNMKNKTEK

SEQ ID NO: 274484 - protein, 355 aa, unidentified
MTSTKYIGMDVHKESISIAVMNSVGKVVMECVIETKASTIVQFIDGLRGDLRVTFEEGTWAAWLYDLLKPHVTEVVVCNPRKIALLSDGSKSDRIDASKLAEQLYMNRIKPVYHGEHGLRTLKELARSYLTISKDLTRVMNRLKALYRSWGIPCVGNEVYAPRHRSEWLSKISEAGVRRRAEHYYQQLDVLRSLRQEVRRDLLLESKKHKAWKLLRQIPGIGPIRAALMMAIVQMPHRFRTKRQLWTYSGLGLETHDSAQYEVVEGQLQRSKKPVTLRGLNKNHNHDLKDIFKGAAMRASTAAGPLRDFYEALLAKGRRPTMARLTLARKIAAITLIVWKKEVRFDANYLKPQAA

SEQ ID NO: 274485 - protein, 370 aa, unidentified
MNVTTFAGLDVHARSIKAVALDVVTGEVRSATFGYDACAVAEWVRSIDPGARCVYESGVTGFDLQKKLSSLGVDCVIGAVSKMIKPAADRRRKNDRNDAEFLARMLSVGNVVEVWVPDDECEAARDLARALDDAREDLRRQKQRLSKFLLRHGLVFDEKTPSGQRKGNWTGAYWTWIKGISFREKADNDTLAFYVDAVRRAEEDKRCLEKLVADEASRPRWKKRVDSLRCLKGIDVMTAADIVFEAGEFARFRNARSFAAWLGLAPSEHSSGEKVAQGGITKAGNKHLRRVMVEAAWHYLNASPHSKGLAPGQAPDPAARRHASKGVRRLVGRRAALLERGVHKNKANVATARELACWCWAVGSMAEGAR

SEQ ID NO: 274486 - protein, 423 aa, unidentified
MMKLKYSICCGLDVHKNVIVATIVITNNDGISEYKQKSFSTINSDIQRFHNWLIENNCFHVCMESTGKYWIPIFNYLENDIDVCLTHPKYVKAIKGKKTDKKDSKWIADLYKFDLVRCSFIPPKDFRQLRELARYRFKLVCMKSSEKNRIQNCMTVSNVGIASVLSDPFGRTATEIMSYLLEHTADSMDEKAVRKLIKKGARAKSDEIIEAIRGYNIEADQAKKLELARGHLEYLDDMITQTEVELYVRIKPYYEFVEFVSTMPGMTELSSTIVLAETGVDMNIFDDAKHLCSWCGLAPANNESAGKKKSVRISKAGDYLKPMMVQCALAAVKNKKQPYFAIKYGRIKKRRGHKKAIIAIARMMMVCIYHMVSEKKPFSPTDYEELMDPRNHVERVVLNEDNVFAYLESLGYDSSKLVKRNDN

SEQ ID NO: 274487 - protein, 411 aa, unidentified
MRYIVAGIDIHKKVLMVVVTDAANPEVVLHRRRFGTGASEREHLVAWLKEHGVQEIVMESTAQYWKPIWLDLEPHFGKLHLAQAHSNRAPKGRKNDFGDAERLSRRLVAGELILSFVPDAEQRDWRSLTRGKVQLVQEVVRLGNQLEAFLEEVRIKLSSVVSELLGLSGRRILRALADGESDPVKLAELGDRRLKCSKQELADALKGQLQPKHREMLKLSLERLELLERQILKLDQMTAEEMKKVESAVIRLAEVPGFGVDSAQQVIAEIGPDAKPFESPGNLASWVGVCPGSNVSAEHNRSSSSPKGNCSMRRILTQAAQAAVKKKGSFFQKTFRRWLPKLGYNGALWAIAHKLCRLAWKILHDHVSYIEQGEELDPKAKQRRAKKLIQALRQLGYDVAVSSPAPQPAQG

SEQ ID NO: 274488 - protein, 346 aa, unidentified
MLYAGLNLSRKRVDVCLLDEHGTRLETTAAPPDADGLRGLAARLAGRGQPIRAAIESMNGARFVRDELEQLGGDVSLADAQKVKGLAPLAAKTDRIDAYVLAELARRDLVPVIWLPTPGVRAERERARFRLHLVRHRAALKARIHASLIAHGLSCPVSDLFGLRGRELLDHLALPEPWAATTAASLRLIEHLDDEIAACEAELRRLGAAHPYVPLLMSAPGIAWVLAYTIASEIGEIERFASPKKFAGSTGLCPRVYQSGASDHRGPLAKNGPEHPRWALVEAAVHAARHPCYAAHYQQTRKRLGRQRGAKVARVEVARKLSEAIWYMLTRSQPFAPAGPALPLVA

SEQ ID NO: 274489 - protein, 317 aa, unidentified
MQPRLTVGVDVAKDAVVVACAEHSFPVQSIPNQRAPLRAWLKSLPVGSCIGLESTGTYHELLADLAQAQGHIVFLLNPLDTRHYAKAMGTRAKTDRVDAALIARLIAQEHTRLRAYTPPTASQRTLDRLIRRRATIVRLKGALKLTMRHLSGFATDLNAVLSKVDALLAKIDATMAAIAAGSPQHQEAQQRVQTIVGVGPLVGLSLTNTLERVPFRKADAFVAFIGLDPRANDSGQKAGRRRLSKRGPAELRRLLFNAAMSAIKTNVWKPIYESYRTQGWSTTASLVIIARKIARAAWSIHHYRTTFNQARITQCLT

SEQ ID NO: 274490 - protein, 486 aa, unidentified
MANRKQSTFERLSSGRLNRQQRKELARKLTAENPGLEIVNRNVAGIDVGNESHYVAVAPRCDPQPVREFGSWTADLERMADWLKVCGVEMVVMQSTGVYWMALYDMLEARKFKVCLTNARHTKNLPGRKTDVQESQWLLKLHTYGLLRDSFHPPEEIRALRSLWRLRDRHVKEAGRAVQHMQKTMTMMNVQLSNAISDISGATGQAIIRTILNGERDPWKLAKLRDRRIKATEEEIARSLEGNWRADMLFELKQAVDAYDFTQNQIAECDQRLQTLLAALPEREVKSTEAQAEVPASESAKRKQKRKKSRADGNAPRFDLQAELKRVCGVNLTSIDGIDVMTAQTIVAELGTDYSRWKNESHFTSWLGLTPSRDISGGKIVKQESRKIKSPVAIMLRMAASSLIRSESYLGARYRSLRTRLGAGKAIKAMARYLACLVYRMFTHGQDWVDRGIKEFESKRTQRELSSLQRRAATLGYSIVPQPTSA

SEQ ID NO: 274491 - protein, 329 aa, unidentified
MVTASLLPVVGLDVSKATLAVCYQVNELVKHLEVSNNKAGFQQLVKACGAECRFVMEATGTYNLALAYYLHEQGGEVAVLNPLVIKRFIQMHLSKGKSDRKDAQWLLRYGQQQPVKVWQPDETVLVECRQLEQVNEQLLKQKTLVSNSLEALQRQPVISKLALKRLQQLLKTLTQQVALVEAELLTLLEQRFAAQMTLLCSIPGIGRKTAGMLLLFAGGFTHLDNYRQLIALAGLSPREHTSGTSIRGKVRITKMGGGLIRGKLFMCSFSAKKTNVACAALFDRLVAKGKNKKLALVAVCNKLLKQAFAIVKSGVPYQADFSSNLALAS

SEQ ID NO: 274492 - protein, 362 aa, unidentified
MNYVGVDIHKKYSVLCAVDERGRKLREARVEGNAPFGFAQFFSGLGGPSKAVVEACWNWSLIYDELEELEGIEEVVLAHPYKTRLIADAQIKTDRLDAYALSTLLRGNLVARAHVPRRETRMRKNLLRQRLYWARLRTMLRNRIHALLDRQRDLELPQCSDIFGMRGLSFLRRLELPETDAALLREQLALHDLIAQQMKAQEKRIGLEFGSEAMHQQLLSVPGIGPTLAAVIACEVDSIERFSSAEKLCAYAGVVPTTHSSGGKTSHGQLLPFCNKWLRWALIEASWVAIGCSPYFAALYKQHRARGKKANSAVLIVARRMCRIIWQLLHEKRDFEKRPLRPNFNFPGCSVVRLTAATAARP

SEQ ID NO: 274493 - protein, 364 aa, unidentified
MFFTGIDQHRLRSTVTTFLATGERVGEATLPNDPATLRRYFAQFPGPHHAVVEATGRWYWLRALLVPEGIDLHLAHAKFLKAIAYAKVKTDAIDAATLGQLLRVGLIPEAHMISDTLRGPRDVLRARLRMVTRPSSATNSLDRLLEKWNVARVEDLPPLYQVQAACQTALITVLTDQIHTLEVAVRPALLESTAVQRLLWIPGIGRLMAFTIYLEVDDIQRFPTIKHFWSYCRLVPGAADSANRHRHRRSKDGNRYLKLAFSHAAVRAVQYFPEVRQWYQRWKRKKPLRVARALVAKELAQSVHHVLQDDVDFNQQFKGTPLTRQKKARWPRRASPSASLSFARSSVTLIGRPDGMPGSRSGTR

SEQ ID NO: 274494 - protein, 319 aa, unidentified
MAETFCGIDVAKAHLDVAVRSAGQTLASWQVSNDEAGLLVLVEQLKPMAPALTVLEATGGYECPAAAALAAAGLAVALINPRQGREFAKATGKLAKTDKLDAALLAHFADAIRPPVRPLPGEQQQHLQALLTRRRQVVEMRTAELNRLGTALPALRERIQQHLDWLQGEADALDGELADEVKASPLWREKDDLLRSVKSVGKVTSLTLLAVVPELGTLSRKRIAALVGLAPFAQDSGKRKGTRAIWGGRAEVRAVLYMATLSAIRHNPVIRAFYQHLRKQGKLKKVALTACTRKLLVILNAILRTRQPWVDKTQQAQPA

SEQ ID NO: 274495 - protein, 425 aa, unidentified
MDFKQNQKINQVTEKTLVVGIDIAKRTHYACFVDERGRVLQKSFSISQSHDGFEYFYQRILQTLNEHGKTEVLVGIEPTGHYWLNLAYFLEERGIPLVMTNPMHVKRSKELDDNLPTKHDRKDALVIARLVKDGRFSYPRILKDTEAELRVGSTFRSKLVEELGALKNRMIRWLDRYFPEFTQVFPSFGKMAMAVLECTPFPSDLYEKQPDEVLSLYRGVEGLKSPQRPKAVRLLEVAANSIGVTEGHEMARIEIATLVRRYHQLEQEIESITEQLVELVQTSVEYEWLSTVPGLGDTTIVDLLAEIGSFSHYEDPRQLIKLAGLTLRENSSGQHKGQKRISKRGRRKLRALLFRVMMPMIRHNVAFRELHEYYTNRQVNPLRKKQSIVVLCGKLLKVLHGISTKRKAFDAQRMMKDIPSLAEAM

SEQ ID NO: 274496 - protein, 408 aa, unidentified
MSVRQTALERSTVVVAVDPGKVMNRVWVSNGSGLLEEPVSLPVTRSGIAALEKMLAAHGGEQVIAIVATGSLHRAWAAELDRLHPGAIRLFAPSETKAARTQLGSGRFKTDDRDCAALTYLARQGAGRGHAEESAVEQLRAAVRHRRGLVADRKKAQQRLHDQLNALVPGLSAPAGHGRSLPIQTPTGQAVLGCSVAFAGRTPSIRSLIAGSPGRLSTATAEYWTRRWRDCLPPPPDAAARAQLGRDVGRYQILQADLATVEDEIARLLANTDGRVLTSLPGVAVNRAAAFAAHSLPITRFPDAEHLYSATGLAPAMYQSATLRRRGRISRQGLAEHRDALMGIAWRLSLCSPSFAERTAALRARGMAPIQARVALARNACRLIYRMLVTQQPFDEQAYRQARLSRGR

SEQ ID NO: 274497 - protein, 426 aa, unidentified
METLRHHKKNFKNNYLDPMKPESRQGPSRKIDEAKICSMEGIMDANQVMGADAGNIVLAVSLELSAAQWKVALHDGLRERPAVHAVGAPQAGIRLQGVLELIEQHKLKWALPIHVRVVVSYEAGQDGFWILRALSSRGIECYMVDAASIPVERHKRRAKTDRLDAIRLVTNLRAWLHGERDRMRVVRAPSAQDEASRQLIRDRGQLHKEVLQHRERMRKLLVTLGCWDEVDHRSFARRLAAGQLACHDGTPLPDELRERLQRETARLELAEQQLATLERTLEQRLPTPVRERITYLRRLRGVGHIGASRLMLELFWRQFSNRRQLGACVGLVPQPYDSGQSHVDQGISKQGNRRVRTQLVEMAWGWLRYQPDSALARWFNERTQGTGPNRRARRIAIVALARRLVIALWRYLRDGVIPEGARFKPV

SEQ ID NO: 274498 - protein, 371 aa, unidentified
MEHTRFVGLDIHKERISIAVAESGRSGAVEYLGEISNDPVAIGKLCDRLERRGNALAFCYEAGPCGYGVHRQLTSLGHRCDVVAPSLIPHKSGDRVKTNRRDATMLARLHRAGELTPVWVPDADHEAMRDLIRLRSVVRQIVTRTRQHLQGFLLRHGRKHGRGTAWRMAYRRWLSTLAFGHPAQQIAFQDYTDAVMDAERRLKRVEEQISGLLPEWNLRPVVDALQAMRGIALINAVVLVAEVGDFTRFSNPRQLMAYFGLVPGERSSGETIRRGGITKTGNTHARRALVEGAWAYRMKARIGRHKVDRIEALPKIIRDIGWKAQVRLCTRYRRLRARGKTANVVNVAIAREMVGFIWSIACTIQSAPKTA

SEQ ID NO: 274499 - protein, 410 aa, unidentified
MSTLYVGIDVSSKSNVIYLMKPDGSKHSNFSVANSLDGARQLVKRIHSALTSEKLNSVVIGLEATSIYGDNLVCFLREDATLNPFDKKIHVLNAKQVKKFKDVYSDLPKNDYIDSFIIADCLRFGRINTEVYLDDYRYQALKNLTRSRFYAVQNLTKEKQRFLNHLFMKYSSMTQEKVFSNTFSVTALAIYEEFESADELAYMDLQELTDFIKDKGKNRFPDPDAVAKAIQKAAKSSYRLPKTINDSINQVLSLSISSMRALETQINAFDKAIEAQMELIPNTLRSIKGIGPVYCAGIIAEIGNINRFKNQASLAKYAGLAWTQYQSGGFEAEHTQLIRSGNRFLKYYLCEAAWSLVRCDTEYSRFYHLKYKEVNRGQHKRALALTARKLVRLIFRLLKDNRLYIPPEVR

SEQ ID NO: 274500 - protein, 368 aa, unidentified
MDRKSSKLFVGMDVHKESIDLATGEAQGEVRHYGAIGGDLGSLARVVRKPESQGRELVFVYEAGPCGFGIYRWLRSRGHECWVVAPSMTPRQASDRIKTDRRDCLKLCRLARAGELSPVYVPDAADEAMRDLVRTREDAVVMQRQARQRLAALLLRNDVRYNGKTAWTPAHRRWIAELKLPHAAQHIAFEEYVQAVDEAGQRVERLTQAIEAQSCDWRWAPVAQALQAFRGIRAIHGTRILAELGDLRRFARPRALMGYLGMVPSENSSGERRRQGSITKAGNSSARRALIEAAWAYRYSARVSVGIARRQSDLPKPITDLAWKAQLRLCARFRRLCARGLHRNKVVVAVARELAGFVWALGQQVAPR

SEQ ID NO: 274501 - protein, 354 aa, unidentified
MLIIGCDFHTRYQQIAMAREATGELLVERRLDHESGEAQAFYRSLQSSQEPVRVGIEATGPMHWFERLLAELGHELWIGDSAKIRASEVRKQKTDERDAALLLDLLLAKRFPRIWVPTPAERDLRQLLWHRHKLVRLRTMLGNQLHFLAMSQGLCRKGKLFTKKGRAELGSLTLGPWARRRREELLKLLDQLDAPIAELHDAVLEEAKRRNDAVLLMSHPGIGPVTSLAFVLAIGPVTRFQCSRKIASYLGLNPTEESSGGRRRLGGISKQGNTMVRWLLIEAVHPAIRRDPALRQDYQRLKFRRGHAVAKVAIARKLAVRMYWMLRSGADYAQLVRRQGSPGATLMNASSSLG

SEQ ID NO: 274502 - protein, 322 aa, unidentified
MAMLSFGGIDVSKDRLDITVLPDEQCSSVSNDAAGWAELIEQLRGSSITAIGVEASGGYERGVVRALLAAGMSVRQINPFKLRQFAKASGTLAKNDRLDARMIASFVAVMPTRPAQRQAPMIEQLAAMLTVRRQLSEQKVATENASRLLEGAMLQRLSRRRVAGLTADIDLLDQRLVEIVTADAALAHRFRLLTSMPGVGAVLACTLIALLPELGQMSRKQVAALVGLAPYDFDSGKLKGRRCIWGGRARVRHVLYMAALSASNWNPALKAFHDRLAATGKKPKVVIVAVMRKMITTLNAMLRDGTAWVDRYSGRRSASTAR

SEQ ID NO: 274503 - protein, 366 aa, unidentified
MLQKAELSCEADSENYLGGSSETMYYIGLDVHKRTISYCVKDAAGRVHMEGKIGSTRRELDSWIKTLPQPRTIAMEATIFTGWIYDHLLPHAEQVKVAHPLMLRAIAAAKRKNDKIDASKIADCLRCDFLPECYMTSTEIRDRRRTLRYRGLLVKQMVQMKNRISGLLMEKGVTHTKRRLHKVGYFAELMGGNEEIDQSIRPLLKLSREHIVRAQKLDYALVSSLERDPLLVERLKRLRTVPGVGPITALTWALEIGDVARFRSIKQAISYCGLCGAEKSSADKMLRTPISKQRNKHIQHVLVEAAKLAPRQCHELALIYEKEMQRGNRNRATLAVARKIVAYLLAVERREKDFVPTEEFGGTAAA

SEQ ID NO: 274504 - protein, 351 aa, unidentified
MAEQIKHVLGIDIAKETFAARLVQRGESIAPVSEVKMFPNTTGGYQSCATWTQQLGAEPAHTNVVLEATGVYWEACAVDLHHRGYEVSVVNPAQIKHFIRSVLQRGKSDSIDAELIARFGALMKPRLWTPPPPFAEHLQLIVRQRDAYVGMLTQERNRLHALRHRVNCPASVMRMTEDHIQFLEQRVEELERSFKDTIKQLPEWSQLFTLLTSITGIGQITAAVLLTETQAFESFHSARQITAYAGIAPAPYSSGTSVFHAPRISKIGNARLRHALYLAALSASRFNPLMRPVYQRLVAKGKPSKVARVAIARKLLITAFAVVKSKCRFDPSYSHNNLILPRFFGQLIKGD

SEQ ID NO: 274505 - protein, 307 aa, unidentified
MHHSSKVYVGIDVSKLNLDCFIADRCIRLPNGPKGFERLRSLLPTQAHVVLEPTASYHRKLLLYLHRHAVVLSVVNPRQVRDFARASGRLAKTDAIDARMLSLFGRTMQPMPTAAPEPARCALAALNSSRDKLVDMRTQLRNHIAHIDLPGALKSCNATLRAIERQIDKLERAILEHIKAEPALAASYSLLRSHHGVGAVCASTLLAALPQLGLISRQKIASLAGLAPFNRDSGSSRGQRHIQGGRARVRRALYMAALSAIRRGSLKAFYLRLRSAGKPTKVALIATARKLLIILNSSLKPSPLPCS

SEQ ID NO: 274506 - protein, 344 aa, unidentified
MPSNFYLGIDVSKASLSVVLMSSNSKVLWSSKKIANQPSGFKQMVEHASKIASKHADGDDYSIAAGMESTGVYGEQLSYYLADNNMSGRISLYVLNPFAVKSYRKATMQLNKNDAADARLIASYLISMITTGQITPWQAPSLAERLLRELTRRRAELVTLREAEYNRLEKFRAGGSHPHPVIESVQELIAHLEQQIREIDEAIEKHIDDAGLRDTAELLRSIDGIGKVSSASFIGEAGDISRYRSVKQLVSRLGIAPCENQSGTSIHKKPVMSRMGSAVLRHAMYMAALVATRKNKVISAFYNRLLARGKCKKLAVIASMRKLLHIIWGVLTHRVKFDPEYAPA

SEQ ID NO: 274507 - protein, 386 aa, unidentified
MNKIIYIGMDVHSSNFTLCSFEPGYGIDDDKVFGQVQFKEDFIKNTEKYISNLKKRRKGVEVICGYEAGCLGYAPQRELTKRGIKCVILAPSTMAVQKGGKRIKNDYRDSVDIARCLSSGAYKPVYVPDTEDEDVRDYIRMRDDHSNELKHIKQQLNAFLLRHGFKYEGKSKWTMKHLAWVRKLDCTVLQREIINEYLATYDTLTNMIKALDVRIEDFAKTERYSGTVRKLTCIKGISTHTALSFMTEVGDFNRFKTAEKFAGYIGLTPGEQSSGESEHKTTITKAGNRHLRRLAVECSWGYSRGIPGRKSAELKKRQQDMPAEVVSYADRASARCRRKYYRMTVTGKNANKTVAAVARELCCFIWGMATSHYENLEDRPKEQPEL

SEQ ID NO: 274508 - protein, 412 aa, unidentified
MSEVSFTQVVQRGCGIDIHRDEAVATIGGEGLNTETRSYKTFSSSLTELKEWLIENGVTHVAMESTGVYWKPVYKILEGPELTVWIVNARHIKYVPGHKTDKKDSAWICKLLLAGLLKPSYIPPREQRQLRDLTRYRTKLVQQIASEKNRIIRILEDCNIKLDSVLSSTSGVVATKLIDKLIDNGKVTMTDIDEVYHRNLSASKELLYMACEGFIEEHHAFMLKKIRKSMEQTQEVIDEITERIRQLLSPYENVVELLREVPGLNTKTVEDLIAEIGLDMSQFPSEKHIASWAGICPGNNESAGKKKDSRTNPGNKHVKAVLTEAAWAATRTKDTFYSERYHRLASRRGKKRALLAIGHSILKSVYFVLKTNVSYKELGADYVRKQREEKRKAYLKKEIEALGYEVELKKVV

SEQ ID NO: 274509 - protein, 348 aa, unidentified
MRGAVHMQITTIGLDIAKNVFQVHGIDSSEKVVVRKQLRRSQVLAFFKTLPPCLVGIEACATAHYWARALTKLGHRVRLMPAKDVKAYVKRNKNDAADAEAICEAVRRPTMRFVQVKSAEQQGQLMLHRTRDLLMRQRTQVINALRAHMAELGIVAAQGREGIKELLKIIASEQDARLPVDAHTSLVVLAAQLQALQTMIRSIEKRSMAQHRSNEASKRLATIPGIGVIGATAIEATVPDPKVFRSGRDLAAWIGLVPREGSTGGKQKLGPISKQGDQYLRRILVVGAHAVLKRARLHPEKYPWLAELLARKPFRVVAVALANKMARIAWALLAKGGTYRAPALAAAA

SEQ ID NO: 274510 - protein, 403 aa, unidentified
MPMFVGVDWASVEHAVCVVDARGRVRAQFAIAHSAVGLTRLITALRRFGEPATVPIAIERPTGLLVDTLVDAGFALYPVHPNAVKACRARYRAAGAKSDPHDAFVLADMLRTDGHRLRRLRPQRDGTRALRALVRGRDDLVATRVALANQLRALLESFWPRAAAIFADVDSPIALAFLTRYPTPHSAGRLGTKRLAAFLAQPAYCGRRTPEELLTRLHHAPVGHAGASEAAAKGETVRALVAVLTPLVAELQRLSAAVEHAVSTHPDGPLVMAFPRAGRINAAQILAELGDDRTRFLSDAQLAAEAGVAPVTYTSGKHHGVGFRWACNKRLRQAVVCFADHSRHGSPWAAAVYARARARGCDHPHAVRILARAWLRVLWRCWHDRSPYDVTQHRAAKQLLDVA

SEQ ID NO: 274511 - protein, 377 aa, unidentified
MSEITRLMLLIVRVGVDLAKNLIQVHAVDAAGRRVVARAFKRDHFFAWCEQLPPGCLVAMEACSSAHHWARRLSAKGLDARLIAANFVTPYRMEGKSGKNDATDAAAICEAASRPSMRFVPVKSPEQQGIMSLHRIREGFKEERTSCINRIRGVLAEFGLVFAKSPKALRADLADVLEDASNELSGTARLVLKEAFEHWRALDDKLLWCDQQIGRHVRSSNDAKRAAKIIGIGELTASAMTASVSDIKQFKNGAQLGAWLGLVPSQNSSGGKLSLGRITKRGDDYLRTLLIQGAKSAVMSAHKRDDPISKWLVQLKDRIGWQKACIAMANKNARILWAVMTRDAAFDPRHVSVKPPCKVPLGERAMSVPQAMAPCPA

SEQ ID NO: 274512 - protein, 353 aa, unidentified
MKYIIGCDAHKRFSQMAVFEEQSKTLQQKRVDHKPGAIYDFLAMYPEGTPVGLESVGNWYWIVDEIEAAGCQPLMAHAAKAKVMMGNVNKTDKLDAQGLVTLLRNGTLPTVWIAPGEIRDARELPRTRMALCKIRVALKNRIHATLAKYNLHPANKTDIFAQRGCQELEEVIQKLPSETLKCVQQELELLNMVQEQILSLEKRIREQIPEKWMMQLLKTLPGVGDILSIVIACEIGSVERFPGAEYLASYAGVVPGVKGSGDKVRYGRLPKQANHYLKWAYIEAANSVSSHCNAPNWRQKHVTLLYERVRRRKGHSVAAGAVARHLAEASYWILTKKEPYRDPVRKKVLPRQG

SEQ ID NO: 274513 - protein, 343 aa, unidentified
MQIRSVGIDLGKTTFHLVALGDNGKVLLKKKFTQKQLIAFTANMQTCLIGMEACSGSHFLGRALREQGHDVKLIPAQFVKPFVKSNKNDFIDAEAIAEAVDRENMRFVPIKTDDQLDLQALHRVRDRLMARRTSLINQIRAFLLERGIVFAKSPIRLREALPEVLENVNENLTPSMRNLVAMLWSEWKDLELQIMQMNDEVERIASSDAACRRLRQIPGIGPLVATAIVASIGNGAAFRKGREFAAWMGLLPKQHSTGGKARLYGISKRGNSYLRKILIHGARAVVLRSKRDRIAMGAWMTSLETRAPRNVLIVATAHKLARIAWAVLSTGQDYRAVPEALTV

SEQ ID NO: 274514 - protein, 346 aa, unidentified
MPIVGGLDIHRKQITFDYLDTVTGQVRRGQVSPADREHLRAWLARFHGRGDVAFAVEGCTGWRYVAEELATAGVTAHLAEPADTAFARGRKRHAKTDKTDCRHLRMLLAEGRLPECWVPPSRVLECRALLETYHDLRREHTAWVQRIHAVLFHQGAPALGEGTLRTEQGVAALRAVTAEWLSPAGQLQVATALEILEALEARLHMLRHQLTDAARHLTGAKVLAARLYGVGPVTALAMTCWLAGKDRFSSSRQAVRFAGLDVTVSSSDRKGPPGRLSRQGPPVLRWAVYEAGKTHARSSAPDHAYYAQVKDRCNGKRAALSEARKILRQACHILAELGDDALAPAA

SEQ ID NO: 274515 - protein, 338 aa, unidentified
MALYCGIDLHSSKSWIAILDEGLEVVQETSVANDLGEVLRVLEPYREGLEGVAVESTFNWYWLVDGLMNAGHRAHLTNTWAVKQWEGLKHTDDRHDARWLAHLLALGILPEGYIYPKQERAVRDLLRRRAFLVRKRTSFLLSMRGAFECHTGLRTRSREVKRWTEADVEAYLDDPAAVLGITCLLEPLKVVTAQIRTIEKEVLSRARLRDEFAPLQTVWGVGKVLALTIMYEVGDIARFSKVGNFASYCRLVKTARLSAGKSKGTGNRRNGNPYLSWAFSEAAHFAVRHHEVARRYFQRKRSKTNGIVAIRAVAHKLARASYYVVRDQVDFDPQKTFV

SEQ ID NO: 274516 - protein, 346 aa, unidentified
MSYSTTVGVDLAKNVIQISVVSGRGKELCNRSLTRKKFAEFLCKQKPSLVAFESCATSHYWARAAKRHGHEARIIPAKAVAPFRQGHKTDSNDALAVAEAARRPKIKEAPMKTVEQQGLQAIHRSRELLIQESTALSNHVRSLLMEFGIVIKTGFASLLRAVPEILEDGENELPDLYRPTLHRMYTRLLELREDIGAMTAEVERLAKGHPICSKLMALEGIGPIGALLLYATMGSGAAFSSGREFAAYLGLAPKQYSSGGKTNIVGLSKKIGNSRLRSVLILGARAYTYKLKEPKSSKDKWLKAIIDRNGESRAAIALANKNVRTAWAMVTQGTEYQRREQLPMAA

SEQ ID NO: 274517 - protein, 354 aa, unidentified
MNTVASKWVIGMDVSEKSIEFFFLRPDGEGGLSKKEPNTPDTLAKLCSEMPDRKGFMVVMENGTHSPWMSEYFHREGVECYVGNARKLAAIWTSVQKSDRNDAEMLARLARADLKLFSPIRHAGRDLRAEFAVLKSRDRLVKCRTALINCVRGTLRSFGVDTTDLTVEKFTSKAAGIMPKDLHPALDGLLVQIRMLETQIKDYDRKIERIGKRHEPVQRLRQISGVGPVIALAYVLFVGDPQNYSSAGRVGAHLGIVPKRDQSGDVDKQLGITKAGNQMLRYLLAQGANYILSRGPDCDLRRFGERICARGGKIARRKAKIAVARKLSKIMYVMWRNGTDYELFHKSQRVIVNA

SEQ ID NO: 274518 - protein, 340 aa, unidentified
MLHIGIDMHKRFSEIAVLDGAGMIVARQKLFHDNREQMTAFFTRFGPDAIATVEATRNWYWLYELLENQQLPVKLAHPQQVRVIAEAKVKTDKIDAWVLAQMERTGWLPESYIPSREIRDQREALRYRISLVRARAMFKNRVHAILDKLGIVHKFTDLFGVAGLEFLKTIALRPIYRQELNGYLAIIEYLEAKIVEATKLVRTLLKQDPRVEWLMTIPGVGELTAYLLLSEIGDIKRFPKAKKLCGYGGITPAVRESAEHRWTGRITKQGNRYIRWGIVEAAQLAPRQDPALCAFYDRLAVKRGPKKARVAVARKLLIAVWHVLTYKQEYRYNCLAKYHE

SEQ ID NO: 274519 - protein, 334 aa, unidentified
MNCVGIDVSHKELVVVVSVKGKARKAKSYKNTAAGFITIIQLLAKLKGHVKVCLEATGVYHFDLAVSLSRAENIEVMVINPKVSSNFAKVLLKRSKTDALDAEILAIYCERMPFEAWVRPANENIALRAHSRRMASLSKLKAQNKNQLHALISTEETPELIIEQINELIAVLDQQIGVQRDAALELIKGHTELKARFDLVTSIKGIADTSGIQVLAELMILPPDMSAKQWVAHAGLDPRAFESGSSVSKKPRISKAGNKYIRQAIYMPALVATRFEPHIKGYYLHMINDNGLKKMQAICAVMRKLLHAIHGMLKANKSFEGERFYKFPSEATYS

SEQ ID NO: 274520 - protein, 366 aa, unidentified
MKKHNSNKQITTKGDQKETFAFYIGIDLGDKMSDVCVLDQVGEVSEQFRLRMKGTDFQTYFTAIPRSRVAVEAGAQSRWVAELVERCGHQVYVSNTRKVPYIHESDDKDDPGDAYKLAELVHLKPRLLHPIQHRSQEAQADLSWIRAREALVESRTQIINTIRGMSKAFGERLRKCSVESFTAQRAEQIPATIRAAMVPLLEMIDQLNEQIGYYDQMIHHVARTRYPKYWLLDQVGGVGVHTALAFMLTIGNPERFAKSRAVGCFLGMRPRKKDSGERKPQLGITKAGDGYLRKTLVNCAHYILGPHGPDSDLRRFGLRVCERGARNAKKRAIVAVARKLAVLLHHLWVTGEVYEPLRNSRKATAA

SEQ ID NO: 274521 - protein, 352 aa, unidentified
MKTETTALVPKLYIGIDVHKKSWTFHYQTDLFDGKTITQPANPNTLIEWVQKHYPSHEVTCAYEAGFSGYSAARLFQKQNWNVLVLNAADIPKPQKQNVVKTDQIDCRNICKQLKNDALNSITIPEEQRESFRSLFRERNNLVEGLRHVKLQIKSHLMYYGIVIPEEFDNPNWSKNFIEWIQTQKMSYETGTEKINFLLKRFNFMHYELLNISNQLRAYARKHYKKDYYLLMSVPGIGGIVAVSILAELGDLRKYNRFDDLASSVGFVPGIYSSGDTTIVSGITPRAKGLLRSYIIEASWQAVRFDPVLQEYYRSHYGKKPNKIIVKVARKLLSRIHAVIKTETPYQIGVVK

SEQ ID NO: 274522 - protein, 343 aa, unidentified
MSIVILGVDLGKNACSVVGVDAAGAVIVRKSMRRQTLIDYVTKLPACVIAMEACCGAHNLGRLFAAQGHEIRLMSPEYVRPYVKAQKNDDRDAEGIAEAASRPTMRFVELKTQEQLDIQTLHRVRSRLVAERTNLINQLRAILLERGTIFPAGRRKLELGIDAMLAAEDTALSPRLKQLVGELRAEWHELDTKVEALNGEFVELARNDAAARRLTSIPGIGTLNATALIAAVGDASSFAKARDLGAWLGLVPRQHTTGGKPRLLGISKRGNTYLRTLLIHGARAALPSLARSETPLGRWLTGMIERGVHRNAIVVALANKLARIAWAALRKEVSFERGYPAAA

SEQ ID NO: 274523 - protein, 366 aa, unidentified
MKKISTVEIERIQIFKENQLTIGLDLGDRTSHYCILNEAGEVILESKLPTTPRGIEEIFSKIPRSRVALETGTHSPWVSRQLTQLGQEVIVAHARNVRLIGDSSRKDDQLDARTLARLARIDPGLLGPVRHRSAQAQIHLTVIRARSGLVGARTALVNAARGLTKSYGERLQKCGTHQMSRESAQGLSQELKDALDPLLGEIESLTERIAEYDRRIEKIGKEIYPQVALLKQVKGVGTLIALTYVLTLDDPYRFRRSRDAGCFVGLRPGRRNSGMSQPQLHISKEGDAYLRTMLVQGAHYILGPFGQDSDLRRWGLRLAERGGKNAKKRAVVAVARKLAVLLHKLWVSGEVYEPLRNNHQVVSAVA

SEQ ID NO: 274524 - protein, 393 aa, unidentified
MRKPKKQKKPLNDLSRSLIPFDPNQTLTAVVELSKKSWLVAGIIPGVDRQPLKKLAADENELLKLLERWRAEAEKAGHKITRIAVAFETGRDGFWLARWLRACGIEAHVIHAASVPVSREHRRAKTDRLDTEQLKRAFLGWLRGERNHCKMATIPTFAAEDAKRPYRERDTLVGEHTTIINRIKATLTRLGIRNFDPKLEKAPERLEQLRTPEGEAIPPNTLAELNRDFARKQLVAEQIQQIEKARLEQLKKAPKAGPNLMILVLMRVIGIGIETADMLVKEILSRNLRDRRAVARYGGLTGSPDESGSRSREKGLSRSGNARVRKGMIQLAWRFLRFQNESALAKWFEMRTKNARTSRKKMIVALARKLLIALWHLVRDGVVPEGVVRRPAQ

SEQ ID NO: 274525 - protein, 467 aa, unidentified
MLFVGDDWAEDHHDVDLVDEAGRRLARARLVEGLEGVSRLHALIGEHRPREWAELDPVDAARRVKIGIETDRGPWVQALGAAGYEVFAINPMQVARYRERHSTSGAKSDAGDAHVLAEIVRLDREHHRPVAGDTPQAEAVKLVARSHQSLIWDRSRHVLRLRSALREFFPAALAAFDDLAAPDALELLGRAPDPDRGARLSRSQLVAALRRANRRNVPDKATQIHAALRAPALRQPSPVQSAYAAVVSTQVRLIAALNSEIESLGEVVAAHFGRHRDAEIYFSQAGLGTVLGARALAEFGDDPDRFANAKARKNYAGTSPITRASGARKTVLARYARNRRLGDALHQWAFCAMRGSPGPAAITTLSAPAASATRLRYANSATDSSASSTAASKREPATTRTPPGATTPRPLLDTRTTWDVCRDECAYLPMSGWRPHRMCRDSAGAGMDAGIRIRVGSGQVNGVLVGR

SEQ ID NO: 274526 - protein, 375 aa, unidentified
MKRYYMGVDWGDRLHQIYVGDQEGKKVREMEVQESPQGLAEIGRWLDEKRAEGFELWAAIEKPAGRIVDFLLDHGVEVYPVNPKAVDRVRDRYRMSGSKSDAFDAYVLAEFVRTDQAHLRVLRPSSEKAQELKMLSRDQRRVVRHKTRFLNQLTTTLKEYYARPLEVFDDLETEIALDFLQQYPTPAHLSALKRKEFNRFATKQHHLSKQRCEQLWEKLNQPQLAVPEHVVRAKAQLVEVLIEQLRASIKAVKIYNHKVESFFASSPAAQFAKTLPGGKSGTLVAAIWAELGDAQGRWESSGHLQAEAGAVPVTKASGKSRVVHFRFACNKHLRHTMYWFSFVSLNHSEWANLYYRGQRDKGHSHHQALRALGAK

SEQ ID NO: 274527 - protein, 409 aa, unidentified
MNLNVGIDVSKAKLDFCGMDSDQKVIFQDSVLNRPAGTNAIKQCILDANEKHDYERTIIGLEATSVYNVLPSRALEEDDELQALGLEVVTLNPKMTHRFSQVYDQDKTDKVDARNIADFLRVGRYQVPVPRDERHIALQRLTRERFHLTKEMTWCKNHFLNNLYFKMNTIDAELPTSVFGATMMTVLTDERYSLDELAEIPLEQLTDDLNKLGRGRFGDPEAVAQALKRSARDSYRLDKQVMDSVNLVLGMYANEIRMFAKQLKELDKSITALCDATPEAKCLRSIPGIGPVYAAGIVAEVAQPERFKNEASLAKYAGLVWQRSQSGNTERQATPRVHSGDQYLRYYLVEAANKVRTYDPTFARYYDKKYREVPKYQHRRACLLTARKLVRLVLTLMKNHELYQPAKMV

SEQ ID NO: 274528 - protein, 379 aa, unidentified
MKKIYYIGLDLHKESIAIAWTMGGSRKTPTYWGECGGSNLAAERALRKVAKKLGVKLQDLKVCYEAGPSGFVLARRLLQLGVECVVMSPSKTQRKPNEKIKTDKRDAINIAKLFRNGDITEVRVPPALDEAVRDVCRARTDASDDLSRAKQRLNSFLLRNGIRYSGKARWTPAHLRYLRHLTLPDPVQNLVLEEYLQAIDSGYDRVDRLAERMKELLIDWEWEPVVRALMACKGFQEVAAMTLISELGDLRRFDHPRKLMAFLGLVPGEYTSGDKRRQNSITKCGNSHARWMLVECSQHFRKAPKIGAALSRRQDGQPREVKELSWRMQHRLHKRYVKLKARGKRENKAIVAIARELSAFIWELQNKLDLPIPETTEVR

SEQ ID NO: 274529 - protein, 399 aa, unidentified
MDDDTFWVGLDLGLTRTSVCIMNGQGFPLNEFECDSEVATLTEALAAVAIDRIGGIAVEAGTGTYIVRKLRGAGFPVVVFEARKAHKFLALRRNKSDASDARGLADLVRIGQNSVSQVHLKTDECQRLRSFLVVRQRFVLMKLAVEGVLRCNFALHGRRLESSHTRKALLRRTETIFPSLRSEEGIDLEPDLAPLVMVCDSVRAYLEKSDRDLQAIASSHPVCRLLMEVPGVGPICALSFYSAIGDPSRFRVASHVGAYLGLVPRRYQSGAVSRTLGITKNGNRLTRSHLVMAAAVFARRAPDCPLKDWYLALRGRAGPKRARIALARKLAVILLAMWKQGTHFELDRTGPSGVLSERGPTETGPVAPVGGDWRSQSGTETVTSRSHLRQGSGDNTPGA

SEQ ID NO: 274530 - protein, 355 aa, unidentified
MLYLGIDQHARQLTISLRNEEGDVLLARQVSTQPDKINAFFEYLTRECLQGDESFVSVVEVCGFNDWLIRMLRDYHCHKVILIQPEERKRQKTDRRDAAALSELLWVNRDRLLAGKSVHGLRQVDISSTTDQENRRLTMLRKDASRGRTRLINRIKHILRRHNLQWEMPTKTFPTQPAIAWLKQLVLPEIDQLEMNYLLIDLEHAQQRMQELEEKLAERCGTSEAATLLVSMPGVGHFTATALACRVGSVERFPRSRSLANYWGLTPGCRNSGESHQRLGSITKAGSSMARWLLSQVAYQALRKDAKLREWFKRIKRRRGSSIARVAVMRKLATIIWHMLSKRKTYAACRALATE

SEQ ID NO: 274531 - protein, 392 aa, unidentified
MSLIEDCAGLAGAEPQTWGTGLMNNIVFVGLDVHKATIAVAVAEGARGGEVRELGYFINHPDHIKKLVERLARGGRNLSFCYEAGPCGYGLYRQLIGLGHECVVVAPSLIPMKPGDRVKTDRRDAVMLAKLHRAGELTAVWVPDDAHEAMRDLIRARSTAVRVLIKARQHLQGFLLRHGRIYAGKKGWTLAYRRWLTTLRFDHSAQQVVLQDYINAVTGAEERVERLTQQIAELGQNWSQAPVVAALQAMRGVAFVVAVTVVAEVGDFTRFANPRQLMAYLGLVPSEHSSGSAVHRAGITKAGNALARRALIEGAWTYRMQARVSRKLHDRIDGLPQSVRDIAWKAQVRLCARYRRLAAAGKPKVVVTTAIAREMLGFVWAIATAIQAPRAA

SEQ ID NO: 274532 - protein, 358 aa, unidentified
MKKQREHIVRNEGVFVGLEDSKKTWKLCVRSGGMVVHETSMPARYEVLRNYLNNKFPECQILVMYEAGFGGFDLHDQLETDGWECVVTPPHTVTQEKVQRKKNDRTDCRRLAKNLENGDYSRCFVPDKELREDRQISRTCGQVQADITRVCNRIRRMLEFHGLDKALPAGPWGSGAAYTRLKQRLGETKMSDSLRFSFDVMFKELGQLRQLKKELLQQLRKLARSDRYQESVRLLMSAPGIGKLTAIRLMLEWGDVSRFGRKEEFASFLGLVPSDYSSGEEERRGHITKQGNRRVRSWLVECSWVAIRYDPVLLEKFRRVLRNCGSKKKAIVAVARKLALRLRRLLLSKEPYIVGVVE

SEQ ID NO: 274533 - protein, 309 aa, unidentified
MKEELVYLGVDIAKSYLDAAIGNEKRRFANERVGHRELIKWVKQLKAPVQVICESSGGYERALVQALVSAQLKVSLVQANRVRQFARAAGILAKTDRIDAKVLCNFAQAMQPGTVSASQLEQQHLRELESQRRHLTHLLVMEQNRAARVSDGCVRRLNRSLLKQIKKQIEQLDLLIKEHIEASPELSAKAQKLTAINGVGARTAALLLAQMPELGQLNRREVAALVGVAPFNRDSGKMRGKRAIYGGRRPVRHGLYMAALVASRYNPVLRAFYLRLRGAGKPAKLALTATMRKLLIVLNSALKPDLNYA

SEQ ID NO: 274534 - protein, 356 aa, unidentified
MNHVSKLDFTGQQVYVGMDVHKKSWSISILTDQFEHKTFSQPPEVGVLVNYLRRNFPGAAYKTVYEAGFSGFWIHDRLQDQGIQCLVVNPADVPTKDKERAGKTDRVDCRKLARSLRSGEIEGIYVPTRPKTEDRSLLRTRHSMVRKQTRCKNQIKSILCFYGIHIPDEVASSKWSKRFIAWIETVRMERASGDMALKAHLAELSHIRQTIAELNRAIRALSVTDGYRDNVRVLKTVPGISTLTAMTLLTELCDISRFKTLDKLCSYVGLIPNTNSSGETDRKTGITGRRNVQLRVVLIEGAWMAVRKDPALMMSFNELSKHMTKTKAIVRIARKLLNRIRYVLMHQREYVPAVIQ

SEQ ID NO: 274535 - protein, 421 aa, unidentified
MEETNEPAELVERVAALDIGKAALTACIRVPHEDKPGRRCQEVREYATTTRALLDLADHLRCQGVTLVVMEATSAYWKPPFYLLEAEGFECWLLNARHVKNAPGRPKTDKLDAVWLAKVAERGMCAPSLVHPKPIRQLRDLTRYRRTLIRERAREKQRLEKILEDAQIKLSAVVSDLFGVSGRAMIEALIAGQRSPRALARLARGTLRNKTRILEEALTGHFGDHHGFLCQMMLDRIDGLSNQIGQLDARVEQAIAPYSHQVTQLDEIAGVGTTSAQELIAETGVDMSRFPTAGHLVSWAKFAPIENSSAGKKKGGSTGKGNPWIGGTLGEIVLGASRSHTFLAERYRRIARRRGKKRAIVAIGNTVLTIAYHLLCDPAARYTDLGPGFYDSKAGRERHARNLIRQLEHLTGKKVTLNEAA

SEQ ID NO: 274536 - protein, 421 aa, unidentified
MGKLIERCAGIDIGKRFLVCCVMTGAAHEEPRSETRRFDTTVPGLKRLRNWLNEERVTDVVMESTGSYWIPVFNLLEGHVTVVLANPEEVKNRKGHKTDRKDAGHLADLLRHNHVKSSYIPAEPVRQLRDLTRRRVQLTQDATRERNRVQKLLEQVNVKIGSVLTDVFGVSGLHMLLALLEGRAAPEEIAGLARGSAKRKTPQLIEALEGNRMSDHVRFLIRGCLRHLACLEEEVEELDAEILRRMQLSTFQKAFTLLQTIPGVGQLSAATILAETGPDLDSFPTVEQMASWAGLCPGNRESAGIQKGPQTTHGNPYLCTALVQCAWAATRKRDSVFRSRFQRLAPRRGEKRAIIAVAHHMLIILYCMLKRGVPFLGAEHAPKQRRRERRAHHHLRCLRRLGFSVEIRLSSESTPPDTISR

SEQ ID NO: 274537 - protein, 351 aa, unidentified
MKVYVGVDLHSNNNYVGIVNEANAVLFKKKLPNDLSTVLTVLEPFRNDTAGIAVESTFNWYWFVDGLMDNGYKVHLANPAAIQQYEGLKNIDDKRSALWLANMLRLGILPTGYIYPKEERPTRDLLRKRLQLVRHRTSHILSIKNIMSRSLGMRMKSDEVKKLDETAVKVLFPEEHLFLSVNASVTIMHELTKEIDRVEKAVLAKTKLRKEFHGLLSLPGIGDTLGLTIMLEAGDIRRFPEVGDYSSYCRCVKSIRTSNGKNKGEGNRKNGNKYLSWAYVEAANIAKRYYPVVNRYYQKKMAQTNKTVAIKAISNKLARASYYILRDQVTYDEKKLFGGRAEPIVGLAHNP

SEQ ID NO: 274538 - protein, 355 aa, unidentified
MTETVYCGVDFHARTQTIAYCDSANGEIQLAQLDHRKDDVRGFYSQFTGQVIVGLEAGGYSSWFEAMLEELGHTVWTGHATEIRRRANWRQKNDRRDAELILEIMLKGDFPRVHRHSPESVETLRMLRYRARLVKMRTMISNNLQAIAINCGLSERSRMLSRAGQQRLKSARMTPAIKHQSEDLLTLLVPINERIGRVEKWLKQQASTDDRVKLLMTHPGVGVLTALGVVHTLEPFDRFNKQKAVVAYIGLEPMERSSAERKHYLGISKAGSRLLRYLLGEAGHIAVRFDQELGQFYVRLAKRRGKPKAKVAVARKLLIRCWIMLRDNIDYAEFRRRGVEARLARQSSRPQMPEA

SEQ ID NO: 274539 - protein, 312 aa, unidentified
MKSYRNFIGIDIGKFNFFVAMYGRKSAREYENTPCGIDQFLKDFSKELPEALCVLEPTGGYELKLLMTLCDHNYIVHRAHTRHVKNFVRSLGNGAKTDNLDAHYLSLYGFERSETLSKFSLQSASASKMYELVQRRRDLKQMLVAEKNRFQSPRVESIKERILAHIHFLEEEMTDITNKIEELISQDELLKKKRKILKSIKGIGDIISFELLISLPELGQLSRREIASLVGVAPISRDSGKWKGYRRTGYGREGIKPLLFLAAMAARNSKSHLKDYYENLIGRGKSKMVALTALMRKIIVIANARLRDLAMT

SEQ ID NO: 274540 - protein, 379 aa, unidentified
MNDTIFVGLDVHKETIDIAITRGRWGDIEHRGKIVNTAEALWRHLRRLGPKEHLLVAYEAGPCGYGIYRQLTRRDVTCVVVAPSLVPRRPGDRVKTDRRDACMLVQMLRSGDLPVVWVPDEAHEALRDLVRAREDAKVARHRLRQQLGKMLLRLGYYPPQGVNPWTVRHQKWLQGLKLKQPAQQFILGEYIHGLDEISQRMHRLERRMEHLARTGPHAPLITALQALRGVGLLTAVTLVAELGDLTRFYHPKGLMSYSGLVPSEWSSGARQNRGSITKTGNQHVRRVAVEAAWHYRHPPRVSRTLRKRQEHVSEKVKQISWTAQDRLNGKYRRLVGRGKPKNKAIVAVARELLGFVWAIGQEVAKETYVMQGADQVVNR

SEQ ID NO: 274541 - protein, 401 aa, unidentified
MEAIVQRSAGLDVHKKIIVVTILLEQSDGTVKEETREYGTHYQACEELADWLFSHDIQLSVMESTGIYWKNIYAALEKKGLRVSVVNARHVKQVPGRKTDVKDSQWLARLARYGLLRGSFIPPKDLRELRIIARHRTKLNRMLASEKNRLHKTLDDAGVRLGNVVSDISGVTATEIIEGLIAAKPIAELLDCARGAIKNKKDLLQLELKGELSARHLFLLKKLQAHINFLKNELKEVDSYLFEAMHPYQTQWEILQTIPGIDLVGAALLIIEVGVDMQQFGNREQFCSWAGMCPGNNESAGKRKSGKTPKGSKQLRYILCEAANGAAKTECQFKYKYKSLMIRRGHKKAIVAVGHKLLRVIYSRLKEGEIYHDPKINYEELVVKKNAPRWIKMLKKYKKVL

SEQ ID NO: 274542 - protein, 408 aa, unidentified
MELTPIYKRVIALDVHQAKITACAIVEHDDGRQEMTKLDFGAFKRDRRALAQWALQIRPEVVVMESTGVYWKSPFAALETVGIIAWVVNARHVKAVPGRKTDMADAQWLATLARAGLLRGSFIPPVDLRQLRLVARQRQKLVGMLSAEKNRLHKVLVDAGIRINVLVSDVHGQGARAMIKALIKGQPMHEILNLKGRLGASREELFEALSTEQFSARHAFVADEIMQHIEYIEQRVARMDGYLLSALAAWQPQLNLLQTIPGIDQIGAAMLLVEISADMNTFGSAARLASWVGICPGNNESAGKRKTGRIRKGNAWVRRLLCEFAQAAARTQCALKAKFDSLAIRKGRKKSVIALAHKMLRTIYAMLSSGTHYEDKTVDYEAMSVARNAPRWIRMLKKHGFIGQTAAA

SEQ ID NO: 274543 - protein, 335 aa, unidentified
MEFEFFIGIDVSKGELDFAVRQGERLLFHRETANQTRAITSFIKDLCKLNGFVLNKAVFCMEHTGIYNNHLLQVLHKKKASICLEAATQIKNSLGNIRGKNDKIDAIRIAGYAYDKRGKLRLWQPKREVVQQLADLAATRLRLITVKKQLKVPLQEHAAFSTKKNSRQNLQICSHSLKAIEADIARADKAIGQIIAADQELSRIFKLVTSVSGIGKVTAVQVIVTTNEFKDINNPKKFACYSGVAPFTDDSGKVVKKARVSHMANKKVKTLLHLSAIVAIQYNPDLKLFYERKVGQEKKNKMSVINAVRNKLILRIFACVNQNRPYEKIYQKVVA

SEQ ID NO: 274544 - protein, 341 aa, unidentified
MVKTPAITGGVDTHADVHVAAALDGIGGLLGVSEFPATPAGYARLLGWLTSFGTVCLVGIEGTGSYGAGLARHVTAAGIRVVEVDRSDRQDRRRAGKSDPLDAVSAARAAQSGRASGAPRGRDGAVEAIRALMVAKRTARAQRTQTINQARALILTGPDGIRARFTSHGPAELIAALAALRPRPGSMVRYHTLLSLRELGRRAQFLDGQLEQLDELIIPLVTGRAPGLLTLYGVGPDTAAMLLIAAGDHPARLRSEAAWAHLCATAPIPASSGKVTRHRLNRGGDRQANHALWRIVITRMSSHPATRAYVQRRAAEGLSKKEIIRCLKRYAAREVYPHLRG

SEQ ID NO: 274545 - protein, 309 aa, unidentified
MDVVVGIDVSKDRLDVHVLSSGESFAVANDDEGLDGLAARLLSMKADIVALEATGGYEKLAAAALSGAGLAVIVINPAQVRAYANALGKRAKTDPIDAAVIAAFVAATRPQIRPLRDEESRALAALLSRRRQIIAMITAEEQRMDPALAKEAQKSIRRLLAALRRELDSLDADLDDHIRKSPLWRVREALLTSVPGVGRVTARTLLAEMPELGSLDRRQVAALAGLAPWTRQSGKWKGKSLIGGGRATVRTVLFMATLVACRHNPVLKAFRDRLVASGKSKIVATVAAMRKLLTILNAMIRDQKSWQND

SEQ ID NO: 274546 - protein, 369 aa, unidentified
MDKAITYVGLDVHKDTIAVALAEAGVRGDVCEYGKIANTPAAVKALAAKLSRVGSALRFCYEAGPCGYGIQRQLTLAGHECVVVAPSLIPRKPGDRIKTDRRDAISLGKLHRAGELTPVWVPDPAHEAIRDLVRARLAAVRGLRQARQQLSGFLLRHGHHYNRPAWTLMHRRWMAGLRFEQAAHHIVLEDCIAAVEAATARRDRLEAHIEAALPDWSLAPVVRALQALRGMALVAAATVIAELGDITRFANPRQLMAYLGLVPSEHSSGATRRQGGITKAGNGAARRMLIEAAWSYRFPARISREQLLRQEGLAKPIRDAAWKAQERLCRRYRKLARAGKSSTVVTTAIARELAGFAWAIAKHVQAAAA

SEQ ID NO: 274547 - protein, 348 aa, unidentified
MLADQLDYVVGVDPHRDFHALAVVHVVSGAVLFEAAVEASSDGYAQALKLVDQHAAGRRAFAVEGTGSFGAGLTRFLNMRGEQVLEVGRLRRERRSGGKTDALDAVRAARSVLTSERPATPRAGGERQGLQALVAAREGAVNAKRAGLCQLRDLLITTPEPLRSQLRPLTRARLLQRLAATRPSGGRDPELRGGMLALRSIARRVLQLTSEERELAREIETITRKLAPQLLEQPGVGPHAAAQLVLSWSHQGRITSEAAFARLAGAAPIPASSGQTVRYRLDRSGDRKLNRALHVILVTRKRSHPATIAYIERRIQEGKTRREATRCLKRYLARKLYRLLEHGPPLAT

SEQ ID NO: 274548 - protein, 340 aa, unidentified
MQITTIGLDIAKNVFQVHGIDAAEKVVVRRQLRRGQVLKFFASLAPCLVGMEACASAHYWARELTKLGHEVRLMPAKDVKAYVKRNKNDAADAEAICEAVRRPTMRFVGVKSAEQQGRLMQHRARDLLLRQQTQVINALRAHLAELGIVAAQGREGLKTLLAIIADEKDERLPIDARASLIVLAAQLQALHTMIGSIEKRLVVQHRANEASKRLESIHGIGIIGASAIAATVTDPKAFRSGRDFAAWIGLVPRQDSTGGKQKLGPISKQGDRYLRRILVVGAHSVLRRAKHNPQKYPWLTQLLARRPFKVVAIALANKMARIAWALLASGSHYRPRLVAA

SEQ ID NO: 274549 - protein, 341 aa, unidentified
MQPYFVGLDVHKQLIAFCVKTADGEIVAEGTIAATRAALNEWVKTVPGPWHGAMEATMFSHWIYHHLKPYAARLQMGHAARMKAISAGKKKNDKIDARTIADLLRCHLFPECFVISPELGALRQQMRFRRLVIEQEVKFKNKTAGLLMGAGVEYQRRRLHGKRYFAELLRESQWIAGEMRPLLEFNRGQIESLQAMDRRLMQMLQRHPRLEERIQFLRGIDGVGPVTALTWALEVGTPERFGSIKQAMSYCGLTSALRESAGQQKRGPISKQRNRHLQCVLIEAAKIGPLYNEKLRETYQKACEKGVHRNRATLAVARKLVAYLLAADRTFFSSRVPAVPA

SEQ ID NO: 274550 - protein, 428 aa, unidentified
MNTYEERKRVSVFKLKQTVFHQKKKGVNDVKSPCVAVDVSKGKSYFQGFIEIDKPANKATPIQHDLEGFKSLYELGQTLKEAYSDVVYVFESTGIYHKVLETFLMNYEEKCIILNPLEASKIRKTDLRSTKTDVRDCKSIAKAYFLKDFTLHNQKDELYEKLQSMNGHYNFLVQQLREMKVHFRNALDIVYPRFDEVYPDPYLDIPMSILKRYPHPDELKSKRVETIVKCIMKDTKYREPKAMDEAKKLRGYIDNVSSGCRMSSYEVTILKTMVHRISEQEVEIELCLDEMRDLVTEIPLYHQLMSIPGIGDNLAIRLIGELGDLDRFERSQQLVAYAGIDPRVYQSGQMTGDHLHITKKGNKHLRTLLFLGISSNVRVGKTNPILDFFNKKRQQAYPLAYKAALIACANKLLRIIFGMYKSGMNFHR

SEQ ID NO: 274551 - protein, 401 aa, unidentified
MKYGVGIDISKGKSTVAILSLAGEVIEEPFEITHDLKGLKVLEEKIKNIPKEDLKIVMEETGTYHLPVFGYLIDKGFFVVAENALKIKKYLDRGLRKAKTDKKDSYKLAEYCCDNWYKLNMSYNNEEIYDNLRFLSRQYIASIEIQVQEKVNFSNLCDLLFPGYYQLLDDNTFILGLEIFKKYYHPEIVTNKKQSQFVNEIDKIAKKLGHKGAGITLANKIYNLALNTLSVRPNNKFSQLSATSCADALILQIKTSKEIISNMDELARELPEYEEISNISGCGNKLTSRIIAEIGDIRRFKNAGSLIAYAGLDAPPYQSGQFEATNRHISKRGNRYLRKTGYEIMKSIKSSCSDDNELKMYMIQKENEGKAKKVAKIATLNKFLRQYYGKVKRKYKELEIW

SEQ ID NO: 274552 - protein, 403 aa, unidentified
MNNVAGVDVSKGKSVVSVLRPFGEVVAKPFSVSHTGSELKELADYLKSLDGETRVVMEHTGRYYEPVARFLHEEGIFVSAVNPKLIKDYGNNTLRKVKTDKADARKIARYGLDNWVELRQHTPMDTIRMQLKTLNRQQGLYSKTKTMMKNNLIALLDQTYPGVNALFDSPVREDGSQKWVDFAATFWHVDCVRAMSLTAFTERYRKWCKRHGYNFSQSRAAEIHTQAQDLIAMLPKDALTKTMIRQAVDALNAVSKSLEQLRLEMRALATQLPEYPVVMAMRGVGDSLGPQLMAEIGDVTRFAHRGSITAFAGVDPGADQSGTHEAKSNHTSKSGPPELRRALFLVMDCLLKTQPQDDPVYRFMDKKRSEGKPYLVYMTAGANKFLRIYYGRVKEYLASLEEN

SEQ ID NO: 274553 - protein, 315 aa, unidentified
MTPTQIFVGIDVSKTQLDVALRPEGRFSAPNDEAGCAQILARVRAVAPTLVVLEATGGLEIPLTGVLAAAGVPVVVVNPRQVRDFAKATGQLAKTDALDAQTLAHFAEVIRPELRPLPDEQTQALAAILARRRQLVEMLTAEKNRLGSARTPVRTSLRTHIAWLERELNHRDRDLAHAIRESPVWREKDALLQSTPGVGPVVTTTLLANLPELGTLTGKQIAALVGVAPLNRDSGSWRGKRTVWGGRAQIRAVLYMAAIVAARFNPVIRAFYQRLCAAGKAKKVALTACMRKLLIILNAMLKHRTPWRTERAEHA

SEQ ID NO: 274554 - protein, 342 aa, unidentified
MTIAVLGIDLGKNSCSLVGLDAGGRVVLRRRMRRETVIAFGAKLTPCVVAMEACCGAHHMGRALAAQGHTVRLMSPEYVRPYVKAHKNDDRDAEAIAEAATRPTMRFVALKSEAQLDMQTLHRVRDRLVGERTALMNQIRSILLERGHVVPQGRAKLAGFLTSLLEAEEGVILTPRMQALVADVRERWQLLDQRIAALDAEFAEQARTDEAARRLTTNPGIGALNATALVAAIGGVATFARGRDLAAWLGLVPRQVTTGGRPKLVGITKRGSKYLRKMLIQGARATMPTLRQSDTRLGQWLRGLLARAHANTAVVALAAKMARIVWALLRHERVYEATAAAA

SEQ ID NO: 274555 - protein, 400 aa, unidentified
MDDIDDVGVFLGLDVGKSAHHGHGLTPAGKKVFDKQLPNSEPKLRAVFDKLAAKFGTALVIVDQPASIGALPLTVARDTGCKVAYLPGLAMRRIADLYPGEAKTDAKDAAVIADAARTMPHTLRSLELTDEITAELTVLVGFDQDLAAEATRTSNRIRGLLTQFHPSLERVLGPRLDHQAVTWLLERYGSPASLRRAGRRRLVEVIRPKAPRMAARLIDEVFDALDDQTVVVPGTGTLDVVIPSLARSLAAVHEQRRALEAQIGQLLEAHPLSAVLTSIPGVAVRTAATLLVTVGDGTSFPTAAHLASYAGLAPTTKSSGTSIHGEHAPRGGNRQLKRAMFLSAFAALHDPASRAYYDRCRARGKTHTQALLRLARHRISVLFAMLRDGTFYEPRTPRLA

SEQ ID NO: 274556 - protein, 355 aa, unidentified
MNGAKYIGLDVHQATISATVLDSTGKLVMESILETKAATILQFIHGLRGSLHVTFEEGTCAAWLHDLLKPHVTQILVCDPRKNALLKVGNKSDRIDSRKLAELLRSNLLRSVYHEQTGVRAVKELARSYMTITKDLTRVMSRLKAIYRSWAIPCAGQQVYAPRYRAEWLAKITEAGVRRRAELYYQQLDALRPLHQEARRDLLAEGKKHNATKLLCQIPSMGPIRAVLLIALIQTPHRFRTKRQLWSYCGLALETRNSGEYCIVRGQLKRSKKVVAIRGLNKNHNHDLKNIFKGAAIRAAAVTGPFQEFYTALVAKGMKPPMARLTLARKIAAITLIVWKKGARFDAEHLKQQAA

SEQ ID NO: 274557 - protein, 344 aa, unidentified
MQITTIGLDLAKSIFQVHGVDATGQVVVRKSLRRSQMLPFFAKLPSCLIGIEACGTSHHWARELIKLGHEVRLMPPAYVKPYVKRGKTDAADAEAVCEAVTRPTMRFVPVKSPEQQAALSMHRTRDLLVKQRTQLINMIRGLLAEFGVDIPKGLERALLMARQIVDGRAPDVPIEAAKIVGTLSRQALDTHVRLREIDRDLLVWQRGNDVARRLMTIPGIGPVGATALAASVTDPHQFRSGRQFAAWVGLTPLQKSSGGKERLGRISKMGDKYLRKLLIVGMTSLVRRARHNRATIDPRLADLLARKPTRVATVAMANKTARIIWAIMTRGETYRAGHRPALAA

SEQ ID NO: 274558 - protein, 311 aa, unidentified
MQNFYFIGIDVSKKKLDICVMSNSKVLKEEQVSNHPQAIATVIAGIKEELSMSNDSLIICAEHTGQYTYPLICACKSVGSKLWLENASQIKYCSGVTRGKNDKVDARRIAEYAMRFFDKAKPYQRPTEELMRLKQLEAERSLYLTDLAKYKAQLSDQEGFMEDKIFKRKAKRLKEMIKSLEKTLKEIAQEMADVIYSSEELSRQMRLLKSVEGVGPVVAMNMIIATEAFTRFDNPRQFNCYVGVAPFAYTSGSSQHSRNRVSQRAVKYIKCLLHMAAVAIAHKKTGDLKTYFERKVAEGKNKMTVLIYKIP

SEQ ID NO: 274559 - protein, 344 aa, unidentified
MDKISTVGLDIAKHLFQVHGEDAAGQIVVRRQLRRAAVLAFFGKLPPCVVGMEACSSAYYWARAIGALGHEVRLMPPVRVKAYVKWGCKNDAADAAAICEAVRRPSMRFVPVKTVEQQAVMMLHQARQLLVEQRTRLGNAIRGHLSELGIAAAKGVAGLAALRRMIADADDTRLPAVARAALTALAGQWRSVDQQIDGLNEQILAWHQSDADSQRLATMPQIGPIIASALVARTGDATRFRNGRQFAAWVGLVPRQNSSGGKERLGHITKTGDRYLRQLLVIAATGMIRRVRAKPALSPWLAALLARMPAKKAAIAFANKLARIAWAILAHGGVYQARDVPAAG

SEQ ID NO: 274560 - protein, 315 aa, unidentified
MEGEVMVGIDVSKARLDVAVLPGEEIFREEHDSRGIAALIERLKKIAPALVVLEASGGLETGLVAELVAAGLPAAVVNPRQVRDFARATGQLAKTDKLDARTLARFGDRMRPQLRKLPDQQELALKALVVRRRQLVEMMVAEQNRLDRAPKVLHRQLRRHVDWLRKQIHSLDRDLDHELRNSPVWREKETLLRSVPGVGPVVCSTLIAGLPELGTLSRRQIAALVGVAPLNRDSGTLRGRRMVWGGRGQIRTALYMSTLVAVRFNPALKSFYLRLRAAGKPPKPALIACMRKLLTILNAILKNRKPWSPQCLNLT

SEQ ID NO: 274561 - protein, 472 aa, unidentified
MAQAIRKQDGKTRSVQANSGGTTELGVIDTHAAGIDIGATEEWVACPPKDGKPNVRKFGTDTPSLGELADWLTSEGVASVAMESTGVYWIPLFELLEARGFRVILTDSRTLGRVPGRKTDMLDCQWLQQLHAHGLLRGCFRPKDATLAFRSLLRTLRTLKAQQDDWIRRMQKALDQMNVRVHRAVSDITGLTGMRMVRAIVHGERDPAKLVALRDPRCRKSVAQIERELTGNWREEHLFNLGMALESYDHFGRQIEATLQRILIELEAIRKQREDTGLSVTPPGEVKEHPDPAKACSMERYGHEPLRAALAATFGVDLTAIEGVGAETAASILGEIGPEIQEAFPDAKPFVAYLRLAPNLAISGGKPVKGKKKMRQGSPVVHRLLRTSAASVRRSKSALGAYYRKTAFRKGAGTAVFATARKIAQHVYRALAHGIPYVTMGIEEQDRQAAERQRFNIERQAAKLGLKLVPAA

SEQ ID NO: 274562 - protein, 429 aa, unidentified
MSYRIAGIDVHKKMLAVVVSDVEVDAEFHFEQCMFGSSPGHLRLLSEWLIEQQAEEVVMESTAQYWKPVWEVLERYWKPLCEKREGAKRRSGKLHLAQAQSNRGRRGRKRDFVDAERLVKRLVARELTLSFVPDAEQRLWRTVTRKKFQLRRARIRLQNQLESLLEEAHIKLSSFVSDLLGFSARRMLKALAEGETNPAALAALADERLRATPEQLSDALGACTELNDVYRRLLQMALEECRLIDEQIGKLDQEMASLLSQHQDAVERLAEVPGLGVDSAQQIIAEVGPSAATFPSEKCLSSWVGACPGDEESAGVNYNHRSPTGNRHMRRLLNQAANAAARTKGSIFEIVYRRSVPRLGHNQAVGVIAHRLCRLIWLILHQRIRYEERGPAVSKRSKQLRTWKMIRDLRRLGYRIELPNPQPSQAQAQ

SEQ ID NO: 274563 - protein, 404 aa, unidentified
MLLDHDRTAIRTHFGAIFVALELSRSKWLVTSLSPGSGEKMSRRSLEAGDMAGLMCLFADLKRKAAIRTGRTYPIIVIQEAGLDGFWIHRVLQEQGIESHVVDAASIAVPRRKRRAKTDKIDGEKLLQVLLAYKRGEPRVCSMVVAPSPEQEDARRLYREREVLIAERIAHVNRIKGLLFSQGIGDYEPLRRNRRVRLEELRTGDGRVLPEHLKAQISRALDRLELLLAHIKAVEAERDALLAAARQARRDDRPHPVALLIELKGVGPDFANGLWSEGLYRHFDNRRQVGAYAGLAGTPWQSGSIAREQGISKAGNPRLRTLMIQLAWLWLRHQPQSALARWFHAQGLRGRKTWRKTAIVALARKLLVALWKYVTHGVVIEGAVMKSPVKNGGASKRALVAAAA

SEQ ID NO: 274564 - protein, 379 aa, unidentified
MKLITLYLGLDVHKDSITIAIAEPGSKGEIRLFGTITNDIHALEKALIRIRKAHPNAQLEVAYEAGPCGFVIARRLKQLKVPCLVAAPSLIPKQHGSPFKTDKRDARNLARLLRAGELTGVYVPEPTDEAIRDLCRARTDAVDDQRRCRFRLKAFLLRHGYRYQGKANWSQPHMRYLRELVLPHPAMKAILEEYLQGIDAAHARVQRIEASMLSLLETWRLKPAVQALMAFRGFQLVAAMITVSELGDIHRFEHPRQLMTYLGLVPTESSSGPHQRLGGISRCGNGHQRWLLTECAEHYLLPPKVSKELSVRQQGQSQEVRDLSWKAQNRLHLRFTRLLGRRLQRNKAKVAIARELCGFIWALLRTQPCYTQPSATTAR

SEQ ID NO: 274565 - protein, 369 aa, unidentified
MNTTTFVGLDVHARSIKAVALDAMTGEVRSATFGYDAAEVAGWVSSVDPSAKCVYESGVTGFDLQKRLSSMGIDCVVGAVSKMIKPSADRRRKNDRNDAEFLARMLSVGNVVEVWVPDDECEAARDLTRALDDAREDLKRCKQRLSKFLLRHGLVFSETNAKGQRKKNWTAAHWAWIRSISFPDKADDEVLAYYIDAARQAMEDKARLERLVEAEASKPRWKKRVDSVRCLKGIDVTSAADLVFEAGEFSRFKNARSFAAWIGLTPSEHSSGESVRQGGITKAGNKHLRRVLVESAWHYLGCSPHSKDLAKGQAPDPGARRHAAKGVRRLVGRRAAMLERGVHKNKANVATARELACWCWAIGRMVENG

SEQ ID NO: 274566 - protein, 348 aa, unidentified
MITLGIDAHKRTHTVVAVDDLGRQLASKTTGATTSEEHLALVCWAEGLGSERTWAVEDCRHLSRRLEADLLGAGERIVRVPPKLMAHARDAARTYGKSDPIDALAVARAALAHPDLPAARLEGPSRELKLLVDYREHLVAERTRGINRLRWHLHELDPTWDPPAGTLTRYRSLDALTDRLAGRQGLVARIAAELITQIRQLTVRERALRREIAGHVTRLAPNLLALTGVGVLSAAKIIAETADVRRFKSKDAFARHNGTAPLPVWSGNRERYRLSRTGNRQLNAAIHRVALTQARCHQPAIAYLNHRRELGNTKTEARRALKRRLSDVIYRTLLQDTRAQPTTLNPAA

SEQ ID NO: 274567 - protein, 454 aa, unidentified
MRWKKANTKADIDSAFPLLRPNAAGLDVGSREHYVAVPAGRDTRPVRSFGCTTSELKQMAEWLKACGVDTVAIEATGVYWVPIYEVLEDAGIEAFLFDGRQTRHVSGRKTDVLDCQWSQKLHSHGLLTRAFRPDKEIATLRAYWRQRGGIVECCARQIHLMHKALEEMNIQLHKAVTDITGVTGMRILRAIVAGERDVHALAALRRGRIKATTEEIARALEGTYRQEHMFALAQALEAYDFFQRQLADCSQALERHLAQMRSGSDTPPQTPPPKQRKNQPNFDLRNELARIAGVDVCLIEGIDAMTAQTLISECGTDMTAFPTEKKFASWLGICPNNRKTGGRIRSRRSRRVKNRAATALRMAAQTLHKSDSALGSYFRRMKARLGAGKATTATAHKLARLYYRLIKHGEAYLTRSQAEYEALQRQRTLTSLQRRARHLGLQLLDASTGELLGA

SEQ ID NO: 274568 - protein, 345 aa, unidentified
MNEISTIGLDIAKSVFQVHGVDALGAVVVRRQLRRGELLKFFAGLPSCVVGMEACGSAHYWARQVGALGHEVRLLPPARVKPYVKRGKKNDAADAAALAEAVGRPRMSFVPVKSAEQQSVVMLHRTRDLLVRQRTMLICALRSHLAEFGCIAAQGKGGFGRLVASLDGPEGRMLPKMALAALRLIAAQIDDGNKKIQALETAILMQHRQCETSRRLASIPGIGPITASALVAAVPDASIFKSGRQLAAWLGLVPGQNSSGGKERLGGITKTGDRYLRRLLVIGATGLIRYKRKNIPGGVAWLSGLLNRKPARLVTVALANKMARIAWAVLCRGEIYRAVAAPAAI

SEQ ID NO: 274569 - protein, 358 aa, unidentified
MAYYSLSALKSFVATHHSEPFWVGIDVHKHSYHLALLRSDTKTFTLVAPACPEKLVEQLRNLDIVVAGVVYEAGPTGFSLARTLQTEEFPIIVAAPSKVPRSITAGAKTDRLDCIKLAHFASKGLIRPIAIPTEQEEAHRALSRRRHQLVDSIRRCKQRIKGFLLYHGFEETKSIKNWSSNYEEQIAELPLEAEGCLTVESHLRELNFLQNELNSVTHQINQINLKPKHRAVIRSLTSVPGVGKVVATTFRTEMFRPERFNRGEEVASYLGLAPTVRHSGEQTPRGHLAPVGQTRLRSLLIEAAWMWRAKDPYALELYNKLLSKTGIPQKAIAALARRLAIILWRLSIEQRAYRPIEI

SEQ ID NO: 274570 - protein, 408 aa, unidentified
MPDLEQAVRFGAIDWAKDAHAVSIVDERGAEVLAESFPHTEAGVCALTRVLADADVLRVAIERPDGLLVDRLLGAGLCVVAVHPNKLASARERHSASGKKSDGFDAYVLADLLRTDGHRFPSLRPDGDETRALRALSRTREDLVGARVALANQLRAQLEAFWPGAAVIFSDIDSPIGLAFLHRYPSPEDARRLGPRRLEGFLARHGYCGRRSAEELLARLRQAPEGAGAEAEVEARRQAVLSLVACLRPLVEQIGLLESEIAGAVRAHADGAIFRSLFRSGATVTAARLIGEIGDVRERYPSADSLAADAGMVPVSKSSGRSRVVSFRWACDKRLRAAVACLADATRHHHRWAGSVYRRARARGCDHPHAIRILGRAWLRVIWRMWQDRVPYDPALHRGLQQLNPAGG

SEQ ID NO: 274571 - protein, 269 aa, unidentified
MNYTIVGADIAKNVMQLQWVDPDTGEVINKPVKRAAFLEHFANRAPCLIGMEACGGAQHWARRLMEMGHQVKLIPAKFAKAFNIRNRNDAADARAIWIATQMPGKSVAVKTEAQQAVLALHRIRQQKIKFRTMQMNCLRGLLTEYGEVMGKSRAALDKAIPGVLERLTGRLPAMLIESLREQWSDLQNLDRQIAEIERRLQAWLKDDEACRKIAAIPGVGLLTATAAVATMGDPKAFRSGREFAAWLGLVPKQVGTGGKTVLLGVISAR

SEQ ID NO: 274572 - protein, 427 aa, unidentified
MQYALPLVLPDVPAGGVCAGIDWATADHVVCVADMTGRVTDRFSAAHDKAGIAALITRLRRNKVTEVAIERGDGPLVDALLAAGLTVVVITSRQVKNLRSRFGAAGAKDDRFDAFVLADTLRTDRARLRPLVPDTPATIALRMAVRARRDLVRHRVAACNQLRAHLAVAFPAASTLFHDLDSPISLAFLARFGSQDAAAGLDEPAIRAWLATIAVRGRPAPASVLHARLQAAPPGATGTDGAAQAGITAALTATLTTLSAQIKALEAQIAGQLATHPDAHIFTSLPRPGTVRAARLLAETGDCRSRFPDPESLAGLAGVAPVTRRSGTRIAHGFRWPVNRQLRDALCDFAADSRHASPWAAAIYDDARARGKDHPLAVRITARAWTYVIWRCWHDGTAYDPAKHNALQAVLARQQAGQTAGARQQDQ

SEQ ID NO: 274573 - protein, 423 aa, unidentified
MPEVRPVLPGPQFSAFVGIDWADQKHMWCLQAAGSEQRECGELEHSPEAVEAWVGWLCQRFASGPIAVAIEQSRGALVFMLSKYEPLHLFPVPSQMSASMRQALYPSGAKDDPKDADLLLDLLLQHGDKLRRLSPDSEVTRRVQNLVEERRKLVEEKTAQSNRLTSQLKIYFPQMLDWFELDTDLARGLLERWSSLEELQRVPPSRLRVFLRKHHARNQEGIEKQIRQAIPAIRDRAVIQAKSTVVKVIASVLQTLTQGIRDLDRQIEEAASVHPDFFLFESLPGAGAVMAPRLLAAFGSQRERFGRAREVQSFSGIAPVTERSGKMKWVHFRWACPKFLRQSFHEWAGHSIAYSTWACAYYQQQRKRGKGHHAAVRALAFKWIRVVFRCWKDGIAYDESKYRAALAQRGSPLSAVLVQEKTL

SEQ ID NO: 274574 - protein, 356 aa, unidentified
MEYIAFDSHKKYTQVRVEQPDGTGVREGRIEHQPGAIRGFLRGAEPGSMVAVETIGNWYWIVDEIEAAGCKAKLVHARKAKMMMASVNKTDKLDAKGLNLLQRNGTLPEVWIPPGELRDRRELPRTRMMLVGVRTQLKNRIHATLSKYGLDVHGVSDLFGVRGREVLKERMARLPSEARFVMEEVLAELDHVSARADRIEQRMAELFRETPELKRIRTLPGVGPILSTVIWLEIGDVRRFLSAERLASYAGTTPRVHSSGGKTRYGSLRADVNRYLKWAFIEAANVVAINARRWGGRHVADLYRRLRLKKGHAKAVGAVARHLAEAAFWILSKEEDYRDPKLNSSVSGSFTRAQAR

SEQ ID NO: 274575 - protein, 355 aa, unidentified
MPSKADTAVARTIGIDTGKNTLHMIGLDERGAIVLREKISRARIAARFVNLPPCLVGIEAGMASHYVARELVALGHEVKQVPPAYSKPFRHGHKNDFRDAHAVAEAVERPSTRCVPIKTDGQLDLQALHRVRSRLIGNRTAVINQIRGFLLEHGIPVRQGHHFLRKQLPLILATRTDVLSPRMIRIIGDLMADWKYLDERIERVTDEIEALAHADEGCQQLITVPGIGPIISSAMVAAIGNGAAFCKGRDFAAWLGLVPKQMSTGDRTILGRITKRGNRYLRMLFIQGARAVLLRPASWAKHSFGSWLTAATRRLHRNVLTVALANKLARIAWTVLAQGRRYEARVEPRVEPAAA

SEQ ID NO: 274576 - protein, 348 aa, unidentified
MRIIGCDLHARQQTLAMLDTTTGEVANLTLMHEDNQVREFYSSLPRPVLVGIEASGSMPWFLNLMEELKIECRVGHPAQIRAAEPRKQKHDRRDAELILKLLAEDRFPAIWLPSQELLDLRALLLHRHQWVRMRTRIQNALQAIALAHGLRRGHSLWSIEGQEKIAFLPLMPHTADRRSALQAMYQKIESEIEKLTQAVAEQAESRSAARRLMTHPGVGPVTALATEVFLGDPRRFADGKAVASYVGIIPREYSSGGQQRLGGITKQGSPLLRFLWGEAGAHAVRRDPELKRFYRRKLVQKGLGKARVAVARKLGIRLWIMLRNEIDYPEFCRRGQMQRSGAACGGNA

SEQ ID NO: 274577 - protein, 562 aa, unidentified
MSSSPVANLVSGATTSASPLRQRVDGIEGQAMALVSTLHSESEMVLAGASADTLSVNNVIELDAPQLRRGPPVPFSTSIGRSDYRLTGPGQPVGSYPLPPVLRAPGGDACPGGLAVMQVRWGVAPRAPVQGMTRIAVARQRTGGEVMTDDARWFVGIDWASETHQVCLVDAGGKIVGERGFPHGGAGLAEMCIWLLVTTRAEPTVIAVAIEVPHGPIVETLLERGFLVYAINPKQLDRFRDRFTVAGAKDDRRDAHVLGDSLRTDRHCFRHLAAEDAVTVELREWSRMAEDLQQERGRLANRVREQLWRYYPQALKISDDLGADWFLELWAAVPTPAKAARVHESSIDRVLKTHRIRRIAAAEAAQVLRQQPLTVAGGTVEAASAHIRAVAARLKLVNRQIKEAHRRLDALCGKLAAGEEKTASGQAPEQRDVTILRSLPGVGRIVLTTLLAEAAEPVRRRDYHALRTLSGVAPVTKRSGKRCIVIMRQACHMRLRGAVYHWARVAIQHDPLSRCRYAELRKRGHSHGRALRSVADRLLAVACTMLDQQTMFDPGRANKQAA

SEQ ID NO: 274578 - protein, 347 aa, unidentified
MAETARRIIMGADTHKQFHTVAVISKTGERLASKSFDANTKGYRQALAWARSFGEVLRAGVESCSTYGAGLCAYLKKNSIEIFEVYAPDKAKRRRRGKDDTEDAFQAAEAALNLERCCIAKDTSATLESLSLLKMAYAQTVKHRTATVNALKAAVVTLPDGMRSKLRDMGTPELVRTCCAFRVSTGSDTKLVLRTMAKRIQYLDEERALLDKKIESYADALLPCTISLLGIGHHGATTLLCAAGQNIERMKSESAFSMLCGTSPLPISTSNSYHHRLSRGGNRKANSVVYKMAIVRIQLCEKTRVFIEKKMSEGKSKKDAIRILKRYLVREAYKALRADIAELYLAG

SEQ ID NO: 274579 - protein, 382 aa, unidentified
MKKNSTAKKSPKALSNQKKNQIHEVAAKQRLTIGLDLGDRTSRYCILDEAGEKVSEGQLPTTKAGLGSLFAKMPSSRIALEVGTHSPWVSRHLAGMGHEVIVANSHKVKLITQSVNKNDRIDAEQLGRLARVDPKLLSPIRHRGPEAQADLAVIRARAELMEARTGLINCARGLVKPMGERLKKCDADQVKASLSEGLSEAARTAIGPLLKSVEAISKQIGEYDQKIEEIAKGYPEMELLTPVYGVGTLIALTYLLTIEDAERFEHSRDVGPYLGLKPKERESGDSRPQLGISKTGDGLLRSLLVQGAHCMLRRGAPDSDLRAWGLAKMKSGGKNAKKRAVVAVARKVAVLLHALWSAGEVYDPLYNRKAAQAAKGKGQVAA

SEQ ID NO: 274580 - protein, 328 aa, unidentified
MIQLGIDVGKSKIDLCLRPDGPKGRKKTKILTNGPDVAVSVLEWLAKQKVAPTDVQVVMESTGTYHEHLAYGLYERAVRVVIANPARVRAFAQGMGILTKNDTVDADVLARYGAMRQPDVWQPPSPAIHELKALLSRRDALVHDVGREKSRLEKLLSTRCSLLVEASVRKMLQVLNNELQVVQALIDNHIDNHPDLKRDMEYLTSIKGIGSAVGSTMLVVLRGNHFISAEQAASWVGVVPKEKRSGSSVRGRTRLSKNGPPEVRAKLFMAAIVAVKHNPLLKQFYDRLLAAGKAKMSALGGVMRKLVHICYGVVMKQQKYNENYATAA

SEQ ID NO: 274581 - protein, 341 aa, unidentified
MNNTKKIIGVDIAKRVFQLHWIESGTGEIVSLQLKREQFLEYFANLVPSLIGMEACGGSQHWARQLQKMGHEVKLLPGKQVKPFVGGNKSDVHDARAIWTAMQQPGIKPVAIKSEEQQAVLALHRMRSQLVKFRTAQINGLRGLLTEYGEVMPQGKVGIKKAIAEALQRLSDRLPSVVIDTLREQWERVAILDKQVTDIEQRLKQWLKQDPASACIFEIPGVGLLTATAAVATMGDAKAFKSGREFAAWLGLVPRQSGTGGRIRLLGISKRGDTYLRTLLIHGARSVLMHAKEPDPWVTELRQRRPLNVAVVALANKMARLIWALLANEREYQKGYVNQVA

SEQ ID NO: 274582 - protein, 269 aa, unidentified
MNIKRIGLDLAKNIFQIHAVDHHEHVVLRKTLRRDRMTAFFSQLSPCLIGIEACGAAHYWARELTRMGHTVHIIPPQRVKPYLKGQKNDANDAEAICEAISRPGMRFVAMKTERQQTLQAEHRVRARLIRARTALSNEIRGLLGEFGLVLPVGIRQLRKALPEILSQQELWDDRFIRLLSELAEELQMLDERVARHDRRLEQSARDDVRIKRLLAIEGMGPVVASALVAAVGDGRQFKSGREMAAYLGLVPRQHSSGGSANGETATCGR

SEQ ID NO: 274583 - protein, 393 aa, unidentified
MHKATHTAVIIDCWTKKLGEITFENRPGKFEKFLKDVKDIAGNLTPVFGLEDTGSYGRSLAVFLLGYKHIVKEVNPSYTKSMRHNSPIVFKDDSYDAFCVAKVLRDMFDTLKPANPQDIFWTIKHLVGRRDSLSRGLIAIQNQLHGQLTYNYPSYRKFFCDIGGNTALHFWENYPSPGHLEEITEEQLADKLKEASHRAVGLKKAHQIFDLVAEDGETKQEYQAERDFIIKSIVKEIRQKKEAIAEIDVELQKMIPLTGYKLQSMPGIDLNTAVHIIAEVGDVNRFSNSDKLARFAGTAPVIFSSAGKGKEQRCRQGNRRMNAILYFLAVQQVQLHSVSKKPRNPAFRAYFEKKLKEGKTKPQALTSITRRLIRILYNMMKNKTEYRMSEVEN

SEQ ID NO: 274584 - protein, 366 aa, unidentified
MKKTSTVRVNGNMIFKGHKLTIGVDLGDHWSCYCVLDEAGKIILEQKVATTSEAMKQAFAKIPQSLIAMETGTHSPWVSRLLTELGHKVIVAHAQKVQLITKSNRKDDRHDARTLARLARIDAELLGPVRHRSAQAQIHLTVIRARAELVRARTALVNAARGLVKSYGQRLPKCGTRQVSRELGAGLHAELREVLEPLLKEIESLNERIQEYEVRVEKIAKESYPQVELLKQVKGVGTQIALTYVLTLDDPHRFPKSREVGGFLGLCPGRRDSGESQPQMRISKEGDRYLRTMLVQGAHYILGPFGEDSDLRRWGLKLAARGGKNAKKRAVVAVGRKLAVLLHRLWVSAEVYEPLRNSQKAMRAAA

SEQ ID NO: 274585 - protein, 348 aa, unidentified
MDEDTAVVVGLDLGDRRSHMHAVAREGRRVVRRQSVTTDREGLAQGFCGLPRCRVVVETGTHTPWVAEHLTALGHDPLVVNARDIAYIYRSTRKDDRVDAQKLAMLGLMDPPLLRPVQSRPLSVYQDLALVRQRVSLVRARTQLVNAARGMAKTLGDRVPRCSTESFARRAEKGLEDSVRTALQPLIDGIRDLSTHIAAGEHRIQELCRTRYPQTCRLTQVPGVGPILALSFVLTVGAPTRFRRSREVGPFFGLVPRRDQSGARDPELPITKSGDNLVRWLLVQSAHHILMKSAPDSDLRRWALEHTRIGGQAARHKTVVALARKLAVLLHRLWVTGETYRPLQQTQE

SEQ ID NO: 274586 - protein, 420 aa, unidentified
MTRREPTPPEAALVAIDVAKRRNEVLIEAVRGGYRRRMTILNTRADHDKLIASLQAMRKPVVVGLEPTGNYHRVLAHRLIAAGFSVRLISSMALARTREALHNGWDKNDPKDAQVILHMLGIGATMVYQDPLVAGINDLQELSKTHEVVSKAKTEIWHRLLTHYLPLYFPEIERFVGNSRSDWFLSFLERFPTPASITAMTKENFVRAAWDVVGRKVSKARLLGDIYETACTSAALPVSLDSPAIAMFRLVLAEARSLIQQRNIIEAHAHELLREWPEYLRLRQVPGIGPIHALTILAEAGDLRRFRHHRQFLKFCGLDLATHQSGQFRGQTRLSKFGNARLRRTFWLAAQVAIRQRDNSLRDCFGRHVAKDRESRDLRRKATVAVATKMARVVHALIKTGTDYRPFPEGPVPSGRTLSL

SEQ ID NO: 274587 - protein, 343 aa, unidentified
MGDVSTIGLDIAKSVFQIHGVDVDGAVVVRKRISRAKLLEFFAALPACLVGIEACPTAHYWSRQLGVLGHTVRLLPPSYVKAYVKRSKNDANDAAAICEAVTRPSMRFVATKSEEQQSGLMLHRSRQLLVCQRTMLSNAIRGHMAELGIISAKGRNGTAELLKIIADEQDDRIPVAARFSLEVLARQYAAVRAEIAAIEKRIHAWHRSSEESRRLEEIPGVGPIIATALVAEVGDWKVFSSGRSLAAWIGLVPRQHSTGGKERLGRISKQGNRHLRWLLVAGAMAVIRYARQHGTKRPWLARLMDRRPIKIAAVALANKIARMAWAMMVRGERFKEPKLLPAA

SEQ ID NO: 274588 - protein, 399 aa, unidentified
MNECIAQTRVAQDKQLSAPSEQHAAFVGLDVHKETIAIAIARPGRGAPEYRGEIKNAPKTVYRWLERLSSEFGGAMLLFCYEAGPCGYGLYRQLVDAGHDCQVVAPSMIPTKAGERVKTDRRDALKLASFLRSGELTPVWVPDVEQEAMRDLTRARDDMKGQERKARQQLNAFVLRHGHHWPRGRSRWTQAHYNWLESIVFDQPYLQIVLQEYIDAARAATQRVDDLTGQIHHVLPSWSLAPVVDALVALRGIDVLAATVLLAELGDISRFESPKQLMAFLGLVPSERSSGGRRRQGAITRTGNGHARRMLVECAWSYRFPARQTMHLKRKARRASDPVKAIAWRAQKRLCGRYRQLTQAGKNVKLVCVAIARELVGFIWDIVRHEMPLPAQQPVAMAR

SEQ ID NO: 274589 - protein, 427 aa, unidentified
MSEVEWVSQEPHFAAFVGIDWADQKHVWCLQAAGSEKRESGELEHTPEAVEAWVGQLCQRFGNRPIAVAVEQSRGALGFMLAKYEPLHLFPVPSTMAANMREALYPSGAKDDPRDADLLLDLLLQHRDKLRGLSPDTEATRRVQNLVEERRKLVDEKTAQINRLTSHLKIYFPQILDWFEHLDTELVGALLEHWSTLEELQKVPPAKLRTFFRKQHCRDQELIERRLLAIRQAISAIRDRAVIEAKSSVVKVIVQIIRSLGKGIADLDEKIEEAAAAHPDFFIFESLPGAGAVIAPRLLAAFGSQRERYGNAGEVQSYSGIAPVTERSGKKKWVHSRWACPKFLRQSFHEWAGHSIAYSVWARSYYQQQRSKGQDHHAAVRALAFKWIRIVFRCWKDGVAYDESKYLASLARRGSPLAALAATAKTL

SEQ ID NO: 274590 - protein, 349 aa, unidentified
MVIVGIDAHKRTHTAVAIDEAGRKLGEKTTHATTTEANLELVRWAGGFDPERRFAVEDCRHLSRRLEMDLLAAGEELVRVPPKMMAHARDSARTYGKSDPIDALAVARAALREPNLPIARLDGPSRDLRLLVDHREDLVRDRTAQINRLRWHLHELDPSWDPAPRVLVRFKHLDGLAARLEGLEGTVAWVARDLVARIRELTVAANDLQRLIVKKVAGLAPALLEIAGVGALTAAKIVAEVADVRRFRSKDAFARHNGTAPLPVWSSNRVRHRLSRTGNRQLNAAIHRIAITQMRIHDDAKVYLERRIGMGNTKMEALRALKRQLSDVVYRALMADAVSTQAACFGEAA

SEQ ID NO: 274591 - protein, 412 aa, unidentified
MSAAVYRFYVGIDWATEKHRVVVLDAERRVVREREVCHEGAALESFADWLTQLAASAVETVAVALEVPRGAVVDVLLARGFHVFALNPKQLDRFRDRFTVAGAKDDRRDAQVLASALATDQPAFRRLEPEPPLLLELRELSRLEDDLQEELGRLTNRLREQLHRYYPQLLHLVPAADEPWLWTLLERAPTPSVAQHLPRATVRTILSRHRIRRVDTDAVLATLRAPALPVAPGTVQAAQRHLAVLLPRLRLIHQQRAECATQIEGLLERLGESQEHRDVPILRSVVGVGRVVAATMLAEASRLLAARDYHGLRAQTGVAPITRQSGRRTLVCMRYACNPRLRQAAYHWGQSAARHDPVSRAHYERLRARGHSHARAVRGVVDRLLHVLIAMLTAGTLYDPARRRLPVGEAVA

SEQ ID NO: 274592 - protein, 341 aa, unidentified
MLYYTGIDVSLEASHLCVVDEAGTVVKEAKVASEPEALVSWFSALGFAVKRIGLEAGPLSQWLYAGLKAARLDVALLETRHVRDAFRSMPVKTDRKDARGIAQLMRLGWYRQVHCKSVEAQDNRALLAARKVLQCKYHDLEMSLRGLLRGYGLKVGETNRKTFEPRVRELTASVPGLAEVTEALLKARAVLLEQFRVLDARMIVRARKDERAGLLMTVPGVGALISLTFVSAIDDPGRFKSSRTVGAHFGLTQRKYQSGETDITGRISKCGDQEVRTALYEAANIILTRPVKGSQLKSWAAKVAQRSGMKKAKVALARKLGVVMHRMLVDGTCFDPALAAA

SEQ ID NO: 274593 - protein, 414 aa, unidentified
MEQAYRVFVGIDWANQVHQVWAADAEGRVLGERGIQHVGIELFEMVAWLIGLAEGDAATVAVAIEVPHGPIVDTLLDRGCHVFAINPKQLDRFRDRFSPAGAKDDRRDAEVLSSAVRTDRRALRALRLGDPLTLQLREASRHDAELQEDLQRLANRLRDLLLRVWPELLRLSPAANEPWFWTLLRLAPTPEAGARLSARRLQIVLAKHRIRRLTAGALVGILRTPSVHLAPGVREGVAPRIMALVRQMQLVLQQRQEAERRLKTALQAIGDDTPTEKVREHRDVEILQSLPGIGTRIAATMLAEAAQPLRERDYHGLRVLGGVAPVTKRSGKSRIVRIRYACNGRVRFALRCWAMGAIQRDPRSRAHYDHLRTIGHNHERALRGVVDRLIPVLIAMLRDGTLYDEARRRGHMAA

SEQ ID NO: 274594 - protein, 350 aa, unidentified
MKKSNNLPALKPHLVIGMDVSDTKSQLAIISGDALRFESVKNTRHSLGLVFAGLSPSRVALEAGTHSPWLSRDLAAHGHEVIVANPRKLALITHSRQKSDLRDAEILARLAKADPKLLSPIRHRSEDAQKTLALIRVRDQLVEARTSLVNCARGIVKPLGFVLPKCDAARFAKRAGKDMDAALAPLLRPILNSLETIETQIEGLDKEIGKQAKASEAARCVRQIHGVGPITALCFVMTLDDARRFAKSRDVGAYLGLTPSRNQSGEQDPQMHISKQGDKMLRRLLVSCAQCVMKRNAPDSALKRFGLRLASRGGKAAKKKAIVAVARKLAVLMHRLWLTGEVYEPLRGCK

SEQ ID NO: 274595 - protein, 451 aa, unidentified
MSRPQVIDDEERERVHERVAAVDVAKDAGMVCTRTPHGSRPGARQSTVWAVKARMNAIRKLGRQLARDGIEMVTLESTSDYWRIWFFVLEACGLAVQLVNAAQARNLPGRPKTDKLDAQWLARLTELGLLRPSFVPPAAIRELRDYTRARTRLVQERTRCFQRLEKLLEGALVKLPAVASKLTTISAQDMIKAMIAGQRDPHQLAALARTRMKARHDDLVEALDGRFDDHHGELAGMLLDQIAFCDGKVRQLDARIEQAAAQIPAAWGTGTDGTTGPHAGAGPDAPVLNAVARLAEIPGISPQLARSIIAETGLDMSRFPTAAHLVSWAGLCPSARQSGPRTRAGTKGQGDTWLRGYLGQAANGAARTATFLGERYGRIARRRGKAKAKVAVARSILVIIWHLLADPEARFADLGPGYYAARTDTSRKLRNHIRQIEALLGHPITITPKAA

SEQ ID NO: 274596 - protein, 458 aa, unidentified
MEEPQEVPADEEHERAWERVAAVDIAKASGVVCTRLPDEDRPGKRKTHLWTVQATTGAVIELGDYLRARQVQVVTLESTSDYWRIWFVLLEAAGLRVQLVNARAVKNAPGRAKTDKKDAVWLAKLTEKGLLQPSFVPPYEIRRLRELTRLRAELVHDKSRYWARLEKLLERALIKISAVLSTLDTDTARAMTEALIAGQRNPRVLADLAIGKARAKRAELTLALDGRWEDHHSIQARILLDNIDALNRQIEQLAGTAGELISQIPAAWGVDADGSTGPHAGTGPDSPVLPAVAQLDAITGRGIIAAQAVIAEIGLDMTVFGTPGRLVSWAKRCPQTRQSGKKTSGGKAGKGNPWLNGILGEIAASAARTDTFLGERYRRLARRRGKRKAMVAISRSILVIIFCLLSDRSARFRDLGPDFYDTQVNRDRKIRNHIRQLQALGVDPEDLAALLTKNPPAA

SEQ ID NO: 274597 - protein, 470 aa, unidentified
MAAVMIGVDPHKASHTAVAISAAEEPLGELRVRACAVQAERLLEWAAAWPQRTWAIEGAGGLGHLLAQQLLAAGERVLDVPPKLGARVRLLAAGNTNKNDPNDARSVAIAALRSAGVREVRPDDHAAVLKLWSKRHRDLGRTRTQVACRLHAVLCELIPGGVSKHITAAAAARLLEPVTPARAVEAARCELAAAFLEDLRGIDARIRETRKKLTVAVQAAGTSLTGLFGVGPVVAAAVIGAVRDVSRFGGRDHFAAYNGTAPIEVSSGQRKIYRLSRRGNRRLNHAIHMAAVTQIGHRHSEGRAYYDKKLAEGKTPKEALRSLKRQISNAMFACLQADARRAAARAEGPGGQPGNDSVASAAGLHPGHRLFGQATPGPGHHITTAAGNPAPGPVSARGGAGHSPVAANLPPAKPQVQVERPQRSEDERPGGAARRRPHSAARKARGQGSLVKPQRPKGTSQAAKKTDGTP

SEQ ID NO: 274598 - protein, 424 aa, unidentified
MNCNQNFKISQVTEGTLVLGIDVGSNTHYARAFDWSGLELSKVFKFKNSFEGFQSFVLWVNDLCCKYNKSKVIAGLEPIGHYWFSLGELLKENNITIAIVNPYHVKQSKELDDNLQTKNDSKDPKVIAKLVIDGRYSFPYIPEGIYGELRVADKLKNDITQQIISIKNKIHRWLSIYFSEYEKIYSSIDSKSGFLLLKETPLPKDIVELGSEGIVERWKQTKLRAVGLDKAKKLEEAAKKSIGCKNITSSARFEIKLLIEDYEYKQNQLNSITEELNKLCEKIPMIKEIAEIKGIGIATAISFVAEVGDIRRFKSAKQVQKYAGLALKENSSGKHKGLTRISKRGRKKLRTILFRATIPLIGFNKEFSSIYNYYIERKDNPLKKKQALTAICCKMIRIFFTILSKGIKYDETKMLHDIKRPVAA

SEQ ID NO: 274599 - protein, 347 aa, unidentified
MTADSTRNVTTGAMHYVGLDVHARRSSVCVLDADGKRVRQFEVRGDWPALLERVAADVPRPFAVCYEASCGYGHLHGRLSALADRVAVAHPGKLRLIYGDKRKNDRVDAAKVAKLLYLDAVPQCHVPDADVRAWRGLVEYRRRLVDRRVAVKNQVRALLRGLGVGGVPPGKALWSSKGLAWLRQLTLDAGADLLRRDLLAEELAAKVKRVERELDARAARHPGVSLLRTIPGVGVRTAEAVVAYLDDVRRFARVRQVGAYLGLVPCQDASAGRDRLGHITRDGPGTVRKLLCEAAWQAVRRSPGMRAYFERVAGGKPDRRKVALVAAAHKLARSMAAMLRSGEAWRE

SEQ ID NO: 274600 - protein, 343 aa, unidentified
MNISRVGVDLAKNIFQLHGVDRQGKTVWKRRLSRDKWLHELFKTVKPGTLIGMEACAGAHHWSRLLQSAGYEVKIIPPQFVKPFVKSNKNDANDAQAICEAMVRPNMFPVQVKTIEQQDIQAIHRVRNEIKAHRVAKGNQIRGLVCEYGLVAPRELSSLRKAIPIWLDDTENSLTSCFKQLLRSLWDDLSYLDDRMNELNKQIKKIAQQDPIVKRLQQLQGVGELVATALVATVGDGTQYRKGRDMSAALGLTPRQHSSGGKEKLLGISKRGDSYLRCILIQGARSAMRTVKNKDDRFSRWVVNLQSRRHSNVVAVAMANKIVRMAWAMMTKGSDYDPNYHPS

SEQ ID NO: 274601 - protein, 430 aa, unidentified
MNTIRPVAGVDVAKAFSEFCLLAPDNSVLATLHIRHDVREDIEKAVNLLQKSEKDFGCSPIVIMESTGHYHKILFHALAQREIDVIIVNPIQSDSIKNLDVRKVKNDKWDAKRLALLYRIKGESLRTAVLASVNVAALKDLVRQYYDIQDDLTAHKLRLTGLVDRVLLGFEKDFFEITSMTGLAVLKAYPSAKAILRARPATIINLIAKTSRKGQKRAEAKYAFLRQIAQTMLDLGDSAEHLTLIIRAEISLIESLQAVLATIMQSMQSIVEQDRQTEHKSLAKAIDLLISIPGIGFQTAVTMLAEFGDVTAFQSAQALTAYCGLDPSVKQSGSFKGTRNKISKRGPRLLRRALFHVASANVRNSRNDKAVNPHMQAFYKSKCQSKPKMVALVAVMHKMLFIIFAVLRDQKPFEFRDPIEHAARLAAKVA

SEQ ID NO: 274602 - protein, 454 aa, unidentified
MEKDREDKKIFLGIDIGKTLNWVSFLSLYSKDEIRKRIKITNNIYGFLKLESILKELLREEKITKEEILIGIESTGHYWINFYEFFTKRDYEVVMVKNRVVKLKREAKYSQKGKNDSIDCHCIGLVLKDWDYFNIQKTDRNFSALKRLTRSKEDYTKIKVQNKNRLRAWIDVNNPIYFMIFTKMDSKTGLAILREYPSPHDVVNKDMEEIKGILKKDGKNKGIDLRIINEYVMLCKDLYKDIIVLNNGDRRELECYLDQVASIEKQLEQLDLAIQELAMETIPAYEKIIKIKGMGDTQIVNFLAEIGLIENFPSARALQAYFGLSIRADMSGNMVKQSRITKAGNRVGRKILYNIAMMLVNHNKDWRKLYCYYKSYDRKTANSNNEMLVAVACKLLRVLYGMLKHNKDFDPDELLRHFDFRDCNKEKFIKEYIGDKKKLAIPKEELEALFKEKY

SEQ ID NO: 274603 - protein, 379 aa, unidentified
MDHVITGTPTETVLYGALELSKNSWLLALQLPNRAQPSLYPIRGGDTEGLMAKVTAARDRWAKMSGKAPSIVLCYEAGYDAFWLARFLKARGIECLVVDAASMQVNRRARRAKTDRIDVGMLLRALIKWGQGDRHVWSVVRVPGVDEEYLRRSHRERDRLVRERTAHINRIKGLLFAQGIRGIKVKSKYKTLQIDKLVTGDGRPLPPRLASEITREIARLALIQEQLAALERERDQAPTPCKATEKKRVQLMSLSGIGPAIAAVMTREVYYRQFDNRRQVAGFLGLATSPHDSGDVERSQGISRAGRGQVRGTIIQAAWLWLKHQPKSAITRWFLRRTAGQSGRIRRIMIVAVARKLAIALWRFLEQGLVPQGACLVSR

SEQ ID NO: 274604 - protein, 344 aa, unidentified
MKNSNVIGIDLAKNVIQIYTISKDGELLSNKAISPKKLKEVLARAKPSIVAMEGCSGCNFWGRLAERHGHDVRIIGARKVKAFLQGQKTDANDALAISVAASQVGMTFSQLKSEEQQIFQSIETSRKFLDKERIALMNHMRAYLYEYGITSGQGEKSFKRLIVDVLDDIFPGLPRCLKEPLRVLWNRFCQTLEQLAKVVKQRNSLVKQSEPCQRLKELEGVGEVCSAMLYTNLGNGSSFKNGRQASAYVGVTPKQYSSGGKVTMRGINKVGGNKELRSALFQGAFAIIYKLPDKPKTTKQAWLKELVQRVGVKRACIALANKTVRTAWALLSTGEHYKVTAIAY

SEQ ID NO: 274605 - protein, 293 aa, unidentified
MIIIGVDFHPEFQQIALVDKDTGEFQEKRLGHRDEAEKFYRGLAAAGQKVRVGMEASGHARWFERLLAELQIELWIGDAAEIRTKRVRKQKTDRQDARLILQLLLEDRFPQIWVPNWENRDLRQLLWHRHRMVQARTRIMNQLQAVALNEGLRCKKRLWRKHGREQLESFRLAPWASRRRRDLLELLDRLNPTIAELSQAIEQEVEKCPEARRLMTYPGVGPLTALAFVLIIGDAERFQCGKQVASYLGLVPLEDSSGNRRRLGTHHQAGEFDIAFLAGGSGAGHSPQPAAVA

SEQ ID NO: 274606 - protein, 361 aa, unidentified
MTKGSTGMGTEAATDFIRLDLSDKTATYVVVSAGGEVIQEGRLKLSQAGLNKALGARPPAQVAIEVGAHSPWVSRALKGLGYAVTVANPRQVKLIADSPKKNDLLDAENLARLLRYDPAMLRPISHRGEAAQADLALLRSRDALVQARTRLINSARGMAKAAGGRLPSCSAESFHSKVRDHLPELLKPALEPMLPAIASLTEQIRTATRQLEKLADDRYPETRILRQPKGVGYLTSLGFVLTLEEPQRFAKSRSAGSFVGLTPRQHDSGESQPQLRITKAGDPFLRRLLVQSAQYILGPFGEDSDSRRWGLKLAGEGKNKIRRKKAVVAVARKLAVLLHRLWLTGDVYEPRRQAEPEQEAA

SEQ ID NO: 274607 - protein, 436 aa, unidentified
MRGCRCSMIMGFTKPIEHFNLQRKKVITMNTLYVGIDVSSKSNVVYLMLPNGDKHSNFSVANSHEGSTLLVKKIYSALTSHSLDTVLIGLEATSVYGDNLVYFLREDATLAPFNRKIHVLNPKQVKKFHDTYNDLPKNDYVDSFVIADCLRFGRINKEVYMGDYRYKALQNLTRARFFAVQNLVKEKQRFMNVLFKKYSTMTQEKVFSDAFSTTALAVYDEFESAEALANMDLHELTDFIIEKGKNRFPDPDAVAKAIQKAARSSYRLPKTVNDSVNQVLSISITSMKALESQIKKFDKAIKALMELLPNVLISIPGIGPVYSAGIMAEIGDINRFDNQASLAKYAGLAWKQHQSGGFEAEVTRLIPSGNRFLKYYLCEAAFSLVRCDKKYSDFYHLKYKEVNRCQHKRALALTARKFVRLVFRLLKDNRLYCPAK

SEQ ID NO: 274608 - protein, 433 aa, unidentified
MSKFFYSPTVGIDISADFSYIAILAPNGETYKKPFRINHDVSGFTHLLNEIKKVEEEFNMKTGIFMEATGVYHLSLFHFLNKNFDNTFVINPLVTKCNKNVDIRKVKNDKKDAVSIAKIGKFQNIKLSQGVTLDIFLLRSLIREYYKLTDTCSIFKKKLSADLRVIFPGYSTIFSNVTSLSSISILSSYPSPKTVLDAPKDDILDILITKSRKGLLWAEKVYSKLYSVTNDAVVIGLPLPGLSIKITSNLTLLNALESEIQNLMSEINNLIKSNDFPKQIRTNIELLKSIPGIGELTAITLVAEIGDINGFIKPKHLVAFFGIDSSVNESGNFKGNQNKISKRGTRIGRRALYAVALASIRQTRKGVPVNKILLDYYDTNLNGKKPKVALVAIMHKILNYIFAVLRNQSPFELRDPRIHKQMFLDNKATANVA

SEQ ID NO: 274609 - protein, 373 aa, unidentified
MAKAEKSINEGELRQFNYLFSLGLFAVGVDLASTVIQVCYYDPKSKQIKNRQLKRDEFYEFIKAPEFGPMQLCIEACGSCNYWSREFVKYGHSAKVVLAKDVKPFIMSSDKNDKLDARGLFKCCLTETLGRTVKPKDESQQTILNLHTVRSLLIKQLVQTQNSYRAMIYELGGVSKPQSINRLKLSGEEMLAKLQDENSDAVDNFNCIKEALTQGLDNTAQRLKVIDGYLHNFAHTNEDCKRLMTIPGIAEISATAIYAVMGDPDNFENGAQFAALAGFVPAMVGTGGREYQLSTRRSANPLLKGMIYICAVSQLAKVAKHDKERKSQLAIKLDHSDAKKKVIVAVANRLCKVAWAVTKYKKDYDPTKCGLLF

SEQ ID NO: 274610 - protein, 351 aa, unidentified
MKYYTSTSEYNCGIDLHSQQMYVCIMDREGEVRVHRNIRGNDFEYFLKIAKPYLHDLTVVCECTFNWYWLADACFAADIGFVLAHALYLRHISGGKNKNDRIDSEKLAHLLRANLIPPAYVYPAARRPIRSLLRQRMSYVWQRAELLTHLSMNQMAQGLVPAPKFGRNREVWEERILEQVEHPLHRMGVACDMQIVRAYDRQIQLLGQEVTRQARKHEGRDHQLLLTVPGIGKILSLTILFEMDTVERFPTVKDFISYCRLVKGSVASAGKIKGLCGGKMGNPYLRWAFGETAVLAKRSNPLLKTYAERLVSKHGKYKGNSILAAKLARAVYHMLQKGTGFDVECVLATSA

SEQ ID NO: 274611 - protein, 334 aa, unidentified
MQYKNMEIIDVIGIDVSKLTLDCCIHKSGLQRGFANEPKGIGKMIKWSLSKSKVNKENLLFILEHTGLYSDRLVEILATGDYLVKAVSGLEIKRSLGIIRGKDDKADAKRIALYGYRTREEGVLVKLPGSTLVRLKRLMSLRRKLVGQRAGHMATLKEQKKVLEEDALLFWVQEDIINLLSWRISDLEREMDKLLQSDQELKEMMELLVGIKGIGRVTARFLIVYTAGFTSFGSWRKFASYCGIAPFPHTSGTSIKGRTKISRLANLEGKSLLHQCAIAAIKSSPEMKAYYERRLEMGKSKMSTINIIRNKLVARAFAVIARGTPYVNTMGYFS

SEQ ID NO: 274612 - protein, 380 aa, unidentified
MIQAYIGLDVHKRTISIAVAFLGNDEPVSYGKCSSDINCFLKILRRLMKKYSFEKKDIKLCYEAGPCGFVLARHLLRLGFDTVVIAPSLIPRQSGDKFKTDKRDARKLARHFRSGNLTTVHIPDESDEVIRDLCRARTDAVDDCRRSRQRLLSFLLRNGHHYTGKSNWTEAHMRYLRELVLQDPSQKVILEEYLQTIDRNMQRVSDLEENMRTLQVDWTRGKFAEALQGFRGFQLIASMIITSELGDVTRFDHPRKLMAYLGLVPTEDSSGDRRRQGAITKCGNSHARWILVEVAECYRYDPKISRALSYRQEGLSKAVKELSWRAQKRLNHRYVRLAMRRLHKNKIKVAIARELAAFIWELGQILRKESSAPDSQWYAA

SEQ ID NO: 274613 - protein, 464 aa, unidentified
MKRQRRREPRPRISPSVLERINPHAAGIDCGSAEHFVAVPPDRDETPIRSFATFTGDLHRLADWLTACRVTSVAMEATGVYWIPIYEILDARGFTVLLVNARHVKNVPGRKSDVSDCEWLRDLHIVGLLRGSFRPTDGIVALRAYLRHRETLIQTAGSQVQRMQKALVQMNVQLPLVVSDITGVTGLRILRDIVAGRTDPHALARHRDHRCHASEDEIVAALTGNYRPEHLFGLRQNLEAFDHSQQLLAACDTAIETHLQILATHARQATTPLPPPRSRQKPRGNEPRFELRTPLHQLTGVDLSQLDGIGPYNALRLVSEIGTDMTRWPTDKHFTSWLTLAPKNKVSGGRLLSSRTQPSASRAAATLRLAAMNLGRTQTALGAFYRRLAYRVGKAKAITATARKLAILVYHTLKGDLVYQDPGAAEYDARDRARVLRRLRQRAAHLGYSLVNLTTGELAEGTVS

SEQ ID NO: 274614 - protein, 405 aa, unidentified
MLFVGVDWAEAHHDVCVLDSEGRVLGRKKVNDTLEGVRDLHALLATCTDDDAPEIVVGIEKDRGLIVTALVGAGYEVYAINPMAAAHYRDRHHVSGAKSDPGDAKMLADLVRMDRHNHRPVAGDTPLAEALKVLARAHQNAVWSRQRHVNELRSSLRDYFPGALEAFGTDLAHHDALAVLEVAPTPSLGRALSKAKLVSALKRGGRQRRLEERALELQEILRREQLAQPMILERAYGLTTSATVVIIVAMNATIDELEAGLAEHFEQHSDAKIIRSLPGLGMILGARVLGEFGDDPNRYADSKSRRNYAGTSPVTRSSGTKKVVLARRGRNRRLAAALDQWAFSSLLQSPGARHYYDELRARKKSHRMALRQLANRWVGILHTCLDRGTLYDEFLAWPQIVDKVA

SEQ ID NO: 274615 - protein, 315 aa, unidentified
MRDVPCLVGIDVAKAQLDMALRPSGERWAVPNEASGVATLVDRLQALHPTLIVLEATGGLERAATAALATAGLPVVVINPRQARDFARATGQLAKTDALDARVLAHCADVIRPTPRPLPDAQTQELRALLGRRQPLIVMRTAEQHRLAGTSARLAKDSAAHMTWLNAGIATLDDDLETLLRASPRWREHDDWLQRAKGIGPVCARTLLLELPELGTLTRQQIAALVGVAPLNCDSGTLRGRRMIWGGRAHVRTVLYMGTLVATRFNPQIKVFYERLLAAGKVKKVALTACMHKLLTILNAMLKHRTPWQPQEVQS

SEQ ID NO: 274616 - protein, 353 aa, unidentified
MHTHQKSSDPVATIGLDIGKNTFHLVGLDKRGSIAMRIKVSRNQLARRLANLSPCLVGLEAGSGSHHIARQIQALGHDVRLLPAQYVKPFLKGHKNDYRDAEAIAEAVQRPTMNFVAIKTPEQSDLLSLHRVRSRLVRQRTAVINQIRGLLIERGITVRQAPGPLRKVLPEVLSSPPEALSPRILRLIAELDQDWRRLDQRLEALSAEIASLSEDDCACQRLMSVPGIGPIISSAVVAAIGTGSGFKQGRDFAAWLGLVPKQESTGDRTKLGRISKRGNKYLRTLFVQAAHVVLERRPAAATRALLPWIDQAARRLAHRNLLAVALANKLARIAWAVLARGRDYEPRITSNAA

SEQ ID NO: 274617 - protein, 355 aa, unidentified
MPSKTAGAVLAKKEAAMDLYCGMDLHGDNVFCTVMDREYRPVFERRLPNDLTVVLECLAPYRERLAGVAVESTYNWYWLVDGLQGQSYPVRLANPARMEENIGLKCANDKTDARFLAKQMVMGVLPEGYIYPVGERPVRDLLRRRMGLVQARTAEWLSLESRVARHSGRDLGMQALNGLEEGELSALLGNDPLVLQAAQISYRHIAFLDREIREVEKTVEERVTLSPEYQRLLTVPGIGRILAMTIMLETGPIARFPGPGNYASYCRAVKATHTSNERKKGEGNAKCGNRYLAWAYVEAATYAARFSPELRAWFQRKAARTKRVVAVKALANKLAKACYFILRDGVEFDVKRLVG

SEQ ID NO: 274618 - protein, 278 aa, unidentified
MFHSDYTVGCDAHKHFSLFAVLNGNGDPLQRTRVDHVPGAIGAFLAQFPEGTPVALETVGNWYWIVDEIEEAGCIPLLAHAAKAKVMMGNIHKTDKLDAQGLATLLYLGKLPSVWIPPADLRDERELPRTRMTFAKHRTMVKNRIRSTLAKYALSLDTASDIFVPKWRPELEAVLQKLPAETERCVRQQLQLLDALNDHIQQLEDRIVDRIQTTPTIQLVQTVPGPAKVLAIVIDRELGSIDRFPSPHHFASYCGLVPKLSASAGRAHYGRMVKQCNT

SEQ ID NO: 274619 - protein, 321 aa, unidentified
MMLIGIDPHKSTHTATAVDPGTNRDQASIRIDGTLQEYQRMLDWARQWPQRRWAVENARGLGHHLTSWLLARGEQVVDVQPSAPARVRQLSRGAGRKNDRIDAAAAACVAAVQGDARPVQPENSTDALALLDERRSNLALARVRAVNQLHALLRALLPGGAPRDLSAAKAEQLLETVVPVGPAETTRHALAADLITEVRAWDVKLKDNAKAMAALVAESGSRLTDTPGIAAITAARLLGRTGNPTRFPTASAFAQYAGTAPIEIASADRAHHRLSRHGDRQLNAALHTVAITQIRMPGTGDTPTSKPKSQKARHPGKHGAA

SEQ ID NO: 274620 - protein, 349 aa, unidentified
MSDVIVFNNDLKGFKSFEDWMIKHRRELEIPLVICMEATGIYHENCALYLFERNYRVSIILPNKAKKYLEAIGLKSKNDSIDAKGLSQMGAEQCLEQWEPFGKYFYELRLYTRQNQNLQELKTVISSQLHALKQAMYTNPIVIEQLESTIDLFDLQLKELEKKIKLHLESDAEIKQKVANIIKIKGLVILTIATILAETNGFDLFKNYKQLVSCAGFDVVESQSGARIGKTKISKKGNSRIRRALHMPSLVVITYKEKPFLDLFERTYAKHGVKMKSYVAVQKKLLTMIYYLWKKNEMYNPDYQNNIQEKELEFPSLLAFEKGTKNSLKQVEAIQGKHPVKNRSMFPLC

SEQ ID NO: 274621 - protein, 319 aa, unidentified
MNPEEVFVGIDVAAAHLDIGVRPGGAAWRAANDPDGQAEVAARIAALGPALVVLEASGGYEAAVAAELRAAGVPVAVVNPRQVRDVAKAVGQLAKTDALDAALLARYAEGVRPEARPGPTPEDAVLKALVARRRQLVELRTAEAQRARIAHAAVRPQSEAHLAWLAGQLAGLERQIAAAIAADPARQATVALLATVPGIGAVVAATLAVDLPDLGRLTRQEVAALVGVAPLNRDSGGQRGRRGTWGGRAAVRAALYMAAVTAVQHNPPLAAFRARLLAAGKPPKVALVACMHKLLTIANAMLRDRRPWADPTPPATPAA

SEQ ID NO: 274622 - protein, 385 aa, unidentified
MKPNSQMTVGEFFRQCVGIDISKKKFTVCLYMYDRASDAGCCTQSVDFANTKTGFNQMVKWSRKEAVKGQPLTYLMEPTGSYYEKLAYHLNKIGLTVYVVLPNKARQWCEAEGVKTKTDAMDARCLALMGCASRKLSPWSPPAAIYRELRQITRFHADLCKVRTSVANRMEALDNMYGPDKSVRKHCEKLLEEIDNLMEKNDEALLCKLAEDKDLKSKVERIAGAKGVSIQTVACVIAETDGFHLIRNRKQLTSYAGFDVVAKQSGGQDPKHKISKKGNANIRAALYMPALVATRYNKQMKAAYDRICQKHPNEKKIGVTAVMRRILLLIYTLWKNGEEYDENKDKANAKGKKKQAQEHGPEDCLAVNEEHVEGVAEDENGQPSS

SEQ ID NO: 274623 - protein, 425 aa, unidentified
MNYKQNEKINQVKESTLVVGIDIGSTTQYARAFDWRGIELGKVFPFSNSREGFESFKAWMQHLQDKYRKSDVIVGIEPTGHYWFDLGAYLEDEGILLVMVNPYAVKQTKELDDNSQSKNDRKDPKVIAKLVTEGRYSAPYTPDGVYADLRIMVANRKRLIREMTQIKNRFARWFAIYFPEYTDVFGDYEAQSSMLLLKKVCTPEAIVELGAEKINQIWRDAKLRAVGMKRATTLCETAKRSIGLKKGSSAARYEMKLLLEDYEYKKAQLDAVMEEIEKLCRKIPESEQMLAIKGIGVITVAGFLAEVGDVRRFESPRQIQKLAGLSLRENSSGKHKGQTTISKRGRSKLRAVLFNAAIPLIAKNPEFKSLHEYYTTRANNPLKKKQSVIAISCKLIRVFYAILANGVTYDAQKMLSDIHRQPQAA

SEQ ID NO: 274624 - protein, 417 aa, unidentified
MTNEARWFAGIDWASQTHQVCLIDVGGKIIGERAFAHGGAGLTELCAWLLARTGAAPAAIAVAIEVPHGPIVEALLEHGFQVYAINPKQLDRFRDRFTVAGAKDDRRDALVLADSLRTDRHCLRRLAAEDAVVIELREWSRMTEDLQQERNRLANRMREQLWRYYPQALAIGDDLAADWFLELWAAVPTPAKAARIRESTLERILKRHRIRRVTAAEVLRTLRQPALRVAPGTAEAASAHIRAVGERLRLVNRQIREAHQRLDALCAELAGDGGERPPGQEPEQRDATILRSLPGVGRIVLATLLAEAAEPLRRRDYHALRALSGVAPVTRRSGKRCIVVRRQACQTRLRDAVYHWARVAIQHDELSRRRYAELRKRGHSHGRALRSVADRLLAVACAMLARQTPFDPEYAAKRAVA

SEQ ID NO: 274625 - protein, 345 aa, unidentified
MMVVLGTDAHKRSHTVVACNEVGAEIGTVTVPATPPGHLRLVKWAAQFTVRRWAIEDCRALSRRLEADLLRVGEHVVRVPPKLMAGVRRSARTRGKSDPIDALAVARAALREPDLPTARLDGPSREVRLLVDYRESLVKDRTAAQNRLRWRLHELEPGYDPPAGSLNRYKTLAAIDQLLDNHTGVVADVARREVTRIRELTTEANQLEADITVRVTGLVPSLLAIPGCGALSAAKLVGEAADISRFKSRDAYAMWAGTAPIPVWSANNTRFRLNRGGNRQTNAALHRIAITQIRIHPDAKAFITRRLQAGSTKREALRLLKRKLANVVYRTLLADTQQPALAKAA

SEQ ID NO: 274626 - protein, 317 aa, unidentified
MKIVVGIDVSKDWFDIAWKENDRIKNQRFDSTVSGINQLMKATPAEAIYVMEATGVYHARLSTMLFEAQRKVAVVNPLVIKRYGQMQLSRVKTDSADASLILSYGENVELRSWAPEPQHLQELKVAQCWLDDLTEDMTRLSNREHAQSYLVVRSPMVDKQLVRRKEQLKQDIIECEAHLEKQVKKHFAELYELLNSIPSIGPKTATQLLISTGGFTKFSNIKQLSAYVGVSPTTYESGSSVRGRGGIAKMGQGRLRQLLYVCSWTARKCNPACKALHERLQVLGKPPKVISIAIAHKLLRQIFAVATKKTAYSPEFA

SEQ ID NO: 274627 - protein, 399 aa, unidentified
MLAVGIDISKSKSVAAILNQDGSMHTSPFEFHHTQPELDAFIKYILNSNQSATILMENTGHYHYPVLKAFQEAGLPVCIVNAYQIKKFGDMDLRKAKTDKKDAVRIARYALEKSYSLVPYTSMEQKYEDLRFLARQYNQRMLTLKTNKVFLLNLLDETMPGITNILPLTTRTPETSLSVLFINRFKSYDRIKKMGKNRFLDAFEKIARKSRNRQTKTYGLAIYEAALRNITTRGENEYTLAAQDQCLELVCESQKAADSIILKMQTLAETLPEYAVLRSMAGVGDRLGPLILAEIGDIRRFHSGKALNAYAGNDAPPYQSGTFESHNRHISKRGNAALRKYCFEVMQALKLTRPQDDPVYLFLLKKEQEGKPYNVAKMAGVDKFLRIYYARAMETLKQQ

SEQ ID NO: 274628 - protein, 370 aa, unidentified
MSVRRILAKTIDTDLEYEAIGIDLAKNCVSAALSTTDGEVICIDRLDYSELEKSAQALSSTTFAMEPCTEMNYLVQKLEAWGHRCLVIGGKNVQNYVENHYSGQKTDLNDAQALAFLAQDTQLRTIKAKDVEQQKYASLTTLREQYIKQYRQTIVSLKGICQAWGLNISKGISGKARLKDLIENHVAFLEELKESLVDMVTHAQTAQKALNKITKTLEELAKSDKVCQLIQTIPGLGSICSCRLRATVGDIKRFKSPKDFPAYYGLVPRSIATGHNERKGKITHRGDRTMRSLMVQAAGSLVNMATKGKLKSKQLTKWILKKQKEKMPWGKLVCAVAAKLLRIVRAVLISNKPYNSKIAGVAKCSLPKGS

SEQ ID NO: 274629 - protein, 354 aa, unidentified
MICIKYVGIDVGKRKCQTCIMEENATVIDEFVFSNDSDGISLLLSKLDDECRAVMESTGNYWVRIYDALEKNGIETKLANPLMMKAVSYPSIKNDRKSARTLARLLKADLIYECYVPSYEARSARNLLRYRSSLVKIQTMVRNQTHALLDLYEVECQYKDILGTHGLAVLSTLKMNADDDLILHTHTKHLECIKDCIDKISARIAMRASDNEDVRILMSMTGIDYHTALLIATEIGDISRFPVPKHLVSWAGLCPNLNDSGESKYYGRIKKRECNRRVQWAIIQAAHVATKHDRRMSEYYERNAKRMHTNKAMVKVANKMMTIIWHMLTKKQLYMQKNDRLYHNKINKMSKLAN

SEQ ID NO: 274630 - protein, 430 aa, unidentified
MKSNTQNAKIEAITEKTLVLGIDVGSETHYARAFDYRGVEYSKKPFKFSNTEAGFVTFKAWVLDIKEKHGKDKVIPGMEPTGHYWFNLGKFLQDNEMKPVLVNPHHVKKSKELDDNHPTKNDRKDPKVIAGLVREGRYMIPYLPDGVYADLRTASNMRFQLQAELTRIQNRISRWFNIYFPEYKTVYGQPDAKSGMMILKIAPLPEDILTLGIDGVNQIWRNAKLRAVGKARAKTLIEAAEHSVGSKEGALSARMEIRMLLEDYESRNARLQEVMALIEELVKQIPMAEKLLEIKGVGIKTVSGFLAEVGDISRFDNPKELQKLAGLALVENSSGKHKGKTTISRRGRNRLRYLLFEVAMSLVSKNQEFRELHNYYTTRRLNPLKKMQSLMAIAAKLIRVFYAMLTKGVDYDPKKMVRDIKRPAVYLQVA

SEQ ID NO: 274631 - protein, 416 aa, unidentified
MNAVGIDVSSRKSTVAVLRPLGEVVCLPFDVTHDIAGLASLAEKLKALDGETRVVMEHTGRYYEAVAKALHEAGLFVCAVNPLLIKEYGANSLRRVKTDKADAVKIARYALDNWADLRDFTPMDAIRYDLKTLNRQFQLASKQRTASANNLIALLEQSFPGIRKCFDSPVRSDGTQKWVDFAHSFWHVDCVRKQPFPAFCERYRKWCKRHAYLFKLSNAEEVYALAKRAVVLTPKAKVVKVLVQEAANQLSSISRSVEVYRAEMDRLAAMLPEYPVVMAMYGVGKSYGPQLMAEIGDVRRFERKQALVAFAGIDPMPNQSGDKNVRSNKSSKRGSPYLRKTLFNVIRTYLQCAPQDEPVFQFLNRKRAEGKPFYVYMLAAANKFLRRYYAKLRDFFASLDTLQPVAPIPTILKATL

SEQ ID NO: 274632 - protein, 463 aa, unidentified
MKRKGNAKATRSGMAMVHPNAAAIDIGATMHMAAVGADRTSDPVRNFGTFTGDLRRLADWFAECGVKTVVMESTSVYWIPIFELLDERGFEVFLVNARDAKHVPGRKTDVSDAQWLQRLHSYGLLRASFRPKGEIAELRAYLRQRERLLDTAASQIQHMQKAMTEMNLQLHHVVADITGATGMRIIRAIISGERNPSVLASMRDKRCHSSVETIEKALTGHYRAEHLFVLEQAVALYDVYQQKVAACDVQIESVMNALSSVRRRQEGATADRSVSPKPHRNRTANEPAFDIGGSLHTLLGKDLTRIDGVGPYLALKLVSECGDDLSAWPSAKHFTSWLSLAPNNKISGGKVLSSRTKRSGSRVASLLRLAAVSVGRTETALGAFYRRLSSRVGKAKAITATARKIAVLFYNAMRHGMDYVDPGASYYETRYRERVVKNLHRRAKALGYIMLAADAPTAVPAVS

SEQ ID NO: 274633 - protein, 319 aa, unidentified
MDSTSHTLVGIDVAKHSLDVYVASEDRCFTVKNTTAGFKQLLDELPAAGSPLVVIEATGGYQSRVVGALVAAGHRVAVVNPRQVRDFARGLGILAKTDRLDARVIARFGEQAQPRTVAVSSEKQAELRELVTRRRQLVELRTAEQNRLETTLTKLVRKNVRHLIEQLDKQIRQLEEAIGQLVENEPELSAKAALLQTVPGVGPVTVTSLLVDLPELGRLDRQQVAALVGVAPFNRDSGKFHGRRRIWGGRSVVRSVLYMAALTARRSNPFIRGFAQRLEAAGKPFKVVLTACMRKLLVILNSMVKNNLPWNPKLHPHCG

SEQ ID NO: 274634 - protein, 424 aa, unidentified
MTQNQSYAAFIGLDKSDKKINVSLQQCAKNKMERSIVKGGAEALHAWVAALCARFPGQAVAICLEQPASGLIHALMSYDFIVLFPINPMTLARYREAFTPSRAKDDPTDADFLCELVALHREQLKAWQPDDVCTRKLRHLTLSRRRSVNMRTRFSNQLKALLKTYFPQALELCGDDLTTPTACALLQKWPSLQQLKKSRAETIRRFYYAQNARRGDVIEKRLALIAQAVALTNDPALIESSIITVQALTLGLRAAHTAISCYDREIARTFAQHPDASLFAALPGSGTAYSARLLAAFGSRRELFESAEAMLNFSGVAPVLKRSGQATITHRRYARPLFVHQSFIEYANESIRHSLWARAFYQMHKAAQKSHWVIIRALAYKWIRILFRCWQQRMPYDEIHYLKSLQKSHSPLLPYLAQPVIQTA

SEQ ID NO: 274635 - protein, 429 aa, unidentified
MNCTQNKKIEQVKETTMIVGIDVGSEKHYFRAFNWRGIELTRKPVAFSNSMEGFNSFYNTIVELMQKSELEEALVGIEPTGHYWFNLGKFLQDNEMKPVLVNPHHVKKSKELDDNNPTKNDRKDPKVIAGLVREGRYMIPYLPDGVYADLRTASNIRFQLQAELTRIQNRISRWFNIYFPEYKTVYGKPDAKSGMLILKHAPLPEDILTLGIDGVNQIWRDAKLRAVGKARAKTLIEAAGHSVGSKEGAVSARMEIRMLLEDYESRNTRLQEVMVLIEELVKGIPMAEKLLEIKGVGIRTVSGFLAEVGDISRFNNPKELQKLAGLALVENSSGKHKGGTTISRRGRKRLRYLLFEAAMSLVAKNPEFRELHNYYTTRRRNPLKKMQSLMAVATKLIRVFYVMLTKGVDYDPKKMVGDIKRPAVYLQAA

SEQ ID NO: 274636 - protein, 466 aa, unidentified
MKTSSALTSGCQDFAELTAKLKMVDPNAAFVDVGSAEHWVCIPEDRCEQNVRQFGAFTCELYAIRDWLLKHSVRSVAMESTGVYWICLYQVLEDAGLKVSMVNARALKNVKGRPKTDKHDAQWGQRLHSYGLLRPSFRPQREICAIRSLWRMREQLVRDASRCIQRMHKALHEMNVLLPKVISDITGKTGLAIIKAILDGERDPVVLAKLRDRRIRRSEQDIVRALQGDYRSEQLFLLQAALKQYEFLGAQLADYDRQIKQRLGELPTVRTLTDEERSANQKAHLSDLRRRHNVPSFDARSLQQELTGMDLSAIPGLSSSLCLCILFETGLDMSKWPTEKHFASWLGLSPNPRISAGRDLGTRTKKCASHASRHFRQAATSVSHSHGHLGDFFRRMRARHGGAHAVTATAHKIAVIFYKMLANSEPYHKVDQTEYRERVRQHQIRNLEKRARRLGYRLTLPATGTE

SEQ ID NO: 274637 - protein, 407 aa, unidentified
MEVIHSRCAGLDVHKQTVVACVRIAGDGPPLQEVRTFATTTSALLSLCDWLDSFQVEVVAMEATGVYWKPVWHVLEGHFELVLANAAHVKNVPGRKTDVNDSMWLADLLAHGLIRASFVPPVAVQELRTLTRTRKQFVRERSAHAQRIEKVLEDANLKLSVVLSDILGKSARAVLQAIVDGQDDPQHLISCIGRVKASRAELLEALRGRVSTHHRFMLKLHLSHIDALDQAIAAIEKEVGLGLEPFRQAAKLLSTMPGLSAVSAHVIVAEIGIDMSRFATPGDLLSWACLCPRNDESAGKRRSTRLRRGGQWLKTTLVQAAWSAVRVKGGYLQAQFHRLRARRGAKKAIIAVAASMLTAAWHMLRDGTEWHDLGAAHFDRADAHKTANRLIRRLQQIGYAVQLTPAG

SEQ ID NO: 274638 - protein, 408 aa, unidentified
MNCVGIDVSKGKSMIAVMRPFGEVVVSPFEVLHTDSELSELARLLKSLDGETRVVMESTGNYHAPVAWLLHDAGLYVSVVNAMLVHDYGNNSLRRAKTDKKDAVKLANYGLDHWLTLPRYVPDEDTRLMLKTCYRQYQQYSKVQTMLKNNLISLLDTAFPDANRLFTSPPRADGSEKWVDFVATFWHCECVCGLSKKAFTAKYQKWCRKHGYNFSQDKALDIYASACGRFGVMPKTNTAKLLVEQAISQLQTTSAALAALKQEMQSLAASLPEYPVVMEMFGVGPTLGPQLMAEIGDVRRFHSKKALVAFAGIDAPPYQSGQIDVRSRSISKRGSASLRRALFLVMGVILQCAPGDEPVYQFMNKKRSEGKPYRVYMMASANKFLRIYYARVKECLEAFDAQQNSAQG

SEQ ID NO: 274639 - protein, 345 aa, unidentified
MDVAYDGRQVVGMDLHRRRSVLVRMTMDGRKLGTARIENGPAALRRELAKAGRNPLVVLEATYGWYWAADVLEQSGAEVHLAHPLGVKAFSYRRVKNDERDAADLADLLRMGRLPEAWIAPAQVRALREVVRYRHKLAGQRTSCKDQVHAVLAKCGVPVTHSDIFGTGGGLWLDQLVLPEPYGAKVASLRALIAVLDGEIARLGQQSAQMLAAGPGYAALRELPGIGPVLAAVVIAEIGDVTRFRKPGQLCSWAGLTPRHHESDTKVIRGHVSKQGSRMLRWALTEAIQRQPEGAKPRTVKDAIVARRGKEAWNIARTAAARILLTQVFYVLRDGHVRRASIPAA

SEQ ID NO: 274640 - protein, 343 aa, unidentified
MDQYVALDVSLQKTAVCVLNASGSVVIEAELPSEPAALTAFIQIHAPRAARVGLESGPTSPWLWHSLKAAGLPVVCMDARHAHAALSVRPSKSDRNDARGLAEMVRMGWYREVQVKSLAAHERMALLGVRRRLVDMRVEIDGQIRGILKTFGLVVGSGNKGAFAQRARMLVQDHPVLSALVDKLIEVRAVAVAKVAALDKEIRRFVRDDPTLRRFMTVPGVGPVTALAFRSTIDEPDRFKRARDVGPYLGLTPRRYQSGETDRQGRISKCGDRFTRTCLYEAANVLLTKVQRWSPLKAWGTRLARRIGSKKARVAIARKIAVILQCIWTDGTEFWWTKEPATA

SEQ ID NO: 274641 - protein, 340 aa, unidentified
MTITTVGIDLAKNVFAVHGVDQNGKTVLVKSRVTRAALPGLIAGLPPCVIGMEACSGAHYWARLFQQYGHEPRLMAAKFVPPYRMAGKSGKNDAADAQAICEAVRRPHMRFVPVKDESQQAMQCLHRTRQGFIEEKTATYNRLRGLISEFGVIAPQSTDALRHMISVQKSSLPLQVQQCVDDLLEHVDRIEANITEYDRILSRMAKTDHRSQRLMELKGVGPTTACALVACIGNAHDFKNGRQLAAWLGLTPSQYSSGGKSKLGRITKAGDSYLRTLLVQGARSVLIGAEKRTDPFSRWVCSLVERRGYWRAVVAIAAKNARLCWASLHYGDDFRLYSAS

SEQ ID NO: 274642 - protein, 341 aa, unidentified
MEEYVGLDVSMKETSVSIRRAGERIWRGKCASDPRIIAELIRKRAPAVKRVVFETGPLSIWFYHSLRTEGLPAICIDARHAKAALDMATNKTDANDADGLAQLAEVGFFREVRVKGFDSMLTRTLVAARTRLVRITTELSNQIRGVMKTFGLLVPAGKGSTFEKNVRSLLADQDGLASIVLPMLEAWRGIRIRAAELGRQLVRDARQSQACRILMSIPGIGAITATAFSTAIERPDNFKKSRSVGAWIGLTTRRYQSGEVDYDGHISRRGDCHLRGLLYEAAAVILTRSSTDSTLRTWGRKLRERIGFKRAAVAVARKLAVIMHTMLKSGELFNPNAGAAA

SEQ ID NO: 274643 - protein, 410 aa, unidentified
MKVFCGIDWAEAHHDVAIVDENGQLVAKKRITDDPTGLAQLVEMFASVGDSAEDPIPVAIETPRGLLVASLRATGRAIYSINPLAVARYRERHSVARAKSDHADAMTLANILRVDAHLHRRLPADSELCQAIAVLARAHQDATWRRIKAHNELRSMLREFFPTFLATFTSRFPLGIASPEARAVLAIAPTPGAAAKLSTNRIAAALRRAGRSRGIDGAAAEIKTALREPQMRHLPQVEAAMGKQTLALLAALDTACTSVDDLGRASAELFERHPDYAIITSFPGLGDSTGARVLAEIGDDRRRFIDARALKAYAGSAPITRASGKSISITHRRIKNDRLAAAGWIWAFGAATHCRPAGEHYRRRREHGGRHSAASRHLLNKLIGQLHYCLQQQVLFNEDRAFSRPGAAVA

SEQ ID NO: 274644 - protein, 315 aa, unidentified
MTNLKKRKTIVNVGVDVGKSSLDVCIYETGVYWQEDNTADGIKRILKRLAHYQVERLVMEATGRYEFELAQAAYSKQVPVCIIKPSAIRQYAKADNRLAKTDKLDAQLIAEYGAIMQPSATPRKSKNLLAIKDLISRRRQLMGMRTQELNRKQIMGKGFQVSCSRIIRFLDQEIARIEKQLAKHVEAEAAWAEKQAILKSAPGVGNTLVYTLLADLPEIGDLTRREIAALVGVAPMNRDSGKLRGKRRIQGGRYTVRTVLYMATLSAITCNPVIKAFYGQLVAQGKHKKVALTACMRKFITMLNAMVRDRCEWAY

SEQ ID NO: 274645 - protein, 398 aa, unidentified
MFYIGIDIGKRNHEVGLIDDQGNPVGKTVRFANSKEGSEKLLQFINQHKLTPDNSVVGLEATGHYWLSVFSFLHKLGFKTTVFNPLQSDALRHFYIRKTKTDVSDAYLIAQVIRIDSPEETPFLEEDLLQLRHLERLRFSFVDQCSDIKRKIISLLDQVFPEYEKIFSDIFGLSSKEVLMHYPLPEDILQIDTNKLAELLNNVSKGRYGDKRALTKANQIRESALNSFGITVGTDVFKIQIKLLLEQINLFEEHLKQIETTMIELSNRQEHFLTTITGISDVTACVILGEIGSIERFERPEQLVAFSGLDASVHQSGDFNSHRTQLSKRGSPYLRRALWQAAFVASNHDPALSLHYQKLRQRGKAHGTALGAVARKLTHIIFAILRDNKPYEPRLHPE

SEQ ID NO: 274646 - protein, 345 aa, unidentified
MNKISIIGIDLAKHVFQLHAADERGNKVFSKTVQRDQLRLTLAQLPPCRVAMEACGSAHYWAREIQALGHETELLPPQSVKPFVLGHKNDARDAAAIAEAAARPATPRVAIKTQAQQALQALHRVRSRLIRDRTATGNELRGLMSEFGLIVSQGHAVMRQGVVRELLDTQHEHLGDELHLLLTDLLGQWLELDTRVKHYDKRIQALAKASEQARQLMSLPGIGPINATLLISHIGDPARFPNGRQFSASLGLVPRQYSSGGHIRLKGITKRGNGDVRRQLVHGARAALRQFQRQEHPDRLARWACALASRVGQRKAIVALANKLARICWSLLAKGQHYQPQGHAV

SEQ ID NO: 274647 - protein, 398 aa, unidentified
MYKQFVGIDISKDSFDLTLLQSSGEIKLEVKLTMDRDGFDTLLEYLSSYSKEELLIAMEATGIYHLPLLSFLLENSFKCVVINPILIKSFIGSTTLRKTKNDKKDAASIALFSLKSYQSLHLATPDIIENIRPLIRERENLSKDIARLKTEIKANLVQLFPELLKNTNIFTKSILNLLLKAPSRKAIRNLREKTIQRILDDTSGNKVKITAKDILTLAKTSIAVSDKYLEKVLTSKIRRLIAIQDELSILDLELENSLEDTHINDDIDILQSIPGVGSVTSKNFMVEVSSIDRFNSVKQLCASIGIDPSVRQSGTSINYKGKISKRGNANLRRTIWQMAIGTIRSCEKFKLYFSKKREEGKKFKQAVIAVANKLLKTIFVMLKNKTKFDENLALGVSK

SEQ ID NO: 274648 - protein, 409 aa, unidentified
MDVVIERGAGLDIHKKSVLACVRVPNPEGGRRQEARTFGTTAAQLLALRDWLHAHGVTHVAMESTGVYWKPVYYVLESTLTCLLVNAAHISRVPGRKTDVSDGEWLAQLLEHGLLRGSFVPPVPIRELRDLTRYRAALVQDRTREANRLHKVLTDAGIQLASVASNVLGKSGRAMLAALVEGTTDPVVLAALAQGKLRRQLPALRDALAGHFRGHHAFLVSQLLAHLDYLDEALATLTEQIQAALAPFAAEAARLDAIPGVGPRTAEVLIAELGVDMRQFPTPRHLASWAGLCPGTHESAGKRRPVRTRKGNRWLRAALIEAALAAINVRDGALAARYHRLVRHRGHKKAIVAVAHKMLTTAYLLLAEGRTYQEPGAAYYDAERKDRVVRRAVQTLERQGYRVSLDLAA

SEQ ID NO: 274649 - protein, 384 aa, unidentified
MDQYTTKYVGLDVHKETIAVAIAEEGRGEPNYYGEIPNKAEALRKLVKKVATHGEKIAFCYEAGPCGYDVYRQLIDLGQRCDVVAPSLIPKKSGDRVKTDRRDALTVTRLYRAGELTPVWVPDGEQEAIRDLTRAREDMKTMEGHAKQRLAAFLLRHGKRFSGRSKWTQAYFRWLEVIRFEMPAQQIVFQEYVDTVKHLKGRVEALEEEMRQALPGWSLAPVVTGLMALRGVELITAMTVVSELGDISRFTSAREIMAHLGLVPSEHSSGDRKQRGGITKTGNGHARRVLIEASWCYRAPARKTAHLQRRAEQASESVQAIAWKAQKRLCKRYWYLVNKGKLPVEACTAVARELSGFIWAIAGEVMKDIPVHKATSFMNSRRRG

SEQ ID NO: 274650 - protein, 338 aa, unidentified
MEKYIGMDAHSSICVFSVVDENGTEVNQAKIATNGRLLVEYLRSIKGSKKLVFEECELSSWLCETLRGEVNELVVCNPTRNMQYKRAKTDKLDAQNLALLLRGGFLSAIYHDGSKTEHLRALMSGYQDVVDTGVSIKNRYKSLFRKAGLPARGTKLYDDSSLLEDLPRPDQRFVGHSFYRLLEALEKEREHYVAAIKKSGRTFPEIKLLKTIPGIGDIQATKIVSQVISAQRFKDKHKFWSYCGLVRHRMESGGQIYGSRRGWGNRILKCVFKMAAHTVLSSDNELRNYYDELRAKGTSDKSARNAVSRKLAAISLSILKTRRPYDETHILPQMAQAR

SEQ ID NO: 274651 - protein, 344 aa, unidentified
MLHIGLDLSRRRLDYHALDAHGQTIAVDAVPPDVDGLRHLAARFPGEQVRAVVESMNGARFVHDQLELLGWDVEIADAVRAKGLAPLACKTDRTDARVLAELCWRDLVPAIWLPDPSVRQERERARFRLHLVRHRTSLKNRVHAILVTHGVPCPVSDLFGARGRALLERLPLPEPWRGSVEASLRLLDQLGQEIVACERELQRLGADHRYVPLLLTIPGVGWVLAYTIAGEIGTIERFATPTKLTGYTGLCPRVYQSGESDRRGSLSKHGPRYLRWALIEATTHACRHPAYATRYQRTARRLGKQRGPKVARVQLARTLAHAIWHMLTHNRPFAPASATHPLAA

SEQ ID NO: 274652 - protein, 356 aa, unidentified
MENQHQRRLSFEDTTIYIGIDVHEKSWTVSIHMEEFEHKTFTQPPDPTILTNYLNRHFPRGNYCAAYEAGFSGFWTYDALQNNGIKCIVAHPADIPLTDLEQRRKKDPRDARKIARGLRASELVPIYVPPLWAREDRGMMRLRESIIKDGTRIKNRIKALLHFHGIVSEHIQARRWSGAFLRWLESLTLSNPQGTETLKSYLRQLSDNRQELARITREIKRLSTTERYAKPVSYLLSIPGIGLISAMTWLTELVDIQRFKSIDHLSSYVGLVPGTHSSGETERVGRLEKRGNRRLRTLLIENSWVVIRKDPGMYQAYASYCKRMHGNKAIIRIAKKLLKRIRFVLIHETQYEMGLG

SEQ ID NO: 274653 - protein, 313 aa, unidentified
MSTSVVYVGLDIAKAHLDLCALTAPQPQFRRFANHARDHRCLLQWLRQWPAVHVVCEATGGYERGVVAALQQAAMAVSVVNPRQARDFARAQGRLAKTDRLDAAILALFGQRCQPPLSAGRSSAQQQLAELVSRRHQLLSLHCAEQNRLEHVGLAGLRRQIQTHLRSLDRQIARVEHWIKELLCAEPALQHHVQRLSSVTGVGWITAVILLASMPELGTLNRRQAAALAGVAPMNRDSGTWRGKRSITAGRAPARAALYMAALSAAFHNPRLRTFYVRLISAGKAPKVALTAVMRKLIILLNQLLKNPNFQPI

SEQ ID NO: 274654 - protein, 444 aa, unidentified
MAGSGMILIREVADAPVIMGISKPAGLKSPCGEVKIMNPLFVGIDVSSRNNVAYLMKPDGSKHSSFSVQNNLGGAKILSERIVSALESVPLSDLVIGLEATSIYGDSLVYALREDGSLGRFQRKIHVLNPKQVRKFKEAYPDLPKNDWVDAFVIADHLRFGRIAKEVYMDDYRYQALRTLTRSRFDIIQNLTREKQRFANYLFLKCSGIAQAKDIQNTSATTIALMERFETVDDLANADLDELTAFIAETGRGRFADPDAAAKAVQSAARGSYRLPKTVNDTVNQAMAVSIASMRALKEQVKVLDKAIEQQFEIIPNTLTSIPGIGKVYSAGIIAEIGDIHRFDSQASVAKFAGLVWHRNQSGDFEAEHSQMIKSGTRYLRYYLLEAANSVRRCDSEFRRYYDLKFKEVNKYQHKRALALTARKLVRLVFRLLKDNRLYIPPEG

SEQ ID NO: 274655 - protein, 415 aa, unidentified
MKGTEDTRKIDRYIALDIHKEYVLAGGQNAKQEWVLPPRQISMAKFREWAIANFQEGDAVVIETTTNVWDIYDIVAPLVTRTVVAHAGAVRQIAEARVKTDKEDVKRLIRLLIADIVPEVWVPPLEVRELRGVISYRNRLVKMGTMVRNRLQSLLHRHNILLQKGKLLDASWWQEQKMSMLEKMQIQQELMMLEELNRHKREVDMELGRQCLREPWGKQAVRLLQLPGFGVVMTMIVLSAIGDIQRFESAKQLVGYAGLGAGVHDSGKEHIEKRITKSGRKELRWALVEAAWQAIRISPYWKEQYETYLRRMRRPNQAIVVIARKLLVAVWHVLTKEETDVHASEEDLAYKMLVLSWDLDESVRMGLTYKQFAKYALMKLGVETDITRFVRKNVPRRIAPREEVLVRMQELGLST

SEQ ID NO: 274656 - protein, 413 aa, unidentified
MRKMVKRAAGLDVHKDQVTACVRIAGKGGEEGREEIHEFGTTTRELLALRDWLAAHRVELVVMEATGVYWKPVYYVLEEAFETWVVNARHFRNVPGRKTDVSDAQWLAELAQHGLVRPSFVPPKAIRELRDLTRYRKAQIQERTREVQRLDKILQDAGIKLSSVASRVLGVSGRAMLDALVKGTTDPEALADLAKGQLRKKIPALKEALEGRFSRRHAVVVGQILAHIDYLDEAISNLSAEIEEVVDPFAEKVELLRTIPGVDEKTAVSLLAEIGPDMTRFPTHRHLASWAGMCPGNDESAGKRRSGRTRKGSKWLRDALVQAAHAADRTKGTYLGAQYARLRGRRGAKRAAVAVGHSILISSYHVLSRGVPYQELGEDWLLTRDREAQTRRLIKQLTRLGHIVTLQPGEVPA

SEQ ID NO: 274657 - protein, 355 aa, unidentified
MSQEKYIGMDVHQATISVAVMDGQGKLLMECLLETKAATILEFIQGLRGTLSLTFEEGTSAAWLHDLLKPHVSRLVVCDPRKAALLNDGNKSDRIDARKLAESLRTNQLKPVYHGEHGMRTMKELGRSYLTVTKDVTRVLNRIKALYRSWAIPCTGTTVYAPRHRAEWLTKIVEPGVRVRAEHLDQQLDSLQPIRLAARRELLQESQKHAAVKRLRQIPSIGPIRAALLVALLQTPHRFRTKRQLWAYSGFAVETHDSGEYRWVRGKLQRNRERITVRGLNDNHNKDLKNLFKSAAIAASTNPGPLHDFYVARVAKGMRPTMARLTLARKMAAITLTLWKKGVNFDPKQLHRQAA

SEQ ID NO: 274658 - protein, 386 aa, unidentified
MQKLNDLSRSLTPLEPDGTLIAVIEMSQSSWLVAGIVPGVERQPLKKLAVDESALLKLLHRWREEAEKAGRRIERIAVAFEAGRDGFWLARWLRARSIEAYVIHASSVAVSREHRRAKTDRLDTELLKRAFLGWLRGERDHCKMVAIPTTKDEDAKRPNRERESLVGEQTRIVNRMKAALIRLGIRGFNPKLKKAAGRLEDLRTPEDEPIPPNTLAELRRDMERRRLVSDQIRQIEEARLDRLKQAPGDGPHAMVRLLARVIGVGIETADMLVQEVLSRNMRDRRAIARYAGLTGSPDESGTKRREKGLARSGNARVRRGMIQLAWRFLMFQKNSALAQWFRARTENARGTRKLMIVALARKLLIALWRLVREGVVPDGVVLRPAQ

SEQ ID NO: 274659 - protein, 342 aa, unidentified
MEITTVGIDLAKSIFQVHAVDAAGQVVVRKALRRAQVVPFFAKLLPCLVGMEACGTSHHWARELMRLGHDVRLMPPAYVKPYVKRGKTDANDAAAICEAVTRPSMRFVPVKSTEQQAALGLHRTRDLLVKQRTQLVNMIRGLLAEFGIEMARGLRHALELAARLSAGDAAEVPPLAQRVVIGLANQIGAVQSQLTRLEKELLAWHRDSDLSQRLATIPGVGIVSATALAASVSEPERFRNGRQFAASLGLTPLQNCSGGKERLGRISRMGDRYLRRLLVVGMTSLVRRAKATPTSVDPRLPALLQRKPVRVVTVAAANRTARVAWAIMTRGGTYRAPAATAA

SEQ ID NO: 274660 - protein, 401 aa, unidentified
MALKIVYPICCGIDVHKTFIVACVASTQKGVTTYKRRRFSTYTKGLKQLLQWLCENNCKDVCMESTGKYWIPVFNVLEDSCNITLAHPKYVKAIRGKKTDKKDAKWIADLFKHDLVAGSFMPPLAIRQLRDLMRYRFKLTNFMSSEKNRLQNCLTVSNIQLANVVSDTFGKSSMSIIEKLLENPLDTSFDLEHLIHGSMKKKLPEQAAKLKVIKQHYEDLQSRKADLEKIILSLSEPYAQEINLILTVPSFKNIFSAIAVVSEIGVNMDVFPTAKHLCSWAGLTPTNNESAGKRKSVRISRAGCYIKPLLVQCATAVVKSEKHPEIRNRYLRIKKRRGHKRAIIAIARMLLTAIYHILKKKEPYNADLYRKSDVLPVNREITVEQAIFLAKSQGFRIMVPV

SEQ ID NO: 274661 - protein, 375 aa, unidentified
MREKLRFLGMDVHAETIAAAIAEPDGEVRSLGTIPNRMESVRKLIKKLGPVEKLRVCYEAGPTGYVLYWQLAELGVQCEVIAPSLVPMKAGDRVKTDRRDAERLARSYRSGDLTAVWVPDEGSEALRDLVRAREAAKQDELRARHRLGKFLLRSGQRPPTGVRSWTHLHLIWVSQIRFAQMAQEATRLDYLHEVEHMRERVLRLEQAIAEAVKLASPALQEVITDLQALRGIAHISAVTIAAELGQVSRFAGARELMGYCGVVPSENSSGERTRRGSITKTGNAHLRRIVVEAAWSYHRPPAIWAGLRKRQQSASEEAKEIAWKAQHRLHKRYARLAAAGKDKRKIVTAVGRELLGFIWAIGTKAEATVSQRIAA

SEQ ID NO: 274662 - protein, 324 aa, unidentified
MSDGMLGIDVSKNTLDVSLSSCNKVRARSFPNSSDGWRHLLDWLINQKVRRVHACLESTGRYSLGVACVLYEIGHVVSIVNPAQIRDFARTKLGRNKTDGVDASHIREYCELFKPQPWAPPSEAHRRLGELQTIRAGVVAGLTEWNNRKNSGMVDAAALSLADATISHFTSQLGAVDEAIAKTIDNDSELRCKRDLLLSISGVGETLAGVVLTELPGPDVLRSSAEVVAYAGLNPRRHQSGTSIDRVTRISKIGNAVLRAALYMPAMSAMRYNPAIVALVTRLKSRGRLKPMQIVVAAMRKLLVLCFGVLKTGKRFDPALAMGC

SEQ ID NO: 274663 - protein, 410 aa, unidentified
MDLTPMHKRVLALDVHQAKITACAVVEHDDGRVQVTKRDFGAFKRDRRALAQWALQIAPEVVVMESTGVYWKSPFAALEAVGIIAWVVNARHVKAVPGRKTDMADAQWLATLARAGLLRASFIPPQLMRQLRLVARQRQKLVGMCSAEKNRLHKVLVDAGIRLNVLVSDIHGSSARAMIKALIVGQPMHEVLDHKGRLRASRDELFEALCTEQFSAAHRFVADEIMQHIESLERRIAGFDRYLLEGLRPWRAQLTLLQTIPGIDEQGAAMLLVEIGADMSVFGSAERLASWVGICPGNNESAGKRKCGRIRKGNAWVRRLLCEFSQAAARTRCALKAKFDALTIRKGRKKSIIALAHKMLRTIYAMLTHGTHYRDKEVDYEALNVERNAPRWMKMLLKHGFITNPAAAAA

SEQ ID NO: 274664 - protein, 364 aa, unidentified
MDPALGLGWDVEVSTTEQETSMNIVRIGLDLAKYVFHLHGVDERGKVVLRKTLRRPGVAPFFANLPRCVVGMEASNGAHYWAKTLSEFGHDVRLISPQFVTPYVKSSKNDRNDAEAICEAVGRPNMRFVSVKSAEQLAIQAVHRIRIRLVASRVRLVNQIRGLLGEHGVVVAQTIGNLRRALPRIIDDEANGLNSIVRALIGELREELSNLDGRITIYDRKIINLYRMSEACQRLGEVEGIGPITATALVAAAGDGKCFKNGRQFAAWIGLVPKQRSSGGRSRLLGISKRGDRYLRTLLIHGARAALGRTRGKQDPRSLWLLKMRERRHANVVAVALANKNARIAWGLLASGMNYDQHLTVSSA

SEQ ID NO: 274665 - protein, 388 aa, unidentified
MYYAGIDISKYKHDCFIQTEFGDVVNTGFSFANNAEGFGLLQSELEQYGRGNIRIGFESTGNYGINLKLFLERIGFDFMEVNPLLIKEYIKSNTLRKTKTDKSDARAIANYVISKAYRPHQTAFYPKFALKQLTRLRSSLVTVRSRYLIQLTNVLDCIFPEFKPLFGNKFSVTALFILANYPSPEAIANMNSRSYDILRRKSRGRFSLDKFIRLKALAKNTIGVFNECYRIELEALLDLYNQVDAKIETLEIEISNIIIELNPPTLSIKGIGAISAAVIVSEYGDFNRFANPNKMLSFAGLEPGYFQSGTSEYNGRMVKRGSAHLRSVLMNCSRAIPLHNETFATYYRKKLNEGKPHNVAINHVAKKLIRLIFTLETKCILFDPNILS

SEQ ID NO: 274666 - protein, 322 aa, unidentified
MNVGADKPLTAIRTDLGAIFVSLELSRSSWLITSLSPGGGEKMSKHSVHGGDFAGLMERLAQLQEKARLRTGQSFRIIVVQEAGLDGFWIHRALQNEGIESHVVDAASIATSRRRRRAKTDKIDGETLVRALLAYKRGEPRVCAMVKAPTPGEEDRRHLCRERKALTAERVRHVNRIKGLLFSQGISGYQPLRRDRRQRLEELQTGDGRAFPQHLKALVNRELDRLELLLRQIKTVEAARDALLAVGQTAKPAPAAMLLDIRGIGPEFAAVLWSEGLFRHFENRRQIAAYAGLAPTPWQSGSPGYGCAISRAQLSASGFTNG

SEQ ID NO: 274667 - protein, 326 aa, unidentified
MKEKQAIGIDVSSQKLNLHFLKTGADFEIANSEKEISAFLKQEKLNVKNCLFGAESTGRYHLTCQNVLVKKDFEFRLINPILTGKKISSSIRKKKTDKNDAKIIARLVNQGEGRIVTARQLNVSKRTLLRTRTSVVNQRTGIKIILKELGMVGKNDRKIVEAMKSLEKLIANMDKCVENIEELALDKNNITNEEKLIQSLPGFATRLSAIVSVETGDFSRFPTATRFKAYVGIDPGVIQSGKSLKTGRITKRSNAHLRTAFYLAAQVARCHDPELKAFYQKKKSEGKPTRVAIIAVARKLCERVFAVVKRGKPYEIRQIQSQVALA

SEQ ID NO: 274668 - protein, 344 aa, unidentified
MEHFAGLDVSVKDTSVCIVDDTGKIIREVKVASEPEALSAVLKSPAYHFKRIGLEAGPLSQWLLSALAEAGLPAICVETRHMQAVLKAQINKTDRNDARGIAQMMRAGLYRPVHVKTLRSQKLRMLLTHRQLLQSKAIAVENDLRGTLRNFGLKVGMVGKVKFEARIRELVENQPDLAVLVEPMLIVRRVLREQIVILHRRLLAIVRDDEVCRRLMTTPGVGPVVSLTYRATVDVPARFHKSKSVGAVFGLTCSKYQSGEIDRSGRISRCGDEMMRVMLYEAAQSMLRSKKWSWLKAWAMQIARRRGMKKAIVALARRLAVIMHRIWVDGTEFRWTREQATAAA

SEQ ID NO: 274669 - protein, 351 aa, unidentified
MKEYIAFDSHKHYTLMEREDRQTARTVQLRVAHQPGAIRSCLRNCESGTDVAVEATGNWYWIVSEIEQAGLKPQLVHPRKAKLMMGLINKTDKLDVHGLNRLQRNGTLPTVWIPPAELRDQRELTRTRLVLVAQRTRLKNRLQSTLAKYGLAVRDCSDAFGTAARSQWPELLAKLPEQTQWVSQQLLKQLDLLEEQIGQCEKRLNPLLKITPQIERLKSLPGVGLILGASIALEIGGVSRFASAEHLASYAGTTPRVHSSGDKLRFGRLRPDINRYLRWAFVEAANVVALHHQQRPERHVSHLYWRLKQRKGHAKAIGAVARHLAEATFHILSRQEDYADPALRKGRSKPV

SEQ ID NO: 274670 - protein, 349 aa, unidentified
MSQYIGIDLHKATSFVTRLDRRGRVLEQVELPHATGALQQYLACVPPDTRIAVEATGNWMWLYELIEERHPDLVLAHPLKTKAIASARIKTDKIDATTLAHLLRADLVPAAYIPPRAIRDTRELLRYRASLVRVRTQVKNKMAAIIGKTGVQPPTKTACGVKAQRFLATVSVRPCYRLALDGYLRSLEHLTTEIRQVSTTIEQQAGADPQAQLLQTMPGIGAYSALLILSEIGDITRFPDSRHLCSYAGLVPSVHASGGKTRLGRLTKQGSSWLRWILVELSVHAINGAPQFRSLYYRVAKKHGRNTGRVAVARAMLKTIYAMLKKQEAFRPIARKAGITGQRPGVMAG

SEQ ID NO: 274671 - protein, 351 aa, unidentified
MNTQITASPKLFIGIDIHKRSWKVHCATDLSSGKTFSMPPDAELLYEYVAKHYTGYEVSTAYEAGCCGYRAHRCFVGYGWRSLVVNPADIFRRGKERHTKTDRIDAQLIARELKDGRLSGICVPDKCREQLRSLFRRRNDLVKDMRQIKSYIKMQLLYYGIRIPQEFDNDHWSHKFRDWLDELDFGYDTGNEALRSRMRSFRFIDREFREVSTLLRRYTKKHFKKDYMLLRSIPGIGPIVASGILSELGDLRRFGNIKHLAGYVGLAPGIYQSGDTIRHTGVSMRAHRLIRSYFIEASWQAIRTDPVMQGYYRKHHGKNVKSVIVKVARKLLSRTLAVIKTETPYEIGVLE

SEQ ID NO: 274672 - protein, 353 aa, unidentified
MVYTPIEYDIFIGIDVDQKSFSFTVKNHDTMSNSYKIPASPENLYQHIRNRYNTKRVICAYEVGVTGYYLHDYLTSKNIRCLMVPPPSVPKASNDRTKNNRLDSERISQHLKNGDMMPIRVPDYDCRELRQLLRSREEYVDMRKVAKQRIKSLLLFSSLHTLLKDTTQYWSYLHIKRLKELPCSPATRQRLDLLLKDLEYSRAQTVLILKELKKASEQNEKLNRNIHYLRSIPGIGFITAITILASIGDIEQLRNPRELSAFAGLVPSEYSTGERISRGHITRLGSSVLRSLLVEAAWANIAKDARLRQFYDRIRAKHHPQIGSRKAIVAVARKLTLIIYRVLKEQREYIANI

SEQ ID NO: 274673 - protein, 392 aa, unidentified
MCVMVADGRVRAKGRVSNDLAGIAKIHDLIAGVMADEDDESQVTIGIETDRGLLVRALVAAGYQVLAVNPLAVDRYRDRHRVSGAKSDPGDARVLADMVRTDAHQHRRVAADSDLAEAIKLVARSHQSAIWSRRRLANQVRSALREYYPAALAAFDDFTSGDAVEVLAIAATPELGRSLSRSKIASALRRGGRQLNIDTRAAKIQTALRTDQLAQPDIVAGAYAAVVASLTQVIAAHNRQIAELETVLAEHFGQHPDAAILRSQPGLGVVTGARVLGEFGDDPDRYIDAKARRNYAGTSPLTVASGTRKIVRARHIRNRRLADALHWWAFNAITRSPGARALYDRRRAAGDTHSGALRVVANHLVAILHGCLRTRTLYNETTAWAHRHDLAA

SEQ ID NO: 274674 - protein, 420 aa, unidentified
MRSGDKEKERIHIYNKRNICFVGVDMHKEKHCAVVIDCWMEKIGEVNFENRPSKFPAFVEDIRKICGTKDFVFGLEDTRGFGRNLASYLTGRKFEVKHVNPVYTSAVRLSNPIVYKDDSYDAYCVARVLRDMLDTLQDAKHEDIYWAIRQLVKRRDMIVKNNVMNKNQLHSQLSYSYPSYKKFFALVDGKSALCFWENYPSPEHIWSTTPEKIYETIKPVHQALKIERIHAIIAMIKKDGNTHKGYQEERDSIVRNIVKDIKNNQELLKDIEEQLRKLLPQTGYKLQTMPGIDIITEAKLISEIGDINRFPDSNKLARFMGLAPVHFSSAGKGRDERCRNGNRELNAIFHFMAIQMVVISPSGKARHPVFREYFEQKVKEGKNKPQALICIARRLVRIIYGMMKTKTEYRPYEKQEEKRQ

SEQ ID NO: 274675 - protein, 354 aa, unidentified
MSQTLNSAISVVGIDIGKNSFHIVGHDERGAIVLRQKWSRGQVEARFANMPPCLIGMEACVGAHHLSCKLKKHGHDARLMPAKYVRPYSKGQKNDFRDAEAIAEAVQRPTMKFVATKTADQLDLQALHRVRERLVSQRTGIINQIRAFLLERGIAVRQGQRFLRAELPRILATPPDVLSPRMVRIIEDLADDWRRLDERVEGLSSEIDAIARQDSGCERLMSVPGIGPIISSAMVAAIGAGDAFSKGRDFAAWLGLVPRQMSTGDRTILGKISKRGNRYLRVLFVQAAWVVLIKPKIWERHGLKPWIEAAKKRLHHNVLAIALANKLARIAWSVLARGRAFEARTITNVTAQTA

SEQ ID NO: 274676 - protein, 433 aa, unidentified
MKVMYERVAGIDVHKDMIKVAIRSPGEKPWTRKTEILEFRTFYGVLQEMARELRRRGVTHVVMEASGVYTEPVYYALCEQDFTEVAVINPVHAKALKGHKTDAKDCARLAELFECGLLRGSYIPSAEQKQVRDLTRYRIKTVQARTSEIQRLGKALESAGIKLGSVASEITGTASTAMIEALIDGERRGGVLADLAIGRMRSAGKLADLSMALTGRFTGHHATLCRLHLDRIKVFDDAVDGLEDRIAAGAARWQREAGLLKSVPGFGDVVSCAWLAEIGPAPHKWFSRHEKLASWVSLCPGNNISARKRKHGRTGDAGTYIKPMLIQAAWSAIRVRGRLQARYNRLVRRFGGPKNPAAKKKAITAIAHTLLKIAYQVLKSGTPYQDLGADFYTRRNSPEEQHKYLERQLQRLHPGCTITITISPPEAALPPGE

SEQ ID NO: 274677 - protein, 408 aa, unidentified
MRVVGLDLHRVFAEAVMLEDGVVRRLGRIGMTRDHLAAFARTLTRDDHVVVEATGNASAVAELIRPHVGRVVIANPRQVRLIAEARVKTDVVDATVLARLYASGFLPEVWIPDEATLGLRRQVTRRTQIVRQRARLKTIVQSILHAHLVPPCPHADLFGPRGRAWLSGQPLPSDEGDAVARHLREYDRLTEDLKVVERELAREARADPNVTRLMTIPGIDMVVAVGLIAAIGPVARFDGPDRLVAYLGLNPSVHQSGEGRPRHGRITQQGRTHARTMLVEAAWQAVRGPGPLRAFFQRVSGRRGPHVAAVAVARKLAVIIWHLLTRGEDYAWVRPALHAKKLRDLELRSGEPARRGQRGAAYAYNLTRTRQEERRRVEQAEVAYRRMTEGWSRRGRRAPTGAAKEERL

SEQ ID NO: 274678 - protein, 387 aa, unidentified
MTVPDQVFKIVPRHYDIFGGLDVAKKSMAVTFTDHEALMRSLRLPYSSAHLLHYVRKHFPDQRVAFVYEAGPTGFGLHDELITAGYRCLVVAPSMVPTAPGDKVKTNRLDSRKLSVQLRGGQLRSIHVPGPRYRELRHLVQLRDTQVGQLTATKCRIKSLLLCEGLAFPAAPESSQWSARVLSELCELPCSPAVRFKLDQLIGTLHFHFNSAAAAQKQIRYFCQNDPELRQSIRWLASLPGIGVIVATHLVARLGDWREISNVRQIAAFLGIVSSEHSTGEKENRGRITRAGDSRLRNKLIQSAWTAIRKDAELRAFYLRIYHRHPKKIAARKAIVAVARKLTTRIYAVLKEQRPYVLRPENLPTPLTAEETVGPRGRLDGPQNEQP

SEQ ID NO: 274679 - protein, 273 aa, unidentified
MSIKVVGIDIAKNLFQVCVLSADGQILSNRKVKRDKLLDTVRQFPEQTAIAMESCATSHHWGRIFQELGNRVALIPAQHVKPFVGRQKNDANDARAICEAFSRPDIHFVPVKSVEQQDLKAIRSVRKRLVENRTALANQIRGLAAEYGVVFPLSIKSLRSHLPLAIEDAENQLSHVMRSLLQTLYCKFINISDEIDKVTQSITRLSQQHPRYEAVKNISGFGPILTAAIISEVGSGKQFQNGRQFSAWCGLVPKQNSSGGKSSLGKVRISPAI

SEQ ID NO: 274680 - protein, 338 aa, unidentified
MKTYFGVDYHKKYSHGTIMNEKGKILKQGRFSNHRESADQFLNGYGGDNCFSVLEATRNWTVMYDILEELTSDVTLAHPLKVKAIAEAKIKTDKIDSRTLAHLLRCDLVPSAYVCSPQARIIKNLLRHRMFLVRVQTMVKNRIHVLLDRNPDVHSQRSASGLFTQIGIAELKGVMLPEYERYILNSELSLLEHLQAQIKQADKMLAGVGSKDKRVKHLMSIPGIGKSFALLIISEIDDVKRFRTNKKLHAYAGLVPSTYSSGGRTFHGRIIKAANKYLRWSMVEAVWPAIRKDAGLNQYYKRIASRKGANPAKIATARRLLTIVYRILKENREYRDAA

SEQ ID NO: 274681 - protein, 466 aa, unidentified
MERKGGEGALAEAAGRRQRKGRGKRARKAGFELAHPDCAGIDVGSGSHFVAVPADRENPSVREFGSFSDDLHRLADWLSACGVRTVVMESTGVYWIALYELLEGRGFAVYLVNARHVKNVSGRKSDVLDCQWIRDLMSFGLLRGAFRPSQEVCALRAVMRQRDMLLAGQARHVQHMQKALAQMNIQLANVISDVVGETGQRIVRAIVAGERDRSRLAALRGPRIHASQEEVGRALEGTWRAEHLFALKQALALFDTYAQMLMECDGELERMLERLARYDGDPGKPKRRGRQKNAPRFDVRVHLFRACGVDLTRIDGIDTTTALKVLSETGPDLSRFPTPKHFTSWLNLCPNTRITGGKRLKGRERNRCNRAGQALRQAAVGLSTSKSALGAYFRRMAGRLSKAVAVKAVAHKLARLVYAALTKGMVYVDRGMATEEERYRVRAFKHLAKRAAALGYSLSPTLQGAK

SEQ ID NO: 274682 - protein, 351 aa, unidentified
MSRTTSAVAVSTIGIDTGKNTLHLIGLDERGTIVLREKLPRGRIGGRLANVPPCLIGIEAGMGTHYVARELMSLGHDVRQVPPAYAKPFRQTHKNDFRDAYAIAEAVRRPSTRCVPVKTDDQLDLQALHRVRSRLVGQRTAVINQIRGFLLERGIAVRQGLRFLRQQLPEILAKRIDVLSPRMIRMVEDLSGDWRHLDERIEQVTDEIEVLARESESCRQLMTVPGIGPLIASAMVAAIANGAAFTKGRDFAAWLGLVPRQMSTGDRTILGRISKRGNRYLRTLFMQGARVILLRPANWTKHSFGPWLTTAATRLHHNVLATALANKLARIAWTVLAQRRNYETRVIAEAA

SEQ ID NO: 274683 - protein, 345 aa, unidentified
MNKLSRVGIDLAKNVYQLHGVDRNEQTVWRRRLTRRSWLKVLLEKVEPGCEVGMEACAGVHHWARQLQAKGFTVKLIAPQFVKPYVKSNKNDANDAEAICEAMSRPHMRFVAVKSIEQQDIQAVHRIRSGLLSHRTAKANQIRGLVAEYGLVVPLQLASLHTATADWLEDAENGLSARFRRLLNDFWGDLKHLDQRITALDQEITTLARQDPVVQRLQQLRGVGPLIATALVAAVGNAEQFRNGRQMAASLGLTPGQHSSGGKERLLGITKRGDAYLRTLLIHGARSVIYASRNKDDRLSQWVTDLATRRHPNVAATALANKTARIAWAMLRRGTDYQPDMMMPV

SEQ ID NO: 274684 - protein, 410 aa, unidentified
MEVVHEHCVGLDVHKETVVACVRHMSGGKIATEVKTFKTTTRELIALSDWLSAEGVTDIAMEATGVYWKPVWHILSDGEFKLMLANAAAVKGLPGRKTDVNDATWLADLMAHGLIKASFVPSAPTQEMRDLLRTRKQFVRQRSAQMQRIQKTLEDANIKLDSVISDIVGLSGRRMIEAMISGETDPESLAALAHVRIRASKAELEAALRGRITTHHRFMLQLHLNHLDAVEVTIARIDQEVEGNVEPFRVAIEMLSTIPGVSRLAAEVIVSEIGIDMSRFETAGHLISWAGLCPKNDESAGKRRSTRMRKGAPWLKTTLIQCAWAASRTKESYPKAQFLRIRSRRGPKKAVGAVAASILTAAYHMLKDGTLYQDLGANHFENRAKGKHVLTLVNRLKNLGFDVQITPLAA

SEQ ID NO: 274685 - protein, 368 aa, unidentified
MPRIAEQVLPVTGGVDTHADVHVAAVVDQVGRVLGTQAFPATAAGYRAALAWMRAHGELAKVGVEGTGSYGAGLARYLAACGIEVAEVMRPNRQARRQRGKSDAADAVAAALAALSGEASGVPKSRDGLVESIRALRVARAGAVKARTQAGNQLRDLILTAPEQVRRQLAGLPCQRQVDLAARFRLRDLAGPAEGAKAAMASLARRHQQLAAEIARLDAAPEELLTRAAPPELLAKQGVATVVAATLLTTAGDNPGRVRTEASFAALCGASPVDASSGKQLRHRLNRGGDRQANSALWTIAMTRLAHDPRTKAYAARRTTEGKTTKEIIRCLKRYIAREIYKTLCQPKPPATTSAPQAKQDLSAPVLT

SEQ ID NO: 274686 - protein, 428 aa, unidentified
MKYNTQNAKIKSITEKTLIVGIDVGSETHFARAFDWRNYEYSKKPLEFSNTEAGFMTLKAWMADFAEKYGKNVVIPGMEPTGHYWFNLGAYLQDNGMKPVHVNPHHVKKSKELDDNNPNKNDRKDPKTIAALVNEGRFSYPYIPTGIYAEIRSLSNLRLQTQEEITRIKNRIARWFSIYFPEIKDVYRNPDSVSGLMILKEAPLPQDIVKLGVDGINKIWRDAKLRAAGLKRAKTLVTAAEHSIGSQEAPDSARIELKNLLNDYEIYKNREEDLMSLTEEKLSEIPHIDKLLEIKGVGLKTVSGFVAEVGDITRFDNPKQLQKLAGYAIVECSSGKHKGESHISYRGRKRLRYVLYEAAISLISRNEEFKEVHRYYRTRKENPLKKMQSVIAVACKVLRIFYTILTKGVTYDGAKMMQDIKRPQLKVA

SEQ ID NO: 274687 - protein, 342 aa, unidentified
MKQYVGLDVSQKETSVCVVNEVGQVLFEGKARSDPGALAALLRKRAPRAERIGFETGAMASWLWHELRRVDLPVVCIDARHAHAALSVRMNKSDQNDARGLAELVRVGWYREVKVKSEESQKIRAILVARSRLVAIRRDIENQVRSLIKEYGLLFPRAIGKQFRNQVSELLGEDHQLLGVIAPLLSIHEHICEQQSKFDDEVRRLAKSDETTRRLMTVPGVGVVTALTFRHTIDDPSRFRSASTVGAYLGLTPRRNQSGETDTSGKISRWGDRLLRSYLFEAATVLLYRTKKWSSLKAWGMKLTKRIGVKKAKVAIARKIAVILHCIWVDGTSFDWGQAKPA

SEQ ID NO: 274688 - protein, 345 aa, unidentified
MLAELTDYVIGVDTHRDRHSAAILASNGSLVDETTASADRGGYATLLVWAQRYAGGGRVWAIEGTGSYGAGLTAFLGEHGERVVEIGRRVRRSGPTRAKSDPLDAMEAAREALSQPRLAAPRAAGEREALRVLINTREGAVLARTAAINQLRALIVAAPEPLRASLRNLSFSELVARCARLRPGARGATTRASALALRSTARRIQALSTEARQLTREITRLVDSTAPALLDEPGVGPISAARIVIAWSHRGRFHSEASFAIFAGASPIPASSGQTVRHRLNRGGDRQLNRALHTIALSRRATHRPTRDYIDRRTRDGKTAREINRCLKRYLARRLYRLLERSAIT

SEQ ID NO: 274689 - protein, 316 aa, unidentified
MAKRVREIIVGLDVGKDWLEVYRSDGGSSRAVENTSTAIEAWLAEVGAPIAIAVEATSHYHECVVALALAGGHTVFLVDGYRLSRYREAVGERAKTDRNDARLLARYLASERQHLQPVVAQGAEEKRLWRLLKRRTKVVELRKQLRMSSKDIAGIEASIERAVAGLSALIVALERQITATARALGWGSDLARLRSIPGIGLLSALGLRALYGRGQFSRADQFIAFLGLDVRVRESGRYRGRRKLSKKGDPEIRRLLFNAARSAAYRNDRFNRLEAGYRARGLSSTATSVILARKLARIGYALLRDQGTYHEPSMAA

SEQ ID NO: 274690 - protein, 364 aa, unidentified
MSVVMIGVDPHKASHTAVALDDRESALGRVRVRASGMQTEQLLSWAAQWPKRAWAIEGAWGLGYLLAQQLAGAGERVVDVQPKLAARVRLLNTSSVNKNDPNDARSVATVALRSHDLPQVSVEDHAAVLKVWVRRRRDLAQARNRIVNQLHAVLCELVAGGFAGEISAPQAEALLAMIAPTSAAGLARKALGDELVDDLRRLDRQSREVHKRLAGLVAASRTTTTEIFGVGPVVAATVVGNTGDVTRFATADRFAAYTGTAPIEVSSGPQKTFRLSRRGNRQLNHAIHIAAVTQIRNRHTSGRAFYDRKIAEGKSPKMALRALKRRISDTLYNAMIADARRAAREEPGRATGNDSDSSAAGSHP

SEQ ID NO: 274691 - protein, 416 aa, unidentified
MNAAGIDVSSRKSTVSVLRPFGEVVRLPFDIVHSAEGFASLIRQLKSIEGETRIVMEHIGRYYEPVAQILHEAGFYVSTVNPLLIREYGGNSLRRVKTDKADAMKIARYALDNWSELRDYTPMDTIRYDLKTLNRQFQLASKQKTAASNNLIALLEQSFPGVRKCFDSPVRKDGTQKWVDFVYTFWHADCVRKNSLNAFTERYRKWCKRHGYFFKQSNAAEVYELARSVITLVPKGPVAKVLVQQAASQLTSISRSVETYRAEMNRLASMLPEYPVVMGLYGVGESFGPQLMAEIGDVRRFDRKQALVAFAGIDPMPNQSGEKNVRSNKSSKRGSPYLRKTLFSIMMCLLQSAPADEPVFQFLDRKRSEGKPYYVYMTAGANKFLRRYYAKVRDYLATLDNFPPVDMDSTGLNHLN

SEQ ID NO: 274692 - protein, 343 aa, unidentified
MQTVTTIGLDIAKSVFQVHGVDAEGHVIIRRQLKRRYVLAFFQHLPPCLVGIEACASSHHWSRQLQALGHTVRLMPPAYVKPYVKRHKNDATDAEAICEAVARANMRFVPTKTPEQQSGLVLHRTRHLFIRQQTAVINAIRAHLAEFGIVAPVGRHGVEELLHVVADPNDKRVPEIARACLSALGAQLRRIKEQILEFDRMIRAWHRSSETSRRLDDCPGVGPALATALVASVADPKAFRSGRNFSAWIGLVPKQHSSGGKDRLGSISKQGDRYLRGLFVAGALAVIRYAKIHGTKHRPWLTALLARRPTKVAAIALANKIARMAWAMMAKGERYKEPVALAA

SEQ ID NO: 274693 - protein, 502 aa, unidentified
MKSKPQDKTNKTTNHPTQRHWHEMNRKQRREMTRQIQSEDLSLEVVHPDAAGIDIGNESHYVAVPPSRDSQPVQRLGCTTAELKVMAAWLRQCRIRTVAMQSTGVYWIAVFDILEEAGLEVYLVNARDTKNLPGRKSDVQESQWLMKLHTYGLLRNSFRPSQEIRTMRTYWRQRNDLVQSAGRHIQRMQKALTQMNIQLANVLSDISGVTGQAIIKAILAGERNPHKLAEFRDPRVKASEEQIAQSLEGNWQQDLLFVLKQEQDGYEFCQKQMAECDRQLNQYLEHGEDRSHGASLPEEKRKGRLKKKKGNAPQFNLREGLFRMTGTDLTLIDSIDVMTATTVISETGYDMSKWETENHFVSWLRLCPDNRISGEKIIGKGRLPTNNRATIALKMAASNLTTERYLSRSAVSSIPNQARCPLRDQGHGRQAGPLGLPHAALRDEIRGPRSSLLRASTPRDTDQAPQGQSRKARIPSHPNTGGGLTVSGEECRFESYRADQRK

SEQ ID NO: 274694 - protein, 366 aa, unidentified
MPNGMALDAPAARAACVVSGSAGAIGGGAIVMGLDQHRAQITAEWLDTATGEVGRARVAPGDRAGVRRFLARFGGRQLEVALEATTGWRFVVEELAAVGAVAHLAEPAQTSALRGNKKRAKTDRADARHLRELLMAGRLPESWIPPSHLLDLRAQVRLRHTLVNQRGEWQQRIQAVLYHHGLPQRSGLLSGENRAWVEQVPLGAAARGQVTIALALADALDVQIAPIDKQLGAYARRQPGTRALMAHYGIGPLTSVTILAELGDTRRFSSSREAVRYAGLDITVHQSDKRRAPGHLSRQGPPALRWALFEAAQCARRPGSPDRAYYTQAAERLGGNRACLAVARKLLKRSYHTLRELGDEGLAPAA

SEQ ID NO: 274695 - protein, 343 aa, unidentified
MQTITTIGLDIAKSVFQVHGVDAGGQVIIRRQLMRRQVVAFFQKLLPCLIGIEACASSHHWSRELQALGHTVRLMPPAYVKPYVKRQKNDMADAEAICEAVTRANMRFVPTKTPEQQSGLMLHRTRHMFIRQQTAVINSIRAHLAEFGIVAPVGRKGVTELLRIVADPNDKRMPEVARACLAAQGTQLLALKEQILEFDRMILAWHRSNQTSKRLHYIPGVGPMLATALVASVADPRTFRSGRNFSAWIGLVPKQHSSGGKERLGGISKQGDRYLRSLFVAGALAVIRYAKIHGTGHRPWLTALLGRRPTKVAAIALANKIARMAWAVMAKGERYKQPAALAR

SEQ ID NO: 274696 - protein, 326 aa, unidentified
MYVIGCDVAKKKLDSALLVSVEPVKLRAKVVANDQSGCEMLVQWACKQANCIPAELHVVMEATGAYHEVAAYAFTQLGVKVSVVNPAQVRDFAKGMAVRTKTDASDRAVLARYGATNKPAAWQPPSPEVVELKGLLSRLQALETDCRREANRLEKAQVSLTPKLVLDSLHKSLSFLEEQKAALQKRIDDHIEGHPQLKQDRKLLETIPAVGRKTACRMLCLLHSRPFAKASSAAAYLGLVPLHHQSGTSVYKPPRLSKAGDGAMRAALYMVAVTATRYNPDIRAHYKRLVGQGKSKMSALGAAMRKIVHICFGVLKNQQPYQQRVA

SEQ ID NO: 274697 - protein, 411 aa, unidentified
MEAAYNIAGIDVHKKMLAVVVANARDLELQFECRGFGTTRSELYALSAWLKEHAVQEVAMESTAQYWRPVWLALEGQCCLHLAQARSNRGARGRKGDFRDAKRIVSRLLSGDLILSYVPEAEQRCWRMLTRTKYQLTRDRVRLQSQLEGLLEECQIKLSSVVSDLLGASGRRILNAIAEGESDPVRLAELGDQRLRASKAELIDALSGQIQALQRQVLALYLTRLDLIESQMATLEKLIAEAMRAHQEAITRLAELPGLGVDSAQQIIAEIGPQAAAFPSAGQLASWVGVCPGRQESAGESSNNRSAKGNRFMRRLLDQLANAAVRKQGSHLQIVFRHLLPRLGYNKAVWAIAHRLCRLIWKVLHEGVHYVEYGAAATPITLKRRRQRLVTQLRRLGYEVKLTPLVANAEA

SEQ ID NO: 274698 - protein, 313 aa, unidentified
MMPQDRIVVGIDVDSRELEVRELGASKGCRMPNRPSGWARLARRWVGRGVVVGVEPSGGYEQGLVRTLTEAGVEVRWADPSRVRALATALGAPAKTDAIDAAMIARYVAETGGRAVEHDPERQALRELLAARQAAMETAERLTCQAQMLAPGAGRAALEELVALARAAEKALTRQVLETLRSSHRLSAAWLLLQTAPGVGKLVAAELLAAMPELGRVNGKAIAKLAGLAPFIRQSGLWRGKATCSGGRPRPRRALYLAAMASLRAHNGLRPVYERLVASGKPRMVALVACMRRLLVALNAMMAEQTPWRGPTA

SEQ ID NO: 274699 - protein, 438 aa, unidentified
MKITEKTLEVNANHILNIGVDVSSRKLDVHFECPLQLNKREVYREQILNRSVEIEKALKNYLSLAQSKGFLNLRIVCEPTGPYSLNLLSMATHLNCLTAYVSGEAVKNSKIIEFNGTNKNDLVDAELINSLAERNKVLIHRTYSANYTRLRMLNSHYEDVDKAYVSARNQVHNTLKQLWPDYSSKLSLLYASTGQALYRCYGFNPWKIVSYNYSYFERRMRTHCKGVWSSTLKQIYRDAEESVRNHCSDAASTLESILSDHYENCLRGLERKASLKTEMKTILSEIREQDDRIPQARVNFISEFHIARLLAETGPLSDFKNLKQLTKYLGLNLRERQSGEYQGRVRLSKRGRSLARKVLSLVVLPLTTQKALYGPDYHRIKTQKDKPGKLVMCIFMKRFLKSFFGIYRSHQSFDSRRLFIDRGSYEKLNSQEVLEAIS

SEQ ID NO: 274700 - protein, 351 aa, unidentified
MLYAGVDAHKKYSQVVLTNDHGTKLAQASLSNDLGCFQEFFKRATEPVKAVVEAGRTWGVIYDLLEDIGVEPILANPLKTRAIAEAKIKTDTIDAETLAALLRADLIPTVHVPSHEVRAQKNLLRQRFWLVELRTRVKNRTHHILDRNHIFLPSCSDLFGKAGRQLLDQIEIPAPDNLLLKAHLELLDYLEKQIDQAERWTKEALEKHSGVTILRTIPGIGKILAALVALEIDDISRFSVADKLCAYAGLVPTTYASGGKVRHGNLLPACNRWLRWAYVEAAWIAQRTSPYCHTYFERIKRRKGANCANTALARRLCEITWHCLMEKRSYEERSSARSGSIQPTAFASSWS

SEQ ID NO: 274701 - protein, 416 aa, unidentified
MIMTQALEIAAGLDLHKKFIIATILTLAGGKMQERFERTHEGLLKLKDWILNNKVQAVGCESTSDYAVNIYDLLNQFMPVIVGNARDIKAFTHKKTDKVDSEFIALLTLKGMIHPSRIMPMDLRNFRALTRLRHRLVDQRTTTKNHIHSILDSELFLLSNAFTDIFGKAGRIVLNGITNGFTVDEILQCIPKNVKGKKRQLREIMEHTLSADALDRMKVNMLILYCYDKQIEDITQKALDYAYSHYPREMKILKSVPGIGEIAAITILAEIGDIKDFPTPEQFASWLGIVPRVYQSADKLHTGSITKRGSVHARWILVQVAHAVGRSRNNSLKSFFQRKEPVIGKGKAIVALARKIVVVIWHLLTNDEVYDDGIYKKSPQPKHISVKIPTNVTMEEILKIIRDAAIIIKKPDPGVI

SEQ ID NO: 274702 - protein, 334 aa, unidentified
MKQDAQIGVDVDSEELVCVMQRAEERMPLATFANTAAGHKKFIRWATKGGRPARVCLEATGIYSLEFALALHHAKNVEVMVVNPRAIKDFGRACMQRAKTDAVDAGGILEYLQRMPFTTWQPPAPEILELQAINRRIVQLTTERTREKNRRHAAEFAGASGDAIAHDIEVNIHHLERRIERMHDSGLQLIRGVPALATKLAHLVSAKGIGEASAMRLLAELLVLPDDLAAPQWVAHAGLDPRPYESGTSVHRPRRITKVGNRHLRAALYMPALVAIQHEPNVKAFYNKLVGRGKKPMQAVVAVMRKLLHAIWGMLKHDQDFDGNKFFKLTENIA

SEQ ID NO: 274703 - protein, 412 aa, unidentified
MELLHRRCCGLDVHKETVVACLRLVSDGKVTTEVRTFQTTTADLLRLSEWLAANECTHVAMEATGVYWKPVWRILDDGEFALVLANAAHVKNVPGRKTDVNDAMWLAELLAHGLIRASFVPDAQTQEMRNLLRTRKQLVREQSSHVLRVQKTLEDANIKLDSVLTDLMGKSGRAIIEALIAGETNPVKLAGLADRRVKASFEEFREALRGRVTRHHRFLLRLHLNQIDALDAAMATLDAQVEANLGPFRTAVELIGSIPGIKNLGAHVIVSEIGIDMSRFPSAAHLISWACICPRNDESAGKRRSNRVRKGGTWLKTTLVQCAWAAVKKKDSYLQAQFYRIKARRGPKKAIMAVVASILTAIYHMLKDGTMYKDLGRNHFDRRSSDQQKNRLVKRLVDLGYVVEIKALAATA

SEQ ID NO: 274704 - protein, 407 aa, unidentified
MQTKNPRCAGVDVHKDSLVVAIRIDGKATVETFGATSSEIFRMAERLASQGVTIVAMESTGVYWRPVWNLLEGQFELILSNAQHVKHIPGCKTDARDCRWLAKLLEYGLAPRSLVPLQPQRDLRDLTRQRTQLNGDRGRVVNRVQKVLEGANIKLASVASDIMGKSGRAILDALVVGKLTPEEMAELVHPSMNVKKPRLREALKGRMTGHHRFMLKQLLDQIDHVDQQIASFDRRIDEVMSPLEHEIVKRLDAVPGLDARSAQVVIAEIGTDMSRYRTSRELASWAGLCPNTEQSAGRRRRGRIRHGNGWLKAALCQAGWAAGRTRRSYFGEQHRRLTTRRGLKRANIAVAHSLLVVCYHLIKEGTEYADLGVNYSKKPFDPERQAKLLVKRLEKLGFAVTVTRPAA

SEQ ID NO: 274705 - protein, 342 aa, unidentified
MEHIAIDLGGRESQICIRSADGQVVEERRYATGSLGRFLAKRPMSRVVLETCAESFAIADEALTLGHEVRIVPATLVRSLGVGSRQTKTDRRDAQILSEVSCRIDLPTVHVPSSIARQRKTLIGMREGLGAARTKLINSVRGYLRTIAKRLGTRGAATFPQRVRALFELNGGQLPACVDRQLIAIDALTEQIRAADKEISKAAREDPICWRLMTAPGVGPMTAVNYVATLDSIERFAGAHQVESYLGLVPGENSSSDRQSRTGLTKAGSPRMRWLMIQAAWACLRSRQQGPLQQWALEVKKRRGLKVAIAALARKLTGILYALWRDGTAFEPSRGAQEIVGQ

SEQ ID NO: 274706 - protein, 412 aa, unidentified
MKRIRERVAGLDVHRDTVVACCQVKQPDRSIEVTKQSFATTVKGLGEMAAWLSDAGVDTVAMEATGVYWKPVYYCLEGLFDELWLCNAQHVKNVPGRKTDLSDAEWLADVAAHGMVRPSFVPPPEIRELRDVTRYRKTQVEARAKEIQRLEKTLQDAGIKLSSVASKVWSKSSREMIEAMIDGERDPKVLAQMAKSRLRAKIPQLEEAFSGRFGPHHALVCRQVIEHIDFLDRSIATLTADVTERLCPFESAVTLLCSIPGVSRTTAEVMIAEMGVDMTRFPTSGHLCAWAGVAPASHESAGKRQPVGTRRGSTWLQRALVEAARGAARTKGTYLSAQYSRLARRRGSNKATIAVAHSILDISWHLLTNGALYDDPGARFFELRHDPAIEAKRLQRRIEALGFKVSIAPAAA

SEQ ID NO: 274707 - protein, 411 aa, unidentified
MDVVHARCAGLDVHKATVVAGVRVPGPGGGERRGETKTFATTARGLRELREWVVGQGVTHVALESTGVYWRPVYAALEGIVELILVNARHVKMVPGRKTDVRDCEWLAQLLECGLLRGSFVPPAGVRDLRDLTRLRKTLIRERSQHVNRIAKTLELAHLKLGCVVTDIMGKTGRAILQALSTGVDDPARLADCAQGNLRKKRAALREALVGRLTPHYAFLLQQHLSLIDALDVHIATLDTRIETAMALFAEEAMLVQTMPGVAARAAQAIIAEMGVDMSQFPTAAHLASWARLCPGNNESAGKRRPTTTGKGATWLRATLQEAAWAAVRSRKSYYRALYHRLKARRGPKKAIVAVQHAMVVALWHMLKHRVSHHDLGVDYFDRRNTERVRRHHVHRLERLGYDVVLVEKVA

SEQ ID NO: 274708 - protein, 359 aa, unidentified
MQRTSVGLDVHARSVVAAALDGVTGEVSRARLTPDHGELLGWITKLAGPTAVTYEAGPTGFGLARFLAAGGLECVVAAPSKLQRPVGDRVKTDARDALHLAKLLHLGEIVEVTVPSIEQEAARDLVRARDDVRGDLMSARHRLSKLLLRQGIVYSGGKAWTGVHDGWLRRQRFDQPGLQMAFETAYDTMLATVDRRDRLDVAIAAMAADSEFTPMVHRLGCLRGVATLTGFGLAVEIGDWHRLTGRSIGPYLGLVPTESSSGGSRSQGGLTKTGNGHARRLLVEAAWHHRQPYRASSLVMRRRWDLAGPAARARGHTGNQRLHDRWQRFDQRGKKSVVANAAIARELAGWCWSLAVLDQ

SEQ ID NO: 274709 - protein, 406 aa, unidentified
MKVIHPICAGIDIHKKSFTIALNETKANGTYSVRTKTFSTMRAGILSARGWLVQSNCLDIAMESTGKYWIPVFNLFEDFFEITLANPRRTKTFPGKKTDARDAKWLSELHRIGLVDPSFIPPRDIRELRELTRYRTKLVKMRSAEKNRVQNSLIVSNIMISSVATDTFGKSGLNIIFALLAQEEITEDLLQLIVLGKLRSKIPELMEALKGELTQTQAHKIRIALDNFFNLGEKITKIEALIDEKVIPYLNVIDRLCSVPGIKKTAAVAIIAEIGADMSKFYSAMHLCSWGGVSPQNNRTAGKNRRVRSKPGNSYLKSMLVQCANAAVKETGTWITNKFNAIKARRGHNKAIVAIARTMLTAIYHVILKQETYKEPPVKIRISKSEEQKMIVRLESLGYKVEKAAI

SEQ ID NO: 274710 - protein, 419 aa, unidentified
MTQKQNTTAISIMHPVCCGLDVHKMKISACLITIDGDGNEQSEIKEFGTFTDDLISLRVWLITNNCPIIAMESTGIYWRPVHNVLEHHLEIILVNARHIKNVPGRKTDISDSKWLASLLKHGLLRGSFIPEADIRYWRELTRQRRKVTESLSDYKKRVHKVFETANIKIGSVISDLFGKTGMNLIERLCDENISLVEADIAECACGRLKSKSSELYRSIQGFFGDHHRFQLCSLMRIISILGSEIGILSDRISGLMTSHNEIIGRLEKVPGIGKRSAQIILSEVGYDLKTFPNTASFASWAGLCPGNNESAGKRKSGKTSVQKHPFKTIMVEIAWAAVRTKGCYYKDKYYRLKSRRGAKKAIIAIAHRIAKAIFYIIKHGEIYHELGEDYLKQKRQRKKLKSLRQQASSMGLQLIPVKG

SEQ ID NO: 274711 - protein, 312 aa, unidentified
MDPTAFIGIDVSKDHLDVHVHPAGGAFRLARSGDGVAALVARLGPLRPALVALEATGGFEMVAAAALAAAGLPVVVVNPAQVRSFALALGQRAKTDPIDAAVIARFVAATRPPVRRLPDEDTRLLADLVARRRQIVAMIGAERQREKRAPARVRKSIRRLVAALEKELASLDADLDESVRGSPAWRAKEDLLASVPGIGPTIARTLIAELPELGTLDRRRIAALAGLAPWTRQSGRWRGHSFIGGGRASVRAALFVGALVASRWNPVLKAFRDRLVRDGKAKRLALIATARKLLTILNAILRDNTPWQPQNA

SEQ ID NO: 274712 - protein, 330 aa, unidentified
MALKIVYQICCGIDVHKTFVVACIASTNKQGVTTYKRHRFSTFTQGLKELLQWLLDNHCKDVCMESTGKYWIPIYNVLEKDCNIVLAHPKYVKAIRGKKTDKKDAKWIADLFKHDLVAGSFMPPADIRQLRDLMRYRFKLTCFMSSEKNRLQNCLTVSNIQLASVVSDTFGKSSQRILDKILENPDDTSFDIEPLIHGSMKKKLPELELAIDGFITPEQAGKLKVIKKHFEDLESRKAELEKLILALASPYQQELDLILTAPSFKNKFTAIGIISEIGVNMEAFPSAKHLCSWAGLTPTNNESAGKKKSVRVSKAGCYIKPLLVCCIVDI

SEQ ID NO: 274713 - protein, 416 aa, unidentified
MDPIAGELTSEHRSFGTTIPQLLEFAAWCRVRESSVILMESTGVLWFSPYRSLEDVGFDNDTLALVNARDVKAAVGRKTDAQDAKRLAEYARLGKFHKSFVPSRPFRDMRMVSRDIIRLSDDISRQKNRYNKNLNSVGCRATSVFSDVHGKAAGKILDAYIRGDRDFEEIVRSARKQLRATQQEILEAINFAMSDALRELLRSSYEHLQYLIARRDSQIALLERMQAPYQEYIDRLMTIPGVKELSARLLFCEFTNEQQSFPDAAHFASWLGLCPGNNKSAGKSSSGKTPKGNRWARKTLTEVAHGIGLMKRGALKALFQAFKERRGARRAVVAIAHKVAMIMFAMIWDGSEYVETTCSALRDTRVKRLLQTSKNLREQRTVITLSGQIVDKDTGELIGQLSVDAATCRNAFEPPQ

SEQ ID NO: 274714 - protein, 351 aa, unidentified
MLIIGCDYHPSVQQIAFVDSETGETGERRLQHKDGEAERFYRELKLRGVSVRVGIEATGHARWFERLLAELGFELWIGNPAEIKAARVRKQKTDRQDAQLLLKLLVEDRFPRIWIPSPENRDVRQLLWHRHRLVQMRTRVMNQLQAVAMNEGVRRKKALWSKSGRAQLESFVLSPWASRRRQDLLEVLDRLNPTIEELSTAVEEEAKKRPEVLRLMTHPGVGALTGLAFVLIIGSAKRFACGKQIGSYLGLIPCEDSSADRQRLGHISKQGNTLLRFLLVEAAQAAVRCDADWRRKYVHLAMRRDPRIAKVAMARKLAVSLFWMWRKEWNYEQVVKFGSHAGQPEHVHGVK

SEQ ID NO: 274715 - protein, 400 aa, unidentified
MPRIWAGIDAGKAHHHCVVVDAEGNRLYSKKVPNTETDILNLLAHVAGLADGHELTWATDLNQGGAALLIAVLTAHSQNVLYLPGRTVYTAARTYRGDAKTDAKDAWIIADQARMRRDLYPISISDEIATDLRLLCAHRTDLMTDRTRILNRLRATLLEYFPGLDAALDFAKSPAGLTLLTGYQDAASLRRMGVTRLSAWLRRRGYHRPERVAQAAVDAAHAQHTVLPGQSAAAVIVAKLATDVLRLTADAAEIEKRIEARLREHADAELLLSVPGFGPMLAAEFTAATGGSMTRFATADRLAGVAGLAPAPRDSGRISGNNHRPKRYDRRLLRACYLSAQVAAIWCPTSRAFYERKRGEGKSHTQAVLALARRRINVIWAMLRDRTTFQHPAAVAASTT

SEQ ID NO: 274716 - protein, 343 aa, unidentified
MKDTIYDQYIAIDWSIKNMAIARMTNKSNKITAIDVPSDIVDLQAYLKNLKGTKILAIEETTTSQWLYAELKDYADTIFICDPNRNKLLNEGPKTDKIDAAKLVQLLKAGLMKEVYHSGDKFLYLRRVTSGYEDLVKAGVRLKNQRYALLRACGKVGNEKKDINLGSQGEQFVLECLDRQIEAYEREKQCYENEFERLARKNPAIKHQESLPGIGIINAVKIVTRVVTPHRFADKGHYLSYTGLIKLDKISGGRSYGKKNPRFSRQLKSVYKSGVLAAIGGSNPINDYYEHLIQEKGYPEHNARHKACRRLAILSLGVFKSGKKYQPYRMNYVKGGKENTSGL

SEQ ID NO: 274717 - protein, 416 aa, unidentified
MNSPPKSTSKRFLALDLHKQYLVVGGVNRQQEVVLNPRRISLQKWPAWAKTNLLSTDNVVLEATTNAWEIYDQVAPLVDRTIVAHPPKVKWIAEARVKTDRHDVLRLAHLLSADLIPEVWVPPVEVRELRSLMAHRRRLVQMSTRARNHLHSLLHRHNLKPPQGKIFTQKHREWWHKLEISPTQRMRVRHDLATIDHVDELLAEIEKELYRLSTSEPWADQVPFLLQLPGFGLIVTLTVLAAIGDISRFSHPKKLVGYAGLGASIHASGGKFRTGRITKTGRKELRWILVEAAWRAADTHPYWKAQYERLDRRIGSTKAAVAIARKMLVAVWYILTERTADRHADPDKVAFKYIMWSWKLDDVKRRGMSTRQWARYHLMQLQLGEDLTHIMRGGNRYPIAPDEEIKALMPELQTKD

SEQ ID NO: 274718 - protein, 317 aa, unidentified
MTEITSERFAGVDVSKHALDLHLEGGRDVLHVEYDDAGLQQVCQRLLEAAPTLIVLEATGGLETRLAAELGARGLPVAVVNPRQVRDFAKASGRLAKTDRVDAQVLSAFARAIRPAARAPKEEDVRELEALVTRRRQLIDIRVQEVLRLGTASKLQAKSLKEHIAWLDRRIASLDTDLTNRLRKSEIWRAKEDLLKSIPGVGQVTCMTLLAKCPELGRLDRREIAALVGVAPLANDSGTHRGKRFIWGGRADVRAVLYMAAVSAMRCNTVIKTFAERLKLAGKPGKVVIVACMRKLLTIMNSILKSNTPWNPENACA

SEQ ID NO: 274719 - protein, 418 aa, unidentified
MKSIKTKKVKKINDKTVIATLDIGKNIQYGYFRAPNGNDVKPFAFYNSKKSYNEFWQKLCQFKNKEGLEEIVIGFESTGPYAEPLFNFLRKKPVTLVQVNPVHTKRVKELTGNSPNKTDNKDPRVIADVISLGHALTLVVPQGPAAELRRLTQARERAIKARTSMINQLQHLIFVIFPEFLKVLKISTKTARHLIKHYTTPEKISVLSLESVGQILKKVSRGKLGQDRAKQLHEAAGNSIGISEGKQSIVFEIKHLIGRIEAEDQFIDRLEKQMHVYLQQIPYSQNILSIKGLAEVTVAGLIGEVADFNKFDTISEVMKLAGLDLYEISSGNHRGQRRISKRGRPLIRKLLFFAAINAVKSKGIMHAKYQKMLARGMLKMKALVAISRKLLGLIFAIVRDNTKYVENYSDNYHYKLAA

SEQ ID NO: 274720 - protein, 490 aa, unidentified
MSRNRQLRQPPLSDATPTSGSPVPFRDVGIDLASVGEHHATVLDERGEVLFGRYFPTRAEALAQLEARALQATPSGTRLRVLLDCASLAWLPVAVWFQRRGHLVYQVPNGKTKDLREYYSKHSKSDPDDSYALAKHPTVDAESLVPLYLPTPEVFSLDRLNREHDRYSKEVAAMKNRLRDFLNSFAPGLAGALPVGLFHAGARELLREYLAPERVLRLGQRRFGTVLQNRLGDQVTPAVSAAVYQVYQQTATLFDLAERPAVCFDDLQAQLNRYWDELAHWEAQAAELKRQIGERYEQVSPGKHLSSLPGVGDLIGASFFGTVRGRDRFPNLASQRKFFGFTPKRNQSANSDKKSQRMTHAGPNLTKKHLFLATDMLRQHDPEVAAYYYDQMVRKGKCHTVAVCNAVNNKTIPRLHALLREDRPYELRDPETGESITPQQARQLIRERYTVPEEIRRARRSHQPRRKAQPPKEGTRSRKKGRAQSPGLRP

SEQ ID NO: 274721 - protein, 320 aa, unidentified
MSGEQWVGIDVCQKYLDVYVRPLDKLFQVTNNQKGISQLIQSLREIKPELIVIEATGGMERKAALELTQSGFAVAVINPRQARDFAKATGQLAKTDAIDARVLAHFADAIRPPVRAISDESSHELQDLVQRRRQLSDMITAENNRLRGKSELIQSQIKEHIEWLQEKLQEVESQIKEAIAVNQDWKEKLKLLTSVPGVGQVVATTLVASLPELGKLSHKSISYLVGVAPLNKDSGKFQGQRRIWGGRARVRRVLYMATLVAVRFNPMIKPFYQRLLDKGKLKKVALTACMHKLLIFLNAMMRNNQLWQPQTLECPNEHSS

SEQ ID NO: 274722 - protein, 429 aa, unidentified
MNCTQNKKIEQVKETTMIVGIDVGSEKHYFRAFNWRGIELTRKPVAFSNSMEGFNSFYNTIVELMQKSELEEALVGIEPTGHYWFDLGQFMGEKDIKFVMVNQHHVHKTKELDDNSPSKNDRKDPRVIAGLVRDGRYFYSYMPTGAYAELRNASNRRFVLVEEQTRAKNRLQKWIAVYFPEYKGIYTHIDAKGGMLVLKKAPTPEEIVRLGVEGIIKIWKDAKLRGNGHKKAMLILAAAMRSIGLKAGLTEARMEIQDLIEDYELQTKRLERVNDLIKGLCQQVRYADKLLEIKGIGITTVAGFIAEVGDITRFDSTKELQKLAGLELVADSSGKHNGKTKISKRGRKRLRYLLFEAAISVVGKNEEFKEIHRYYTTREKNPLKKMQSLIVVACKLIRVFHAILTKGIRYDASKMLKDIRHPGEQLKAA

SEQ ID NO: 274723 - protein, 425 aa, unidentified
MSKPNVEIAAFVGLDWADQKHVVSLQEADSDQRQRFTLDQTPEALQSWIQLLRNRFAGRPVAIAVEQKRGALIYALMHVDFLHLYPVNPQTLSQFRKAFYPSGAKDDPIDADLLLEILMTHRQHLRVWIPDDVLTRSIQLLTEDRRHLVDERTALTNQLTAALKTYFPQALNWFGELHTTRACAFLRRWPSLQNLKRATPSSIRKFYKAQGYRGEDKLEQLIANIQKAQPLTQDGAVLLAYSMKVQALVTQISLLTESIERYDQQIASLFDQHGDSTLFGSFPGAGPSLAPRLLAAFGSDRGRFQFAAEMQQLSGIAPVTEKSGTGIWIHWRLACSKFLRQTFQEFAGCSILQSDWARAYYDQQRKRGKSHHAALRALAFKWIRIIFRCWITRMPYDEALYCKSLQLRRSPLAAELPASEKMALT

SEQ ID NO: 274724 - protein, 422 aa, unidentified
MSYCPVAGIDVSKRFSDMCILSPGNKIFAQEKIYHDETSINRANALLQKVEQLFFSKPVIVMESTSHYHLILFQFFSEHGYDVVVVNPLQSNSTKDFSIRKRKTDRVDAFKLAMMYRTKTLRPSQIPQTATRALRQLCRHRAELLNDVSSYKNRLTALLDQTFPGYDKVFSDVGGVTSCAVLARFPTPTILLVEKESELVEVIAAASKSSYSFAKKKAGLLISAAQKAQTLGIHSCADETLIVCTIQMLRTLSESMLQIETAIDNLLAQIKEMRNNVSLLQSIPGVGSHSAALLLGEIGDISLFKKPKQLAAYFGLDPTERQSGSFRGTRNKLSKRGSPHARAALHMGVVNSICKRGKDSAANPILLSYYEKKCKNKPAKVAQAASMHKLVFIIFAVLRDQKPFELKTPEQHAVEQGFAKAA

SEQ ID NO: 274725 - protein, 368 aa, unidentified
MRKSSTDLGSVMTSFIGLDLADKESTFVGIDGKARLVEEGKVTTTPSGLGKVFASRDRCRIALEVGTHSQWVDRLLREMGHEVIVANPREVALIYRNKRKSDKLDATTLARLARSDPELLHPVKHRGKQAQIDLAVLRARDGLVGARTQLVNLVRGTVKSYGERLPKCSTASFPAKAAAALPADLSPALTPVIEQIAELTKKIDQYDAEIERLAAERYPEARALRQVKGVGPITSLAYILTLEDPGRFPTSRDVGAYLGLTPGRRQTGESDPEMHITKAGDVFLRKLLVQAAQYILGPFGSDCDLRRWGLRLAGAPASAKGKAPKGSKQRKKRAIVAVARKLAVLLHALWRNGEVYEPLRWASKREAA

SEQ ID NO: 274726 - protein, 366 aa, unidentified
MLYLGIDQHARQITISLRDDGGDVLQARQVSTQPDKINAFFRQLTRERLHDGESFVAVLEVCGFNDWLIRMLQEYRCHKVILIQPDQRKKCKTDRRDAAALSELLWVNRDRLLQGKPVRGLRQVDIARGTDQENRRLTTLRKDAGQARTRLVNRVRHILRRHNLQWQMPTKKFPTKAGIAWLKQVALPEIDRLEMNHLLADLERVQERRKELEQVIAQRCGVSGEAVLLSSMPGVSYFTAVSLACRVGRVERFPRAQSLANYWGLTPGCRNSGENTQRLGKITKAGSGMARWLLAQVTHKVLRKDARLREWFKRIKRRRGSTIARVAVMRKLATIIWHMLSKRKTYAECRALAAAGAKERDKQECT

SEQ ID NO: 274727 - protein, 375 aa, unidentified
MEGAPVLDTTTFVGLDVHARSIKAVSLDVMTGEVRAATFGYDAGAVAEWVRSVDPGARCVYESGVTGFDLQKRLSGLGVDCVVGAVSKMIKPSADRRRKNDRNDAEFLARMLSVGNVVEVWVPDDECEAARDLTRALEDARDDLSRSKQRLSKFLLRHGLVFDERTPTGRRKGNWTRAHWSWIESIRFAEGADNDALAYYVDAVRRAAEEKARLEGLVEAEARKPRWRKRVDSLRCLKGVDTASAADLVFEAGEFSRFGNARSFAAWVGLTPSEHSSGESDRRGSITKAGNKHLRKTLVEAAWHYLTCSGRPKDLAKGQAPDRGARRHAAKGVRRLVERREALLARGVHGNKANVATARELACWVWAVGLMAEEA

SEQ ID NO: 274728 - protein, 391 aa, unidentified
MAPVMIGIDPHKGSHTAVAIGADEEPLRQVRVRASAAQAQKLVAWAADWPERTWAVEGARGLGYLLAQQLVAAGERVLDIQPKLGARVRLLATGASGKNDPNDARSVAIAALRSTTAAEVAAAGHAAVLKVWSKRHRDLGRARNQLACRLHAVLCDLAPGGFSKEITAGQASGLLQRIRPSGAAAQARYDLASEFVEDLRRLDAQLRDTRRKLTAAVKESGTSLTEIFGVGPVIAATVIGATGQVSRFASRDRFAAYNGTAPIEVSSGNRRACRLSRRRNRRVNHAIHMAAVTQIRNKHSQGRAYFDRKLAEGKTRKEALRCLKRRISDAIYARLQDDARRTRQARTLTAREGNRGTTLTPARPAHTPITGSSDKPLPGLTPPYDPGQLPT

SEQ ID NO: 274729 - protein, 356 aa, unidentified
MTKTLMAGIDLHSNNVMIGIVDQNGRRLKHQKLPCELGVVEKFLSPYKKRLKSVAVESTYNWYWLVDGLRARSYPVVLANPAAMEQYSGLKHADDQSDAYFLAEMQRLNILPTGYIYDPQLRPVRDLLRRRLGLVHQRTALMVSFKSLYARTTGRELKLNRLKAMEPEQAGELYEHPANQLIARVQKEHIEQLDSSLRRIEKAVLESARKLPYYDRLNTLPGVGRILGMTITLEVGEIGRFQTAGDFASYCRAVAARRLSNEKSKGPNNRKCGNKYLGWAFVEAANFAKRYDERSRKWFDRKAAKTNTILATKALACKLAKAAWHVMAQQVNYDGDRVFGRAAGSPGKGLALSPGN

SEQ ID NO: 274730 - protein, 340 aa, unidentified
MMLYVGLDVSQKETEICIVDAEGRRTWRGKCPSRPDAIAEVLGQRAPGAIKVGMESGPLAIWLWHGLKALGVPIECLHARHVAAALSLQVNKTDTNDAHGIAQVVRSGWYRPVAVKSMQSCRVRAILAARRQLVEVRTGLYNQIRGLLKTFGVVLGAGTGGTFERAVDAECPDDPMVRDAIGALVCAWKAAGEQKVALERQLVRIARDQDVCRRLATVPGVGAITSLTFVTALDDPTRFRRSCDVGAYLGLTPKRYQSGEVDLAGRISKAGDRTARSLLFEAANALMTRVRKDCALRSWGLSLAKRIGSRKAKVAVARKLATILHRIWLDGTEFEAVPAH

SEQ ID NO: 274731 - protein, 323 aa, unidentified
MKKFVGIDISKETFDIYFEQEGKGCHVKLQQTEEDYKVLLRLISKDAICIMEATGNYHLKLAHYLHQAGIKVIAENPLKIKRFSQMSLQRTKTDKADAKLICEYGRLILSSNKLHCWHPDETEIGHLKQYDTVRHQLIKQRTALSNSEEALNALTHLNDEVTQVLNDMVTAVDKAIKQLDKGMLKLVKEHHSETFDLVTSVPGVGPKTATLMICLTDGFNKFSHDQVKQFISYIGMSPRTFESGTSVKGRAHISKVGNSRMRSMLYMCSWTAKRKNQQCIALYERLSGKGKPEKVIKVAIAHKLIRQVFGVIKSGEPFSKEYA

SEQ ID NO: 274732 - protein, 404 aa, unidentified
MFKFGIDWSEQHHNLCIRNDKGAIVSQVEFKHTLEGFQRFDDERRKLGVPPSECLVAIETAYNLLVDFLLDRGYPVYLIPPQATKGYRNRQRSTDAHTDDTDAALLSSILHTDLDSHRRLQPNSALTQQILAQVRLIDLLRRSIQRQANQLRAVLFRVYPQALGLFGKLTAQINLHFLMAYPTAQDAQALTQSAFEAFCREHRYGRANLISRRYAHLMEPAPAANPIAVAAYRDQVRILAELLLPQVLRRTEARSSLAQLFSQHPDSFIFDSLPGAGELLAPGLLAKFGDHRDRFPTPASVQALAGTCPVTKQSGKRKVVLFRRGCDREFRRITQQFAKASVRQSGWALAYWRDVRPRCRSDSDAYRRLANRWLAIIWKMWQDRKAYDESYHIQQRAQRRRPRS

SEQ ID NO: 274733 - protein, 392 aa, unidentified
MFYVGIDIAKQNHEASIIDSNGKLLDKSISFSNSQVGCDKLIALLERFEADTSNTVIGMEATGHYWVSLYSYLLDLGFSVNVINPIQSDAFRKMYIRQTKNDSKDSFIIAQIMRFGEFSTTSLADEDIMALRQLSRYRLALVDECSDWKRKCIALLDQVFPEYSKLFSDTFGVTSRELLSKYPTPEDMLSIDTGTLSKLLSEASRGRFGISKASEIQESATNTFGINFAKDAFAFQIKQIIAQINFIEEQLKELETEISTLLHQTNSVITTITGIGDVLGAIIIGEIGDISRFEAAPQLVAYAGLDVAVKQSGDFVGTQTKISKRGSPYLRRAIWLAATVAAFKDPALSVYYQSLRARGKHHLTAIGAVARKMCNIIFAVLRDNKPYVPNIK

SEQ ID NO: 274734 - protein, 441 aa, unidentified
METVFEVMNACCAFLDIHKETVEATVRILQGQRVRQETRRWSTTTGQIQAMADWLATHGVTHAGMESTGVFWKPIFNILETRFTVILTNPAHMKQVPGRKSDLRDSQWGAQLLQAGLLRGSFIPPRWQRELRDYTRYRSQLQAEQTRVANRLHKVLEDANIKLGSVATDILGLSGRAMIHALMEGEQDAATLAEMAQGKLRTRRPELKLALEGRVTPHHRRMLRMLWKELAAVEECIADVDREIQEVTQPYTSQIEQMDPVPGIDRRTAEVVLAEVGANVDPFPSDQDLASWAGMCPGNEESAGKRRTGRTTKGNRWLRAALVQAAWAASHTKRSYLGAQYRRLAGRRGKKRALVAVGHSILVILYHLLKDSRPYSDLGRDFFDRMNHDRLIRYYSRRLAELSQKVTVEPLPEVIPGEGMVNVHPLAKAKGMTAGGICNDP

SEQ ID NO: 274735 - protein, 384 aa, unidentified
MSNIAPACAEASTDRSLETERHRFLYVGMDIHKDNHTAIATNCFGQNLLELAISNSEQDFDDLVAQVERLSKAENLKPVFGLEDSYGYGLRLAKYLYEKGLLIKMIAPVLVDRERQYETHPEKSDSLDALGVAKVLIQRIDRLPNYSISKNDEISKNIKELTLDREFLVKEQGRLKNQLHRLLHKAYNSEYREKFKNPFSLKALRYWRGCPVPRKKVDIVDNVSILKNQIRRKIKRLLDIKEEVKEIEQELNCLIQQTNQKIETLNGCGTVLASQVLAEVRNIDRFHSPHSLAKYAGLCPREKSSGKTFHHIKTKSGNRRLNMTVHRIALSQISKSGNERAKEYFRKKLSEGKTKDQALCCLKRRLIDIIFMMLKYKQPYNYIA

SEQ ID NO: 274736 - protein, 414 aa, unidentified
MVDATIRTVVGIDVAKRRHVICALDAAFGTVRQRPKPIEATAEGYQELCRWLADAGAPATLRIGLEATGCLWEPLYEALTQAGYAVVVLNPRQTAAWAASLGLRAKTDGLDAQTLARGLLAGYARASTVPPETVQALRELTRARRDLVQTRTAARQRLLDELVLVFPELPDHTPERCDLATPALLHLLSTYGSAQALATAPVAEVAALLATHSKGRWGDPQAAALHDLARQSAASTRAVAARRVVVQTFARHLLELQQHIADLEAAIAEALRDDDPGQRLRQIPGIGPIHAATIRAELGDVTRFTHVDQVIAYAGLEPRTRQSGAFVGQRKLSKRGPGALRHALYLAALVATRYRAEWRERYQRLLDRGRAKKEALTILSRALLKTVYHLLVTGAAYDPARLKPRAGAGLDSGI

SEQ ID NO: 274737 - protein, 434 aa, unidentified
MWKDALLVIFQEASDQFSGGASMEVVYPRCSGLDVHKRFVVACLSLIQNGERHKEIRQFSTMTSDIQALKGWLKAAGCSHIAMESTGVYWKPIFHVLEGEFEIFLVNAQHMKAVPGRKTDVKDAEWIADLLQHGLLKASFIPSSEQQAVRDLTRTRTRLIQERTRLVNRVQKVLEDANIKLASVVSDIMGMTGHAILTALVAGQEDPECLAHLAQGKLIKKQEQLKAALQGKLISHHRVLLGELLQLIATLDRSIAHLDREIAERLRQHDGLIDRIDEVTGLSRRSIEVLLGELGWDMSRFPDAAHAASWVGICPGNHETGGKRLSGRIRQGNRWAKTVLIQAAHAAAQTQTYLGEQYRRISARRGAKRAAVAVGHSILVIFYQMVKTGESYHEKGTDYFLAANIQKIQQRLVRQLERLGNTVILQPKGETAPA

SEQ ID NO: 274738 - protein, 339 aa, unidentified
MSLYCGIDLHSNNNYISIIDPNDKIVFERKLTNNIGAVTDALARMREPITGIAIESTYNWYWLVDGLQELGYKIHLVNTSKVKQYEGLKYTDDKYDAYWLAHLMKLGILPTGYIFPKEMRAVRDLLRRRMQLVQQRTANILSIGNQLTRNTGKQFSSNKIKSLKLVDMKSMIKDPNIQLSIKSNINIMQSLSVQIKLIEKAVLKQVELKEEYIKLTEIDGIGVILALTIMLETGDIARFKAVGNYASYCRCVNSKRTSNDKKKGEGNKKNGNKYLAWAFVEVANHSMRFNEKAKRYYQKKAAKTKRVVALKALAHKYARACYYVIKNKESFDENRLFGC

SEQ ID NO: 274739 - protein, 368 aa, unidentified
MSKTITSFVGLDVHKDSTAIGEAEAGRETPRFIGTVGPDLGQLLKALKSLGKPETMLVVYEAGPCGYGLARQLRSRGYACEVVAAGKIARRPRERIKTDRRDALTLARLARSGDLVKVMVPDERDEAMRDLSRGREDAVKARLKARQQLKALLLRHGHRYGGKSSWTLAHERYLAEVSFAHPAQDIAFVEYRQAVREGHERVERLTEALRTQTEHWRMQPLVAALSSLRGIDFVAAVTLAAEIGDFSRFAHPSELMGFLGLVPSEYSTGDHRRQGDITKTGNSHARRVLVEAAWNYRFPARISRGLQIRQEGQPKAVREIAWRAQLRLAHRYRRLSSRKLHPNKICVAIARELAGFLWDIARQAHMPA

SEQ ID NO: 274740 - protein, 389 aa, unidentified
MKIYVGIDIAKLNHFAAAISSDGEIILEPFKFTNDADGFQLLVSKLESFDKNSIIIGLESTAHYGDNLVRYLVAEFYQVCVLNPIKTCQMRKNNIRKTKTDKVDTFVIAKTLMMQDDLRFITFFDLDMMDLKALGRFRQKTIKQRTRLKIQLTTYVDQVFPEIQYFFKSGLHQHAVYALLKEAPSPKEIASMHMTHLANLLKVNSHGHFTKEQAKELRVLAQKSVGANDSAISIQITQTIQQIELLDSQLEKIEAEMTDIMKFNDSVIMTIPGIGYINGGMILGEIGDIHRFSNPNKLLAFAGLDPSVYQSGNFQAKTTRMSKRGSRVLRYALVNAAWNVVRNNATFKAYYDAKRAEGRSHYNALGHCAGKLVRVIWKMLTDEVEFNLE

SEQ ID NO: 274741 - protein, 311 aa, unidentified
MTETNIGIDISKDHLDVHRLPGDERRRFDNSKAGHKALIRWIGDTPARVVYEPTGYYHRALERALAAAGMPIAKVNPRQARRFAEATGNLAKTDALDAAMLTRMGAVLSLEARPVPSAIINDLRDLRTARNALIKDQVAAQTRAKAITLPLLKRQNAARLKQIEAQRKAVDAEINALIQGDPDLAQRFAILCSIPGIAEVSAAMLLIEMPELGSLDEKQVAALAGLAPIARQSGNWKGKSFIRGGRQQVRQGLYMPALVAIRFNADLKAKYEQLIKAGKAPKQAITAVMRKLIILANALLKKGRKWQTRVA

SEQ ID NO: 274742 - protein, 391 aa, unidentified
MICVGIDVAKDKHDCCILDSEGTTLADCFTIPNNLDGFKRLLQTIKDCTQKSDKIKVGLEATGHYSCNILGFLLDNDLPVYVMNPLHTNLYRKSLSLRKTKTDRVDAKTIATMLLSDVDLQSYTDTAYHNEELKSLTRYRFDKVQERAKLKQSVSRLVTILFPELEQLVSSIHGTSIYALLSEYPGAKQISEAHLTRLANILVTTSRGHYRKDRATHIRDAARTSIGSVMPAKSLELKHTIKLIQELTSEINEIEDAIRKIMDELKPPILSIPGMGFYSAAMILAEVGDFSNFNSPDKVLAYAGCSPSTYQSGKLTNCYAHMEKRGSRYLRYALYTATKYVCYWNPVFTEYLTKKQAEGKHYNVALSHATKKLVRLIYALQKSGKAYLAIT

SEQ ID NO: 274743 - protein, 400 aa, unidentified
MSVVGWDWASQAHDVTVLDDAGAVVDRWAFPHTEAGWVMALARLRRHGEPGGLPVIIEKTSGLIVDRLLAAGHPVVPVHPNAFYAARPRWGASGAKSDPGDSYKLADYLRTDGHRLRRLQPADPGLRELQALVRLREDQVRARTAATNQLWAMLGNYWPGPRDLFYSLASAIALAFLTAYPTPASAARLGEARMGAFLRRNSYRGGKSPALLLARLRAAPQAPVALPAATLAAMVGAHVQQLRSLQATITGIEHLIAERVAAYPRTRLLARLPGAGTINLAQLLAEVGPILDRATSAEQAASECGTAPVTRASGKTTGGYFRWAASTRARKAITAFAHNARMQSPWAAKLYADARARGKRNPHATRIVARAWIRVIWACWHTGTPYNPATHHAARQPLTR

SEQ ID NO: 274744 - protein, 387 aa, unidentified
MTKVNDLSRSLAALDQDTTLIAVVELSSKSWLVAAAVPGIERHPLKKLDPDASALLKLIERWRGEAERRGRTIKRVVLAYEAGRDGFWLARWLKERDIEAYVIHPASVAVSRERKRAKTDRLDAAMLLRVLLGWLRGERGHCSMVAIPSMDEEDARRPSRERETLVGERARITNRIKGALARFGIRSFNPLLRKAPQSLEKLQTAEGGPLPVNTLEEIKRDLARMAVVREQIAAIEKARVHRLKQAPKTGSNAMVQLLARVIGIGIETADMLVREVLSRTLRDRRAVGRYAGLTGSPDESGSRRREKGLTRAGNARVRRGLIQLAWRFLMFQKQSALTQWYRARTAGATPTQRKSLIVALARKLLIALWRLVTTGEVPHGVVLRPAI

SEQ ID NO: 274745 - protein, 378 aa, unidentified
MISVGIDVAKGKSTVCILKPYGEIVSKPFDISHVEKDLGELTAMLLRFDDEIKVVMEATGIYHLPVLTYLQEKGLFVAVINPYLMKVYRSGDFRKAKTDKIDSRIIANYGIEHWFTMTEFKASDDVYGELKMLGQQYRHYMKLHIMSLHELTHLPDYTMPGIKRMPASWNEGNRKDKLSDFVERFWHYDNITRLSEKEFIEQYTLWAKEKKYHQSQDKATAIYALARESIPTLSSETPSVKMLVTEAVRVLKKVDATLSTILSRIQELAKTLPEYFTVREMGGVGEVLAPKLIAEIGDVRRFHSGKALIAYAGIDTPPYESGQFVGSKRKITKRGSAALRKVGYETMRCIKTHPRPEDPVYQYIVKKETEGKAKKLLK

SEQ ID NO: 274746 - protein, 434 aa, unidentified
MRQQNISTPSTPPVYAAFVGLDWGDEKHALSLCAAGATVIERTTLPQTPEALADWANVLRSRFPSGKIALCLEQARGALLAGLMQYEHIVPYPVNPKTLARFRQALYPSRSKDDPIDADLLLDLLLKHREHLRAWQPDTVQTRQLALLNEQRRHFVDHRTALTNELLSHLKAIFPQALELVGQSLASRLATDFLKKWPTLQAVQKVKPAVLRQFYYGHNSRSQELITGRLERVKNAVALTSDPALLAVHSLAIQTLAGQLQALRPFLDQHEQQIAELFAAHPDAALFDSLPGAGSALAPRLLAALGSDRSRFPDALSIQCYSGIAPVTERSGKTQYWVHLRWSCPKFMRQSWHEFANCSLKFSTWARACYQDLNKRMDHHEAIRKLAYKWQRIVWRMWQERQPYDETRYLRSLQKRGLKIYADLVPQPIAPAGE

SEQ ID NO: 274747 - protein, 367 aa, unidentified
MIVNEVAKNVEKIISIDTAKNSFQVLVVNHKTGKKKNTKVQRSKFVEYILKQGPCLIFMESCSASQHWARLFEGHGFTVKLIAAQHVKAFLRNRKVKNDERDAEAIYTCGIQPDTKFVRIKTVEEQTVALLHTLRKAAVSQRVELSNRIRGILAEFGIVVARGRGSFNSEIEALFNECEKIHDVNLRAAISSLFEDYHRLEQREKGLSEKIEALNKDNELVKIALTCPGVGSLTASAIVAEVGDASQFRNGREMAAWNGVVPSQHSTGGRSTLGGITKTGNRYLRTLLAQCACAVIQKASRHLEQGKDTHLDRFALRLKLNGKPVKKIMIAIANKIIRILWAMLTQRKTFENKAEETSDISAELQLA

SEQ ID NO: 274748 - protein, 309 aa, unidentified
MKQSVVYIGIDVAKAHLDVAWAGTFRRLPNERSGHAALVRWIKQSATPVQLICEASGGYEQALLESLEKSEVKVTLVQAVRVRQYARAAGILAKTDRIDAKVLAAFGSAMQPQPTRSLSAEQKCLRQYEAHRRHLSRILVAEENRLAQLSCAELRTLSRSLISKIKNQIETLDRRIGELIAQDQTLCVKAQKLTAISGVGVRTAALLLAQMPELGQLNRRQAAALAGLAPFNHDSGSIRGKRAIFGGRRALRSGLYMAALSAARFNPILSHFYQRLRAKGKPHKLALTAVMRKLLLALNHTLKPQPILA

SEQ ID NO: 274749 - protein, 355 aa, unidentified
MAIVAHTHPFVIGVDAHARNHAVAILVCPTGEVVDDAQFPATVAGLQRAVSWVARRTGGDLDVLWVIEGVGTYGARLARVAAEAGYPVAEAGRMNARANRGVGKSDPLDARRIAQAVMAVDVAMLRRPRADDGVRAAVRVLVASPDHISAERTAAVNALTALVRVADLGIDARRPLTAAQITAMAAWRARDEDLATAVARKEAVRLAKRVIAADRELAANTKQMTDLLNRSPARVLLDQPGIGPVTAAVALAAWSHPGRVRSEAGFASLAGVNPIPASSGNTVRHRINRGGDRRLNRALHMAAVTRIRMDPRTRSYVERRTTEGRTPREIRRCLKRYLARQIYRQLNAAQTPDPA

SEQ ID NO: 274750 - protein, 395 aa, unidentified
MATIATIGLDIAKSVFQIHGIDAAGAVVVRRKLSRGRVLAYFEALPRCVIGLEACNTSHHWARELTALGHDVRLMPAQYVKPYVKRGKTDAADAEAICEAVTRPTMRFVAVKTPEQQSVMMLHRVRLMLNRQRTQLSNALRAHMAEFGVVAPVGRMGLERLLSIVADCADKRIPTDARVCLEMLARQLAVVKTQVLENDRRIRESARATEVGRRLMAIPGVGPLLASAFVASVADPRVFKTGRDLAAWIGLVPKQNSSGGKERLGGISRAGNGYLRNGGHPPSAAARHSARVAASVAGPARHQGRGCRLGEQDRADGLGADDERRSLPRAGRGGGVEIRRPGSGADEVGKGEQELMHEAGQYRRNRKTQSGRCTSSACFWSGPDPRERHHGQRRM

SEQ ID NO: 274751 - protein, 349 aa, unidentified
MTMVGGFDVHRKQITFDYVDDDGLVHWGEIRPATRKTLRGWLGKHCPSGDAEFGLEGCTGWRYVVEELATAGVVAHLGDPAEIAGLRGPKKRAKTDRADARLLRTLLVEGRFPESWIPPAHVVEVRTLGRLYCALMEERRAWQQRIHAQLFHQGCPPVTALLSVAGRDALAGAQLSGVGRQYVDTALRRVDALGAEIVPLRAQLVTFARYQRGCQALQARHYGIGWLCAAIIWAEIGDARRFSSSDQLVRFAGMDVTVYSSDAKRSSGHLSRQGSPELRWATFEAARCAARRGSPDYDYYHQLAVKHDGHNGKNPTLAVERKILRRCYHTLRGLGDAALSPPQSVREAA

SEQ ID NO: 274752 - protein, 420 aa, unidentified
MPDDRCRLGSDDVVIGLDLASAEHQAVVLTAAGQRLTRFRIPHTRAGLEELLRRTTPAALGRAGGARVFAFEATGHLWEAVAYVLRARAERYVVVNPLATFRVREARQLSREKTDLTDAEQIAELCRTGLVTRPQLETRPYLALRRAWGEYVRLREERARLKVLVAHQLYGLFPEFLRVWADLLQPGAMAVLRTGLTPAAMATLSLSEFVAQVRAHGAGHRIWRFKLAQVHREAAQTIACPDGLDVLAREVQRAVARMDMLTAHMTAVAAEIDIVLAELAEVPYLRTIPGLGWASVAGLLAHVGAITKYHHGRQLIKLAGTNPSRRDSGQTVGRGQRMSHRGRAGLREVLYLATISCLQYNLRIRAHYDRLIQRADRPLPKMQALGACMNKLLLYAFAVMHRREAFQLDHDWQRTMARVA

SEQ ID NO: 274753 - protein, 309 aa, unidentified
MDAPVVGIDVARDRLDIHVHPSGANFAVDRTTEGVEQLCERLRPLKPKLVVLEATGGLEAMVARALTTWRLPAVIVNPAQVRAFAHALGQRAKTDRIDATVIARFAAATNPPVRARADAETQALADLVTRRRQIVGLIASERQRASQAPSCIRDSVRRVIEALEQEQSVIDRSIDAEVDRSLEWRRKETLLTSVPGVGPTIARTLIAELPELGGLNGKQVAALVGLAPWTRQSGQWRGRSFIAGGRAPVRTALFMGAMVASRHNAALKTFRDRLIAAGKPKLVALIATARKLITILNAILRDGTPWQPA

SEQ ID NO: 274754 - protein, 363 aa, unidentified
MNATAALPVVGVDLAKSVFQLAVADGAWHVIEQQRLTRTQFERWFSNRAVGLVVMEACGSAHHWARWLNGLGIEVRLLPAAYIRAYVKRNKTDSADACALLEAARCAEIIPVRVKSIEQQALQGLHRTRSLWMGTRTSRINALRGFCREFGIVIAQGSRLGVEQIGRVLADPHAPVPTLIRGTMTLLVEEIRLLEVRIAQLERELTTLARQSPACTTLLSIPGVGLLTATAMVAATSGEVSHFRDARHFASWFGLTPKERSSGGTRHLGRISKRGDRYLRMLLTHGARSVLRAASVARHAGRTIDALRHWALAVQGRSNHNKATCALANKLARICYATLRDGEPYGTARLQKKVTRTAFALPA

SEQ ID NO: 274755 - protein, 462 aa, unidentified
MPRREEREISARSTRPLEGLPVIRASVAGIDLGSERHWVCAPTRDRSGREIASFGATTAELLGMSEWLKTRQVESVAMESTGVYWIAPHEVLEGQGLQVLLVDTRQLARVPGRDKKTDPTDCEWIQRLHSCGLLRGSFRPEEAVCMLRTLVRDKANLVAESGDWLRRMQKSLDQMNVRVHRAVSDIDGATGMAILRAIAGGERDAQKLAQFRDARCKKTEQEIAEQLSGHWREDHVFSLQQALKMYDAVQERIAAYEQEILRKLGEMEPDEPPEPTAPPLHNANKAKMIKKRGQEAKRQALYRMSGVDMTQIDAIGVETVEVVLSEYGPDLSRFPTEKQFVSHVTLAPRVPQSGGKPVKKKKRNSASTRVAAALRMAALSLRHSQTALGSYYRRIAQRRGGDIAIFATARKLATLIYRLLRWGQPYVDEGAAAYENRYRQNRIAHLAATAKQLGYQLTPVTA

SEQ ID NO: 274756 - protein, 322 aa, unidentified
MQQDEVMVGVDVSGTQLDVALWPSGENFSVSNDMQGVEQLLTRMVEVHPRAVVVEATGGLESLLVGELCAAQVPVALVNPRQVREFARSLGQLAKTDRLDARVLAQFGHSAHRSGRLKLTQLLPAADAELKALVRRRRQLIEMLGAETNRRQRASKVVKKSIVATIRSIKRTLAELEQQLRETVKNSPAQQKKAAILEQVPGVGPQLARTLIAEVAELGQLGRRQIAALIGVAPHAHESGQFKGRRMIWGGRAGVRRTLYMAMLTATRYNPLVAPFYRRLLEAGKSKKLAYIACARKLLVILNAMFRDHTTWNPKLELQHSR

SEQ ID NO: 274757 - protein, 468 aa, unidentified
MPALVAMPGSPPVLASHARRLIRTSPRWLIEARRHAAWTLYREEDGQMSRSQRIVGFDCGEDTHSAVLLDTAGKFGKKFEVTNERGQIQELLAELMLVIGPEAELVVAVESKRSHGRVVSDVAVELGCDLRQVNTVALNHFRDLEGQPRKDDDWDAYLAARMVFLEMGGTRKAIVTTEEERTLSRLTRTHSRLVEDRKRNVARLRAVLLELAPEMVHSSWKGPKPGSKAMLYLLERWPGFEGLEKAQLRSIERILRQCRYGSRAADVAELIRKVARGISVAEEERCAITFELDLLVQQIRFCNESVDRLYTKIAHRVERDPVGEKLLEMHGFGPIITGVLISELVPVARTSTEPKCATYAGVTPLSRKSGKSLDNDKLTQGVNQRVLHALYTSSVVAIKNSAIDRAYYEKKLRDYAGHPKPHVAAFIALSRQRHKLVYKLMTTDARYDKEILIAAHLARIEQDRAAAA

SEQ ID NO: 274758 - protein, 404 aa, unidentified
MIFAGVDWAEAHHDICVLNEQGEILARQRIPDSIVGARSLHELLGAHAEEPQDVAVGIEMDRGLIVTALLAAGYHVYALNPMSVARYRERHVTSGSKSDPGDAKVLADLVRTDRHNHREAAGDSEGVDALKVLARAHQSTIWSRQREVNALRNALKDFYPGALRAFGTDLDHRDAVAVLAIAPSPALGRQLSLSKIISALRRGGRTRGLERRAQDIHSALREEQLSERPRVELAYAKVVSAHVAMIRAFNDEIAELESAVSEGFEEHPAAGIIHSLPGLGTVLGARVLAEFGDDPNRYRDAKSRRNYAGTSPITRASGKSHVVLARRMRNRRLADALDQWAFCSLSASSGARSYYDELRARGKTHRQAIRQVANRWVGVLHACLEQGVIYNEDFAWKHRIDLAA

SEQ ID NO: 274759 - protein, 459 aa, unidentified
MAQDGESVEVEETEELVARVAAIDVAKASGMVCTRVPHPAKPGQRATTVWQVPATTNAIIELAEQLACQGIQRVVVESTSDYWRAWLYLLEARGLVVWLVNARDVKHLPGRPKTDRLDAVWLARLNERGMLRPSFVPPAEIRRLRDYTRLRSDLTAERGRQVQRLEKLLEDALIKLGTVATDIMGVSGRAMLEALIAGQRDPKVLAELARGRMRGKRGALVQALTGRFDDHHAELARMLLDHDDALTGQIDRLTVRIQELIGAIPAAQAPGDGAGPTGGGDGGTTGVGAPPPVAQPPLGALDRLDEVPGVGAKAAQVIIAELGLDMGQFPTPGHLVSWARLAPRTIQSGAKHRAGATGKGNPYLKGVLGEVAAAAAKTDTFLGERYRRLVRRIGKLKALVAIARSILVIIWHLLADPTARFHDLGAGYHTSRIDRDHKTRNHVRQLQALGYSVTLTPAA

SEQ ID NO: 274760 - protein, 457 aa, unidentified
MSKVKIKSKTKSVKRVTKAIQGLPVLQANSAGADIGDTQHNIAISDGQGGHIVRIFRTFTTDIENAVKWLQAEGITTVAMESTGVYYLPFYLMLEEAGIEVYLVNARHVKNVTGRKLDDSDAIWIQKLHSCGLLQKCFQPDHDFRTLRTYVRQRKGLISKSSDEVRRMQKALELMNVKIHTVISDLLGKTGMQIVKAIIDGNFNPVELSQLRDPRIQASEADIIKSLQGIWKEEYLFMLEQAYNTYFFYQQQIRECDQKIHAQLVKQIATVNLGDITEVEMISEKKSKPRKNQYSFHVAPLLKKITVVDLCQIPGISEVSALEFISETGVDMSKWKDLKHFAAWLNVVPNTKVTGGKIISSRMMKKKNTAGQTLRMGASCLLNNKTPLGDYHRRMSSKYGGKGAVLASAHKLSRIIYTMLDKKIEFDIKLLVDSQQNYREKRIKQLEQQLARMKNVA

SEQ ID NO: 274761 - protein, 338 aa, unidentified
MTVVTLGIDLAKSIFQLHGVDEHGKVVVQKRVSRSKLRETVAQLPPCLIGMEACASAQYWAREFQQLGHTVKLISPQFVKPYVKGNKNDSRDAEAICEAVSRPHMRFVPLKTVESQDIQTIHRMRSRLVKERTALSNQIRGLLAERGIVFAQGLTRLRQHLPTLLEDEENVLTPLSREVMRELYNELVALDERIAQADRLVQRVFTENAQCQKLAQVEGIGPVIATALVAAVGNAHEFANGRHLAAWLGLVPRQCSSGGKERLLGISKRGDRYLRTLLIHGARATVHRARHKTDARSRWIVRLEQRRGKNIATVAIANKNARIAWVLLTSDAEYRKAA

SEQ ID NO: 274762 - protein, 340 aa, unidentified
MGDITTIGLDLAKNVFQVHAVDVAGSVVLRKRLRRGQVLAFFAGLPPCLIGLEACATAHHWARELIALGHETRLMPPSYVKAYVKRNKHDVADAEAICEAVRRPSMRFVPLKTAEQQSALMMHRARDLLIRQRTMLVNALRGHLAEFGLVEAQGLHKVARLIAIVMDEMDGRVPHIARQVLKVIVSQIEDIQTRIAGLETQVLAWHKSNPVSQRLATIPGIGPIIATAIAATVADPNIFRSGREFAAWLGLVPRQNSTGGKARLGGISKRGDSYLRRLLVNSAHTVLLCSKAAKADPWLTSLLSRKPRLVVAVALANKTARMAWAIMSRPDLYRHAAVAA

SEQ ID NO: 274763 - protein, 370 aa, unidentified
MSELYIGLDVHRKKTVYVIQSADGDVMAEGKTPTHREGIEQMVLKHELEPGTQVCLESGVQAGMVCDVLEALELVPVVVDAAEVRKKARRRGQKTDRRDAFEICDGLRRAIWTSIVYMPPPPIRKLRRILSRRRHFVRLGTQQINAAKFLLRAEGILTEESISLTTQTAWSKLMARSETEALSSHLNLHAQAWALAVTHTRLLEDELLVALDPFAEIMGWLTSMPGIGLVTAASFIAVIGDPRRFADSNHLVSYLGLAPSMYDTGDTQRHGHITKAGPSHMRALLCEIAQQASRPRHPLHPYFVRVAAKSGYKKAAIAIAQRLARIMYRMWLNREHFDVSKLNIERDGKIKTKISHWKIRQPTKMMATAH

SEQ ID NO: 274764 - protein, 418 aa, unidentified
MKKHSKSSQRSEPTLKRTKARGPVQRDAKEVLAEVLGKLTGKLDAPAVSSNVKESRRGNTVGPNRDRLTVGVDLGDRWSQYCILGLEGETLAEGQLRTTQEDVGEFFQAMTAARVVIEVGTHSAWVQDVITEWGHEVLVANPRLMEGSKRRKRKSDRIDANKLARLGRVDPQSLYPIRHRSREVRQDLVVLRARDALVSVRTELINTTRGLVKSMGTRLPRCSSPSFAEKVKDAIPVEVGEALLPLVQLTETVNDCIARYDQKIEELGQKKYGHTTLLRQVKGVGPITSLAYVLTLEDPQRFSSSREVGPYLGLVPKQEDSGDSQPQLGISKTGDRMLRRLLVGSSQYMLGAFGPDTDLRRYGLRLCERGGNNAKKRAVVAVARKLAVLLHHLWVTGDVYEPLHHSGAETRTAQATAA

SEQ ID NO: 274765 - protein, 421 aa, unidentified
MDKERRWFVGIDWGSQEHVVSLYDEDGNKIGQRKFPHGGTGLTDMIAWLLKASGGKPSEIHVAIETPHGPIVEALLERGFVVYSINPKQLDRFRDRFTVAGAKDDSRDADVLADSLRTDMRAFRKLSVADPVIVELREWSRIDEELKVEHVRLTNRLKHQLWRYYPQMLELADDVGANWFLDLFEAAPTPEKAANVREKTIARILKSHRIRRFDAAYVLAELRKRALTVAPGTIEAATAHIRSLIERIRIINGQLADAQRQLDRLCKKLSEPVADENGETTQGQKNEQPDAAILDSLPGVARTILATLLAEAPDPLQHRDYHALRALCGSAPVTRRSGKSCMVVRRYACNRRLTNAAYHWAQNAIQRDPTSRAKYDALRARGHGHARALRSVIDRLLGVACAMLNNGTLFDPEFASKRAAA

SEQ ID NO: 274766 - protein, 424 aa, unidentified
MNQNQSFAAFIGLDKSDKKINVSLQQCAGTRIERSVIKGGAEALHAWVAMLCARFPGQRVAICVEQPAAGLIHALMGYAFVVLYPINPVTLARYREAFTTSRAKDDPTDADFLCELVSLHREQLQAWQPDDVCTRKLRHLTQARRSSVNMRTRLSNQLKALLKTYFPQALELCGEDLTAPMACALLQKWPSLQQLKNARKETLRRFYYAHNARRGQVIEKRLALIEKSVPLSNDPALIESSIITLQALILGLRAVHTANARFDREIARTFNEHPDAPLFAALPGSGTCYSARLLAAFGSRRELFQSAQAMLNFSGIAPVLKRSGQSTTIHRRYARPLFLHQSFIEYANESIRHSLWARAFYQKQQAAKKSHWVIIRALAYKWIRILFRCWQERTPYDELRYLRSLQKCRSPLLQYLVPQTTQPA

SEQ ID NO: 274767 - protein, 340 aa, unidentified
MSNRIVIGLDLAKQSTATAALDGQGREQWRRTFRRQKLLPFLARQAPCIVAMEACAGAHYLARQVDRYGHQVRLYPPKHVKAYQRGQKNDYNDALAIAEAAQHGRLRSVPVKTVEQQDEVLLIQQRRQLKQEQVRLGNHIRALLAERGLVLPKGVAALRRRLPEVLEDGDNGLTPLVRRVLNGPYQRLLAILEELTWYDRELERQTQQDDVRQRLCEMPGVGTVVASVLKAWMGDGRQFRRGRDASAALGLVPCQHSTGGRQVLGGISKRGDRYTRSQVINGAQAVLLYAHRKDDALHRWVVRLQATRGHNKAVTALANKLVRIAWVILARGERYSPRPA

SEQ ID NO: 274768 - protein, 342 aa, unidentified
MSFYCGIDLSARESQICVIDKGVKKVLEVKVPNKLEHIKQLLAPYKADLQIVVESTFNWYWLVDGLQAAGYNVVLAHTLGLHMITAAKVKTDRRDAFALAKLLLAGMIPTAYIYPAETRPVRDLLRRRGWLVQVRAGEYGSLRRLLLRHGILSHKQQEIKQATEEDLEKWFTHELVRLHASQELERIRLYSEQIETLEETILEQAKKARAFEKLQQLPGIGPIIALSIYYEMGELGRFASAKDFSSYCRVVPGVAQSGQMTRRGRGSKQGNPYLKWALSQAAVHAVRCYPGVRRYYERQLQRHRGRARQMVVYNIIAHKLAQAIYHVLKEDSEYREELLFGK

SEQ ID NO: 274769 - protein, 441 aa, unidentified
MEVIHSRCAGLDVHKETVVACVRLALDGKVTREVRTFETTTSGLLLLLAWLTEMGCTHVAMEATGVYWKPIWNILSDGDFELVLANAAHIKNVPGRKTDVSDAAWIADLLAHGLIRSSFIPDQEIQELRELLRTRKQLGRQQSRHIQRLQKTLEGANIKLDSVITDIVGKSGRAMIRALIAGETDPIKLAALADGRIKASPQELREALRGRVRDHHRFLLHLHLQHIEFADAAILDIDRNVAALITRMDQEVEAGRTFQTLIALLITIPGIDVLPARIILSEIGPDMNRFPTAGHLLSWAGLCPRNDESAGKRRSTRLRKGDRWLKTLLIQCAWAAKRKKDAMGPATRVWHHRCCLTTDGAPRETERLKPIPHRLRSGYHFGGRCGTESRQLVGGGSCSPSDPTTIEEAAVRSGCASGIGVAMARPGNQSRRPHQTDCAGI

SEQ ID NO: 274770 - protein, 424 aa, unidentified
MDAKDQNSWEQHRYYMGLDWAKQEHAIAVVDGNGRIMMETTIEHTAEGWHRLREKLVDLAGPDMSLVAATIETNRGPVVERLLELGCTVYPINPNAAQCYRSRKAPSGSKTDRLDALSFADALRTDGHGWRPLNPEDPKTQELRLLCRDEMSLIEQRTTLVNQLQQALHEYYPAALEAFDDWTSPSSWAFLERFPTPQALKKAGKRHWEKFLHTHRLYRPETYQKRLEIFAGATEFCGSHAVTNAKSMLAVSLAKQLRLLEQQLKAYREHIDKLFQEHPDYTIFDSLPGIGEKLGPRLLSECGEDRDRFEDHEALQCYAGTAPVSFQSGQINRVRFRYACNKNLRTTVHLWANLSRKKCAWAQIYYHQKRLEGKSHACALRCLGQRWLKILWKMWQTKMPYNEQMHTRNQIKHGSWVLTLTASK

SEQ ID NO: 274771 - protein, 307 aa, unidentified
MPQTVIGCDLARGWIDTHALPTKVVVRIDNNPNSITRWTASLPANSLVVFEATSGCDTLLIKALCDRGLRFARVNPRQAREFARATGVLAKTDRVDARILADMGRLLPLEVTAPPHPDRARLSDFLRRRRQLVEMRKAEKVRRHSAGQPAILREIETMIALLDRRIVIMDRKIAALIGDSPELTEHAELLRAVPGIGPTVLATLLGELPELGTLCRRRIASLAGLAPHARESGTWRGTRRIWGGRRKVREALYIAALSASRSVPLLIAMRDRMKAAGKAPKTVLIAVARQLLVILNAMIRNKQPIRL

SEQ ID NO: 274772 - protein, 440 aa, unidentified
MSKRAYRATRVNDVNWDQLAQGKDGLDIALGVDVGKYSLWAVCRWADGRFERPWRVQNPGEIPTLLTLLKRVSAGRKLVVAMESSGTYGDALRQALADNQIEVQRVGGKAAHDYAEVFDGVPSQHDGKDAAVVAELAALGKAMPWEYQPADPWEQELAYWVEWMVAHRQMLTIWQGRLEGLLARHWPEATQVLKLSSGTLLRVLKRYGTPQALAADGEAAKLLARWGGAFLAPEKIEQLLAGAGASVGVRLGEWPQRQIQNYAQQALAARQEANRAQRRLRSLAAGHAVLQAQGKVVGVPTACVLWVSTGDPRKYHAAGAYRKAMGLNLVERSSGTYQGRLRISKRGSPRTRQWLYFAVLRLVQKCGVRPWYEAKKAHDEADARRVVVAVMRKLAVALYYVGVHNEEFQPRRLFGRIRRRRDSPGEQKSRTKRRSRAEQI

SEQ ID NO: 274773 - protein, 348 aa, unidentified
MTIYCGVDFHARQQKVAYCDPATGEIQLKDLKHQGDEVRQFYQQLPKPVIVGLEATGSSLWFEKLLAELGHEVWIGHSTEIRRRARSRQKNDWRDAELCLDLMIKCEFPRIYRLSEESFDILRRLRYRHRLVKLRTMAKNGLHAIALSAGLSLRAKLLTKSGRTKLDGLELSPVLQQQRSEWLDLIDQLNRRISRLESEIEQIGKADPRVQLLRTHHGFGPLTALALVHTLEPVTRFSNSRKVTAFIGLEPREESSDDKVRWRGISKAGSRLLRFLLIEAAGIAIKYDEELKRFYSRLLYRRDWRKAKVAVARKLLVRAWIMLRDHIDYEEFLKRGVAVESARTKHRP

SEQ ID NO: 274774 - protein, 337 aa, unidentified
MNYSGIDLHSNNSVVSVIDETDRVVAEKRLPNDLTKILAFLAPWRAGMAGVVVESTFNWYWLVDGLQTAGYVVHLANTTAIKKYDGLKHSGDETDARYLAHLLRLGILPVGTILPARLREVRDLARKRMQLVRSCTSHILAVENITARQYGTRITSNQVKRLDEHAVNQMGLPDNVALAVRANIAVITTLRDQIAIVERRLRKEVARHPDYVLLTTVPGIGQTLATVIMLETGTIDRFANAGNFASYARCVDSQRMSNGKKKGEGNTRNGNPYLCWAFIEAANFAMHFSTEARRFYERKKARTNSVLARKALAHKLARACFHMLKERKPFDVTRCFA

SEQ ID NO: 274775 - protein, 322 aa, unidentified
MASFLGIDVSSLSLDGWVRPQAVRIAVSNNPAGFEELERTLRKFSIKRILLEATGGYERDVLRFLQDAGYKVIRVNPARARKFADSMGVKAKTDAIDAEVLAHYAEVIPDQPTLQISPDRALLRELLMQRDRLVQQRDDDRRRLKQAQSLVVANFLKANLQHFRSQIRLVEQEINQQAAKLNDERIARLTQVKGIGMVTAGKLVALLPEIGRVESREIASLVGVAPFNHDSGKSLGKRFITGGRFEVRRTLYMALLVAVKYNPALKARYEALRGRGKLAKVALVACMRTFIVRLNAMIKTGTPWRDLILPQPAGTTQIEKAA

SEQ ID NO: 274776 - protein, 467 aa, unidentified
MGLRLGIDVACRAAHQASLADEQGEFAWSGHAFRTRAPDLELLWARLPIGTDPADVTVVMEPTRNAWVALAAWFRRQGATVVLVPPERAADLRAYYAKHTKSDRLDSRLLARLPLLHPEGLHAERGLGPGDALRRATKLHSTLVLRRSKSLARLDALLEILGPGWHEVFQGDLANKTPLRFLAAGYADPDTVRRLGRARLARFFARHSRGRWGEAKADELLVAAAETHTLWAGELDYLDLAEDIAIEARLALVLTDEIKDLDERIAIMLDRADPAGIIRSSPGVGAITGAAILGRLGDPTRFSSLAAARSFTGLVPSLDASGQAGRHGGPTKRGDAVLREALFLAADHARRLDPSLAARYHRLMTQAGKHHTSAICHIAPALLTRIIACWRNGETYVLRDVDGRPVDSLEARAIIAARYTVPAEVRSHQVRVHRPSRTGRRGQGSQSAPSADPFGGHAITRTITARA

SEQ ID NO: 274777 - protein, 317 aa, unidentified
MSNKPSIVCAGIDTGKRKLDAAIDGRPDQLQVDNDPDGHRVLSAWLRRQRVKRVGIEASGGYEQAIVRQLRGDGFEVVVFQPAQVRAYATFHLQRAKNDKIDAALIAACTAAAKKIHAPPDPRLAPFAEPLTLIEQLSEDIAHLKTRRESCRDPQNRQFWAQEISRLNKLRSSAVKTLAAAIRQYPDLANRLDLIASVQGIGLQTAIIILVRVPEIGRLTREQVTALVGLAPYDDDSGDRLGARHIAGGRERVRTGLYRAALPAAFRWNPQLIALYQRLIAAGKLHKVALVACARKLLIYANTVVERGTPWVPQSAR

SEQ ID NO: 274778 - protein, 353 aa, unidentified
MKTYYVGMDVHRASIVIVVLNGAGKIVMQSVIETGAERVRGFLKQLRGKVSVTFEEGTQANWLHDVVRPLVTEVMVCDPRHNKLLQSGNKNDRVDAQKLAELLRNGSLKAVYHGDNGVRTLKELVRTYDCLVSDTTRVMNRLKAIFRGRAIACGGHDIYRQDRRGQWLEKLKEPGAKQRAGFLYEQLAALKPLRHKAKLAMVKEVRRQTAYLWLMSVPKLGAVSVAQLIAVVGTPHRFRSKQQFWTYVGLAVVTRSTADHELVDGVLRRSQRPVSTRGLNRNHNHLLKRVFKNAATSACHSGPFKAGYEARVGQGMAPSLARLTLARQLAATTLALWKRGEQFDPERKKQQVG

SEQ ID NO: 274779 - protein, 348 aa, unidentified
MNQVTTIGLDIAKSIFQLHGVDAAGRSVLRRRLSRSRVLEFFGKLPRCLIGLEACASSHYWARELIKLGHEVRLMPAQYVKPYVKRGKNGAADAEAICEAVARPTMRFVDVKTTEQQSIMMLHRVRRILTRQRTQLSNALRSHLAEFGIISPIGREGLDRLLKIVADTDDGRVPAEARASLDMLAAQLEGVKARILENDRRIIANARATEVGRRLLEVPGIGPVLASAFVASVANPAIFKSGRDLAAWIGLVPRQNSSGGKERLGGITKAGNGYLRQMLVVGAMAVIRYAQRDSTRRPWLVQLVSRRPTKVAAIALANKTARTVWALMTSGERYRTPQAIQAAVSAMA

SEQ ID NO: 274780 - protein, 339 aa, unidentified
MWYSGIDQHKRDSVIATYGPDGPRVKQARVANTPFALAQYFAAFPAPHHAVVESTGGWYWLADVLAPLGVDLVLAHATRLKAISAAKVKTDQVDSDVLAQLLRADLIPIAHMIRSEQRGPRDLMRARLRLVEKCVSAQNSIDRLLEKFNVATVAQLDALYQLQAACHQAQIHLLDEQITTLERALHPHLIPNPDVQRLLWIPGLGKVNAFTRYTEIDGITRFPSARQFFSYCRLVPGADNSGGRMRHRSGSKAGNRYLKLAFSHAGIRAVQYYPEIRAFFKAKARRKPIRIARTLVALELARIVYQELTKQEAFNGQFKTHPLSRRKHAQWPRRASPSV

SEQ ID NO: 274781 - protein, 332 aa, unidentified
MDKIYFIGIDVSKKKLDICVMLNSKVVIEEQIVNHTQAIVQAVSRIKDDLEINNDEFVICAEHTGQYTYPLICASNSLSFKLWLENPTQIKYSCGMTRGKNDKVDARRIATYAFRFFDKMKRYKRPTDEVIMLTQLEAERTMYVTDLDKYKTILTDQKDFIPSAIYAPKAKRLKSLIMSLQKTIDALTDKMNEIIRGSKMLNRQMQLLTSIDGIGPVIALNMIIATEGFTKFENARQFCCYAGVAPFAYTSGSSQHSQNRVSLRAAKYMKALLHMAAVAIAHRKGGELKEYFQRKVEEGKNKMTVLNAIRAKLVARMFSVIKNDRIYQPILG

SEQ ID NO: 274782 - protein, 412 aa, unidentified
MKLIRDKVAGLDIHRDTVVACCRVHHQGRRVALTKGTFATTTKGLAELVDWLREASVTTIAMEATGVYWKPVYYSLEGHFEELWLCNAQHVKNVPGRKTDLNDAEWLADVASHGMVRPSFVPPPEIRQLRELTRYRKTQVDMRNQQIQRLEKVLQDAGIKLSSVASGVWSKSAKEIIEAMIAGERDAAVLAQMAKSRMRAKIPQLEEALSGHFGAHHAAVSREIIDHIGYLDATIATLTSQIRFSLSPYEAAFTILCSITGISEITAQVLIAEMGVDMSRFPTPGHLCAWAGVAPASYESAGKRRAAGTRKGGTWLRRSLIEAAHAAVRVKGSYFSAQYIRIARHRGPNKAVVAVANSMLAVAWHLLTNGTLYEDPGADYFTKRHDPIIEAKRLQRRIEALGYEVRVTANVA

SEQ ID NO: 274783 - protein, 343 aa, unidentified
MHIASIGIDLGKTTFHLVALGERSKVLARKKFSRTQLLAHTANLSPSLIGLEACSGAHFLGSALREQGHDVRLIPAQFVKPYRKSNKNDFIDAEAIAEAVTKQNMRFVPIKTEEQLDVQAMHRVRDRLVQRRTALINEIRGFLLERGITFPVQPIHLRKNLPTVVEDAEQNLTPRLRWLRNRLWQEWKQTEIDIETVTDEIERISAEDERCRRLRQIPGFGPLVSTAMVAAIGNGAAFRRGRDFAAWVGVVPRQYSTGGKQKLFGISKRGNIYLRRMLIHGARAVLFRIKYEIAGLGQWVHRLRQRAPRNKVVVAIANKLARIAWAVLSSGKDYRHQTLQPAA

SEQ ID NO: 274784 - protein, 368 aa, unidentified
MESVHGRFASWSSTAVAERGPGRLLCCIVPTAERATDIHARIARKESRMSKTEPVFAGIDVAKNKLDLARSDTDKVVTISNDTHGIKKLVKMLSDMPPTLIVIEATGGYERSALDAMLEADLPVALAQPAHVRHLAKALGILAKTDAIDAKVLVDFARHAEPRLAKKRSKNRVELESLVTCRRQLIKVRTEQRNRLGVTHAACARAAIKAVLETIAEQVAGLDGQIRELIDSDEDMNEPDRIIRSVPGVGPVLSATLLAEMGELGSLAGSKISALAGVAPFNHDSGRMKGKRAIHGGRRDVRSVLYMATVAAIRCNPIIRIFAERLKASGKPGKVVIVAAMRKLLTIINAMLRDRIEWNQLKIVQRLT

SEQ ID NO: 274785 - protein, 341 aa, unidentified
MEYFAGLDISMNETHICVVDRNGKVALETKAPSSPGAIAAELAKAPATKRIVFETGRMAPALYHGLDALGLPVVCIESRQAYQALKLLATHKTDRNDARGLAHLARTGFYKPVHVKSLSAHAVRALIVARKKLVGQRVTLENQIRGLAVVFGVRLPRGLSPAFAGQVINGSGGVAGLSGAMRGLLAARNAVLEAIAAINGDIRHLARSSEACRRLMTIPGVGQVTALAFVAAIDGPDRFRTSRDVGPYLGLVPRRWKSGEIDYTGSISKCGDRRVRTLLYEAANVMLTRYRGDLALRDWALRIGRRSTMRKARVALARRLAIIMHAMLRDGTEFQAARGVV

SEQ ID NO: 274786 - protein, 387 aa, unidentified
MIYVGIDIAKLNHFASALSSDGEVLIEPFKFTNDSDGFFMLLSKLSSFDKDSIIIGLESTAHYGNNLLMFLVPKGYKVVVINPIQTATLRKNNIRKAKTDKVDTFIITKALMINEYRFVTLQDLGLMQLKNLGRFRQKTVKQRTRLKIQLTSYVDQVFPEIQYFFKPGIHHKGCYALLKEAPSPELVTSMHLTHLTHLLKSNSKGHFKKETAVELRVLAQKSVGNGDKSLSIQITHCIEQIELLNAQLANVESEMEDIVSSLDSVIMTTPGIGAINGGMILGEIGDISRFSHPSKLLAFAGLDPSVYQSGNFQAKHTKMSKRGSRTLRYALINAAHNVVKNNKTFQNFYERKREQGLTHYSALGHCAGKLVRIIHKMLTNDIAFNLD

SEQ ID NO: 274787 - protein, 405 aa, unidentified
MFVGDDWAEDHHDVEVQDVTGRRLAKARLDEGIAGIDRLHAMIAEHADEDSDPDHVAIGIETERGPWVQALIASGYRVHAINPLQVARYRERRSVSGAKSDAGDAHTLADMVRTDGHQLRTIAGDSDLAAAIKVVSRAHKTLIWERTRHTLRLRHALREFFPAALDAFSDLTGAEALELLAKAPDPASAAKLTTTQITAALKRARRHHAGAKAEAIQSALRTKHLEQPEAVTAAYAATVRAQLAILTTLDAELKTMQGQVEQHFGQHPAAEIYLSQPGLGRILGARVLAEFGDDPTRYADARGRKNYAGTSPITRQSGKKKIVVARYVHNDRLLDALGRQAFAAMIASPGARAYYDQLRDRGVGHHAALRQLANRLVGILHGSLKTGTNYSENTAWSQHAEPVAA

SEQ ID NO: 274788 - protein, 350 aa, unidentified
MAMVCGLDLHRGQITYDALCEETGEIFRGRLWSPDRARFRSWLATEVAPRAEGAPVKIAVEGCTGWRYVIEEVQAAGFEAHLAEPAETQAARGRKKRAKTDRSDAALQRMLLASGELPDSWIPPTIVLEWRERTRLYKTLADERRMWIQRIHAELFQHGVAVPEAAITASETKQWLMGDDVELSPAGRQRIGVGYKMIAAMEHEVVELRDQLRRFSAKQPACRTLCQSHFGIGPLTAVVSWAELGDCRRFSRSMQAVRHAGLDVTVHASDLHRSGGFLSREGPATLRWALFEAGKCASRIQSPDYAYYQAVRGRHGGKVAALAVARKLARRCYHTLRAIDPELVYAMPGS

SEQ ID NO: 274789 - protein, 387 aa, unidentified
MIYVGIDIAKETHVAAAVDSDGVIVIEPFSFSNNHEGFKLLKSKLDSLDKSNLLIGLESTAHYAENVIFFLHGCGYELAVINSVQTAAMRKTGIRKTKTDKVDSLLICKTLMVNSFRRYTENDIKTLKLKSLCRFRQNLKKSKARLKIQLTSYVDVIFPELQYFFKSGLHIKSCYELLKVYSSPDDIAALHLTKLSNILTKASRGRFGKQDAESLKSLAKSSVGVKNTYISIQITQTIAQIELIESQLNELETVIETAMDELDSVIMTVPGIGKLNGAMILGEIGDIKRFSDSSKLLAYAGLDPVINQSGKFNAKRTRMSKRGSKILRYALINAAWNVSLNNDTFKRYYDSKVAQGNSHYSALGHTAHKLVRVIFKLLNDNITFALV

SEQ ID NO: 274790 - protein, 343 aa, unidentified
MDQYIGLDVSLKETAISIRQDGKRIWRGKCASDPKLVAEMIRKHAPHAKRVVFETGPLSTWFYHGLIKEGVPAICIEARHAQKILNETLNKTDSNDADGLAHLAEAGFYKAVRVKAFDSMLTRTLVAARNQLLNISTQLSNQIRGVMKTFGLIVPKGTGRVFDGNVRQLLDGNDGLAKIILPLLEAWHGIRMRAANLDRQLVAAARESQATKRLMTIPGIGAVTAISYVAAIEDPDNFKTSRSVGAWLGLTTRRYQSGEVDYDGHISRRGDPYLRALLYEAATVILTRTGARNESSLKSWGLKLRERLGFKRAAVAVARKLAVIMHSMLKTGDVFDRSAGAAA

SEQ ID NO: 274791 - protein, 403 aa, unidentified
MLFVGVDWGERHHHLCLLDPDGSVLATHRVGDGLAGVGELHGLVAAHAEQPGQVAVGIETDRGLLVAALLAAGYQVYAVNPQVVSRYRGRHGSSRAKSDRGDAKVLADLVRTDRHNHRQVAGDTPLAEAVKVLARAHQSLIWARQRHVNALRSALREFYPGALAALGAQLAEPEALAVLQLAPTPGQGRRLTRATVRRALVGAGRRRNLQTRVVTVHDALAAPQLAAPAPIQAAYGEVVGALVAMLGCLNQQITALEQQLAARFAAHPDAAILRSQPGLGMVLGARVLGEFGDDPARYQTAKGRKAFAGTAPATRSSGLRTVVVARAACNQRLVDACYLWAFAALSASPGARRCYDAHRARGATHHQALRALGNRLVGILHGCLTHRLAYQEQVAWPAAEPAP

SEQ ID NO: 274792 - protein, 327 aa, unidentified
MIQSVVGIDVSKDTLDVVLLKAETNTYASFTNNPVGFGKLARWLISQGAGQVHACLEATGQYGDGVAEYLYQAGHMVSVVNPARIKRYGDSKLHRNKTDKADAALIAEFCRKEHPALWTPLPAYLKQLRQMVRRLEDLQANYQQEHNRLSSGISDTWVVEDITDHLKELSKRIKALQKAIFQVIADTAELKEQFDLLLTIPGIGKLTAARLLAEMGDIACFEDAPQLAAYAGLNPKGFRSGSSVHKKTRISKEGRALLRHILYMPAIVACKHNPIIHTFCDRLAQRGLPKMAIVAAAMRKLLHLVFGILKHKQPFDPNYLLQPSFTS

SEQ ID NO: 274793 - protein, 330 aa, unidentified
MNQQGWVANRGHRPNAGVDVSKLHLDVCVETLQQRLTNDPNGWGELIAKLKELDVDLVVVEATGGYERGVVIALQEADVSVARVNPRQARDFAKSMGELAKTDKVDARMLRDFADVLARHKDRAKYITPMMDTIRAELAALMVRRRQLVDMRVAEENRLEQANARTVRSIRNVIKTLDKQLTAIDQDIEDHMDHHFKQQRSLLDSVKGVGPVTIMTVTAALPELGQLGRRQIAKLVGVAPLANDSGPRNGKRAIWGGRSEVRAVVYMATLSAIRSNPVIKAFHGRLIAAGKPKKVAIVACMRKLLTILNAILRDRSEWDATRHLQSPQNA

SEQ ID NO: 274794 - protein, 394 aa, unidentified
MPELFVGIDVAKDTSSAQGIDRNGKGRFSLTFAMDSEGFMQLWKAITAHRKDLLEVSAAVESTACYHINLYTFLTAKGISTVVINPLLIANFAKLSLRKTKTDKKDAMSIAQFLLVHRETISQLSLSQDLQDFRDIARERESVGNLLSAHKVEIKRLLQSTFPELERIGDLSTRVMQEFIAAFPSARLVKAAKPKAIQKILQRKGVGTRLTYTAEDLIQAAKQSVATISPAKELILQGKVRTHEHLRERYEELTKILTEYCKSSMLEDFEIITSIDGISKCTATTFLAEIGCIGNYASYKKLIAFAGIDPTVYQSGKFEGSSRISKRGNRHLRRVIWLMTTCVLQHNATFRAYFMKKRSEGQPFKKAVFATAHKLVRVIFAMLTQRTMFREVCA

SEQ ID NO: 274795 - protein, 450 aa, unidentified
MSRRPQVIIDEDHERVHDRVAAIDVAKDSGVVCTRMPHPSRPGARASTLWTVQARMGAVRALGARLKADGIELVTLESTSDYWRIWFFVLEACGLAVQLVHAAQAKNLPGRPKTDKLDAQWLARLTEMGLLRASFVPPAAIRELRDYTRARARLVRERTRCWQRLEKLLEGALVKVSAVASKLTTVSARDMITAMIAGQRDPEVLAGLARGRMKARHDDLVAALDGMFDDHHGELAGMLLDQIAFLDERITTLAARAAELTAAMPAAWGINADGSTGPLAGAGPDAAVPDAVTRLAAIPGISPDLARSIIAETGLDMTRFPTAGHLVSWAGLCPSARQSGPRTRPGTKGRGDTWLRGALGQAATGAARTATFLGERHARIARRRGKAKAQVATARSILVIIWHLLADPTARYTDLGPGYHAARTDTDRKIRNHIRQLQALGFDVTITKTD

SEQ ID NO: 274796 - protein, 329 aa, unidentified
MKLQHIIGADLSKKSIDLVCHLLITHIEIENSIAGFKNLLQWLQQQKVNPSETMIVMEHTGLYSFCFENFLHKHQIAFCKVNALAIKRSIGLVRGKTDKLDAARIAAYGYEKKDKLAIDVPVSDVLKRLQMLHSTRDRLIKQRVALTCAVKEYRHIGIPEKDIIMQTQLRLIKNFDKQIEKLMAEIEAIINEQEPLKQNFHLLQSIKGVGKILALTAIIKTHNFTRFANARKFACFCGTAPFEHSSGTSIQRKARVSHLADKQMKTLLDLSAKSAIQYDKELREYYLKRTECGKSKMSTINVVRNKILYRMFAVIKRQTPFLENYLQAA

SEQ ID NO: 274797 - protein, 369 aa, unidentified
MDVHSTNYTLCAMEPIIGEDDRIFATVDVTPDYKNILMFIENLKMKLGVDNQYDIQCGYEAGCLGYSLYNQLTSANVKCVILAPTTMLTPQGTRIKTDARDARMIAQCLSYGGYHAVYVPTEDDDSVKEYIRMRDDHKTALKKIKQQISALCLRHGHHYTQSKWTVAHWKWLKQLELSALYREVLNEYMASYEEQTAKIERFDQRIEELASQEQYAEKVKKLGCFLGIQTHTALSLIVETGDFARFAKGSIYAAYLGLAPGEDSSGTKTNRTGLSKAGNSHLRQLLIESAGGICKGAIGHKSKALKARQNGNTAEVIAYADKANTRLRSRYYKLIRHGKARNVAVAAIARELACFVWGMMTENISKKTV

SEQ ID NO: 274798 - protein, 495 aa, unidentified
MAVDLEREKVAKARTPLERLQEFLQTGPDLAINSSKESYMPKPRDKANRVRTVSKQELENLPLLNPDAAAIDIGSAQHLVAVPPGRDTESVRSFGAFTADLHALARWLKQCRIRSVVMESTGVYWIPAFQILEQYGLEVLLVDARAAKNLPGRKSDVLDCQWLQRLHSFGLLSGCFHPAAEIVPLRAYLRLREELVRAGSQSVQHMQKALFEMNIQLANVISDITGETGLAIIEAILAGERDGKKLAQLKHRRIQASKETIAKSLEGNWRVELLFALQMALDTYQFYQQQIAACDQRIAQALAKLPTRQPAAQSEPASQTDQSLKAQKLTPLQAELIRIAGVDLMRIDGIGEQIAQVILSELGTDLQSNFKSEKHFSSYLGLCPGTKISGGKVLKRKSRKVAHRVATALRLAARSLHSSDSALGANFRRLKARLGAPKAITAMANKLAKLVYRLMVYGKDYFDTGAQRYEQKFRLQQIRRLQKQAKMLNLKLVPV

SEQ ID NO: 274799 - protein, 346 aa, unidentified
MFTVGLDVHFDKSSLCVLDANGKVVREQQVRGHWDQVVQELGKLKEPFRICYEASIGYGYLFENIGKLPRARQVLVAHPGDLRMIFKAKKKKDRVDARKLATILYLDQVPQVHVPRQEVRSWRAMIQWRRKLVASRASIKNQLRALLKTFGIAPWKGKKLWSRPGIAWMQEQALPTISDQLRREMLIEELKEAGRRIKLVEEKLGEIAEQHPGVKLLMTIPGVGQRTAEAFVAYVDDPARFGNIRQAGAYFGLVPCQDASAHMNRLGHITKDGPSAVRQLLVEASWQGILRSGRIKAHYQQIVDKKPERRKIALVATARWLSTVMLSMLKSGQCWREEEQTIIKPA

SEQ ID NO: 274800 - protein, 455 aa, unidentified
MAQRNRSVSLKPAKSRAALTITHPNAAGIDIGNAAHYVAVPPDRDDEPVREFPSFTVDLNAIADWLKVCGVDTVAMESTGVYWIPLFELLESRGFTVLLVNARHVKNVSGRKSDVLDCQWLQQLMTYGLLSGAFRPTEQICVLRSLWRQRVMLLRSQGRHVQHMQKALTQMNVQLANVISDVVGETGQKILRAIIAGERDGQILGAMKNARIRASIDEIAKSLQGNWRDEHLFALKQAVDTFDFIGKQLAECDREIEQQMQCLQAYEGEPAKGKQRGRTRNAPKFDLRTQLFKMCGVDLTRIDGIDVTTALAVISETGTDMSRFPTVGNFTSWLGLCPGTKITGGKVMSSKTKRVANRAAQALRLAAAALRSSQSALGAYFRRMCARMDKAKAVAATAHKLARLVYTMLTKGEEYTDQGQDYYEERYRARVLRQLSLRAQKLGMTLVATEQPEPA

SEQ ID NO: 274801 - protein, 544 aa, unidentified
MTTKVEIGKKRTKRRSKAFAQAVLGRPSGVIQPRVQAVGPERFTIVSVDCAKDRSKWIMCDFYGKVLVNPTPVEHRSSDLKAMVLLIKQTMDAHGIKDLICCVEMTGIYHQIVSRTLRSAGYETRLVHPFASNHYRMAESGDIKTDDKDLVAIHRASVNGFGLIEHEWSEHYQSLKLLTRHRRDLVKKRAKLQSQIRVRLESCLPGYAGLFPSTDLWDHEIGQMVLQFIADHGGTSRALLDAGIPGLTKWLKEKQCSFQAKSVARILAWASNAVKGDPLHPLITRLWQQLLVDWRQKSQQILEVERETAGLLAQTPWILLLSHPGINVVSAAEVAGETGPIEHYASAKAITGRAGLFPSRYQSDGVDRGGKLSRFRNGKMRGAWMLIADNLIKCNEYWRGKYQFWKEQGHDPRDIRCRVANRVTRTIYQIVAGRKLFQHPSRLDRGYVLGKLLDFHRKHQTPMDVVLADLKTATDQLPKSAYAEEAKPLNDIRSKTVRSRKKEPQQLGSLLVHVLAKLGVTNQPPEVNSTSLEAPVAESGESDR

SEQ ID NO: 274802 - protein, 395 aa, unidentified
MFIVGIDIAKRSHEAIIIAEDGQVVRKAFSFRNNCTGYNLLLEQVRRLTLIKSQIVFAMESTAHYWLALYARLLKDGYAVMVLNPIQSHSLRELYIRKAKTDARDSLIIADLVRFGRCKASNVPQDKILALRELCRSRAYLVDMAADLKRKLIALLDRIFPEYESLFDSVFSKASIAVLSKYSTPQKVKNANLRKLTDILMESSNGHFGEWKAHQLKEAACSSFGIDDSGGVYSTLLGMFLEQILSLTAQADSLEKQISVFFQEFNNPLTSIPGVGTVLAATILSEIGDITRFSSADKLLAYAGLDPSVKQSGEFKSNQNRMSKRGSPYLRRAIWLASTVAVHRDPMFQTYYEKKISEGLHYMNVIGHVSRKMTAVIFAVLRDGQPYQPILQSAG

SEQ ID NO: 274803 - protein, 428 aa, unidentified
MNCNTQNAKIASITEKTLIVGIDVGSETHYARAFDWRNYEYSKKPLEFSNTEAGFLTFKAWVEDIAEKHGKTAVIPGMEPTGHYWFALGKFLQDNGMKPVHVNPHHVKKSKELDDNNPNKNDRKDPKTIAALVNEGRFSYPYIPTGIYAEIRSLSNLRFQTQEELTRIKNRIARWFSIYFPEYKDVYGDLKAVSGRMVLKVAPLPEDIRKLGAEGVNRIWRDAKLRGAGMKRAKTLVSAAEHSVGSKEAPEAARIELKNLLNDMDVYASRLEELLQDIEEKLKEIPYVDKLMSIKGIGLVTVSGFIAEVGDIGRFDNPKQLQKLAGYAIVANDSGKHNGESRISYRGRKRLRYVLYEAAISLIGKNAEFREIHEYYRTRKENPLKKMQSVVAVACKILRIFYTILTKGVDYDAEKLMSDIRRPKIQAA

SEQ ID NO: 274804 - protein, 325 aa, unidentified
MQDKSILGIDISKKTFNICLLTDKKERHKVFQNNHGFEQCLGWCKSHGAIKLWFCLEATSWYGEELSEYMVHLGHTVSIINPARIKAYAQSKGLRQKTDKADARVITDFCRVHQPPTWNPPSKEERYLRDLCRSLEALKESQRSVANRLENTRLHEHVRDSLAAIMDAYNQEIKSLEKKIKDSVNQSLDLKGKVDFLTQIKGVGFLTAITLLTEIPNIKNFENVREYVAFAGLNPRQYSSGSSVRGKQRISKIGSQPVRKALFMPALVIKNKNPHFSDFCNRLTTKGKCAKVIIVAVMRKLMHIIFGILKNNTPFDHTLAFRGEA

SEQ ID NO: 274805 - protein, 375 aa, unidentified
MKKRSSDDKVVVPSKTKSSKERPMNTSKYIGMDVHMATTVIAVLNSVGETVAEAVVETKASTILDFLKSQRGTVHVTFEEGTQAAWLYDLIRPHVAEVVVCNPREVPAQDNKADKSDAKRLAELLRTNGLKAVYHGEHGTQALKELSRSYGAILSDSTRVKNRLKGVFRGRGISCTGTNVYSKKGREQWLRKLDNSAVRSRISKLFKELDCLTELRNEAEKELLAEARKHPATKVLRSIPGIGPVRAAVILGFTITPHRFRTKSQFWKYCGLAVMSEITGEYAVIDGRVVRSRKKPLVRGLNINYNHALKEAFKGAATTAAMGAWKSHFDALVANGTRPSLALLTLARKIASIVLAVWKRGELYDSKKMKIMHAV

SEQ ID NO: 274806 - protein, 312 aa, unidentified
MTSEKFVGIDVSKRWLDVQVHEDGQAWKVGNDPDGFAQLITRMKKIEPTIIVFEATGGYESHCVKALSEAGLRVAVVNPTRVRRFAEAIGILAKTDKIDAKVIARFASVVKPLAKSRQTPLEEQLAACVERRRQLSGELTTEKNRLSTSPDLMRSDIEEHIVWIDDHIKKLDTQIQACISQKTEWQERAEIIDSVPGVGPVTASTLVAEMPELGLLNRQEIAALAGVAPFNKDSGPKRGKRKIFGGREGVRRTLFMAALSAAKCNPIIRPFYESLLKRGKEKKVALTACMRKLLVIINVMVRDGKQWKYLPA

SEQ ID NO: 274807 - protein, 406 aa, unidentified
MPVYLGIDWSQVKHDAVFLNEAGAVLAHLTLSHRPEGFLQLDVTRQQLGVEAPECLVGLETAHNLLVDFLWDRGYRQVYVLPPKMVQRSRERYRQSGARSDLSDAFVIADVLRTSRARLQPWFPDSLLTRQIRAKVSFIQHLTHTAVRLSNRLQAVLSRYYPLALQVFSEPTGQIGLHFIQCYPTPQEAAELTLETFRDFGRQYRYTRRDALVRSFSHLQASYPEASPETAQIYRQEVVLMAGLLLGTAEAKKAALRDLQVLFRQHPDVEIFASLPGVGDILAPSLLAKFGDDRARFPSPASVQALAGTCPVTKSSGKRTIITFRYACDREFRQIAVQWARCSLGESVWANAYFESVRPHCRSLSHAYRCLANRWLAIAWKLWQTRVCYDEDYHLRQRAIRTVPRA

SEQ ID NO: 274808 - protein, 310 aa, unidentified
MDIIAVGIDVSKDRLDVAVDPDGEAFVVERNGTGLQQLVARLKQLAPTIVVLEATGGFETVAAAAVGGAGLPIAIVNPAQVRAFAKALGRRAKTDPIDAAVIARFAAATRPEPRPLPDEATQLLSDLVTRRRQIVEMIGAERQREKRAASRHLKKSIARLIKALEKELVSVDTDIDDAVRSSPAWRETEDLLASVPGVGPIIARTLMADLPELGRLNRKQIAALAGLAPYTRQSGQWRGKSFIAGGRQAIRTALFMGAMTARRHNPVLKAFFDRLVAAGKPKLVALIAVARKLLTILNAMLRTKTPWQPA

SEQ ID NO: 274809 - protein, 360 aa, unidentified
MAKARSLVGLDVHATKIVAAVLDVETGQLQCFTMTGESAKAAEFCAGLPRPVRAAYEAGPTGYGLARELATRRVECVIAAPSKIPRGSGDRVKTDRRDAEHLVRLLMAGKLHAVRVPGPEEEALRDLVRARESVRIDLMRARHRLSKLLLRHGHRFDDGNAWTDRHRQWLSTICLSWPAAQATLLDHRGAIDALAIRRDQLQREIVTLLPSCPWRVQVGRLRCLRGVDTLTAVGLCAEIGDFERFAKAEQLMSYIGVVPSENTTGQHRRLGAITKTGSAHARRLLVEAAWHYRPRPNVGKTLTDRQHDQPQAAIAVSWHAQLRLHRTWTRLEARNKRRTIIAVAAARELAGFCWAITQIE

SEQ ID NO: 274810 - protein, 427 aa, unidentified
MSETKSLEIRVSVDVGSRSHQVAIGLSSGEVLEEFEIAHRVEGFEDFFSRIERHRKGNSYRVAVAMEGFNGWARPLDSMVRGRGYRLYNINNLKLARFKEIFPGAAKSDRIDARKGLELFQLRDHLPLAKEVLQEVVGTPHENEVLKRLSRRRRRLVDERVRVVNNLQADLQAVCPGLLEITKEAGNQWFLNFLISADTLPQLARLRRTTLLKIPSVGVKYARLIQDWQERAHFSEEVEWVSAMIQEDARRILELDETIKALEVKTAEVAETSTIAKLLRSIPGYGAICTSELAGEIGTIERFNKEGSLALYLGMATLDNSSGKYQGTKRPKHINTRAKAAMMTALDRHRKYVPQSQKYYEKKRAQGKSHNQAIRALGRHLCRIIYKMLKEKREYEVRPLKRDTQAKVTSRSSRIGQIGKKKISAKG

SEQ ID NO: 274811 - protein, 341 aa, unidentified
MEQATTIGLDIAKHVFQLHGADAAGHVLFRKRITRVKLLSFLAAQTRCVVAMEACAGAHYWAREIAKLGHHVRLIAPAYVKPFIKRQKNDAADAEAICEAAQRPSMRFVPVKTEEQQANGIVFRARDLLVRQRTQCVNALRGHLMEYGYVFPKGITHVEALVALVEDLQSSLPDSVRVILKLLVDTFTALEAQIAVLDAEINQRSKSDPTARRLMTIPGVGPITSTAITALVPAAEGFPAGRDFAAWLGLTPLQKSTGGKQKLGAVSKRGERTIRRLLIIGASAVVQQASRRGAPKGSWLAQMLARKPKMLVTVALANKMARIIWALLVKGGTYRTPAAAA

SEQ ID NO: 274812 - protein, 448 aa, unidentified
MPYSNLALDADRQNGPAARSFAADAHDCIMVRIKRSYRIQILCSGATNSGNSMSPTTEPKEQSMDHSATLCVPDPTGIPGDCAILFASLELSRSTWVATSLAPGSKKMSKHTLVGGNGRELLELLARLKTRAEQRIAASVKVVTIHEVGLDGFWIHRLLDANGVDSHVVDPASIAVPRRHRRAKTDAIDGETLLRTLIAWQRGEPRVCAVTVPPTPSEEDCRRISRERAALLRERIRHTNRIRGLLFGQGIANYNPLNKNRRECLEELRTGDGRSVPARLKAEILREIGRLELVLRQISEVEAERDQMLRLAEASSPTALLKLKGIGAEFASVLYLEGLFRHFENRRQLAAYAGLAPSPWKSGSIDHEQGISKAGNPRLRTTMIELAWMWLRYQPDSALSCWFRQRVGSERGRTRRISIVALARKLLIALSRYVTHGEIPAGAVMKAV

SEQ ID NO: 274813 - protein, 347 aa, unidentified
MRDDMYYIGLDVHKRTISYCVKDAAGHVHQEGKIGTTRRELDAWIKTLPQPRTIAMEATIFTGWIYDHLLPHAEKVKVAHPLMLRAIAAAKKKNDRIDAGKIADCLRCDFLPECYMTSTAIRDRRRTLRYRNLVLKQMVQMKNRISGLLMETGVSYNKQRLHKLGYFTELMSGNEEVEESIRPLLKLSRETIVRSQRLDYALVSSLERDPLLAERLKRLRTIPGVGPITALTWALEIGDVSRFQSVKQAISYCGLCSAERSSADKLVRMPISKQRNKHIQQTLVEAAKLAPRYSHELALVYERERQRGNRNRATLAVARKMVAYMLAVERRKQDFVLTGKFSGTAAA

SEQ ID NO: 274814 - protein, 496 aa, unidentified
MGCCALEGGDAVSAIPIRNLMNCAAQPFRWRQQEELEMNPKRSKSRHGRKMPMVHPNAAAIDVGATMHMAAVRADRTPEPVRSFGTFTADLHRLVDWFTQCGVETVVMESTSVYWITVFELLDARGFTVFLVNARDAKHVPGRKTDVSDAQWLQRLHSYGLLRASFRPKGQIAELRSYVRQRERLLEYAASHIQHMQKALTEMNLQLHHVVADITGATGLRIIRAILAGERDPQALAALRHYSCHSSAETIAKALTGSYRAEHLFALEQALALYTAYREKASACDVRIEAVLKELSIHRGRDHGAVPPPRRRHRTDQVNALAFDVRAALFALLGKDITAIDGLGAYLSLKLIAECGDDLSSWPSAKHFTSWLGLAPSNKVSGGKMLSSRTRRSGGRAAALLRLAAVAVGRTDTALGAFYRRLSSRIGKAKAVTATARKVAVLFYNAVRHGMEYVDPGASSYETRYRTRVVNNLHRRAKAFGFLLQPLEPKAGAAVS

SEQ ID NO: 274815 - protein, 456 aa, unidentified
MKESELSMKVVNPHAAGIDIGSKTHWVAVDQIPVNVREFGVYTRDHQRLIDHLKFHQISTVAMESTGSYWQTLFHALQKAGFEVVLVQGSQTKNVKGKKTDILDCMWIQKLHTLGLLSSSFLLSDYLQTLRTHYAHREHLQEQTAMYINKMQKALRLMNIRLDVAIRDITGKSGRAIVEAILAGHRDPDYLASLAHFRVKKSQQEIAAALHGNWREDLLFELRSCLKFYDAYKKEILVCDQEIQSLLSDFVQEADLSALENRSPDKLNHKQVNRNSPSFNVRQLAFAHLKTDLFQIPGVSHSTVLCLLCNMGNDIKRFSSAKRFASWLRLVPNNKLSGGRLISSRTPKGKNAIALALRQAANSIGNQKEHPLTPFFKRIAYRKGRHAAVTATARKLAVIIWNMITKAQSFFKPSPELLIEKRKHAQVKNIKLRLFRLNLSEIEMAELFQKTSYPST

SEQ ID NO: 274816 - protein, 460 aa, unidentified
MNPKRSKSRNGGKMPMVHPNAAAIDVGATMHMAAVRADRAPEPVRSFGTFTVDLHRLVDWFTECGVETVVMESTSVYWIPIFELLDARGFTVFLVNARDAKHVPGRKTDVSDAQWLQRLHSFGLLRASFRPKGQIAELRAYVRQRERLLEYAASHIQHMQKALTEMNLQLHHVVADITGATGLRIIRAILAGERDPEALACLRHYSCHSSAETIAKALTGSYRAEHLFALEQALALYDAYQEKAFACDARIEAVLKKLSIHRGHGHGSAPRASRRRNRTDQANALAFDVREALFALLGKDITTIDGLGPYLSLKLIAECGDDLSSWPSAKHFTSWLGLAPSNKVSGGKMLSSRTRRSGGRAAALLRLAAVTVGRTDTALGAFYRRLSARIGKAKAVTATARKIAVLFYNAVRYGMDYVDPGASSYETRYRTRVVNNLRRRAKAFGFVLQPSEPKVGAAVS

SEQ ID NO: 274817 - protein, 335 aa, unidentified
MNEFWIGVDVSKRKLDVACLDVRDKIKSRVFTNDAAGHAALKIWLVERGACIDITHICLESTGPYSEPPAIVLTDAAWKVSVVNPARPKAFAETTGVRNKTDKSDAALLARFCAKMAPDLWQPPSIEQRKLRALVDRLQALKDMHLQESNRLEGQELLAQEASIKSIHEHLAWLDARIAELKREIDDHIDSNPTLKGDADLMTSVPGVGNTTVAKVLAYVGDLRRFSSAKALSAFIGVTPRQKQSGTSVRGRTMISRAGHAQLRAALFMPAMVALQHNPAIKAFGERLGNNGMARKAVVAASMHKLVHLLYGVVRSGLPFDPIRARPRIDIQVSI

SEQ ID NO: 274818 - protein, 385 aa, unidentified
MQTPNDLSQSRIVLKQDSTLIAVIEMSLSSWLVAGMVPSVERQPLKKLPIDENALLKLLHRWREEAEKAGRKIERIAVAFEAGRDGFWLARWLRARGIEAHVIHASSVAVSREHRRAKTDRLDAELLKRAFLGWLRGERDHCKMVAIPTIEDEDAKRPNREREGLVGEQTRIINRMKAALSRLGIRGFNPKMKKAAQRLEDLRTPADEPIPPNTLAELRRDMERRRLISEQIRQIENARLERIEHAPRHGPHAMVRVLARVIGVGIETADMLVQEALSRNMRDRRAVARYAGLTGSPDESGTRRREKGLARSGNARVRRGMIQLAWRFLMFQKDSALARWFRARTENARGARKTMIVALARKLLIALWRLVREGVVPDGVVLRPV

SEQ ID NO: 274819 - protein, 361 aa, unidentified
MGMRRIIALDLGKFKTVACVMNAVDRSHVFETIEMSPAAVHDLLSRHATDDPADTLVVFETCCCGWVYDLCAALGLAARVVAANTEAWQWRRVKRKTDRDDALKLAKLALLDQLTIVHMPSPVQRQKRRLILHRRSVVARRTQSRNAIRSIFSQQGIALVRGTKQWTKAGIEQLRQHAKPLADCNDVIDLWRGRLHAELQLMADADAQLKIFDQTLDALAASDKRVQLLQTIKGVGPRVAEAVVMHLDDPHRFSSAEHVASYAGLVPKQIESGEMSRFGHITRRGPSLLRSMLVESAWVVWRHNPWAQAWVNKISRGSRARRKIAIVALARRLLTILWAMLRDNKPFRVPGGPPLTLSLTT

SEQ ID NO: 274820 - protein, 344 aa, unidentified
MLMVKSVVGGVDTHADAHVAAALDSNGGVLGVESFPADQAGFEELLGWLVGFGAVSLVGVEGTGSWGVGLARFLAAADVAVVEVDRPNRQARRKVGKSDPTDAVAAARAALSGAASGVPKSRNGPVEQMRVLLVAKRSARAQRIQTLNQLRHLVFTGPESIRSRFKDRYKTGLISEAAGMRPRNGSDPVTFTTNLVIRGLARRIQGLNNEMATLDAMLGELVTETAPSLLELYGVGVDAAASLLVTAGDNPDRLRSERSWAHLCGVTPIPASSGKTIRHRLNRGGDRNANSALYRIVLTRMSSHPETRRYVARRRAEGLSSLEVIRCLKRYVARQVFKELPRTA

SEQ ID NO: 274821 - protein, 341 aa, unidentified
MQITTIGLDIAKNVFQIHGIDAAEKVVVRKQLRRGQVMKFFAALSPCLVGMEACATAHYWARELTKLDHEVRLMPARDVKAYVKRNKNDAADAAAICEAVRRPTMRFVGVKSAEQQGRLMQHRTRDLLLRQRTQLINALRGHMAELGMVAAQGREGLKTLLEIIAKDADERLPIDARASLIVLAAQLEALQTMIGAIEKRIVARHRANEASKRLASIPGIGVLGASAITATVTDPSAFGSGRDFAAWIGLVPRQDSTGGKQKLGPISKQGDRYLRRLLVVGAHSVLRRAKQSPQNYPWLTQLLARRPFKVVAVALANKMARVAWALLARGGTYRVPQLAAA

SEQ ID NO: 274822 - protein, 352 aa, unidentified
MNSLTDLREVVDVIVGVDTHVHTHSAAVVDARTGAVLDEITVEATADGYAELVDFAEAHAVLRAWAIEGTGSHGAGLTRHLERRDEVVIELDRPERARRRNGAKSDPLDAVRAAREALARPRLGTPRTSGDRQALSVLLAARRSAVNAAGDAQRQLFNLVIAAPEPIRERFRGQKVPAMIKTAAGLRIHSSWDVEAATTVTVLRALARRTHDLTAEASAHERAIASIVRSWRPDLLEEFGVGTIVAATVRCAWSHPGRIHSEAAFAMLAGVAPVPATSGQVTNRHRLNRHGDRQLNRALHTITLCRIRYDQRTRDYFDRRTAQGKTPREIKRCLKRYIARDLYRLLEHPSTT

SEQ ID NO: 274823 - protein, 484 aa, unidentified
MPEGIVQREGEEMARAARRQGGSQLRKGHSKGARSAQLEQLNLNAAGIDVGADAHWVAVPPDRDERPVQCFGAFTADLYALAEWLRQCQIETVVMESTGVYWIALFEVLEERGFDVKLVDAHYARQVPGRKTDVKDCQWLQELHTYGLLHAAFRPDDQVCVLRSYLRQRGVLVASASRAVQHMQKALEQMNLKLTEVVSDITGKTGMEILRAILAGERDPQRLALYRDRRCKHDQATIAKALEGHCRAEHLFALQQALEQYEFLQQQLQACETQIEACLLTFVTHVEVDSPPPAPARKRRSRQRHAPGFDVQVYLDAMTGVDLTQIDGIDELTALKVISEIGLDMTRWPTGKHFASWLGLCPGNKLSGGKRYRMRSKPTANRAATALRLAAQGLVNSHSALGAYYRRMRTRLGAPKAITATAHKLARLVYSMLRYGTAYVDAGQQAYEQKYRDRVLTNLQRRAKAFGYQLVHVEDRDGGVASTL

SEQ ID NO: 274824 - protein, 479 aa, unidentified
MTPPKDFCLDPGPPAPTPTFPPSPVLSDALQICHPHAAGIDIGEAEHWVAVPPGCDPQPVRRFGTCTVDLDALADGLIDGGVTTVAMASTGVYGIPLFELLEARGVQVLLIDPRQAKRAPGRPKTDRLDCKWLQRLHAYGLLAGAFRPEDQVCVLRSYLRHRQMLLTSAAHHIQHMQKALQQMNLKLTQVVSDITGVTGMAIIKAIIAGERDPQRLAKLRNPHCHHDADDIAKALQGTWRAEHLFALRQAVELYEVYHQQMAQCDQQIKRHLETFADQSAGQPLPPKARRHKKTNEPRFDARTPLYRMAGVDLTTIEGIEENTALILLSEIGTDMHRWPSVKHFCSWLGLCPQHQISGGKVLSRRVRPGAHRVTVALRLAARSLHHSQSALGAFFRRMKARLGTPKAITATAHKLARLVYSLLQHGSAYVQQGLDAYEAQYRERKVKAMARQAQALGYTLVALAVPEVQEIAAVPAPTP

SEQ ID NO: 274825 - protein, 409 aa, unidentified
MTKALHIGIDISGRENMACILNENGDKLGPAFTFNNDQLGLDQFLEHLFLSAEKHNPEKINIGMEATNFYWWHLQEALSETLIDGTDIDLFIINPKLIKGFKKAYTSLPKTDAVDAWIIADRLRFGRLNPLHRGSLIYAPLARLTRLRYTMKKNIQKDKNRALNLTFLKFSSFRQAAGKKAFNKSSCDLLGEFTTDQVAEKPLDELVDFILSHGNNRITNPEDFILEIQKAARNAYRLNPKMDDMVSVALAMTIENIRYLENQCKTLDKVITREFQAMPQVLNTIPGIGSVLSAGITTEIGDISRFTGEKALAKFAGLTWHQIQSGPFVAEETSLTKAGNAYLRYYLVEAANSLRLHNDDYAAYYRRKYNEVTKHQHKRALVLTARKFVRLVFALLSKGQIYNERMVNG

SEQ ID NO: 274826 - protein, 300 aa, unidentified
MIAHPVHVGADVSKATIELGSTLFAVPASILNTPAGFRPLLKILARSPAPIHVICEATGPYHKAFVAALHQARISVSVVNPRLPRDFARARGRLAKTDAIDALLLADYGQTMKPAPTPQPDEQMTLLDDLVTRRAQLVGDRAGERNRLQQTTCAEALASVKSHLRHLDSQIEKLLARIAQVIESTPVPRAKVALLVEVKGVGSITASALLAALPELGTLSKNEVAALAGLAPFNRDSGAISVTTSYRSDPEDPKHAGIDSTDCPSGKEEWRTVRIVFEDGRYPFAQNTIFLEAPCSPAQN

SEQ ID NO: 274827 - protein, 359 aa, unidentified
MKKDSRKAKCMDKPAITVGLDVGDRFSRYCVLNEDGEVVEEGKIQTTEVALQRHFDKEPRQRIALECGTHSPWISRLLERLGHQVIVANARKIRAITASESKNDRNDAEKLAHFAYCDPFLLSPIRHRSPERQQDLNLIQVRSTLVRARTMVINSVRGLVKSAGGRLPKCSTADFAKQALPLISAELALVVAPLVEQVGTLTDQIRRLDKQIENLSQRYVEIKLLRTAPGVGPVIAAAYVLTLDSPDTVANSRQAGAFLGLRPRQSQSGDSNPQHSISKTGNIYLRSLLVQSAHYILGRFGQDCELRRWGLKLAASGGKRGKKRAIVAVARKLAVILHAMWRSGHPFEPFLLPATTAVA

SEQ ID NO: 274828 - protein, 409 aa, unidentified
MRLFVGLDVSSFDMKVCFLNGDGEKLDSFSVSNDLPGATTLKEKLLQCIAGKEVDILKIGLESTSVYSFHPSMFLHHDIDLQRLGAKVFLLNPKQVANFKKSYSDMNKTDEIDAFVIADYLRFGRNQMSIVKESQYVALQQLTRSRYQLVKMLTKEKQHFLQHLSFKCNTFSQEVDTSVFGSAMTELFLEKFSLEELANMPLEELAEFLQEKSRNRFGDPKCVAASIQKAVKASYRLDKVVEDSIDVILGTSIAVIRTFQQQIKELEKSIKKIMAGLTQTLESIPGVGPVFAAGIIAEIGQIERFDDETKIAKYAGLYWRKHQSGRFTAEDTSLSRTGNHYLRYYLVEAANSVRKHVSDYQEYYVKKYNEVPKHQHKRALVLTARKFVRLVDALLRSHQLFTPGRCVKE

SEQ ID NO: 274829 - protein, 459 aa, unidentified
MNSKRSKSRNSSKMPMVHPNAAAIDVGATMHMAAVRADRAPDPVRSFGTFTADLHRLVYWFTECGVETVVMESTSVYWIPIFELLDARGFTVFLVNARDAKHVPGRKTDVSDAQWLQRLHSFGLLRASFRPKGQIAELRAYVRQRERLLEYAASHIQHMQKALTEMNLQLHHVVADITGATGLRIIRAILAGERDPEALACLRHYSCHSSAETIAKALTGSYRAEHLFALEQALALYDAYHEKASACDVRIEAVLKELSIHRGHGHGSAPRASRRRNRTDQANALAFDVREALFALLGKDITTIDGLGPYLSLKLIAECGDDLSSWPSAKHFTSWLGLAPSNKVSGGKMLSSRTRRSGGRAAALLRLAAVTVGRTDTALGAFYRRLSARIGKAKAVTATARKIAVLFYNAVRYGMDYVDPGASSYETRYRTRVVNNLHRRAKAFGFVLQPLEPKIGAVS

SEQ ID NO: 274830 - protein, 348 aa, unidentified
MVTIGIDPHKQAHTGVAVDPLGVQVSQRTVAARREGFGQLLEWGRKLDGERVWVIEDVRHVSGSLERFLIDRGETVVRLPPRLMANARQGVRERGKSDPIDALAIARAALREGVETLPTARLAGVELEIRLLALHRERLVGERTRMINELRWQLHDLWPEWEIPKRVLIGPAWQTKIAGRLRRTATTVQVQIARDMINRVRELTRTITQLYQQLAGLVTQVAPQLLAEKGLGVLIAAKLIGEIAGIDRFTSDAKLARVSGCAPIPVSSGRTDRHRLDPGGNRQLNHAFHMLALTKILNDPQTAVYLAKQRRNGKTNKEAIRSLKRHLVRRVYHLLRDPNSVPITICLT

SEQ ID NO: 274831 - protein, 457 aa, unidentified
MNRKRSKPKIDRRMPMVHPNAAAIDVGATMHMAAVSAERTPEPVRSFGTFTTDLHRLVNWFKECGVETVVMESTSVYWIPIFELLDARGFTVFLVNARDAKHVPGRKTDVSDAQWLQRLHSYGLLRASFQPKGQIAELRAYVRQRERLLEYAASHIQHMQKALTQMNLQLHHVVADITGVTGVQIIRAILAGERDPKVLARLRHYNCHSSAETIEKALTGSYRAEHLFALEQALALYDAYHEKASACDVRIEAVLKELSIGRGCRSDSLPSSRRRTDQANGLAFDVRAALFALLGKDITQIDGLGPYLSLKLIAECGDDLSAWPSSKHFTSWLCLAPSNKISGGKVLSSRTRRCGSRASALLRLAAVTVGRTDTALGAFYRRLSARIGKAKAVTATARKIAVLFYNAVRHGMEYVDPGASFYETRYRKRVVDNLHRRAKAFGFVLQPMEPTPDVVVS

SEQ ID NO: 274832 - protein, 311 aa, unidentified
MIVGIDVSKDKLDIHLFPENKHLVIKNTKASVASFFKNKLDVQDCELVVFEATGGYERLLQHYLIEKKTPYHRAHPSRVHKFAGAKGYFAKTDCIDARILALYGKQEEIEADTATTKDQLEIHDYSARRSQLKDMISSEKQRLNTVSFNKYIVRSIRRNIKQLERELALVTKKLDELIAADEALERRYKLLQTTKGIGPEVAKILVTDLPELGHLNREEISHLVGVAPQTKDSGKKRGYRAISRGRFHVRRALYMAALVAARFNPRMKKIYEKLLAKGKLKKVALVAIMRKMIIMLNAMVKKGTPWERERI

SEQ ID NO: 274833 - protein, 372 aa, unidentified
MNANGITWVGMDAHKNSIKVAALFPDRPEVVEWTEATTPEAVRRLARKLQREAPGEVRCCYEAGPTGYALHRQLEAAGVICEVIAPSLTPIKPGLRIKTDRRDARKLAELLRAGLLTEVHPPSESEEALRDLCRCRDDARTDLLRARHRLSKFLLRRHCIYRQTKHHWGTRHMAWLEELRFDDRVSQSTFDSYFLSVQQLDERLHQLDERLAEYGGQEPYREPVAWLRCFKGIDTVTAVSLIAELHDFRRFRSARELMSYVGLVPSERSSGDRERRGSITKSGNRHVRRLLVEAAWHHRHRPALSAPLRKRREGQPARVLAIADRSQERLCARFRRMTSRGTCQPKTIVAMARELVGYLWAVLHPAAVAVHN

SEQ ID NO: 274834 - protein, 320 aa, unidentified
MNYLGIDVSKDKFDVFINDQRGQFENNDSGFKALISWLKKKKLFKDIHACLESTGCYSYALAEYLHHKGIKVSIINPALIKSFANSLGKRNKTDAIDCEVIARFCEVNQPSRWEPPAESVKALTEFTRAIDDLKKYKRALSNRLEGQVNKIVEKSLKETIETFDEQIKLLEEEASKRVKEDDNLSRKKKLMMSIPGVGEQTAQIILAETRGEPDKFDSARALVAYSGLNPSNRQSGKSLNWSSISRKGSSYLRSKLYFPTLSAIRSNPAIKEFYERLIERGKSKMSAICACMAKLLKLVYGVLNSGEEFNPNYKNFAFFS

SEQ ID NO: 274835 - protein, 365 aa, unidentified
MRESINWIGFDEDASKIVVARVVGYEPKARETFTVEFNDRGLRELVRRLKRLEGEVRCVYEAGGSGYEMYRYLRKHDLPCQIAAPSLTPRKPGDRVKTNRRDAEKLAMLHRGGELTMICVPDQAREALRDLVRGREDAQQDLLRQRNRLTKLLYRRGLRHGEGRRWTQAYWRWLRALHLEDPHLQTVIDESILAIEHVAERLGRFDIAVQAAAKEEPYAPMVRRLMAFRGIGVLTAISIIAELGDLRRFIQAKKLMAAVGVTPSEFSTGSHERRLGITKTGNNHLRYLLVEAAWQARHRPSGRGAIVKRRADLPPAVVEIARRCEQRLHRKYTRMIGRGKPSCKAAVAVAREMLGFIWAVAQVPL

SEQ ID NO: 274836 - protein, 449 aa, unidentified
MGKGSGLTRGDVRRNARKAALRALVPASGAVIGVDLGEAKQALVVTGADNRVLARRSPRVSVHGLGAVLDWARGQALAAGYAGVTVACEPTGSRWMVVQELCRARGLPLVCVQPLVSHVAREQQDLTGDKADEPDSELIARLARELHCYAPEELEAGWAELRAAGRDRAAQVTRATAAKQLIRDQLGLVAPALLAAHCEPLDSATWLACLEAALDGAAAGGLAGCCAGGYEVFAAAAAGRLAGWGGKRLGPTAVTVFALLGEPAAVPRMVRAVRRRLAGALEDLKYARRRRRRLETEMIAMLGELGVDWERVCAIPGLSPASLAAIVAEAGDLRRYASSSSLVKHAGMSPARNESAAFRGKTAISRRGRPALRLAAWRATWAVLRHCDVLAAKHAALTSRGDGRLHDAQARAACAASLLRWIWSLIVHGTCWDPKIAAGELGHHHAVAA

SEQ ID NO: 274837 - protein, 389 aa, unidentified
MQVSNVCTPTADHSGTIFVTIELSQRSWLVTMHSPDRDRISRHKLEGGDHAGLLALIGQVRARATPKLGSQPAVVSCYEAGYDGFWLHRLLTAAGITNLVFDPASIAVEQRARRAKTDRIDGELLLRTLMAHLRGEPRVVRIVRVPSVEQEDARRANRERDRLIKEQTAHTNRIKALLRLVGMAVGNPRRSDWLNWLERQRDWQGCPTPPHLRAEVAREHARLMLVREQLAALAPAPATQEAPAAQQASATPSQMMERRDLLLRLKGVGPAFASTLASEVFYKDFRNRREVAGYCGLAPSPWHSGGIEREQGISKAGNPRARHKAVELAWLWLLHQPDSALSRWFRERTINTSKRSRRIAIVALARKLIVALWRYLMTGLVPNQAVMKA

SEQ ID NO: 274838 - protein, 323 aa, unidentified
MSWKAIGIDVSKAKLDVCLLGEAGETAYQQVANTLAGYERLQTWLQQHCPQPLPICLEATGIYSLPPAQYLHQHHYPVSVVNPAPVKAFAAALMKRHKTDKTDALVLARYAAHFTPPLWSPATLSQSQVHDLKRLADDLQTDRTRVKNRLEGTPSGSPARPYLQDQLAYLEKQLAQIQRALQKQLDEDQGLQSQCDLLTSIIGIGVTSAVQILAELPDLTRFASADALVAYAGLCPRQQQSGNQTAHSWLSKQGRAALRKALYFPALTAKQHNPHLRRFAQRLGDSGKAKMTIVAAVMRKLLVLIYAILKSGHPYDPNYLFAT

SEQ ID NO: 274839 - protein, 317 aa, unidentified
MKTMKSAVHIGVDVGKFDLDFHCHESGEHFSVSNTCEGIGQAFKQLTRYTIERLVVEATGRQEQRLVGVAQKLGVPVVIAQPIAIRRFAGALGLLAKTDKLDSRVIAQYAAVIQPQVRELPDKNTRKLKDLTIRRKQIIGMLTMEKNRLQVMPRFLRAEIRKSIASLQRQQQRLDAHILELSEQVTAWREQRQIMESMTGVGVTLSTTLLSDLQELGTLNQKQIAALVGVAPMNRDSGKMRGKRRIRGGRAHVRTVLFMATLSAIQHNPVIKCFYQKLVAKGKNRKVAVVACMRKMNVLLNAMVRDQTYWGEMKSMA

SEQ ID NO: 274840 - protein, 336 aa, unidentified
MTITTIGLDTSKSWFQVHCVDADGRMVLRRKLARGKVLSFFANTPSCVVGLEACGGSHFWARELTKLGHDARLMPARYVRAYVKTNKHDAADAEACCEAVQRPGMRFVPVKTEEQQGLLMIHRARDLLVRQRTAAVNALRGHLAEFGIIAAKGTAKAHELMRLAGDDERLPPMAREALGYIVAQIHDIEAKLRAFEQRIVELAKNDEVCRRLMTVQSIGPFIATALAATVGDPRNFASGRHFAAWLGLTPSQHSTGGKEKLGRISKRGDSYVRRLLIHGARATVARVRGGQVQSAWISGLLGRRHFNVATVALANKTARIAWAVMSTGQGYRAAAS

SEQ ID NO: 274841 - protein, 376 aa, unidentified
MEVAGNAVGLDLGKRTYEMCLVSNDNKINRTGGKTDFSGLDKLCMKLTKDDVVAMEACNLAFRIERILRKKIGCRVIILNPGRLAIIFMSTRKTDKEDSMKLAKYIKSHEEEEMPIVTPPSDEEWERRKLLSEYRALRSQRTREVNRLHAIFEHAGFTQFTRKDICVPKNREEILPLLKGYEKEESERLVERLLLLEKQIELLYKKINDETEKNEKVQKLMTVPGIGPITALSYVAYIGDVNRFENAHQVSNFIGFVPKVDRSCTINRLGHITKQGNSLLRSLLVQAAWSCVRSKNGAALRDKYNYMSVTRGVGKGKSIVTIARKMGELLYTLLKNNQCYEPKKFISSDERISKLAEEALFYANNRAGDKINLTCS

SEQ ID NO: 274842 - protein, 357 aa, unidentified
MSQQSNNCAIAVIGIDIGKNSFHVVGHDQRGAIVLRQKWSRGQVEARLANLSPCLIGMEACVGAHHLSRKLQLLGHNARLMPAKYVRPYSKGQKNDFRDAEAIAEAVQRPTMKFVASKTADQLDLQALHRVRERLVSQRTGIINQIRAFLLERGVAVRQGLRFLRAELPSILAMQTDVLSPRMLRILEDLSADWRGLDARIEGLSDEIETLAHQDQHCERLMTVPGIGPIISSAMVAAIGSGEVFSKGRDFGAWLGLVPKQISTGDRTILGSISKRGNRYLRALFVQAAWVVLVKLGPKQWERYGLKSWIEAAKRRLHYNVLAIALANKLARIAWAVLNKGRAFTCVKTDAMASRPA

SEQ ID NO: 274843 - protein, 399 aa, unidentified
METIFDRVAGLDVHKARVTACVRVPAAGGAREQQVAEFATTVRGLVALRDWLEAHRVTHVAMEATGVYWQPVWQVLEDAFELILVNARHVKQVPGRKTDVSDAAWICQLMEAGLLRGSFVPPKPQRALRTLTRYRKTQIQERQREANRLHKALEDTGIKLDRVATDILGVSGRAMLDALVAGTTDPEILAELARGKLRAKLPALREALEGRFEAHHALVIGAILAHLDFLDEQIERLSDAIEEQLGPFATGVRLASTITGVAARTAEVMVAEIGTDMSRFPSAGHLASWAGRCPGNHQSAGKRRSGRSRKGCKWLGIALEEAALAATRTKGSYLQAQYQRLRPRIGHGRALGAVKHSILIAYWHMFTTGEIYNDLGGDYYQRRHPQRLGQHVTLETAAA

SEQ ID NO: 274844 - protein, 345 aa, unidentified
MLYIGLDVHSKWMTVAVLDPGTGECLQWDRVSNDQASVAELFGKLKGPLCGVMESGTNSWAVYRELLPFFESLVVADPASLWDRRRDRKAKTDRLDAMRLAQMLCRGEIKPLYIPDEQTQDLRILVRGKVRISRWVTRLTNEIGSMLRSWGYVGSRSLLTKSGKRDLDQAELPKHSARVLELWRELLEVAQKIEDELQAAIEEEAAGDKDCELLQTVPGVGAFTALLVKAEIGDIKRFQHSSQLISYVGLSPRVYQSGENCRYGHLGCWGNRWLRYAIGLLAQRVAHSRKNTALKTTYWRVQFRNHKNAAKMAVARKFTRAVHQMLTHGQAWEESKARSREKLAA

SEQ ID NO: 274845 - protein, 481 aa, unidentified
MSKPTQHSKKPGEKKTAAGQGKRSRKRKGMCLEDRPILEPNAAGIDIGAREIFVAVPPDRDADPVRVFSTFTEDLEEMAKWLVSCGVTTAAMESTGVYWIPAYDVLEQHGVKPCLVDAHGMKNVPGRRTDWHECQWIQFLHSVGLLRAAFRPDGEVCAVRSLMRHRSDLVQMTNQHIQHMHKALTQMNVQIHHVIDDITGVTGLAIVDAIGDGQRNPLELAKLRDPRIKASEETIVKSLQGTWRPEHLFTLKQSRQMYRHYQDQIAACDEEIEKLLVAFQPWVDPAEKPLPPDRKKRKRGRQKKNAKTKQAFDLRTESYKIFGVDLTQIPGLMAMVLTLFSEVGRDMSRWKTAGQFVSWLALCPDNDITGGRVAWRGMRRVHNRAGELFRMAAYSLHHDKSPLGDYLRRMKSKLGPTGATTATAHKIAIIFYTMVKKQVEYDATLWAERDTQREKRFQAKLKRQAQQLGYKLVPVEEKPAA

SEQ ID NO: 274846 - protein, 427 aa, unidentified
MEIVFERCAGIDVHKRTVVVCRLMRDAQGARLAETQTFGTTTGELLRLSDWLAEGGCTHVGLESTGEFWKPVFNLLEGTCEVWLLNAAHIKAVPGRKTDVKDAQWIAELLAHGLVRPSFIPPRPQRELRDLTRYRTTFVRARATLVNRVHKALEDANLKLASVATDIMGVSGRAILAALLAGEADPAVLAELAKGPLRKKRPQLEQALRGHLRPHQSFVLTELLAQIDCVEETIARFTAQIQATCASEAEEAEVVALLDTIPGLSQATAQVVVAEIGTDMTRFPSAAALAAWAGLAPGNDESAGRQRSGRTRKGNVWLRTILVQSAQAAAHTKHTALAARYHRIAARRGHKKAVVALAHALLVIIYHVIARRQPYHELGENYFQRLDPAARAKRLVHQLTHLGFEVQLRAQQATMPSGGAPALAGGS

SEQ ID NO: 274847 - protein, 349 aa, unidentified
MEMTTVGVDIAKNCFQVAEANAQYRLIERKRLTRLQFSRWMGTHPPCQVIMEACGSSHHWARVLKGYGHQVKLLPAQHVRAYVRRNKTDAADAAALIEASRSREIRSVEVKSIDQQVLQQLHRARTQWQAARVARINSLRGMLREFGIDIPEGAARGIAAIRQALEVADNGLPDLLRPIVEQLLQEIEECAQRMKEVERSLESLTAEDATVQRLQQIPGIGLLTSTALRAAISDIHRFRSGRYMASWLGLTAREHSSGETRRLGPISKRGDVYLRTLFAHGARSALRVAKTVARRGLQLDGLRRWALETEKRIGHNKAVIALANKLARIAWATWKHERAFEGNWMRGAA

SEQ ID NO: 274848 - protein, 342 aa, unidentified
MKRSIGVDLHKSTFTVCYYESEEKHEFKTYQVSRMNLGYFKNTLKKTDELAVESTGNTTFFVREIQDKVKRVRIVNPFQFKVISSSVKKTDEKDALTISRFLHKDLIPEVRQRTEKDSQIASLIGTRDKFVKLRTALKNKIHNILNAQGIVTKREMFTSDKSFERVLALKIDSSCRFEIEIIATQIKSLNDAVDKIGEELKTRAQNIPGHKNLTSIKGISDTGATIFLNTIGNIKDFKDEKHLASYFGIVPRVWVSNQTVHHGRITKLGNKTARTALVQSTLVAIRYSPYLRAFYDKIKSRRGAGKAIIATSRKMLGIIYNTLKNNWVFEDFTRFKLAPCAG

SEQ ID NO: 274849 - protein, 346 aa, unidentified
MLYAGLDLSRKRLDYRVLDDGGATVDAGAAPPDADGLHGLSERLARHGAPIRAAIESMNGARFVHDRLELHGWQVEIADAQKVKGLAPLACKTDRIDAWVLAELARRDLVPAIWLPDPRVRAERERARWRLHLVRHRSSLKQRVHAVLLTHGKPCAVSDLFGVRGRQLLATLGLPEPWQGTIDASLRLIDQLDREISECERELRRLGADHRYVPLLCTVPGISWVLAYTIAAEIGDIGRFPNPRKLAGYSGLCPRVYQSGERDLRGPLSKQGPRYLRWALVEAATHACIHPVYRDRYQQTTARIGKQRGAKVAQVDLARRLTEAIWHMLSRGEAFAPKGATDPLAA

SEQ ID NO: 274850 - protein, 370 aa, unidentified
MKKNNTVAQSPKRASARKQGPITIGMDLGDKTSRYCVLAENGERLAEGSVATTRKAMAQKFAGMRRGRVAMEVGTHSPWLSRWLTSLGFETIVANARQVQLISASSRKNDRMDAHLLARLARVDPQLLRPIRHRSEQAQADLMTIRIRAALVEARTSLVNAARGFAKAQGDRLPACDADAMGVEKMEALPAGMRERLRPLLEQVESLTEKIKTLETKIEQIARTEYPETALLRQVSGVGTLIALTFVLTVEDRNRFQKSRDVGCYVGLRPRQSESGQSQPQLRITKEGDRYLRTLLVQGAHLILNRRGPDTDLKRWGLMLAERGGKNAKKRAIVAVARKLAVLLHRLWVTGEVYEPLRNSQAGQSSKQAA

SEQ ID NO: 274851 - protein, 358 aa, unidentified
MQRNKISFKGQKIFVGIDVHAKNWEVAIAPEVGIVKRHSQKPSAKELFDFLKKNYPDGDYQSVYESGFSGYSTYYALKEVGIDCMVIHAADVPTTQYEEVMKTDRVDAVKLVRSLKAGLLKGNYIPEKQYIDDRSVVRIRKTIQKQLSGYKSRVKHLLHCHGVEFPERFSKKQTHWSRAFITWLMNDVRLMSDTRASLDLLIRQVEVLRGTLLEATRQLRKMSQTERYKHRHDLLRTIPGIGIIVTMCILTEVCDVKRFRNENQFAAYLGLIPTSHSSGEKTVHGEKTFRGNKQLGPMIIEAAWITIGRDAGLGAQYFQYKQRMEPQEAIVRIARKLSNIIFSVLKNEKEYVPYQTGN

SEQ ID NO: 274852 - protein, 387 aa, unidentified
MIYYVGIDISKYKHDFCIISNTGEIIVENDSFENNKKGFQLLLDHLKPYNKSDVHICFEATGHYSLNLELFLTDQDYSFMKMNPLVIHQFLKARSLRRTKTDKADSITIANYLMSVPYKPNSDLLYHIYTLKSLCRSREQLIKEKSKFQVLLTNVLDKVFPELKPFFNNKISETLLYILNKYKNPKHISLMKDYDSLRKISRGKFSYVKFVKLKELAKITVGHYDNNTDLLISTYVSLIQTFNDKIDPIDKQISTIIKELNPRMLSIPGMGEISAATILSEYEDIKNFSSPSKMLAFAGLEPSVIESGTLQSNGKMVKHGSGHLRYSIMNIAMIILRYSPTFYDYYLKKRSEGKCHRVALSHVCKKLIRVIYCLEKNDIAFDPSLLK

SEQ ID NO: 274853 - protein, 475 aa, unidentified
MNIKGSKKKNQVLSVNIFEQQGIIAKADAIKAGLKASTWHELETRGKFDKNDKLSFVSDDMLILGCDIGSETHYVRAIDIRGRELSKSAFGFSNTAEGFESMLDWSAKLAAANDKKQIVLGLEPTGHYWFCLTTWLVAKGISVVQVNPYAVKQTKEVEDNSQLKDDKKDPKLIANLVKDGNFGMPYLPEKLYADIRRLSMFRDQLNEDRIRNLNRLHREMKIYFPEYKDAFGKIDGAFSLELLKAAPFPDELAALGTEGMKQIWHEAKLRGRGYANASSILEYARKSVGIKDGADAGRQAVKWFVSRIIELDGQLSDIENKLNERCMEIPHAKNILAISGIGENILSGILAEMGDISRFDDVKEIQKLSGLGLVACSSGKHTGETKISHRGRKRLRYWLFQAAKSAVAHSGEFKELHVYYTTRKQNPLKKMQSLIVIACKILRVIFTILTKGTTYDPKKLLGDIIRPNQAIPQAA

SEQ ID NO: 274854 - protein, 409 aa, unidentified
MMNPLFVGIDVGSRNNVAYLMKPDGSKHSSFSVQNNLGGAKLLSERIVSALGSMQLSDVIIGLEATSIYGDSLVYALREDGSLGRFQRKIHVLNPKQVRKFKDAYPDLPKNDWVDAFVIADHLRFGRIAKEVYMDDYRYQALRTLTRARFDVIQNLTREKQRFANYLFLKCSGMAQDKDIQNTSATTIALMERFETVDDLANADLEELTAFVTETGRGRFADPAATAKAVQAAARGSYRLPKTVNDTVNQAMSVSIASMRALKEQIKVLEKAIEQQFEIIPNTLTSIPGIGKVYSAGIIAEIGDIHRFNSQASVAKFAGLVWHKNQSGEFEAEHSQMIKSGNRYLRYYLLEAANSVRRCDSEFRRYYDLKYHEVNKYQHKRALALTARKLVRLVFRLLKDNRLYIPPEG

SEQ ID NO: 274855 - protein, 411 aa, unidentified
MLVQAPLGLSALVVAIDPGKVMNRVWVSDGAGLVTDPVSMPVSRAGIGDLESTVSSQVAGHDGLVIAIEATGSLHRAWAVELERLHPGSVRLFAPSETKAARTQLGSGRFKTDDRDCAALTYLARQGGGRAQAEESVVEELCAAVRHRRGLVADRKKAQQRLHDQLNALVPGLSAPAGHGRSLAIEGTTGQAVLACAAAFAGRPASTRSLTARSPGRMSPATARYWAQRWQGCLPPPPDAQARASRLGRDLQRYRALQADITVLEEEITTLLARTDGQVLTTLPGVATVRAAAFAAHSLPIARFPDAEHLYSATGLAPAMYESATLRRRGRISRQGLAEHRDALMGIAWGLSRFSPAFAERDAQLRARGMAPIQARVALARNACRLTYRMLVTQQPFDEEAYRRGRLSRGR

SEQ ID NO: 274856 - protein, 408 aa, unidentified
MLLVGIDWADKAHVYCLMDDAGTTLSTGTMEHTAEGLEQFMNIVRARVQTPHDVLVALETSHGPLIGALLDQGFTVYAINPKAVERHRDRFRVAGAKSDLRDAWVLATLLRTDRAQYRPLVPDSEVAQELRALTRDRAELVRTRTMLSNQLTACLKAYFPEFLTLFADPDRPVALALLQTFPTRDHLQAVSRADLEAFLRRHHCPHSRKRATAIHERMQAPGFHIAPPIVRAKARLAGTLASQLLALLEHIDAYEREIERILKLHPDGELYRSLPGAADVLAARMVGELGDNRDRYRDPNVAQCEAGTAPVTRKSGSTRTVHIRRACIHPLRETLWTFAFSSLRHCAWAQAYYNQARKRGKKHAEAIRMLGNVWLRIIIAIRRDRRPYDEAVFQKARARHASPGLCFA

SEQ ID NO: 274857 - protein, 463 aa, unidentified
MAKKNTTRRKSKSKARKSVLERINPNAAGIDIGANFHLVAIPEDRAEENIRKFGPFTSDLHRLADWLTEHHIETVVMESTGVYWIPVFQILEQRGFEVKLVNAAHVKNLPGRKSDVSDCQWLQQLHTFGLLNGSFRPKDEVCILRTFLRLRDTLVKDCSSHVLRMQKALTEMNIQIHRVLSDITGYTGMAIIRAILAGERDGLKLAQMKHPQVKATTQQIVKALEGDYRTEHLFALQTAVELYDVYQLKITGCENKIEQQLEQFESKLDFEQVLEQSGALKVRSAKVRLELQRQAYLTSVCGVDLTRLPGLSTLAVEVIISETGLDMSCWKSEKHFCSWLKVCPDNRISGGKVLSSKSRKTKNRAAGMFRLAAQGAMQSKTAIGAFIRRIRARLGAPTAINAGANKLARLFYRMLKFGAAYVEQGQTYYEERYKDRLLHNLSKRAKVFGFQLTPFEPATVSVS

SEQ ID NO: 274858 - protein, 331 aa, unidentified
MKKQNYVGIDVSAKTFTVIIDHDGDRGKAFDLANDSDGHKKLIRMITKKGYQARVVLEATGVYSLDLALALHRAKRVEVMVANPRTIGQFAGASMRRSKTDTLDANLIVEFAIRMKFKAWKPPAPHTFDLRAISRRIEGVIKMATQEKNRLHAALSFDEMSEIVRNDIEVNIRHLERRVERLREQARELIAEHPELERAFLHITSVKGIANSAGIQILAELAILPEDMDVRQWVAHAGLDPRVFQSGTSVNKPARISRQGNVHIRRALFMPALVAVQYEPHVKAFYEKLLGRGKTKMQANVAVMRKLLHAIYGMLKHDRDFEGEKFYVIGA

SEQ ID NO: 274859 - protein, 346 aa, unidentified
MMIIGCDFHPSWQQIAWLDSETGETGERKLVHASGDAKAFYQQLAAPARIGMEATGNSQWFIELVQDLGHEIWIGDAAQIRASYVRKQKTDKRDAAHILKLVVEGRFPRLWTPDGEQRDLRQLVLHRHRLVEIRSRVKNELQHLALNKGMQRKAKLWSQAGQKLLRELPLKPWAAGRREDLLGLLALLNQQIGTLDQAVQQAADQHPQAKLLMTQPGVGPNTALAYVLTIGDVSRFPRGKQVASYVGLIPREESSGGRQKLGAISKQGNRLLRSLLVEAAQIAVRYDPGLRKQYLHRCHQKPKGVAKVAAARQLAVRLYWMLRTGKPYPEIVRIESSPRVALVGAS

SEQ ID NO: 274860 - protein, 421 aa, unidentified
MIPAVIERCAGIDVGKTFLTVCLLIGPANGEPNVEMRKFGTFHGELEELRRWLADQHCTHAAMESTGSYWKPVFNVLETSVTVILANSQDVKGRKGHKTDWNDCRWLAHLLRHGLVRASFIPPRPVRELRDLTRRRKQILNSATGERNRVQKVLEQANVKIGSVLADVFGVSGQLILEALLEGKASVEQMAELAQRKARCKIPELIRALEGHRLDDHHRMLIRLSLKHLAFLEQQLQEIDAGILARVQGPEFRQAFQLLEAIPGIQQTAAACILAEIGPSMEAFPSEAHLSSWAGVCPGNNCTGGKSKPAKIPRGNRWLRTILVECAWAASKKKDCFLKERYWRLAAGGKKRALVAIAHAILVLIYRSLSTGQVYQERAPVQVDERKRQKLIRHHIRRLGRLGVSVSSMGMAAPVTPLPAS

SEQ ID NO: 274861 - protein, 350 aa, unidentified
MSQNLNSAVAVIGIDIGKNSFHVVGLDDRGAIVLRQKWSRGQIEARLANMPPCLIGMEACVGAHHLSRKLKALGHDARLMPAKYVRPYSKGQKNDFRDAEAIAEAVQRPTMKFVATKTADQLDLQALHRVRERLVSQRTGIINQIRAFLLERGIAVRQGQRFLRAELPRILAAPPEVLSARMVRVISDLAEDWRRLDQRIDHVSSEIAVLARQDAGCERLMSVPGIGPIISSAMVAAIGTGDAFAKGRDFAAWLGLVPKQISTGDRTILGKISKRGNRYLRVLFVQAAWVVLIKPMSWERHGLKHWIEAARKRLHRNVLAIALANKLARIAWGVLAGSGRTFEASKLQAA

SEQ ID NO: 274862 - protein, 322 aa, unidentified
MNKYKETFGVDISKDVFDVHGSNKGHDQYKNDEIGFKKFLKELPIGSLVVMEATGYYHYRLAQFLYKKGVVVSVVNPLSVKRFIQMKLAKVKTDKSDAKAICEYALINEVPIYNALTETQSECLQLFRLLDTYLKQRTATKNKIHGEAVLGIPSKFVYRSLIRNKKQLNKEVATIESKILSLVKEDQQEQLTLLTSIPGIGQKTALFLIVVTDGFNKFETAAQLCSYVGITPTIRESGSSVRGRARISKVGNRKLRNLLFLCSFNACKHNKACKEVYERIVNKGKSKKLALIAVVNKLLKQSFAIAKSGRPYDETYVSVLPR

SEQ ID NO: 274863 - protein, 334 aa, unidentified
MDTMVNVICIGLDISKDTLDACLRINHKRHEKQFANDDKGQRKLLDWAHALATSTVDSSCHFCIEATGPYSQSVALFLMDKQQAVSVINPARIRFFALAQNAGNKTDKADARLIALYCQQQKPPLWRVAQAQVRALQALTRRLHALSELVVQEKNRLQAPGQDKTILASGKRVVAALEKEMLRLKLAIRAHVKVHEHLQRDSKLLQSIPGIGEITAWDILAEMPDVNEFENAQSAAAYAGLAPREHKSGSSVRKPTHLSKRGNSRLRKAFYFPAVSAITWNPLVKAHYQSLVAQGKPKMVALAAAMRKLLMICYGVLKHQKPFDAQWQNTPQVA

SEQ ID NO: 274864 - protein, 453 aa, unidentified
MARKAEKEKTKDGLKLKIVNPNAAGIDIAYGEMQVCVPEDRDGENNRCFGSFTCDYEEIASWLKACGITTVAMESTGSYWVGLYFFLEEKGFDVLLANAKDVKNVSGKKTDEADAEWIMLMHSYGLLKPSFHPDAAARSIRELARHRDNMLRSASKEVQHMQKSLVLMNIKVDTVISDILGKSCKAIIEAILNGNHDPKSLVQLVDPRCKASKETIEKSLEGTWDVVHLFELKQSYDLYKYIHTQIADCEAEMDRLLDEYTDGCGTDMQGYTATKKRVAKKNAISFDAEKHAFSMWGVNAMEIPGMSLGALAVLMGELGSGFTEKFTSAKSFCKWCNLVPNNKISGGKLLSSKVPKQKNRVGQVFRLCANSVKSVKTGLGVYFRRQKSKGGHLQAIVATANKIARIFYTMVVSKKHYDESKVGLDEKQLLERKIILAQITLDRLNRKLSVTQG

SEQ ID NO: 274865 - protein, 398 aa, unidentified
MIAVGIDVSKSKSTVAVIDSDGQILHKPRNYNHTLSDMLNLVSLIHSFPDDVKVAMEATSHYHYPILKTLLDENIYVALINPYLMKKYGENSIRRGKTDKKDAIRIAFYVLEKSYLLKPHTAADQKYADLKFLARQYQQIIMLKTKARMQLNNLLDEMMPGVKKLFSSNNAPSSTQNLFLDFVEKYESFDRIRNMGEKRFINSYAKFAAKRHTRNFQYKALSVYELASDSITTRSTDLSTLLALHQCISILRQCTVSSNNLLDQMHSIAFTMPEYPIIRAMNGVGFKLAPQLIAEIGDVRRFTSAKALNAYAGNDAPPYQSGNFEGTNRHISKRGSAYLRKLCYEVMLALKLHKKEEDPVYQFMIKKESEGKPKNVAKMAGVNKFLRIYYARVMELYQ

SEQ ID NO: 274866 - protein, 507 aa, unidentified
MKNLKISPQRVKKAVERRARPRYEFSPRSFDDHLKSFERGRTPGPTTHTQMSSYEDSTIRVAPVPGKRVVTPVSGGLPMENSPSCSLPIVAWVGLDWADQAHAVCLQADGSAHRERCELKHTAEALQFWVAELRSRFPQGRVAIALEQSRGALFYALMTYDFLVLYPIPPKALADYRKALYPSGSKNDPGDAQLLLEFLRKHRERFRPWVADDAPTREIALLVEHRRKLVDDRTALSNRLQALLKGYFPQALEWAGDLTAPLAWDFVGQFPSLEQAQKAPRLKVLKVYRAHTRRTPEQLEQLLDQIHTARPLTTDRAVIESSALMALAQVDQLRALAAGLERLEDKLQELFAAHPDQAIFRSFPGAGPALAPRLLAAWGTDRQRYEAAADMACWSGAAPVTNQSGKKCWVHWRLACPKFLRQTFHEFAGQSILWSPWARAYYQQMRQRGLDHHPAVRSLAFKWIRILYRCWKDHSLYDEARYQQALQRRGSPLAAALRQISTQEARA

SEQ ID NO: 274867 - protein, 415 aa, unidentified
MKIHRNCCGLDVHKQTIAACLIREDGNGHTWKEKRLFGTMTQDLRELAQWLREAEVGAVAMEATGVYWVPAWNVLERAGLHLLLINPEHYKAVRGKKTDLKDGERIAELLQDGRLEGSYVPPSELRVLRDLTRYRVKLVEHQSSVACRIQKLLEQCNIKLGSVASNVLGVSGTAMLHALASGETNAEHLANLAKKQLRRKLPALRLALDGCLMPHHRFLLREMLDELSHIETQLARLEAEIEVQMRPFQKALQAWMSIPGVKHRVAWTLVAEIGPDVQPFPSPAHIASWVGVCPGNNESAGKRKSGKTRKGNRWARRALCEAAWVAAKAKKSYLAAQFRRFAATRGSKRAIIAVAHTILTIGYHMLQRGTVYQDLGANYFDQRHILRTTRRLVKRLEALGHRVILESPVLDPQTA

SEQ ID NO: 274868 - protein, 445 aa, unidentified
MKDHSEAFVGIDTSKLRNAVAIAEGGRGGEVRYFGEIDSAGAATRKLVAKLAAKYRSLTFCYEAGPTGYGLYRLIKSLGHDCIVAAPSLIPKKPGARVKTNRRDAMQLAKLSRAGELTAVWVPDERHEAMRDLSRARQAVQKHLKSKRQQISSLMLRLGRHYPRRKTWGPAHMNWLMRQKLEHHEQRIAFEELLEGVRQEAERVERLEQAIRDAVPEWSLAEVATALQAMRGINLVAAVTVLAEIGDLSRFQTPRELMAYLGLVPSENSTGDTVKRGGITKAGNGRARRILVEAAWSYRHPPRVSREKQPKVAAAPKRVCEIAWKAQTRLCGRFRSLIRRGKLPTIVAAAIARELAAFIWAINREVMAPEEGREIRNAPTAHSVTPCSPQSRRGLATADGVAGAPRRPALTAAARGVPAAARVGTKKRAPRSNKETGLEAGSAGL

SEQ ID NO: 274869 - protein, 352 aa, unidentified
MEVLYAKCAGLDVHRDTVVACVRIAVDGKVSQEVKTFGATTTELMALSEWLTGYGVTHVAMEATGVYWRPVWHVLDGSFELVLANAMHIKNVPGRKTDVSDAMWIADLLAHGLIRASFVPPTPVQDLRALTRTRKQLIRERASHVNRIDKILQDANLKLGSVLTDIMGQSGRGILNAIASGEADPEKLVEHVRRGVRAPRAKIVEALRGTVTPSHRFLLKLHLDQADALQKAIDDIDREVSERLDPFRDAARRLTQVPGISDVVAAAIVSEIGTDMSRFPTAGHLISWAGLCPRNDESAGKRRSTRLRKGAPWLKTILVQTAWCATRAKGTYLQAQFLRLKARRGSRKAIMA

SEQ ID NO: 274870 - protein, 388 aa, unidentified
MLPVIDALEVQKGRPAMKQNTTELENPRRRVVRKNKQRELTIGVDLGDKTSRYCVLDREGNVLFERSTATTKKGLAQAFASMGASRIAMEVGTHSPWVKRLLESWNHEVIVANAHRVRLITESTRKDDRLDARKLARLARVDPELLSPIRHRSEGAQAHLVMIRARAVLVEARTKLVNSARGVTKSFGERLASCDPDQMRVKCLVGLPSSLQSALQPLVTAVESLTRQIHEYDNKIAQIARSEYPETARLRQVTGVGELIALTYVLTLEDPQRFRRSRDVGGYLGLRPKRRDSGASRPQLRITKEGDVYLRMLLVQGAHYILGWHGVDTDLRRWGLKLAARGGKNAKKRAVIAVARKLAVLLHRLWVTGARYEPLRHSQIASSLQVAV

SEQ ID NO: 274871 - protein, 351 aa, unidentified
MLIIGADYHPSFQQIAFLDQETGESGERRLNHSDGEAEKFYRDLKEQGSSVRVGMEATGYSRWFERLLAELSFELWIGHPAEIKARRVKKQKTDRKDAELLLRLMREGNFPRVWVPSPENRDLRQLLWHRHRLVQMHTRIMKQLQAIAMNEGMRRKTKLWSEQGRAELEKLALGPWTSRRRQELLELLDQIDPVIEELSKAAEQEAHKRPEVVRLMTHPGVGFLTALAYVLIIGTPERFHCGKQIGTYVGMVPSEESSGDKQRLGHISKQGNSLLRFLLVEAAQAAARSNPEWRRRFVRLAMRRHRNIAMVAMGRRLAIRLYWMWRNGCEYSPSMEFGSYAGQLGTGHSVQ

SEQ ID NO: 274872 - protein, 403 aa, unidentified
MDRWIERCCGLDVHKQTVAACARVPGAQGRRTQEVRTFGTTTPDLLALQDWLAAHQVTHVAMESTGVFWKPVYYVLEARFTVLLVNAAHVKQVPGRKTDVRDCQWIAELLEHGLLRGSFVPPPVIRDLRELTRYRRTQIQERTRVANRLHKVLQDANVKLSNVTHHVLGVSGRAMLDALVAGTTDPDVLADLARGQLRKKLPALRQALTGRFRAHHAFLLGQILAHLDYLEEAIAAVSAHIEEQLRPFTPQVERLMTIPGVQRRTAETILAEIGTDMAVFPTAGHLASWAGMCPGNNESAGKRRSGKTRKGSKWLRTGLIEAANAAARTKATALGARYRRILPHRGHRKGAHEGDGARRALSPHPPASRPPQSHRRRRPPHPRNQPPPAAHRPHLLGARSGLL

SEQ ID NO: 274873 - protein, 350 aa, unidentified
MVTIGIDPHKDTHHAVAVDALGKRLADREVRANADGFGALLAWGRTVAASDDRVWVIEDCRHVSGPLERFLIDHGEAVARLAPHLMAIARTHVRERGKSDPIDALAVARAALAHGLENLPTARLAGPELEIRVLHQHHQRLVKQRTALINDLRWNLHDLFPGFTIPARRLSEASQHARIANKLAKAAPCSRVRVARDELRRIRELTRSIQQLITDLDQLTRTVAPQLLAETGIGPITAAAVIGEIAGIDRFATDSQLARISGCAPIPVASGRTDRHRLDRGGNRQLNYAIHMIALSRLRHDPETATYMAKQRERGKTKREAIRCLKRHLVRRIYRLLTNPNQIQRTICLT

SEQ ID NO: 274874 - protein, 343 aa, unidentified
MQTITTIGLDIAKSAFQVHGVDAGGQVVIRRQLRRRHVLAFFQKLPPCLVGIEACASSHHWSRELQALGHTVRLMPPAYVKPYVKRQKNDSTDAEAICEAVTRPNMRFVPTKTVEQQSCLMLHRARHLLIRQQTAVINSIRAYLAEFGIIAPVGRRGVEQLLEVVADKADHRLPEIARACVAALGSQLRALKAQILEFDRRIIVWHRSSATSKRLDAIPGVGPALATALVASVADARAFRSGRDFAAWVGLVPKQNSSGGKDRLGSISKQGDRYLRSLFTAGALAVIRYAMIHGSGHRPWLTGLLARRPAKVAAIALANKLARMAWAMMARGERYNEPAALAA

SEQ ID NO: 274875 - protein, 396 aa, unidentified
MISVGIDVSKGKSTVCILKPYGEIVSKPFNITHTQKDLSELSSMLFRLNDEVKIVMEATGIYHLPVLTYLQEKGFFVSVINPYLMKSYRNESLRKAKTDKIDSRIIANYGIDHWFKMKEFQTSGEIYEELKLLGQQYRHYMKLHLLSLAELTHLLDLTMPGIKNLLASWNETNRKDKRSDFVERFWHYDVITSMSEQEFTEEYILWAKEKKYVPSQEKAKVIYTLAQESIPTLPSETSSVKMLVTEAVRVLKEVDATLGLILSRMQEIAKTLPEYSVVREMGGVGNTLAPKLIAEIGDVRRFRNGKALVAFAGIDPPPYESGQFVGCNRKISKRGSASLRKVGYETMRSLKMRSRPEDPVYRYVVKKESEGKSKKSAKIAGLNKFLRIYYARVTEL

SEQ ID NO: 274876 - protein, 410 aa, unidentified
MEVLYPHCAGLDVHKETVVACARHMVNGTVTREVRTFKTTTKDLLALSEWLSSQGCTHLAMEATGVYWKPVWHILSDGDFSLVLANAAHVKNVPGRKTDVNDATWLADLMAHGLIRGSFVPDAQTQELRGLLRTRKQFVRERSSHVQRLQKTLEDANIKLDSVISDILGLSGRAMIEALIAGESDPDALAAFAHRRIKAPVGVLREALRGRVTHHHRFLLQLHLRHIDALDDAIGVIDREVDAHVEPFHMAVLLLTTIPGVSDLSAQVIRAEIGGDMSRFPTVGHLISWAGLCPKNDESAGKRRSNRMRKGAPWLKTTLIQCAWAAARKNGSYLQAQFHRLRARRGAKKAIGALAASILTAAYHMLKDGTLYHDLGPDHFDCRAKTVQTKRLLTRLQRLGYAVQLTPLAA

SEQ ID NO: 274877 - protein, 357 aa, unidentified
MSYTIAGIDIHKKVLMVVVTEVAVEELRFVCRRFGTTASEREHVVAWLQEHQVQEVVMESTAQYWKPVWLDLEPHFGRLHLAQAHSNRAPKGRKNDFGDSKRLVRRLIAGELILSFVPDAEQRSWRTMARGKLQLVRDRVRLENQLEALLEEMRIKLSSVVSQLLGLSGRRILRALAEGETDPDKLAQWGDRRLKCSKEELQDALRGQWQAMHRQMLQLFLERLDLLDRQIEQLDRMMAEAMKDHESAVIRLAEVPGFGPNSAQQIIAEVGPDVKTFPSAGEFASWIGCCPGSQESAEENHSSRSPKGNPFVRRVLTQAAQAAIKKKGSHFQAVFRHWRPTLGYNGALWAWPTSYAA

SEQ ID NO: 274878 - protein, 370 aa, unidentified
MLDTTTFVGLDVHARSIKAVSLDVMTGEVRCATFGYDAGAVAEWVRSVDPKAKCVYESGVTGFDLQKRLSGLGVDCVVGAVSKMIKPSADRRRKNDRNDAEFLARMLSVGNVVEVWVPDDECEAARDLTRALEDARDDLSRSKQRLSKFLLRHGLVFDERTPTGRRKGNWTRAHWSWIESIRFAEGADNEALAYYVDAVRRAAEDKARLEGLVEAETRKPRWRRRVDSLRCLKGVDTATAADLVFEAGEFSRFRNARSFAAWVGLTPSEHSSGESDRRGAITKAGNKHLRKALVEAAWHYLTCSARPKEPARGQAPDPGARRHAAKGVRRLVERRGTLLARGVHNNKANVATARELACWVWAVGLMAEEA

SEQ ID NO: 274879 - protein, 372 aa, unidentified
MNYNTVYVGMDVHKESFTFCAYTIDAEKGSRFQRTEADYKSVLRYLEFLRTVYGNDANFICGYEAGCLGYTLYHQLTEHHVNCVILAPTTMLEQRSKKRIKTDKRDAEIIAKCLAQYNYSPVHIPTAADEETKEFLRMRDDHKLALKKVKQQILAFCLRHNYRYDGNSHWTAAHIKWLKSLKPEALYKEILDEYLLTYTALSDKLERLDKRIEELASKDEYKESVKKLCCFIGVKTHTALSVLVEVGDFHRFASAQNFASYLGLVPGEDSSGDGQTRLGITKAGNRHVRMLLTEASQCYARGQIGFKSKKLKSRQAGNSPQVIAYADKANERLRRRYYKMVLGKSKKPNVAKTAIARELACFMWGMMTDHVA

SEQ ID NO: 274880 - protein, 340 aa, unidentified
MSRLNIIGIDLAKTNFYLFRLSPEGKPGGRIKLSREKLIGWFTTQSRMIVAMEACGASHHWAREIQKTGHDVVMLPAQHVRAYQRRQKNDYNDAQAIAEACWHGTIRPVPVKTLSQQDEQTFLKMRRLVSEERTQLINHIRGLMAEYGIVLRKGATELRRKLPELLEDAENGFTPQMRELLQRQYQRLAALDDELIWYDNRQRKNAAGDSVCQRLLSIPGFGPLVSLAVKSWMGDGKQFKRGRDASAALGLVPRQFSTGGQQVLLGITKCGNSYVRSMLIHGARAVLFRSAGKTDQLSSWVNLVREKRGFNRAVVALANKLIRIAWVIITRNEVYRVSVA

SEQ ID NO: 274881 - protein, 429 aa, unidentified
MKNNTARKLSQIPPGYLIMGIDPHKKIHVAVAMAQDTIFHTRFKFANSRQGYEQVMRSTSDQIVKTGSTGVIFAIETGGHYWRNLAYFLDEQGIPFRLINPFTLKRMREGKDINRRKTDFRDAAMAAELLRNGEFVETKLPKGIYAELRATYSTYRRLVKERSRAKNLLKGLLDGLFPEFNQVFKNICGMTSLQVLSICPAPRTITSMKLEEFVAAVRNGFKGRAPKVRKLHTIYSLAQTSIGIETGADSVSLELSFLVQRLRLLIEQIERTEDILVRLLYSIPDARYLLSIVGISYISVGGILAELGPLRAYRNAGQLIKMAGTNPIEWESAGKRGSHTPMSKKGRPGLRWCIWTAAMCLLRHNTDFRSWAKERRERPAHLHPLKAREVFGAVANRLLRLAYALVREQTFYQIPKPKVAPELELVAAI

SEQ ID NO: 274882 - protein, 356 aa, unidentified
MEQLTTVGLDLAKDVIAACVLDVHGAVIERRVLRRGAFERWAEQLPSCRVAMEACGSAHHWGRWFAARDHTALLIAAEFVVPFRKGGKNDTADAEAVAIAARQPTMRFVPIKTVDQQAILAWHSVREGWKEERTALLNRVRGLLAEFGIVIGRSSERLLTVLPELTEDSRLPDAMRALLLEAREQFAALHARLARCDAQIAAHARNSPAAQCASELLGVGPVTASALAATVPDARVFKSGRQFGAWLGLTPRQHSSGGRTRLGRISLRGNVYLRTLLIQGARSTLQAAINAEPSRASRLQRWIIELYGRKGYYKTLIAIANKHARILWAMLAKDERYDAAAWQRHPMHQPPLASNA

SEQ ID NO: 274883 - protein, 341 aa, unidentified
MSIITIGIDLAKNVFAVHGVDDNGKAALVKPKVARDKLVELVAQLPPCVIGMEACSGAHHWARLFRQHGHVIKLMAPKFVTPYRMSGKRGKNDAADAAAICEAVTRPNMRFVPIKEEHQQIILCLHRTRQGFVEERTATYNRLRGLISEFGIVLPQKVTCLRRDIGAHLEDLPGYANQCIGDLLAHADALDARIDEYDRIIAKAARDDSRSKRLMERPGIGPVSASALLASIGGGHDFKNGRQVAAWMGLTPGQYSSGGKARLGRITKAGDPYLRSLLVMGARAVLAGLGTKQDGFSRWARSLQERRGYWKAVIAIAAKNARLAWAVLKYGEEFRLNPNAA

SEQ ID NO: 274884 - protein, 390 aa, unidentified
MEARTVNNLPPAASHDDDAVRCVLAIELSKKSWIVAVNTPLSDKISRLTLKPCDGKELLDLCERIRTRVARETKQRVEIVSCYEAGYDGFWLHRLLEAHGIRNYVIDPASLQVDRRARRAKTDRVDAERLLRSLMAYLRGEPKVWSVVRVPSVAEEDDRRLHRERGRLINERIQHVNRIKGLLAIHGIYDYQPLRRDRMQPLDRLRTADGRTLPPRLKAEILRELQRLELVIGMIKAIEAERDAIASAKAQTEHTSAKKIQDLAKIKCIGPEFASTLVGEVFYRSFDNRKQLASYVGLTPAHFQSGATCHDQGISKAGNAKARTVMIELAWLWLRHQPDSPLSVWFRGRVGKLKGRIRRITIVAVARKLLIALWRYLETGLVPDGAALKL

SEQ ID NO: 274885 - protein, 337 aa, unidentified
MEQVQQYVGIDLHRRRSVIVRRTQSGETLDTVRIDNDPVALATELAKAGEHPEVILEATYGWYWAADVIEACGGTVHLAHPLGNNWGNRRVKNDERDATDLVDLLRMGRLAEGWVAPPPLRELRELIRYRGKLVHLRSNAKAQVHAVLAKEGVTVAMTDLFGVRGQHLLDEVELAKAYRIRVESLRDLIELYDREIAMLEKEVAPFFAGDLGYRAIQAIPGVGPVLAAVFVAEIGDVSRFTSARHLASWAGLTPTHHESDEKVRRGHITKQGSRLVRWAAVEAVSHQRSATPIRAHHQRVGERRGKQIGRVAAARKLLTLVYYGLRDGEIRCLAKAG

SEQ ID NO: 274886 - protein, 365 aa, unidentified
MQKISTMRTSGKNIFQGQLTMGVDLGDRSSAYCVLSEAGAIVLEHKLATTPETMKQVFGGMPRCRIAMETGTHSPWVSRWLTALGHEVIVGHAQKVRLITKSRRKDDRLDARTLARLARIDPELLSPVKHRSAQAQLHLTEIRARAGLVSARTALVNAARGLVKSYGERLRKCGTQQFTREITSGLSAGLREALQPLLREVESLNEGIQEYDRRIAKMAKQTYPETALLKQVKGVGEVIATAYVLTVEDPHRFRKSRDAGCFVGLQPGRRNSGDSEPQMHISKEGNEYLRTLLVQGAHYILGPFGEDSDLRRWGQKLAARGGKNGKKRAVVAVARKLAVLLHRLWVSGEAYEPLRNSQKAMSAAA

SEQ ID NO: 274887 - protein, 365 aa, unidentified
MPSVTSAAGLIHLGMDTSKNTIVVGVLMPGEQIPAVDRIFNDEAAIRRLIGRFPDRGLLRACYEAGPGGYDLYRLLASMGVACDVVAPSLIPKGGSDKVKTDRRDAVRLTRLHRAGELAPVRVPTPAEEAVRDLCRVRAAVLSDRKRAQQRLTAMLMRHGRIWRNTYWTGPHRAWIAAQSFDEPALATALAHYRATLDTRETELACIESELAPWARRDPLAPAVARLGCYRGIAELTGLTLAAEVVDWRRFPAARAFMGFTGLVPAEYSSGAKTWRGHITKAGSGPVRTALIEAAWAYRFQPAIGVTLRRRQEGAAPDTLARSWKAQRRLHGKYRQMVTGGKAAPEAATAIARELAGFVWAEMTS

SEQ ID NO: 274888 - protein, 433 aa, unidentified
MIKINYMSTLFVGIDVSSKSNVVYAMDFDQNKYIDSSFGNNQPGADKLAEIIAESMQKHSHLNTIIVALESTSVYSIHIANFLSSCELLMPYKPYVYCLNPKMTANYRKSYVGMEKTDHMDAFLISDFARVGRTKKCEPWRGSQYLALKRLTRHRLHLAECITREKTYMVSNLYLKFSELQLLDDDNQPFSNIYGATSSAVLTEFMSLQEIIDSPEEELLQFLAHKSRNRIADISKTSALLKKAARDSYRLDKCMYEPLNVSLASSFNCIQTYQKEIKLIDQAIDKCINGMNPNAFIILKSIPGIGSVWAAGMLSEIGDITAFHSSDALAKYAGLTWLKNDSGDFVSEDNRVSKAGNTYLRYYLGEAANSVRRHVPEYAEFYSRKYAEVTKHQHKRALALTSRKFVRLVFGLLVKNQLYTGEKLDAELNSLSE

SEQ ID NO: 274889 - protein, 378 aa, unidentified
MHSMKEDALVVGGVDAHADTHHAAALDQRGALLATQSFPATTPGYLELLAWLRSFGEVDVVAVESTGSYAAGLVRYLRGHGVRVLEANQPHAHTRRRRGKSDPIDAEMAARLALAGKATTVPKQTDGIVESIRLLRVARQSAVKSRSAAMVQLRDLTVTAPQELRDQLACRKTIRGKAALCRRLRPSTGELGQPAHAAKFALRSIAVRIKALDAEVAVLDRQLEELVSGAAPRTSQLLGISTGHAGRLLVTAGENIDRLRGEAAFAALCGASPVPASSGKTSRHRLNYGGDRQANRTLHLIAVCRLRYCARTRAYARRRSAEGKTKPEIMRCLKRYIAREVYYALRADLARLDHPRRPTRVTTIICGAGPIGITRRRT

SEQ ID NO: 274890 - protein, 425 aa, unidentified
MNFNTNEKINQVSENTLVIGIDIAKHKHFACAVDDRGRVLQKSFPIFQSRIGFEAFYERLLALKQAHEKQEILVGFEPTGHYWMNLAAFLTQYGIPFVMVNPMHVNRSKELDDNLQTKNDQKDALVIARLMRDGRFSYPRILEGVEAELRNGATLRAKIQEDLNALHNRMIRWLDRFFPEFTHVFKNFGKMAFAVLEKTPLPIDIQGKTPEELLFLYRQVEGMKNPHLTKAKQLIELAPQSIGLQEGLVMARFEIATLLTQYHMMQAQLDDLSNKLSELAHQMTDYDYLASVPGIGDVTIVELLSEVGSLTQYEHPRQLIKLAGLTLRENSSGQQKGQKRISKRGRRKLRALLFRVMMPLIRHNPAFKQYHEYYTSRTVNPLRKKQSIVVLCGKLLKILHALCKKKQRFNEQQMMNDFTTLQAAA

SEQ ID NO: 274891 - protein, 328 aa, unidentified
MAKEKFDVSFFDLTSKKVSNQPSHKVVTNNLKGIGKFLKSLLSDAVLVAEHTGVYGDTLLKCCMDSNVKIAFVGGYVIHRYRATPDRAKTDVLDCALLRDFGERYPDKLKYKTFPEEALYELRQLARHREMLVEQRKQLITADKSEDCRPIRSLAVKRSMDRIKEMLDTEIAETEKEMLKVINGHESIRHNYELVKSVDGVGLITAVELLVKTENFTKITTARQYATYAGTAPYEKSSGKMDKGAHISKIGNRRSKTLLYICAESARLHNKEIKLYYERRTLIDKKPRHYVLNAIANKLLRIIFTLVEKGEYYDANFIRQDPRVVKYN

SEQ ID NO: 274892 - protein, 343 aa, unidentified
MNDITTIGLDTAKSVFQVHGVDADGEVVLRRQLKRRQVLAFFAKLSPCLVGIEACGASHYWSRELTKIGHTMRLIPPRYVKPYVKSQKNDATDAEAICEAVTRPNMRFVPTKTSEQQSILMLHRTRHLLVRQRTATINAIRSHLAEFGIVAGVGRNGVEALLKVIADEQDDRVPAVARDCLMALGAQLEMLKRQALELDTKILATHRNNELSRRLEAIPGVGPCIATALVASIPDPKAFRSGRQMAAWIGLVPKQNSSGGKDRLGGITKAGDRYLRSLLMLGALSVIKRAKQLGYTRRPWLAQLMARRPVKVAAIALANKIIRMVWAMMVRGESYREPVALAA

SEQ ID NO: 274893 - protein, 323 aa, unidentified
MEEGRIQSTVAALEKHFGGEPRMRIALETGTHSPWVSRLLKSYGHEVIIANPRKIPTLTGSESKNDRNDAEQLARMAAFDPKLLHPIEHRSLERQQDLNLIHTRSVLVRARTMLVNSARGLVKSAGGRLPSCSSEAFPEKVSVAVPRELKAACEPLLKQIAQMNRTLAAMDKQIEGLAKKYPEIALLRTAPGVGPVVAACYVLTLGNPETMETNRQAGAYLGLRPRQQQSGECDPQCGITKRGNSYLRSLLVQSAQYILGRFGPDSELRCWGLKLAACGGKRGKKRAIVAVARKLAVLLLSMWRNGKKFEPFPQSATQLAKAV

SEQ ID NO: 274894 - protein, 403 aa, unidentified
MNSVGIDISKGRSTIAVMRPFGEVVISPFEVRHTGSELSKLAKQLKSLDGETRVVMEATGNYHASVAKLLHNAGLYVSVINAKLVHGYGNNELRRVKTDRKDAVKLANYGLDRWLTLPRYIPEEDTRLLLRNCYRQYRQYSKVQTVLKNNLISLLDTVFPNANRLFSSPIRGDGSEKWVDFVAEFWHCRCVSEKSERAFTSKYLRWCRKHGYNFSEAKAHTIYAEASGHIGVMPKSETTKLLVEQAVAQLRATSTALAALKLEMQTLASQLPEYPVVMDLFGVGPTLGPQLIAEIGDVRRFYSKKALVAYAGLDAPPNDSGDVTGRHKSMSKIGASSLRRTLFLVMSVYLQNAPLDEPVYQFMDRKRAEGKPYRVYMMASANKFLRIYYATVKAYLESLEHTA

SEQ ID NO: 274895 - protein, 399 aa, unidentified
MRKIIGIDVSKSTAKLSVAIDAKTVYEGDITLDMIGFTSLKAIIDSYGGAEVVFEATGVYSRRLERYLLDESITYHILNPLVAKKRLDDGSRTRKNDVRDARGLAITEFAKPPKPFKPSFYDPVYRELMDISRYYDQQTEDLKRTKNRIHRLIQLSFPGIEEELDLRKPSALHTLTLFSHPAELTGLSFENIKTQILDMHLKGVGAVRSSNLARALWRSRARSYPAVSGNSFVVQAVKHETQKALKLLSEREETVQAMVSLAERTPEYVILLSIPNIAENTAVRLVAELGDIRRFKTRAKLNSFIGLDLQEMQSGNYTAQRKITKHGNAHTRKLLYWTVINMIGSGAQPSHIRDFYAKRQATASRRKPLLVACMDRLLKTIHYLVNTNQLYSYELACSR

SEQ ID NO: 274896 - protein, 329 aa, unidentified
MIEEVRARVGRETGRAVEVVSCYEAGYDGFWLHRQLEAHGIRNYVIDPASLQVDRRARRVKTDRIDTDRLLRSLMAYLRGEPKVWSVVRVPSVAEEDARRLHRERDRLVSERVQHVNRIKGLCALQGIYDYNPLRPQAMARLEQLRTAQGGAFPPRLKSEIMRELQRLEMAVEMIATLETERDAIVDDEASTHLNAKKIQALHKLKAIGPEFATVLVGEIFHRDFNNRRQVASYVGFAPSPFQSGNVAHDQGISKAGNRKGRTTGIELAWLWLRYQPDSDLSVWFRARVGTTKGRIRRIAIVALARKLLVALWRYLENGLVPRGAVLKG

SEQ ID NO: 274897 - protein, 343 aa, unidentified
MQAYAGKQFVGIDLHRRRTVIVRTTETGEVLETVRIVNDVQRLASVMARAGDCPEVVLEATYGWYWAVDALQAGGANVHLAHPLGVKAFEYRRVKNDVRDAQDLADLLRMGRLPEAWIAPPPTRELRELVRHRAKLVGLRSHCKAEVHAVLAKCGVQVLMSDLFGVWGTELLDGLELPAPYAARIASLRRLMDDVDFEINLFAGIIRGRMAQEPGYTAVQKIPGIGPTLAAVLVAEIGDITRFASASKLTCWAGLTPKHHESDTHVRRGRITKQGSRLVRWAAIESVKTVSKNSEVGVLRERVADRRGRNIGSVAAGRRQLELVFYALRDGHVRALEHLPRVA

SEQ ID NO: 274898 - protein, 358 aa, unidentified
MVQRKELNFEGQNIYIGIDVHLKTWHVSILTESGCLKKHSQQSSAQALFEHLKKHYPNGNYLSAYEAGFSGFSTYYSLLDFGIECLPVHAADIPTGQYESVMKTDAIDSTKIARALKSGLLRGIYIPKKEVLDDRNVMRLRITLKRQLSGYKSRVKHLLYNNGVIYPECFQNSKSHWSKRYLKWVHEDVQLLSESRNSLDLLLRQVELFRKSLLEITRLVRTLSRNGRYGEAYENIVSIPGIGMITGMCLLTEIGDIHRFRNERQFASYLGLVPTSHSSGEKTSHGEMTFREETLLALLLGESPWLAIRQDRALAAAYGEYCKRMLPQEAIIRITRKLSNRILIILKSGKKYEHDRCY

SEQ ID NO: 274899 - protein, 408 aa, unidentified
MLEVKVERCAGIDVHKKFLAVCVMIGLADQKPETEVRRFGTSVTELEKLRAWLVEKGCTEAVMESTGSYWKPVFNVLEGAVKLILANPEQVKALRGKKTDPKDCRWLASLLRHGLVQPSFIPPRDIRELRDLTRRRRTLMQEGARERNRVQKLLEDANVKIGNVLTNVFGMSGQAMLEALLENKLNAEEIANLAQGRLRPKIPQIVEALEGHHMSEHHRILLKQILKHMAFIEEMVTELDLEISNKLQPYEKQMKLACTVPGIGRDAAASILAETGMDMGDDGPFPTCHHLASWAAICPGNNESGGRRKNGKTRKGNRWLRATLAQTAWAGAAKKDSAFRNRYYRLKARRGPQRAATAVSHAQLIALYWVIRNGVPYQEQAHQLKEQQRDSLIRHHLRRLAELGFKTA

SEQ ID NO: 274900 - protein, 423 aa, unidentified
MREFGAFTKDLDELVEWLLTCGVKTIVMESTSVFWIPLFQKLEAARLEVLLVNARHVRHVPGRKSDCKDCQWLQRLHSYGLLNGSFRPSDDICRLHTLMRHRDNLTKSCGAEVQHMQQALNQMNIHLHHAVSDLNGETGLRILDSILAGERDPKKLVELRDAQCSKTRPEELGAALQGDWREEHLFVLRQSLENYRHLLKQMEICDAELEKALAKVVVNPAAFTEEERPENPPAAEAKAKTRKKFKKLKSSTGLKRDLSAELTRICGVDLTRVIGLNVLGVLILISEIGVDMSRWRSVKAFCSWLGLCPGNKISGGKILSSHTVHVVNRVSILLRTVAPAVGRSDTWLGIFHRRMRARLGPAAANTATARKLACMIYHLLKYKEDYIDVDCLIYQEKIRKSRITKLSRQAEELGFELTKKEAA

SEQ ID NO: 274901 - protein, 344 aa, unidentified
MQISTIGLDLGKRVFQVHGVNALGTCVLSKRLSRAQVVEFFKALAPCLVGMEACGSAHHWARVLSGLGHEVRLIPPQYVKPYVKRNKTDAADAAAICEAVTRPSMRFVAVKSVEQQGLGVLYRTRDLLIRQRTMSVNAVRGHLAEFGFVVAQGLTQVGKLAQLMKDAPADHVPELAKQMLTLLFEYLLKLDTRIRELDRKIAAVRRENTVCRRLGTIPGVGPIIALAVVAKVADATTFRSGRHFAAWLGLVPGQHGTGGRVQLGRITKRGDAGLRRLLVCGAMALIRQARVRGARTMPWLEALLARKKIKLAAVALANKLARIIWALLVRGEEYQPDMGLSVTA

SEQ ID NO: 274902 - protein, 326 aa, unidentified
MRKKGYSVMGNSPTSFVGIDVSKATLDVVIRPTGEYFQVPNSDQGHSQLIERLMLLAPQAIVLEATGGYERRCTAALVDAQLPVAVIHPKRARELASGLGKLAKNDRVDAGVLAYCAQHCQVRPVIKTPEQQARLEALVLRRRQLVTMRAAEQMRLEQAVVKEAKKDVSQSVSFLNKHIDKIEKQIARLIDSDDHWQKRSEIIDSVPGIGPTTAAVIVAELPELGSLNRRQASALVGVAPYAHDSGKRKGKRTIYGGRQDLRSSLYMATLTATTKNEVIKIFYQRLIAAGKPFKVAMVACIRKLLGILNQMVKNGQLWNEHLPKTA

SEQ ID NO: 274903 - protein, 357 aa, unidentified
MNTAAALSFDQTHLFVGIDTHLKNWRVTTRNAGIELKTFSMNPSPLELISYLHNHFPSGTYHLVYEAGFCGFWPLRVFQQHHIDCIVVNPADVPTTNKEKVNKSDPIDSKKLARELEKNSLHGIYVPTVEHEELRMLMRLRYRVIQSQTRTKNRIKGLLYSQGIAIPLQFSGPARWSHHFICWLESLPMNTTAGRFTLHNLIAQLREIRQHNKNVLKQLRAEARKDTIAPILCTLMSVPGVAFITAMTLYTEIIDMKRFSDENHLASFIGLVPSVQSSDENIYSNNITVRKHSFLRTIMIEAAWTAVREDPAMTLRFSELNKRMKGQDAIIRIARKLISRIRHVWLHQQEYQYSLVA

SEQ ID NO: 274904 - protein, 365 aa, unidentified
MTESTWVGLDVHQDSITAAILRGASSQPEVVRLPGDLMKVRKLFRRLSTEGPVRSCYEASGAGFVLHRVLREDGFHCEVIAPSLIPKKPGDRRKTDRIDAVNLALLYRGGHLTPVHVPSSEQVELRQLLRLRGCYQQQTKSTKLRITSILRTHGIRFTDGASLWTKKHRSWLEQMRTTLTGPLGIVIAAELEHHEYLEMVRNSFDAEIARVAQSPTYRPFVEALCCFRGIKTLTAMTILCEVGDIRRFDSPRRLAAYLGLVPSERSSGDVQRRGPITKAGNSHVRRLLVEAAWNNRHRAPSDLVLNRRRQGQPPEVVAIAMKAQHRLSKRFHHLLQRKHVNVAVTAVAREMCGFIWAALRALPQN

SEQ ID NO: 274905 - protein, 367 aa, unidentified
MALKIVYKICCGIDVHKTFVVACVASTSDKGITSYESHRFSTYTSGLKTLLQWLIDRNCKDVCMESTGKYWIPVYNILEKGCSIVLAHPKYVKAILGKKTDKKDAKWIADLFKHDLVAGSFMPPADIRQLRDLMRYRFKLTCFKSSEKNRLQNCLTVSNIQLGNVVSDTFGKSAQAILDKILEDPADTSFDLEPLVFKSLKKKLPELRDAIDGYITPEQAGKLKVIKAHYENLEARKAELEELILALATPYQQELAILQTAPGISSDFTAIGIIFEIGTNMEAFPSAKHLCSWAGLTPTNNESAGKKKSVRVSKAGCYIKPLLVQCANAVIKSTKHPEMRNRYLRLKKRRGHKKAILPENRSSSSRA

SEQ ID NO: 274906 - protein, 481 aa, unidentified
MSRQKKHPEEPTEEKTRAGKSKRGGRRKGMCLEDRPILEPNAAGIDIGAREIFVAVPPDRDEQPVRVYSTFTEDLEKMALWLVDCGITTVAMESTGVYWIPPYNVLEQHGVKPCLVDARGMKNVPGRRTDWHECQWLQFLHSVGLLRAAFRPADDVCAVRSLMRHRAGLVEMTSQHIQHMHKALTQMNVQIQHVISDITGLTGLAIADGILEGQRDPATLAKLRDPHIKANEETIRKSLEGNWRQEHLFTLKQSRKSYQHYQGQIAACDEEIEKLLVAFEARVDPVERPLPPDRKKKQSGRKKKNVNPKTGFDVRTESYKLFGVDLTQIPGLMAMILTLFSEVGRDMSRWPTAAHFVSWLGLCPDNDISGGRVLWRGLRRVHNRAGQLFRLAAFALHHDQTPLGDYLRRMKSKLGPAGATTATAQKIAIIFYTMVKNQVEYDATLWAQRDAERDQRFEAKLKRQAQRLGYKLVPIEEKPAA

SEQ ID NO: 274907 - protein, 366 aa, unidentified
MKKYTVFHSVTAAPAVAKSKVMRSGSLLKIGLDIHREKFVAVAQYDHATARPPQHFAPAEFVPWVEARLREGFQVHVVHEGCGFGYGLYRALLEAGASCYVIAPQKLDEANTRVKTDGRDSHALCLRLDRYLAGNKNSLAVIRVPCEEEERARHWGRQREQLVHHRQKLEAQGRSLLIDHGLPAPARWWRPQSWSRLDKLLPVWILSHLELYRPMLLALDQQIRTLTAELEKAAPVALPKGMGALSTVVISREICDWQRFNNRRQVSSYTGLCPGEYSSGAKRVGRSITRHGNSRLRAALVELAWRLVRYQPGYHAVQKRLTVLAKGARATRAHRKKAIVAVARQLAVDLWRLHTGRCTPAVLGFK

SEQ ID NO: 274908 - protein, 338 aa, unidentified
MDHYVGIDLHSNNSYTAIIDNDNKKVFKKKTKNDLRLVLHALKPYRDQVKGIVVESTYNWYWLVDGLIEEGYTIHLANPTAIKQYTGLKHSDDVTDAFHLANLLRLGILPTGYIYPKEERPIRDLLRKRMQLVQQRTLQIQSFQNLVSRNLGKSINGNAVKKLSEDDVEHLFHDKHLVVSGKASIATILFLRDRIQEVEKIIHKAAKLRDEYTLLMTVPGIKKILGLTIMYETGPIERFAKVGNYASYCRCVGSRRLSNDKVKGKGNRKNGNKYLCWAYVEAAHHAQQHYEYVKRYYQRKMVKTNMIVARKTIAHKLARACYYIIRDQTRFDPARVFV

SEQ ID NO: 274909 - protein, 411 aa, unidentified
MEVLYERCCGIDVHKRIVVACLKCGKQQEIREFGTTTDELRTLTKWLQDSNCQMIAMESTGSYWKPLYNIFELSALDAMVVNARDMKNVPGRKTDVKDAEWIADLLQHGLLRASYIPTREQRELRELSRYRKSLIEERARELNRLQKMLEGGNIKLASVVSDINGRSARNLLTHMLKHDTPLTKEDIFGMIHGKLRHKMDAIMKSLDGFLTPLQKQLMLKVVDHIDDMTKRIGEMDNLINQYLTGYHDAINKLDEIPGIGRQSAETILAEIGLDMNRFPTERHFSSWAGLAPGNNESAKKRRHGRTTKGNITLKTTLIQCAKAAVKKADSFLSAQYQRLVVRRGANRATVAVAHTMLIAIYHMLKDNVPFVDLGAAYYNKFNAQSKINHYLKKLQQLGWEPNDATISVAAV

SEQ ID NO: 274910 - protein, 347 aa, unidentified
MRFYTRQHQYYCGIDLHARSIYVCILNQEGEVLVHRNLKAKPHAFLAVIAPYREDLVVAVECMFTWYWIADLCAQEGLTFVLGHALYMMAIHGGKAKNDRIDSYKIAHLLRGGNVPFSYVYPQPMRATRDLLRRRNFLMRKRAELLAHIQNTNAQYNLPEFDGSLRYPANREDLAEHFTDDSVKKSIETDLALIEVYDKHLKEVELYPARHARIDDPNRYHLLKTVPGVGQILGLVLLYEIHDIARFPRVPDFVSYCLLIRSSKESAGKKLGTGGKKIGNAHLKWAFSEATCLFLRKNGAAQKYLQKLEARHGKGKALGILSRKLATAVYYMLKRQEVFDMKKFFET

SEQ ID NO: 274911 - protein, 394 aa, unidentified
MFSFFVGIDVGKWNHQAAFLDSSGIHVAHELAFTNTSEGFQFLLSSLSSFDKTQTVVGLEATGHYWLALFSFLVDNSWIVKVINPIQSDALRNINIRKTKTDRKDSVLIADVLRFGRYTETVLPEEPILQLRELSRCRTGLVESSGNLKRKILGILDRIFPEFASCFSTVFGTAPTELLQEFADPEEVANCDIEKLIKLLEKESRGRHSAQKAQELKDKAAQSIGIRMGLDAIKFELRLLLQQLDFIKKQTKDIDKFLKKLMKQHEILLSIPGISHVLGAAILGEIGDVNRFATPQQLQAFAGMDPSVTQSGNFTGTQGKISKRGSPYLRRALYLAANTARRFDSVFKEHYEKLVARGKHPKQAMGAVSTKLLRVIHAVLKSQKPYDPKKLVHA

SEQ ID NO: 274912 - protein, 341 aa, unidentified
MTMIIGIDPHKSTHTAVAIDGDEQPVARLQVAADRCQTARLLAWAVPLGDERTWAIESAGGLGKLVAQQLLAAGEHVVDVPPTLSARVRLLGSTKAGKNDGNDALATAIAGLRHCGLRAVHPEDQSAVIRIRIDRYQDLIALRTQAACRLHVCLRELVPGGAPRRLSADRAAKLLRAVRPDRAAAIERRRLAGELLADVRRLDREIATARARVTDAVTASGTTLLEVHGIGSIVAGFILGHVGDPTRFTTPDRFASYNGTAPIEASSGPRKRHRLNPRGNRTLNHALHLAAVTQIAHATPGRVYYDRKLAEGKSTKEALRALKRRISDTVWRQLQADLRHR

SEQ ID NO: 274913 - protein, 421 aa, unidentified
MRAFGLDVHRDFCEVAIAEGGAIRSAGRVATRVGSLELFAQSLVAGDVVALEATSGADRIVSLLQANGIRVIVANTRKLRSITEAKAKTDRLDARTLARLLVSGLLDEVWTPDERTRSLRRLTNRRERLVRARTRAKNEAHGVLARNLCERPPVTDAFGKAGRRWLARLDLPVDERLTLDGCLRQVDFLDAEIAALDSEIARAALAWPEVLRLMTVPGVNVQTAATFMAAIGDIRRFPSPRKLVSYLGLDPRVRQSGSTPARHGRISKAGASEPRHMLGEVAWKVMLTPGPLRAFFERVRARRGPQVAATATARKLTVLLWHLLTREEDYAFARPAMTRNKVRRLELLAGAPAQKGRKGIAGGKSKAVFEAERELSRQAEAAYRRLVSDWRSSGPPKAGAGATPGRASSKPSKGKATRQTP

SEQ ID NO: 274914 - protein, 407 aa, unidentified
MICLGIDVSKRKSTVCFMAPGDKIIRRPFDVKHTKEELQPLVDEIRVQAKYDEIKVVMESTGVYHLSIAYFLQQNGIFVSVVNALKVANFNKAENFRHTKTDSIDSTNIARYGIAYWAKLPQFDLNGDKYFLLKRLCDAYLNFSEERSRILLQLQSQLEQTMPGIFDLFGGFDINSGKDKLLDFLERYCHIEDIIAKSEAEFVASYREWAKEKGYRSNESKAATIYAQAKNGIPSIPNNPIVRETIMWYVGLLRRADEALMASLTRMEDIAKDLPEYELVGEMGGVGRVTRVALIAQIGDVRRFKTKHSLICFAGLTPSIHESGKFRASQNHIVKKGPARLRKVLYQVMMSLVMHKIPKDDAVYRFIKKKEAEGKYKKVAKVAGMAKFLRIYYGRVMHLYRDLGLAA

SEQ ID NO: 274915 - protein, 329 aa, unidentified
MNYYWFIGIDLGKTSFDVSILSKDEHEIAHGQFKNTEEGMVAMIAWLASHEVDTTQTLFCAENMGKYTSVLALYAVEHKLNLSLACPLDIKHSAGLTRGKNDRIDALRIAQYAQRKYRALKLYTLPETTLVKLRNWLNLRNIHIKNKVALENQLATFESDVVVDDEIVNYSNDAIAESKRKIAELEKKIESVIEENTSVKQNYSLLKSVIGIGMINAVLLLCTTDNFTRFETPRQYASYCGVAPFEHSSGTSVRGKTRTSRIANMEVKTHLTNAAVSAMSADPQLRQYCQRKLAEGKHKASIINAVRFKLIARCFAVVRRQTPFVKLVA

SEQ ID NO: 274916 - protein, 403 aa, unidentified
MNSVGIDISKGRSTIAVMRPFGEVVISPFEVRHTDSELSELARQLKSLDGETRVVMEATGNYHASVAKLLHDAGLYVSVVNAKLVHDYGNNELRRVKTDRKDAVKLANYGLDRWLTLPRYIPEEDTRLLLKNCYRQYRQYSKVQTVLKNNLISLLDTVFPNANRLFSSPIRGDGSEKWVDFVAEFWHCRCVSEKSERAFTSKYLRWCRKHGYNFSEAKAHTIYAEASGHIGVTPKSETTKLLVEQAVAQLRATSTALAALKHEMQSLASMLPEYPVVMDMFGVGPTLGPQLIAEIGDVRRFYSKKALVAYAGLDAPPNDSGDVTGRHKSMSKIGASSLRRTLFLVMTVYLQNAPLDEPVYQFMDRKRAEGKPYRVYMMASANKFLRIYYATVKAYLESLEHTA

SEQ ID NO: 274917 - protein, 327 aa, unidentified
MRAVFGIDVSKASSEVAILINSEKVHGYTMLNDAVVFTRLLGDLESVHNPEIVFEATSVYSRRLQAFLDEHGYSYTRLNPLESKNQLDSLRVRKTDKIDAEKLARYQFVLNLKLSELIDIIRQSTSKRISNKRLSYLTEKLTALAKQSYCAVKKTSPLLEEVRYYEKELLRLSDRRKAVLDDMFKLAQSLPEYEIILSIPGIAETTATSIIGELSNIRRLQSANQINAFIGIDLRLYESGNFLTKECIIKRGNLYARKILFKCIHNIASASQTKPCHIADFYQKRKQQSQTASTKPHTVAAIHRLIRTMYYLIIHNKFYVYNLTQNR

SEQ ID NO: 274918 - protein, 372 aa, unidentified
MNYNTVYVGMDVHKESFTLCAYTIDAEKGSHFQRTEADYKNVLKYLEFLRTVYGNDANFICGYEAGCLGYTLYHQLTEHDVNCVILAPTTMLEQRSKRRIKTDRRDAEIIGKCLAQHNYSPVHIPTATDEETKEFLRMRDDHKLALKKVKQQILAFCLRHNYRFDGNSHWTAAHIKWLKSLNPEALYKEILDEYLLTYTTLSDKVERLDKRIEELASKDEYRESVKKRCCFIGIKTHTALSVLVEVGDFQRFASAQNFASYLGLVPGEDSSGDGQTRLGITKAGNRHVRMLLTEASQCYARGQIGFKSKELKSRQAGNSPQVIAYADKANERLRRRYYKMVLGKSKKHNVAKTAIARELACFMWGMMTEHIA

SEQ ID NO: 274919 - protein, 414 aa, unidentified
MDVVHPRCAGVDISKRDAKVCVRVAGSGRARAKSLVTTWGAVTNQVLALRDHLIAEQVTLVVMEATSDYWKPFYYLLEDGPFEVMLVNARHVKNLPGRKTDVSDAAWLAQLGAHGLVRGSFVPPEPIRQLRDLTRTRTTLVRARAKEIQRLEKLLEDAGIKLSSVATDITGVSGRAMLEALIDGQRDPVVLADLAKRRMRSKIPELTEALTGRFSEHHGFLAQLHLDLIDNHTRAIDELTGRIEVVVEPFRHVRNLLVTIPRVSTLVADVIIAETGGDMSRFPTAGHLASWAGTCPGSNESAGRIKSTQTRPGNPYLKGALGIAAMSASRSKDTYLAAKFRRIASRPGPVKAIVALEHAMLVAIWHMITNGTAYGEPGGDYFTRLNPDKAKHRALDQLHKMGYSVTLEPLAVAG

SEQ ID NO: 274920 - protein, 315 aa, unidentified
MEGEVMVGIDVSKARLDVAVLPGEEIFSEEHDSRGIAALIERLKKIAPALVVLEASGGLETGLVAELVAAGLPAAVVNPRQVRDFARATGQLAKTDKLDARTLARFGDRMRPQLRKLPDQQELALKALVVRRRQLVEMMVAEQNRLDRAPKVLHRQLRRHVDWLRKQIHSLDRDLDHELRNSPVWREKETLLQSVPGVGPVVCSTLIAGLPELGTLSRRQIAALVGVAPLNRDSGTLRGRRMVWGGRGQIRTALYMSTLVAVRFNPALKSLYLRLRAAGKPPKPALIACMRKLLTILNAILKNRKPWSPQCLNLT

SEQ ID NO: 274921 - protein, 391 aa, unidentified
MYSDGSKHSSFSVPNNRNGAKIIVDRVTSVLLSQDIPQVVIGMEATSVYGDNLMRFLRESGSLGRFERNLHMLNPKQVKKFRDAYSDLPKNDYVDSYVIADHLRFGRINKEVYMDDYKYQALKMYTRVRHQLVQELTREKQRFLNTVFISFSGLTQEKIFSDKFGATSTALIEEFSSLDELAYMSTDELVDYIRKKGKNHFDDPEEIAEAVQRAAKNSYRPPQVIADAAKQMLAISMNTIRLLQKQIKEYDKAIEKMLEAFPQTLTSIKGIGNIYAAGIIAEIGDINRFPSQASLAKYAGLVWTQHQSSDFEAEDKRMIQGGNHHLKYYLCEAANALRRCDPEFKRFYALKYKEANKHNHKRALALTARKLVRLVYTLLKTNRLYIPPEEY

SEQ ID NO: 274922 - protein, 278 aa, unidentified
MSSTKYIGMDVHTESISIAVRNSLGKLVMECVIETKASTIVQFIDGLRGDLRVTFEEGTWAAWLYDLLKPHVTEVLVCNTRKNASRDSSKSDRIDARKLSEQLYMNNIKSVYHGEHGLRTLKELARSYLTISKDLTRVMNRLKALYRSWGIPCAGKEVYAPRHRAEWLAKISEAGVRRRAEHYYQQLDVLRPLHQETRRDLLLEAKKHKPWKLLRLIPGIGPIRAAIVIAVMQTPHRFRTKRHLWTYSGLALETYDSAQYRVAEGQLQRSKNPRRFVV

SEQ ID NO: 274923 - protein, 384 aa, unidentified
MTKHNILFIGLDTHKEFNEVAYIEDQRGAQPIHHGRIPSSKVAIKKLIRQFESKYPNATLHFVYEAGPCGYWIYRLITSLGHCCYVVAPSLIPKKPGERIKTDKRDALKLAKLLKSEDLTPIYVPEPEDEAIRDLSRAREVAMKDLKDAKYQLKALLLRNNINYAGTANWSLKHLRWLTELVLPHPAQQIVLQEFIQTINERTARLDRLDNELSHHVYQWRYYPVVKAIQAMRGVRLLVAAGVVAELGDLTRFDHPRKLMSYLGLVPSEHSSGGKRHIGAITKCGNGRARRLLVEGAHSYRHAANISTELQKRQEGLPKQIVDIAWKAQLRLCKRYKKLINKGKHYNLVVTAIAREMIAYIWAIAKEVVLIPVNPRLRLARVPA

SEQ ID NO: 274924 - protein, 318 aa, unidentified
MTVPACFVGIDVAKATLDVAVRPSGEHWSAPNDDAGIRTLVERLRPLAPALLVCEATGGFESATVAALAAAGLTIVVANPRQVRDFARATGQLAKTDVLDAHVLALFAERVRPEPHPLPDAAAQALDALLTRRRQLLEMLTAEKNRLGFAAGPIRRGITQHITWLKRRLVDVDHDLEQTIQASPLWRAKDDLLRTVPGVGRVTSRTLVGELPELGRLTHKQVAALVGVAPRARDSGTLRGKRMVWGGRAPVRAVLYMSALVATRYNPVIRAFYQRLRAAGKPAKVALVACMRKLLTILNAMVRTNTIWRAPLGVGATS

SEQ ID NO: 274925 - protein, 368 aa, unidentified
MSRGSLGVLTSTTKEAPVSTDYDGRQYVGIDLHRRRSVIVRMTPEGQQLGWSRIDNDPVALGLELAKAGPDPEVVLEATYGWYWAVDALQATGARVHLAHPLGVKGFAYRRVKNDVRDAADLCDLLRMGRLPEAYIASRGERELRELVRHRAKLVALRTGLKAQVHGVLAKQGLLPPCSDLFGVAGMAWLRAAPLDLVYRQRVVSLLELINAYDAEVEMFRTMIAHRFRGHRGYRVIQQISGIGPTFAAIFIAEIGDITRFGRPQKLTCWAGLTPRHRESDTTVRRGPITKQGSTLVRWAAIEACQRTRPGTKLATDRARIIAARGRNIGVVAAARKLLTYVYYGLRDGEFGRWPKEPREQGWTQQDA

SEQ ID NO: 274926 - protein, 384 aa, unidentified
MKKNSIVAVELKKPRHRKRAKGRASQRSRSTPAPQQTIGVDLGDKSSCYCVLDAAGEVQSERTVATTKKGMTQTFGRIGPSRIALEVGTHSPWVSRLLRDLGHEVMVANARRVRAITASSRKDDRMDAQMLARLARVDPGLLCPIRHRGEKAQQHLALIKARAALVEGRTALVNTARGLTKSSGERLASCDTDRMGVHQLEGLPAEMQAVLRPVLEVVEAMTEQIQGYDSQLAEIARSEYPETALLEQISGVGPLIALTFVLTLEDPQRFQRSREVGCYLGLRPTRRDSGESQPQLRITKEGDVYLRMLLVQGAHCILGRRGPDTDLKRWGLKLAERGGQNAKKRAIVAVARKLAVLLHCLWVSGEVYEPLRHSQARAAQKIAS

SEQ ID NO: 274927 - protein, 348 aa, unidentified
MHSTTVAVDLAKNVFELAVADGEGKIHKRLRLNRVRFAAFFVQCPPSRVLMEACGSAHYWARCIAGHGHTVELLPAQYVKRYVRRSKTDRADAAALIEAARCTEICPVPVKSLEQQQLLALHRLRSQWMSTRHRSINVLRGLLREFGLPIPVGAHAARAQVSQHLAQPPQELPAGLLPFLAQMLAEVDACEQHIEQVEHQLTALTSRDEAVKGLQQIPGIGLLTSTALRATVGSIERFPSARRFASWLGLTPREYSSGERRRLGSISKQGDTYLRTLLVHGARSALLVAHRQQRTGKPLDRLALWALKCEQQRGHNIATVALANRMARIAWATWKHHRSYDGNWAATA

SEQ ID NO: 274928 - protein, 343 aa, unidentified
MQTVTTIGLDIAKSVFQVHGIDAAGQVVIRRQLKRRYVLAFFQKLPPCLIGIEACASSHHWSRELQALGHTVRLMPPAYVKPYVKRQKNDATDAEAICEAVTRANMRFVVTKTPEQQSGLVLHRARHLFIRQQTAVINAIRAHLAEFGIIAPVGRHGVEELLNVVADPNDKRVPEIARACLLAFGAQLRSLKEQILEFDRMIRAWHRSSETSRRLDDCPGVGPVLATALVATVADPKSFRSGRNFSAWIGLVPKQHSSGGKNRLGSISKQGDCYLRGLFVAGALAVIRYAKIHGTKHRPWLTALLARRPTKVAAIALANKIARMAWAMMAKGERYKEPIALAA

SEQ ID NO: 274929 - protein, 339 aa, unidentified
MNKNDFAGMEVSQKELLVALRRGEQTLPLESFPNTPEGHRAVVRYLARKGRRVRVCLESTGVYGLDVALLLHQRPGVEVMVANPRAVRHFAQALIERSKTDSLDARVLLEFAARMPFQPWQPPSPTVRHLCALARRIEAVTDLCAAERNRLHAAGAAAALPAAIRQEIRRSIAFQSRALARLTRQALALIARDPLLQERFGSLDSVPGIGATSAIALLAELSLLSPDLDVRQWVASAGLDPREHSSGSSVHKKPRISKAGNRHLRRALYMPALVAVRYDPHLGSFYQHLLGKGKAKMQALVAVMRKLLHAIFGMWKHQQAYDGSKLFPLAPELCTAEVA

SEQ ID NO: 274930 - protein, 391 aa, unidentified
MDRAWVGIDVGKEFHWAHALDASGRELLSRKLQNDEADVSKLIDEALSLADEVVWTVDQPGGSAALLLALLWERDQKVLYIPGLSVNRASDAYRGESKTDARDAHVIADQARMRADLGNLEPDEEELAELRILLGRRRDLLVDQNRSITRLGEALLSLSPALERALDLNRRGPLTLLTHYQRPAQLRRAGHKRIAAYLRARRVKGFESVAGRALAAAKSQSIALPAESIAARIVAELATEILALKDRTELVDEEIERRFFDRPEAKILASLPGMGPLLGAEFLVAVGDLSAFSSADHLAAYSGLVPAANDSGKRVGNNRRMRGGNKNLKRVFYQAAFASLRSSPESRVFYDRKRAEGKRHIQALIALARRRVNVIWAMLRDGTTFQTRSAA

SEQ ID NO: 274931 - protein, 353 aa, unidentified
MKNSQVVYIGIDLHSNTSTIGFMNHQGEYCGHRQVKTTAQNLINQVSAIPGKVKKLTLEQSNMAFWAGELLQAYVDELIICDPRQNALISRGENKNDGLDTLALCQLLRLGQLKEVWRPKQMGLRRVFFHQVKEYHRLTKTMSIHKRQLGDALRHWGINIKLTRADYDRPEQVLSGVNNELLREEFYQKMHMVNLLIERKELQKQRIQETAKAFDEVTEYLKIPGIGPVGACTFSGYIQNPNRFSRPGQLIKFCKLGVRHFTSDGKKVRNPRLSKAGHGILKNLAHVAWKTNLHCNNEINHYYLQQLDRCGNPVHARLSTQRKILITMWALWKNKTHYDPNRFTYNGRGGSTR

SEQ ID NO: 274932 - protein, 375 aa, unidentified
MKHSSTLYVGLDVPKESIAVAYAAEKRDAEVISLGTIGTRQCDIDKLIRKLQSKGHALVFVYEAGPCGYWLYRYLTKKGLPCWVVAPSLIPKKPGDRVKTDRRDAAQLARLMRSGDLTPVYVPEVEDEAIRDLVRAREDTVQDLKAAKYRLKAFLLRQDIRYEGRANWGPAHLRWLAEIVCPTPAQQIVFQEYVRTVSEHHERLQRLEAELRTQVRDWRLHPVVEALQALRGVQFTVAVTVIAELGDLTRFDNPRQLMSYLGLTPSEYSSGERRRLGGITKAGNTHARRAMIEGAWAYRFPAKVSRAIQIRLEGLPQAIQDIGWKAQVRLCKRYRQLTARGKNVNQVVVAIAREMAAFLWAIARQVPLAAPPATR

SEQ ID NO: 274933 - protein, 350 aa, unidentified
MLIIGCDFHTRFQQIAMLDTETGEIVERQLEHGSGEAETFYRSLPPPVRIGMESTGHAHWFERLLAELGHELWVGDAARIRAAEVRKQKTDTRDAAHLLDLLVTNRFPRVWRPSPADRDVRQLLVHRQKLVWARSSVKNQLQALAMNQGVCRRRKLWASAGRRALEELALGPWTSRRRKELLALLDQLDGSIRELDRAVEGEAQKRTDAVRLMTQCGVGPVTALAFVLTLGPIERFRRSKQVVSYLGLNPREHSSGGRQRLGAISKQGNSMLRSLLVEAAQTASRFHPELRQKYQRLKFRRGSGVAKVAIARTLAVRLYWMLREPADPAQPVRMQGSPAAILVDASPSHF

SEQ ID NO: 274934 - protein, 358 aa, unidentified
MQKNKISFKEQRIFIGIDVHKTTWAVAILTESGVLKKHSQKASAKELFYFLKKHYPEGEYHAVYESGFTGFSTYYALKDLGINCIVIHAADVPTTQYEEVMKTDNIDAVKLAKSLRKGDLKSVYIREKENLDDRSVVRIRKTIQSDLCSYKSRIKHMLHCHGVDIPEKFNRSGSYWSKAFIKWLKEDVHLLSSSRLSLDLLIHQVEINRQSLLEATRAIRLLSKTDRYKTDFDLLMSIPGIGVLVSMCILTEIYNINRFNNEREFAHYLGLIPTCHNSGDKKSNGEKTFRGNKQLGPMIVEASWKAIRSDIGLGMAFSYYLKRMKQQEAIIRIARKLSNIIFSVLKNARPYESYCWDK

SEQ ID NO: 274935 - protein, 372 aa, unidentified
MTEITRGEIVRVGVDLAKHVIQVHAVDQAGHTVAVKPLAREKFLAWCTLQLPPGCLIAMETCGGAHHWARRLQEMGFDARLIAGHFVGPYRMQGKSGKNDANDAAAICEAASRPSMRFVPIKTAQQQALLCVHRLREGYKEERTACINRIRGLLTEYGLVFAQSPEALRLALPDTLEDASNELPALARMALQRAHLHWTEIECHIAWCDERIAAHVRTDAQAKAAAQLCGIGPVTASALVASVGDFTQFKTGAQFGAWLGLVPSQNSSGGRASLGRITKRGDDYLRTLLIQGAKSAVMSAHKRSDRISAWLVQLKERVGWQKAVVALANKNARIVWAVLAKGRIFDPNHVSIKPGEIVGAVVGAVAATAWAP

SEQ ID NO: 274936 - protein, 413 aa, unidentified
MNKLYAGIDVHSTTNYVYLMKPDGSKHSSFSAKNTPDGSRKIADNVVSALTSLELSDVVIGVEATGVYGENLMIYLRDESSIARFNCNFHVLNPKQVKKFKDAYSDLPKNDPVDAFVIADNLRFGRITKPMYIDDGYKYKALQTLTRARFFAVQNLTREKQRFANYLFMKCSGLAQEKVFSQISGATSMALADEFETVDELVYMDIDELTAYITEKGHGRFANPQTVAKAVQSAARGSFRLPKTVNDSVNQALSVSVANIRAMKEPIKTFDNAIQKHFELIPNTLTSINGIGPVYSAGIIAEIGDINRFSNHAALAKYAGIAWSQNKSGNFNGEVTNLVKSGNRYLRYYLLEAADSLRRCDSEFRRYYDLKFKEVNRFQHKRALALTARKFIRLIFRLLKDNRLYTPPEQFKR

SEQ ID NO: 274937 - protein, 395 aa, unidentified
MFYGLDVHKEFIQVCALNEDGKTRRDFRVGGTAAAIEEFARRLDRSDPVVLEATFHSWAIVQILRRYVDRVVVADPAQLKAIANARIKTDKVDAHILAQLLRLDFLPEVELPTRGTWALRQLMAHRRQLRRQSVATKNTIHGVLNRSLQRYPGKFLFTEKGFRWLAELELPAAERMVLDHQTGLLREVQAHLQSVDRALREQAQLYPEAHLLVTIPGVDVVVAMGFLAAIGSIERFPSPQKLGAYFGLVPKIRQSGSTTYYGHITKAGSRNARWLAIEAAHTIARSSSPLAASYHRLRRRKGHQIAVTALARKLVVVVWHILTTEQPYRYAAPERTRIKLRKLQKHERPPRGRAPRNLDEVYAEAGLALAPPAPGEKRAAKRSRAALTRMRNETS

SEQ ID NO: 274938 - protein, 349 aa, unidentified
MLADELDYVVGLDTHRDQHALAIVDAHSGAVIAQTTTAANARGYIDAVRFADRHALGDRLWAVEGSGHYGAGLVRHLQRQGEQVHEVDRSSRGERRLRGKDDQLDAVRAARSPLAHEHRARPRAGEHQEALRLLLLARRTAVDTRRVALVQLRSVIVTAPEGLRDELRRLPLGELLNRCSRFRRSSSRTPAQLATILVLRTLARRIQTATDEAETLEREMLSHVRALVPELLDEPGIGPIVAAQLIVTWSHHDRIDSEACFARLAGVAPLPASSGQTTRHRLSRGGDRQLNRALHTIVLHRRQHDPATKDYIARRISEGKTSRDAVRLLKRYLARHLYRVMQNSTPLTS

SEQ ID NO: 274939 - protein, 440 aa, unidentified
MAVRRQEDEIFPNAAGIDEGASSHWVAVPARSSVEPVREFGAMTDDLNAMAAWLIACGVDTVALESTGVYWIPVFEVLEQRGLKVWLVDARQMKYVPGRKSDVQDCQWLQKLMSLGFLRAAFRPDAEVCELRAVARQRDILVTDQASWVQRMQKALVQMNIQLTEVLSDVMGLTGELIIRDIVAGERDPRALARHRHSRVKASTEDIIKALTGNWRDEHLFVLRQSLGMYDDIARHVAECDTKLQAELDNLGQKKIDLGKPPRSGSKQRLAFDKRQVLANWAGVDLTRINGLGLAAVTKILTEIGPDLSRFPTVKHFCSWLGLSPGTKISGGKVLSAKTKRSVNRVRQVLKMAAMSLSRCDSALGAFYRRLCARMDKPSANTAVAHKLARMVYFMLTRGEEFVDQGQQRYDEQQLARSIAALKRRAMTLGFVITPVAAGA

SEQ ID NO: 274940 - protein, 418 aa, unidentified
MSEENNARPSCRYVALDIHKHYCVVAAVNREGQVVLQPVRVEHQDLEGWLKKSLCGSDHVVIESTTNAWHVYDLLEPLAEQVLVANPIKVKQIAFARVKTDIRDTLILARLLAANLVPVVWVPPQHIRQMRQLLSQRRQMVETHTQIINRMHSAAHRHHLKHERGKRFNEKTTAWQKDESLSQIEQFQLSLEMENRAYIEQQIGRISEKVAKMSHQKPWAESMTYLMQLPGFGVITTMTVLAAIGDIGRFETPKKLASYSGLTPGLEQSGTKNRGKGITKEGRRELRWALVEVAQMAVKSEPLLKRRFQELQHRMHRNQAIVAIAHHLLELVWYVLTRREPYRHFSEEKIAYKYLSWAWRMSEDARDGLTRQQFARYYLMRLGIGKDLTRIALDPRHPRRLASESELLALRPELKHIE

SEQ ID NO: 274941 - protein, 356 aa, unidentified
MSNITRVGVDLAKNLIQVHAVDAAGKVVTNRALKREKFLVWCAALPAGCLVAMEACGGAHHWCRKLRESGLDARMIPAQFVAPYRIQGKSGKNDANDAAAVCEAASRPHMNFVPPKTLAQQGMLCVHRLREALKEERTACINRIRGLLAEFGVVLPQTPAILRQHLNEVLEDASNDLAGMARLVLQRAQEHWRELEKHIQWCDERIAAHQKDDEQVQRAAELKGVGVITASAVVATVGDFKQFKNGAQFGAWLGLAPKQNSSGGKTSLGSITKRGSNYLRTLLIQGAKAVVLVGKHNDDPISQWVQRLRQRSGWQKAAVALANKNARILWAVMTGRKRYDSHHVSIPPAGAIPAVA

SEQ ID NO: 274942 - protein, 341 aa, unidentified
MEKHFYFIGLDIAKETFVASIYHTPDRPVLTKENFSNNPQGYKELIVWLQDYQINTTNCHICLEATGVYSDGVAYYLSAQGYRVTVEPPLRVKRAFHPAGHKTDPVDSRQIAEYAYRFSDRLIPWHPKEELLEKIRQLLSVREQFTKQKVALKNARDAYQRQKVQVELIQKAHQETLAQLEKQITRIDQELDRLMKENPDLSQKFHHLKSIPGFGLLLSAHLLVMTENFTSINDYQRLAAFVGIVPYQHQSGTSILKKARIRHYGPRACRKLLRLAAQSVATHNMTFRKYYLRKLAEGKAKALVLNNIANKLLKLACALIRDNSRYIKEYHSFHPMYVKGT

SEQ ID NO: 274943 - protein, 367 aa, unidentified
MKNDSIVWVGMDTDANKNQIALYRNWDEKPAAEWETGMDEKGIRRLIDRLKREDGTVRCVYEAGPNGYELYRKLRKAELECDVIAPSLTPTRPGDRVKTNRRDAQNLARLHRAGELTVIQVPDEKQEALRDLIRARENVREDVTRRQHRLNRFLARQGYSYREGDKWTQKHWIWIRKVRFEDLNLQAVLDESIRAVEQSLEQLNTFNAKVEENAQKPEYTKKVAHYKTLRGVQTVTAMTIVAEVGDMRRYGMAPQFMASTGLVSSEYSTGDNQRRGRITKTGNAHLRRVLVEASWHYRHRPMAGPAIKKRRKGQAEAVVSIAERADQRLNRKFRRLVDRYNKKPQVAAVAVARELAGFIWAIGQIQD

SEQ ID NO: 274944 - protein, 460 aa, unidentified
MNEPEEISDADHEQLIERVAAIDVGKEFGKVCVRLPDPARPGRRISRVWDTAATTNAVLVLACRLIELGVEKVTVESTSDYWRIWFYLLESQGLDVQLVNARDVKNVPGRPKTDKLDAVWLAKLTEKGLLRPSFVPPAPIRTLRDYTRMRTDFVREATRHWQRLEKLLEDALIKVSAVACKLDTLSTRDMIEALIRGERDPEVLADLARGRMRGRRAALVEALTGQFDDHHAELARMLLDQIDALGRQIDTLTTRIEAVIAAIPAAGTTEGTPHDPDHGHTTSPAELAAIERLDEIPGISRLGAQIILAEVGLDMTRFPTAAHLTSWAKLTPRTIQSGATHRAGKTGKGNPYLKGLLGEAAAAAAKTDTFLGERYRRIVKRRGKLKALVAVARSILVIVWHLLADPTKRFQDLGADYHTTRIDKGRKIHNLVRQLQALGQTVTLQTGGLTTQDGGVTPNL

SEQ ID NO: 274945 - protein, 356 aa, unidentified
MGKDITADERRTIGLDLGDRYSEAVVLDGGGEEVERFRVRTTQPGLSRRFAGFEPTRVVLEVGTHSPWASRLLAAQGHEVIVANPRRVRLIAENDAKSDGFDAELLARLGRMDPRLLSPVAHRGEAAQRDLVLLRARDGFVRARTQLINQVRGFAKSLGARLPSSSAEAFPRRVRSAAPDDLFPGIGTMLQTIERLTLEIRAMDREVERLCRERYPETAVLRQVKGVGPITALGFVLVVEDPGRFRQSRSVGTYLGLCPRRRDSGEQRPQLRISKAGDPLLRRLLVTAAHYILGPFGPDTDLRRFGLRLAERGGQAAKKRAVVAVARRLAVLLHRLWVTGEAYQPLGYDASLAKAA

SEQ ID NO: 274946 - protein, 336 aa, unidentified
MNFVGIDLHKKTITIEAQNQERRIVHRQTLPCCDSGKIVRVFESLRPFRAVMEATASYEWLWNLLEPLAERLLLANPHKLRVIAESKNKSDKLDAQVLAEFLVLDMIPPAYRPTPRQREHRRLVRQREYLTRRSTSVRNKIRRIVSDYNADRSDLFTAEGLAYLDELTLSPADRLVLEQLLEEWQHHQTQLRALDKQLQQFAKSAPVKEQEARAVLRSIPGVGPVTADVVLCELGDVRRFRSAKRVVAYAGLSPGQRESAGKRRELGITKQGSALLRWVLVEAAWRLVRCSRRWGNIFEALHRRRGKKKAIVAIARRLLTVMVALLRSGQSYRLAA

SEQ ID NO: 274947 - protein, 467 aa, unidentified
MTPRAGKRFRTSHRDEDLTVQHPHAAGIDVHAAVHFVAVAAEDVPAGFVNPEPKLPAGVRKFATNTGDLEALADWLAACRVTTVAMESTGVFWIPLFDLLASRGFQVLLVDPRQTAHAPGRPKSDVLDCQWIRRLHSYGLLTGAFRPGDEIVRWRGFQRQREMLIRYAAQHVQHMQKVLEEMNVKLTEVVSDIVGQTGMKILRDLARGVRDPVKLAKHRHERCKATEAQIAAALEGNWRPELLFALKQALSLYDFYQKQLRECEGRIEECLRAMGDKSKGAPLPPNPRQRKPEKNEVRFGARALLFKMSGVDLTQIEGISETTALVILSELGADLSAFPHEKNFVSWLGLCPQHRGSGGKVFKRRTRRGSNRVARALRMAAQGCHHAKNALGAFYRRIQARCGGAKAVVATARKLAERVYRMLRYGQEYVRQSQEAYEEAYQLRQVKSLAKKAASLGYKLVPEAVAP

SEQ ID NO: 274948 - protein, 345 aa, unidentified
MKKIAIGIDFAKEKFDVTVKNVLEGTSCYGQYPNTPAGGRSMVRMVKKFAKGTTSEDWLFCGEDTGYYSQTISRYLTEKGYFMWLQNPYAIKHSEGDIRRGKDDKADSAAIADYAHRYEDKARKYELPSEASEELHLLLTRRDAYVRAKRVIQSGANEIPKRDKQGETVTLIKASTRHLLKEIDDEIDRLEKQMEEIVAKEKAMQKNYEILRSFTGIGIVNSMCFIAYTDNFKKFDLNARKIATYWGVAPFGKDSGKTVHVGPHVSNFCNHWLKAILSNAANSAIAWNPIIKSYYERLDKAGKCEGICRNNVKNKIIQTITAMIRKGEKFDPEFIFTNKKAVAQC

SEQ ID NO: 274949 - protein, 351 aa, unidentified
MIIVGVDYHPSVQQVAFLDTETGETGERRLNHSDGEAERFYRDLQRRQVKVRVGIEATGHARWFERLLAELKFELWIGDPARIKAARVRKQKTDRQDAQLLLRLLIEGRFPQIWVPSPENRDLRQLIWHRHRLVQMRTRAMNQIQAAAMNEGVRRKKTLWSKTGRRQLEALPLAPWATRRRQDLLELVDRLNTTIGELTAAAEQEARKRPEVLRLMTHPGVGPITALVFVLVLGSPDRFGCGHQIGSYLGLIPCEDSSADRQRLGHITKQGSSLLRFLLVEAAQAAVRWDPDWRRRFVHLAMRRDRRIAKVAMARKLAVSLYWMWRKGFDYPQTLQFGSHAGEPGYVHGVK

SEQ ID NO: 274950 - protein, 309 aa, unidentified
MKEELVYLGVDIAKSYLDAAIGDEKRRFANERVGHRELIKWVKQLKVPVQVICESSGGYERALVQALVGAQLKVSLVQANRVRQFARAAGILAKTDRIDAKVLCDFAEAMQPGTISASQLEQEHLRELESQRRHLTHLLVMEQNRSARASDRCVRRLNRSLLNQIKKQIEQLDLLIKEHIEASPELSAKAQKLTAINGVGARTAALLLAQMPELGQLNRREVAALVGVAPFNRDSGKMRGKRAIYGGRRPVRHGLYMAALVAAHHNPIWRAFYLRLRAAGKPAKLALTATMRKLLIVLNSALKPDLNYA

SEQ ID NO: 274951 - protein, 342 aa, unidentified
MKEFIRIGVDLGKRYIQIHALESKDGRAVKRKLPRSKFLEFFADVAPCLIGMEACGSAHYWARQLRAMGHDVRLMPPAYVKAYVKRGKNDAVDAAACCEGVSRPDMRFVPVKSEEQQATLTLHRTRELLVRQRTMCVNALRGHLTEFGLVAAKGIGRAGELIDMAGNDAALPEIAKSVVKIFAEQLAAIQASIAALEKEIAGVHAQSPMSQLLAGIPGVGKIIASAIVASVPDPQVFKSARDFAAWLGLVPRQNSTGGKTKLGPITKKGDRYLRKLLVLGATSALRVAGKRKGALRDWLAALLEKKKSARLASVALANKLARIIWAMMTSGETFRKDMFEPA

SEQ ID NO: 274952 - protein, 320 aa, unidentified
MSEQPVVVGIDVAKAHVDVAVLGAPTAAGRFDNDGAGHMALIEALSPLAPALVVMEATGGYEAPLACSLQAAGLAVAVVNPRQARDFARSFGQLAKTDRIDAAGLAEFAAALLGRPDLDRYLKPLATAEQQDLVALVNRRRQLLTMLGMEEQRLAAARPAVRRSIQTLIRAIRKQLDEVDGTMARHVTKHFTELGELLRSASGIGPVASATLIADLPELGHLSRRQVCALVGVAPFACESGSMRGRRRIRGGRFELRRTLYMATLAAITHNPVIRAHYRRLLAAGKLKKVALVACMRKLLTILNAMARTHTPFQIDHRSA

SEQ ID NO: 274953 - protein, 335 aa, unidentified
MQTKKLGCVYAGADVGARSVVVVFEREHDRLREQFEITNDPAGHRALIKRLRKHGATIRFCIESTGVYGLELACAVHGAGIEIMVANPRAVSDFAKALLQRSKTDSVDAQMILQFLLRMPFVAWTPPEATRFELRAIMRRVGALKENQTQEKNRLHVASRTSQMTSAIRKDLAASLRQLKQRIRSLETAALDVVKNDPELLRAFMHLISTKGIAKVAALQILSEICLLAPSMTARQWVAHAGLDPREYSSGTSVQRRPRISRVGNAHLRAALYLPALGALTRDPNVRAFYLSLVDRGKPKMQAVVAVMRKLLHSIYGMLRTDTDFDGARFYPAAA

SEQ ID NO: 274954 - protein, 402 aa, unidentified
MSSTKKGVIIGVDPHKMSVTIEVVDTHERLLGSGRFETTNAGYAAMRRYVKQWPDRLWAVEGANGAGRPLAQRLVAAGEKVVDVPAKLAARVRLFDTGHNRKTDALDAHSIAVVAVRTVGLRVLVEDGELEALRMLTDRRDELAHQRVQTVNRLQRLLSELLPGQRKRDLSAAQAKAMLATVRPRDIAGKTRRRMAAEEIADLVAVDAKLKKIKAELKAAVLERGSHLMNIYGIGPAGAARVLADVGDVARFADRNRFASWTGTAPLDTSSGEQTRHRLSRAGNRRMNHLLHIAAIVQIRHDTEGRAYYRRKLAAGKTPMEALRCLKRRLSDVVYRQLVADAQRTQHVDDAGPGGHCGAALQSSAADSHPLIDTSDQPLPGPADRRLRRPSTDRKTLTQAAP

SEQ ID NO: 274955 - protein, 359 aa, unidentified
MEHIGIDLGKVASQICIKTESAETVEMRIATTPARLVEELGRRPTSRIVLESGTESEWVARVLEQIGHEVIVADPNFAPMYSTRNKRIKTDRRDARALCDACQKGDYRPAHRRSDEQRHVRAVLNVRDALLHTRTSYINLIRAILRSHGLRLRSGVAESFIKRVEELEIPGRLKSQVAPLLALMAPLNKQIRWSDRLLGMIVKGNEVVERLCTLPGVGPVTASAFVSTIDKVERFQGSHQLESYLGLVPSEYSSGEKQARGKITKRGDRRMRCLLVEAAVGILRREDPRTASLKEWAMRIALRRGKKIATVALARRLAGILYAMWRDGSTYRATVVETAAEDAQTANLQCSNSKTTSYD

SEQ ID NO: 274956 - protein, 396 aa, unidentified
MKSNTQNAKIEAITEKTLVLGIDVGSETHYARAFDYRGVEYSKKPFKFSNTEVGFVTFKAWVLDIKEKHGKDKVIPGMEPTGHYWFNLGKFLQDNEMKPVLVNPHHVKKSKELDDNNPTKNDRKDPKVIAGLVREGRYMIPYLPEGVYADLRTASNIRFQLQAELTRIQNRISRWFNIYFPEYKTVYGKPDAKSGILILKAAPLPEDILTLGIDGVNQIWRDAKLRAVGKARAKTLIEAAEHSVGSKEGAVSARMEIRMLLEDYESRNIRLQEVMTLIEGLVKQIPMAEKLLEIKGVGIRTVSGFLAEVGDISRFNNPKELQKLAGLALVENSSGKHKGETTISRRGRKRLRYLLFEVAMSLVAKNPEFRELYNYYTTRRLNPLKKCSHLWRLQPS

SEQ ID NO: 274957 - protein, 381 aa, unidentified
MKKDSIAKLQVTKSQIRRMAAKQRLTVGLDLGDRSSRYCILNEAGGKASEDQLPTTKAGLDSLFGKMAVCRIALEVGTHSPWVSRHLAAMGHEVIVANPRKVRLITQSVKKNDRMDAEQLARLARVDPQLLGPIRHRGAEAQGDLAVIRARGELVDCRTALINTARGLVKPMGERLKSCDADYVKESLAEGLSEATQNAIRPLLKSVEEITRQIGAYDKKIQEIEKRYPETKVLKQVHGVGTLIALTFILTLEDAERFAHSRDVGPYLGLTRKLRDSGESQPELGISKAGDVLLRRLLVQAAHCILRDGAPDSDLKLWGLTKVQAGAGKKGSKRRKKRATVAVARKLAVLLHRLWVTGEVYDPQYNRKAVEAAKGRGKAAA

SEQ ID NO: 274958 - protein, 406 aa, unidentified
MLFVGDDWAEDHHDVELMDPTGRRLAKTRLPEGVAGITALHELIGRHLIEDADTAEVLIGIETDRGPWVQALIAAGYRVYAINPLQVARYRERHSVSGAKSDAADAHTLADMVRTDAHQLRPVADDSPEAEAIKVVTRAHKTLIWERTRHAQRLRHQLREYFPAALEAFKDLSAADTLLLLAKAPDPASAARLTITQITTALKRARRRNITEKATVIHAALRGEHLDQPTVLTAAYAASVRAQVAILTALNDQIKALQGQVESHFGRHPDAEIILSQPGLGMILGARVLAEFGDDPQRYASAKARKNYAGTSPITRQSGKKKTVLARYVRQHRLVDALNWQAFAALSVSPGARAYYDQLRARGAGHPGALRQLANRLVGILHGCLTSRTHYDEATAWSHHATSTAA

SEQ ID NO: 274959 - protein, 337 aa, unidentified
MNNYIGIDVAKATLQIYIPKNDLAIEITNSERGLKTLYSKLKKQYKKEIGDIVFVYESTGSYSTYLEQFSESKSIKCFKVGAYQSASFSKVVKNRNKTDIVDARMLSKMHIIANDEDIKIPSRDVKAHQIRSYIKYYQSLIKEEIRSKNYLEAATFNLEDKFVLNQVKKKIKNIQTEQVDIINKTMKVINSNEKYKKAYENITSIKGVGEKSGIILLYLFLRYPNASRQHITALCGLDPIQRSSGTSVQHKERISKQGLSLVRAILFMPTMTAILYNREMKLIYDRLVDRGKPKSLAQIAVMRKIILLAYSLYKNDERYDEDRYLNFTQIKVDEDME

SEQ ID NO: 274960 - protein, 315 aa, unidentified
MVEQVVVGIDVSKAKLDVALLPGGEQFTVSNDRHGIGELLRRVSPLAPSRVVLEATGKLEQLAVSELAAAGLPVVVINPAQVRHYAKARGKWAKTDPIDARLIAEFARDLEPELRPLPDAETQALAALCQRRNQLLEMEQMEKSRLQRAPGANQKSIKAMLRFVRRQVEQVEKQIEHSIRHSPLWQAKRELLESMPAIGKVNSSTLLARLPELGQFTRQKICALVGVAPYNDDSGQWHGRRHIAGGRGGVRQVLYMATLSAVRCNPALRDYYRRLLGRGVEPKAALIAVLRKMLTILNAMVRDNTPWRPPCPIPA

SEQ ID NO: 274961 - protein, 369 aa, unidentified
MKAVYPVCCGVDVHKSFLVATIITTTHSLEPHYEKKRFSVYNRDLHLFADWLISNNCFDLCMESTGKYWIPVYNILEKDCSIVLAHPKYVKAIRGKKTDKKDAKWIADLFKHDLVAGSFMPPADIRQLRDLMRYRFKLTCFKSSEKNRLQNCLTVSNIQLGNVVSDTFGKSAQAILDKLLENPEDTSFDLEPLVFKSLKKKLPELRDAIDGYITPEQAGKLKVIKAHYENLESRKAELEELILALAAPYQQELAILQTAPGISSDFTAIGIISEIGTNMEAFPSAKHLCSWAGLTPANNESAGKKKSVRVSKAGCYIRPLLVQCANAVVTSKKHPEIRNRYLRIKKRCGHKKAIIIARNQGYQIKSATA

SEQ ID NO: 274962 - protein, 415 aa, unidentified
MLKLRHVGLDVHKDSIVMAVADGGSSPAQIVGTFDWCESRVLSELRKLGPLGSLKVCYEAGPTGYGLQRFLTSHKVDCVVIAPALVPQMQGCHIKTDRRDACKLAHFLRSGDLTKIWVPDEQTEALRDLVRARDDARLAERRIRQQLLKFLLRQGRRCPPGINHWTKAHWTWIRQQRFAPEAQQRVLADAIQTAEAAAARIKRLDEDLTQCVAGWKQAALVKNLQAFRGIQLVTAVGLAAEIGDFQRFPRAPQFMAFVGLVPRENTTGQTRRQGGLTKAGNRHVRRLLIEAAWQYIGAPATLSQKLVDRRRDVPEAVVTIADRALRRLRHKAHKLSLRKKSSTKIAAALARELAGFVWAAARATAGVVETSSAATPNTPQKAASKTSSVKRQGSATPNRAASSKRLAAAGATRLK

SEQ ID NO: 274963 - protein, 328 aa, unidentified
MYFLGIDVSKDKLDVQLLANEDTDSAEFPNHKQGWRSLVNWLKQRSPTMAVHVCLEATGRYGEGVTAYLHQRGYAISVVNPARIKGYASSRLARNKTDRLDAALIADFCRAQQTDLPLWTPPDPAQRQLQALVRQLEDLDKMRQQERNRLKAGETAPSVLQRIRDHIVFLDAQIEAVKQEIDAHIDQHPDLSKQRDLIASIKGVGTLTAAKLLAEIRNIADFDSPQQLVAFAGLNPRQHRSGSSVRGHSHISKVGCAAIRAALYMPAIVAKNTNPYMQPLVQRLEHRGHCKMSIVVAVMRKLLHLIFGILKSGQPFDPFFLEKSAAVA

SEQ ID NO: 274964 - protein, 341 aa, unidentified
MQPYFVGLDVHKQLIAFCVKTADGEIVAEGTIAATRAALNEWVKTVPGRWHGAMEATMFSHWIYHHLKPYAARLQMGHAARMKAISAGKKKTDKIDARTIADLLRCHLFPECFVISPELGALRQQMRFRRLVIEQEVKFKNKTAGLLMGAGVEYQRRRLHGKRYFAELLRESQWIAGEMRPLLEFNRGQIESLQAMDRRLMQMLQRHPRLQERIQFLRGIDGVGPVTALTWALEVGTPERFGSIKQAMSYCGLTSALRESAGQQKRGPISKQRNRHLQCVLIEAAKIGPLYNEKLRETYQKACAKGVHRNRATLAVARKLVAYLLAADRTFFSSRVPAVPA

SEQ ID NO: 274965 - protein, 323 aa, unidentified
MNSIQFSITIGVDIAKQKFDVASLIAGKYKHKKFDNNEAGFMAFIAWFLTLCGDVKPLICMESTGAYSLPLADFLVNHGYSVSLVNPAKIHAFAKSELSRAKTDKADAKLIARYAFLMQPSLWIPTPAHIRELHALVRRVEHLLKMIQMERNRQETADAKIMASINTVLETLDAELEATRKAISDHIDNHPDLKQRGDLLATIPGIGEASIAHLLIALSEHHGFTHAKQVVAFAGLAPALRQSGQWSGNTHIAKNGDALLRKTLYMPALCAWTHNPLIRVFCERLKANGKNGKAIVCAAMRKLIHIAFGVLKSGKAFDPKYVG

SEQ ID NO: 274966 - protein, 310 aa, unidentified
MYVGIDVSKDRLDVRIRPGGERCALSRDEAGLADLVKRLQAVKPELVVLEATGGYEQVVLAALVSAGLPAVAVNPQQVRHFARAIGQRAKSDPIDAEVIAHFGEAVRPELRPLPDEATRMLSELVARRRQIVEMMAAERMRRQQISSQRITRGIERHLAALQKELSEIERDLDETIRGTPAWRETEELLTGERGVGPIVARTMIADLPELGDLSRRRISALVGVAPYVRRSGKWQGQSHIAGGRASVRSVLYMATITALRCNPKIKAFYERLLAAGKIKKVAIVACMRKLLVILNAIVRDAKHREALANA

SEQ ID NO: 274967 - protein, 392 aa, unidentified
MMISVGIDVSKDKHDCFIFSSEGEVLSDVFTIPNTMDGFHSLLQQIWKCSNSQDKIKVGLEATGHYSYNLLGFLLDNGLATYVLNPLRANLYRKSLSLRKTKTDRVDARTIASMLLSDAGLKPYTDTAYHNEELKSLTRYRFDKVKERAKLKSSIARLVCILFPELEKLVPSLHIASVYALLEEFPGAKQVAAAHLTRLKALLETASKGRYKRDMALEIRNAAKNSIGSQMPAKSLELQHTIRLIRELDNEIAEIEEQIQSIMDELHSPITTIPGLGFRMAAMILAEVGDFTRFDSPDKLLAYAGMSPSTYQSGQLKNCYPHMEKRGSRYLRYALYNATKYVCHWDPTFADYLAKKRAEGKHYNIAISHAAKKLVRLIFAMEKSRQPYCSAA

SEQ ID NO: 274968 - protein, 415 aa, unidentified
MALKIVYKICCGIDVHKTFVVACIASTNDKGVTSYESHRFSTYTSGLKTLLQWLLNRNCKDVCMESTGKYWIPVYNILENDCSIVLAHPKYVKAIRGKKTDKKDAKWIADLFKHDLVVGSFMPHADIRQLRDLMRYRFKLTCFQSSEKNRLQNCLTVSNIQLGNVVSDTFGKSAQAILDKLLENPADTSLDLEPLIYKSLKKKLPELRDAIDGYITPEQVVKLKVIKAHYESLESRKAELEELILAIAAPYQQELAILKTAPGIRSDFTAIGIISEIGTNMEAFPSAKHLCSWAGLTPTNNESAGKKKSVRVSKAGCYIKPLLVQCANAVVTSKKHPEIRNRYLRLKKRRGHKKAIIAIARMLLTALYHMLKNGENYNAELYRKSDLPPADWEITVEQAIIIARNQGYKIKSATA

SEQ ID NO: 274969 - protein, 422 aa, unidentified
MRSEVEAVKQEPQFAAFVSIDWADKKHVWCLQAADSEKREGGELVHTPETVEAWVGQLCQRFANRPIAVALEQSRGALVFMLSKYEPLHLFPVPSTMSASMRKALYPSGSKDDPRDADLLLDLLLQHRDKLHRLSPDTETTRRVQNLVEERRKLVDEKTAQANRLTSDLKIYFPQVLDWFERLDTELVWDLLQRWPTLAELQKVPPAKLRTFFRKHYGRDEELIERRLLAIRQAIPAIRDRAVIEAKSMVVRVIVQVIVSLLEGIADLDKKIEEAAATHPDFFIFDSLPGAGAVMAPRLLAAFGSQRERYGSAGEVPTYTGIAPVMEKSGKKKWGHFRWACPKFLRQSFHEWAGHSIAQSVWARSYYQQLRNRGKGHFVDTKWKDCGGRSKKFKNLLDSITQMSCAFVRLRCFEAGRLMAGA

SEQ ID NO: 274970 - protein, 429 aa, unidentified
MNYTQNKKIMQVKVSTLVVGVDIAKNKHAARAFNFRGIEYDKAIFFENNEAGFKKLLHWVKKVSEKENKDNVIVGMEPTGHYWLPLEEYLRRKTDFLRVVVNPAHVKKSKSLDDNSPTKTDRKDAKVIAKLVIDGRYSIPHMPEKEYADLRAAMTHRERLVKDIVNLSNKIQQLIDKYFPEYQTVFKKWSGKASVAILKELFLPELILEKTAEEIVEIFKKGANRAVGIKRARKLKKAALNSIGIKEGGEFTQYELRNLLEQYELLNNQKELLEEKVEKLFNSMEEAKYMESVKGVGIITVAGFIAEVGNINDYDHPRQIQKLAGLNLKEHSSGKHLGQTRITKRGRPRLRALLYRVMLPILAKNEEFKQLHEYYTTRRKNPLKPKQSMIALACKLIRIFFALGQKHVNYDGQKLMNDTERNLDLQEVA

SEQ ID NO: 274971 - protein, 381 aa, unidentified
MYAETTHTNRYTAIQPHLYMAFELSQTKWMLGFTIGFGQRPRLRSIAARDLAALQGEIHLARERFGLVEDAPVISCYEAGRDGFWLHHYLASLGVSNLVVDSASIEVNRRAKQAKTDRLDLGKLLTMLMRFEAGENKVWHVVHVPSPEVEDHRHLHRELTDLKEQRTQHINRIKGYLSNQGVCLEVRDDFPEIIERQRLWNGESLPVGLRARLLCEYQRFQLVQQQIKALEAERREMLRHSAQPEVEQVRRLLRLRGIGINCAWLYVMEFFSWRAFRNRREVGALAGLTPMPHKSGEEDHELGISKVGNRHIRAMAIEIAWIWLRYQPHSELSRWYQRRFGKGSKRLRKIGIVALARKLLIAIWRYLEFGTLPAGAVLKST

SEQ ID NO: 274972 - protein, 345 aa, unidentified
MDEAYDGRQVVGMDLHRRRSVLVRMSMDGRKLETVRITNSPGALRAVLARCGERPLVVLEATYGWYWAADVLAGAGAEVRLAHPLGVRAFSYRRVKNDERDAADLADLLRAGLLPEAWIAPPEVRALREVVRYRHKLVGQRTSCKDQVHAVLAKLGVPVTHSDVFGTGGGLWLDQLVLPEPYAAKVASLRALIGVLDGEIARLGQRAAGVLGADPGYAALRELPGIGPVLAAVIIAEIGDVTRFRKPGQLCSWAGLTPRHYESDTKVIRGHVSKQGSRMLRWALVEAIQHQPAGTRPQQAKEAILARRGKEARNIAKTAAARVLLTQVFYALRDGHVRRASHPAA

SEQ ID NO: 274973 - protein, 354 aa, unidentified
MLKYSVGLDVSSKDIHTCISAIDAEQKVRVISSKVITNTPKGFEILITWIEKNRKQKNIPLVIGMEATGIYHEECAYYLHDKKYPVCVVLPNYAKKFLQASGLKSKNDKIDAKGLAQMFAERAFALWAPMDKFYYHLRALTRQQESLQEIKTGVVNQRSAAKRSAFNNKEVIKQLNETIKFLEKKIAEIEKKIISHLKSNKEIEDQVQNVLTVTGIGIVTLAILLAETNGFLLFKSTRQLVSFSGYDVVENQSGRHRGKTKISKKGNSHIRRSLFFPAFTAVSQKCKPFLDLYNRTFEKHKIKMKSYVAVQKKLLVIVYTIWKKNVRFTEEYITDNTRERELASTSLDSLVQAE

SEQ ID NO: 274974 - protein, 367 aa, unidentified
MPSFVGLDASKRTTSICVIDKSGEVVKEGVVETEPKAIIAFLRGEGRRYSRVGMEAWSMSPWLYAGLAKAGLPIICIEAWHASGILKASRRNKTDRNDARGIAEIMRMGSFKVVHIKTLESQRIRDLLTMRKFLRTKVTDIENAIRSAALTRGIRFASGRQSTFDGKVRKALCADLFALELIQPLLSIRAIALREMIAFETSLLTIAKTDPVCRRLMTAPGIGPITALNYRVAIDEPARFSRSRDVGAHLGLTPRTRQSGQTDFRGSISRSGDNAVRAALYLAAFGQLRASTKPTSLKTWGEAIAARRGRKKAVVAMARRLAVILHRMWITETDFHWPAAADLADAEELDQRPAAKREEEFGSCQVA

SEQ ID NO: 274975 - protein, 354 aa, unidentified
MQIIGCDYHPGFQQIAFVDTETGELQERRVQHREEAEKFYRDLAAQGMKVRVGMEASGHARWFERLLSELQFELWIGDAAEISARRVRKQKTDRQDAQLILKLMLKDDFPQIWVPSWENRDLRQLLWHRHRMVQARTRMMNQLQAVALNEGLRCKKRLWREAGREQLEAFQLAPWASQRRRDLLELLDQLNPTIAKLTQAIEEEVKKCPAARRLKTHPGVGPLTALAFVLMIGKADRFQCGKQIASYLGLVPLEKSSGNQRRLGHITKQGNSLLRFLLVEAAQVTARSLPEWRSKYCHLTLRRGRKIAKVAMARKLAVRLYWMLRKEWDYEQFTGEFELIIMIERVTEEMHGSD

SEQ ID NO: 274976 - protein, 341 aa, unidentified
MQTTTIGLDIAKNVFQVHGIDAAEKVVVRKQLRRSKVIAFFEAVSPCLVGMEACASAHYWARELRKLGHEVRLMPAKDVKAYIKRNKNDAIDAEASCEAVRRPTMRFVTVKSAEQQGQLMQHRTRDLLMRQRTQVINALRAHLAELGIVAAQGREGLKDLLAIIADEKDERLPVDARASLIVLAAQLQAVQTLIGSIEKRIIAQHRATEASKRLQSIPGIGIIGASAIVSTVTDPTAFRSGRDLAAWIGLVPRQDSTGGKQKLGPISKQGDRYLRRILVVGAHSVLRRAKHNPEKYPWLTQLLARRPFKVVAIALANKMARIAWALLARGGTYRVPALAAA

SEQ ID NO: 274977 - protein, 340 aa, unidentified
MHQAPSYHFIGLDIHKRSMAYCEKTVTGKVADRGTIGARPRDLAAFARSRHRPFVVGMEATLFSGWVYDVLLPYALEVHVGHPTRLKALSKNKNDRIDAELLANLLRADLFPSCHMASPEVRELRRVLRYRNFLVREATRMKNRAADLLMETGVEYVKSKLHGKRYFSELLDSLEEVPGSVRELLRMTRTNIELFARAQRRLLEALARHGALRDRVALLKTVSGVGEVTALTWALEIDDPYRFPSIKNVQSYCGLCSAQHESGGKERRAPLSKERNPHLQTILIEAAKLAPCKYRHLARVHQAALERGYNRNRATLQVARKLAAYLLAVDKSGAPFVAPA

SEQ ID NO: 274978 - protein, 343 aa, unidentified
MLAITTVGLDIAKSVFQVHGVDAHGSVVVRRQLKRRYVLAFFKKLPHCLVGIEACATSHHWSRELQALGHTVRLIPPAYVKPYVKRQKNDAADSEAICEAVQRPSMRFVPTKTSEQQSCLTLHRTRHLFIRQQTAVINTIRAHLAEFGIVAPVGRNGVEDLLYAVADQGDERIPEVARACLQALGALLGRLKAQILEFDRQTNAWHRSNETSRRLDELPGVGPALATALVASVADPKAFRSGRDFSAWIGLVPKQNSSGGREKLGSITKQGDRYLRSLFTAGALAVIRYAKIHGTKHRPWLARLLERRPTKVAAIALANKIARMAWAMMAKGECYREPLALAR

SEQ ID NO: 274979 - protein, 377 aa, unidentified
MQPTQRSDRNHALEVSLELACRSWKLAVTDGRRQRPTVLKIDTCELWGRVQDLLRCLDELKVRWRLGRCRVTLIYEAGQDGFWIARALRDSGVEVLVVDAASIPVPRHQRRAKTDRLDALKLLEVLRAWLRGERSGVRMVQIPTEQAEASRLLSRERGLLQKEIGQHRDRMRKLLRLHGCTEEIDAGFVERLSAGQVRRADGQPLPEELWEWLMHEAQRMDVAATQLAALEKTLLHQLPEPVQRCVAQLAALKGVGWIGAMRLMLELFWRDFANRRQVGACVGLVPQPYDSGDSHSDQGISKQSNRRLRALVIELAWMWVRYQPRSELAQWFARRTAGSGKRNKRVAIVAVGRRLAIALWRYVRDGVVPAGAELKSA

SEQ ID NO: 274980 - protein, 482 aa, unidentified
MKHSHQDKSQKVSPHKEQNSWQQMNRKQRREMTRKMHAEDLRLEVVHPDAAGIDIGNEAHYVAVPPDRDNKSVRRFGCTTAELKEMAVWLKQCGIRTVAMQSTGVYWIAVYDILEAAGLEVYLVNARETKNLPGRKSDVQESQWLMKLHTYGLLRNSFRPPQEIRTMRTYWRQRNDLIRSAARHVQRMQKALTQMNIQLANVLSEVSGVTGQAIIQAILAGERDPRKLAAFRDKRVKASEEEIARSLEGNWQEDLLFMLKQEQDGYEFCQKQMSECDERLQQYLRQREDRSKGAELPEENRKERLRKKKTNKPRFDLRTELFRMTGTDLTQIDAIDVRTAATVISEAGWDMSKWPTEHHFVSWLRLCPDNRISGDKVIGKGRLPINNRLSVALKIAASTLRQSNTYLGAQFRRLKTRLGPPIAIKAMAAKLARLLYRMLRYGMRFIDRGAQFYEAQHRWRQINSLKRKAANFGLKIIDAPAA

SEQ ID NO: 274981 - protein, 315 aa, unidentified
MTTSSGKFVGVDVAKEKLDIAVLGETKASQVTNDAKGIASLIKEMTALRPELIVVEATGGYQRAVVLGLYEAGLPVAVVNPARVRQYARACGLLAKTDKLDAFNLAEFGKQVRPRQFEAKSEVGRYLSALLVRRRQVEEMLKAEKSRLRTVQADMRGSLERMIEILKEEIKRLEKDLDRFMKEHADWQEQEEILCSAKGVGRVTAVTLLAELPELGKLDRKKIAALVGLAPMNLDSGKKRGYRKTKGGRIEVRSVLYMATLVATRYNPLIQVQYQELLRRGKVKKVALTACMRKFLTILNAMMRDRVPFRQTVAA

SEQ ID NO: 274982 - protein, 320 aa, unidentified
MSQHLPQEGVSVGIDVAKNHLDVNFAPTREPLRLANDRDGYTELMARLSSMDVRIIVLEATGGYERDLVVELAAAGLPVVVVNPRQVRDFARATGRLAKTDQIDAAVLADFGLAIQPPLRPLPDEQTLQMREKLARRRQLVQMIVAERNRLHRARAATVRRSIEAVLELLQTQLRQVDDELDQAIRQSPVWQEKVKLLQSVPGIGPQTALMLLFCLVELGLCSRQRIAALVGVAPMNNDSGQFRGRRTIRAGRAELRCCLYMATLAAIRRNPKIRRHYEKLVAAGKPKKLALVACMRKLLTILNAIARDAKPWQTAPATT

SEQ ID NO: 274983 - protein, 366 aa, unidentified
MSEGTPATVHVGLDVHAASVRLAAVRADELLDERTLPYDHRAVERALAHWPRVRCCYEAGPTGYGLARYLRARGIACDVVAPGLVPVRPGDRIKTDPRDARRLARLHAGGLLESIAVPSEQVEALRDLVRAREDARVDRMRDRHRLSKFVLRHGLRMPNKSWGVTRRRWLGSLSFAHAHQQQAFQTYLHALDLVDRRIEQLERELDRAGAEGPWAELVARLRCLRGIDTLTALGLVAEIGTDWSRFKTAEQFMSYVGLVPSERSSGAQRSQGSITKAGNSHVRRLLVEAAWHQRQRPRVGEKLAARQRGQDPLVLERAWRAQQRLHRRWARMAGRGKPHQKIVVATARELAGFVWAIATNQPLRNT

SEQ ID NO: 274984 - protein, 440 aa, unidentified
METTERPEMVLAIDFSLDRLDVALRGPAPPWIWGHRAYANNWAGYQQLKQDLLAELQRVSPVQFTAVGESTGPYWWHAFYQFSHDAELAPFDPQLALLNPAHVKGYRKALAEQDKTDPDDARLIERYYRSVGIEHPYQFADRYLRLRTFSRAYARVLHTLAAEKAYFVAVLYLWGSEYQRRAVRPFSDLLGVTSQFIVDEYADLQQLSAIPEAELAALLEQHSHHTLRQPQETAQKLHQVAQNSYPLPAPLGQALHQVLQLTLELIRVLSDNQDAYRQLLEAELATLPEAQRALAYKGLGPVLVAGCLAEIQDTTRFTTGTKFDRRTQTDRPRTYRDGQAAVAKLAGLWWPKQDSGHVQGVQPRLARERNPYLRFWLVQAAYTLQRYQPEYQQFYWQKYREAHDHHHRRALILTARKATRLIFALLHKGRLACLEEGTLT

SEQ ID NO: 274985 - protein, 327 aa, unidentified
MAQKMDVVGIDVSKATLDAYALTSQQARQFANDPAGHQGLVAWLQELGVGVAVFEASGGYERAAAQSLRRAGLVAHVVDPKRVRHYAQAAGQLAKTDRIDARMIAAFGAAFLLGKPSGVAGGDDPARQDLAELVGTRQVLVDHRTSLQQQADAVTSAIAKKLLLATLKQFDRQIETSDRQIAAAIARHEPFAALARRLDTVPGLGPVSIAALIAWLPELGQLDRRQLAALVGVAPFADDSGKRTGQRHIQGGRMKLRNVLYMATVGAATRHNPVLHARYRRLLENGKKPKVALIACLRTLLTILNAMVAHQQDWNPTKLPATEPVAA

SEQ ID NO: 274986 - protein, 342 aa, unidentified
MGHVTTIGLDIAKSTFQVHGVDATGEVILRRRLTRARVVPFFTKVAPCLVGIEACATSHHWARELRKLGHDVRLMPPSYVKAYVKRQKNDTADAEAICEAVTRPTMRFVDVKSPEQQSIMVVHGTRVMLMRQRIQLSNAIRGHMSEFGVVAPVGRKGLVTLTDILHDDADQRVPAEARHCLQMLAAQLQLVNAQILENDRRIRLSARATDVGRRLMGIPGVGPVLASAFVATVPDPHAFRSGRNLAAWIGLVPRQNSSGGKERLGGITKQGNRYLRQLLFVGAMAVIRYAERHGTRRPWLVQLLARRTTKVAAAALANKTARMVWAIMTSGQPYREPEARTA

SEQ ID NO: 274987 - protein, 323 aa, unidentified
MELAGAFVGIDVSKATLDTAVRPSGERWSTANEDGAISELTQRLSGMQPALIVMEATGGLETLAASMLTLAGLSVAVVNPRQTRDFARAMGVLAKTDALDARVLAMFAERVRPAPRPLADAQTQELEALVGRRRQVIEMLVAERNRLYTATLSVRPRLKEHIEWLEHELKDLDRDLREAIRSSPTWRAKDKLLRSAPGVGPVLSYTLLAELRELGQYDRKQIAALVGVAPLNRDSGKMRGKRCIWGGRAHVRAVLYMGALIATRHNPVLKDFYQRLRAAGKAPKVAIVACMRKLLTILNAMIRHGTSWQAGSLSRKPATQSLT

SEQ ID NO: 274988 - protein, 387 aa, unidentified
MPPLNDLSRSLVALDQDSTIIAVVELSQSSWLVAGVLPGIERQPQKKLEPSAERLLGLLHRWRDEAVRAGKKITRIALAFEAGRDGFWLARWLNARGVEAHVIHPSSVAVSREHRRAKTDRLDTELLKRGFLGWLRGERGHCSMARVPTIAEEDAKRPNRERECLVGERTRIVNRMKATLARLGVRNFKPTLRKAAERLATVHTPEGTPLPRNVLAELQRDMARLGFVVSQIREIEQARQKRLEQETETGPHAMVRQVARVIGIGIETADMLVHEVLSRPMRDRKAVARYAGLTGSPDESGARRREQGLARAGNARVRRGMIQLAWRFLRFQKQSALAQWYRARTADSRLGTRKTMIVALARKLLIALWRFVTTGETLDGVILRPAG

SEQ ID NO: 274989 - protein, 417 aa, unidentified
MEEEDVYYGRCAGIDVHKRMIVVCLRIGRKQETREFGTLTHELRAKTAWLKTNGCQMAAMESTGSYWKPLWNLFEVEELPVMLVNAYHIKNVPGRKTDYNDAQWIAKCLMQGLLRPSFVPARGQREFREMTRFRKSQIEERARNLNRLQKMLEGANIKLGNWVSDVDGKSATELLELVIGKPDFTVEDVAQRRHKNMEATAEELFLSLEGVITPIQRELFQHVMRIIRRQTEEIAQTDAMIERYMDDTYKAACKAISAIPGIGRVSAQQIIAEIGTDMSRFRSADALCKWAGICPGNNESAGKRKSGKTPFANKTLKSTLAQCAQSAKKNKKSFFHAQFERLVVRRGKKRANIAVAHSLLIAIYHVLSGADFKDLGSDYYTHFNREKKINSYVKQLSRLGVAIPDDVLRAAIDAAVA

SEQ ID NO: 274990 - protein, 371 aa, unidentified
MKSIIYIGMDVHKKTYSLCALLKETGEIIGETKIPADVSLIIKFIENAKKSVDSDDVQIKTGYEAGCLGYSLYWQLAEKGIECDILAPSTMHRSAKNKVVKNDRRDAKNIAANLANGTYKSVYVPTDEDVEIKEYIRMMHDFKIELKKVKQHINAFLLRFGHNYPGKSKWIPAHIKWLKELELSDMYREILDEYLSQLEILSEKIERFKHRLEELSQKETYNEKIGQLRCIKGIDTTAAMTMHAETSDFDRFPTANAFASYCGLTPGEDSSGESYHRLGITKQGNSMIRTTMVEAAQVLVRGTIGKKGKKVKSKQKDQDVKVIDYADKAVVRLQKKYHRMIFRGVKRNIAITAVARELACFVWGIETGHIS

SEQ ID NO: 274991 - protein, 409 aa, unidentified
MTYFVGLDVSSLDVKVCVLNSQGAKVTALTITNDLPGAQVLRDQLLALAHDQKVDDYKIGLESTSVYSYHPAMFFHTDEALKSIGCTVYLLNPKQVNGFKKSYPNLDKTDEIDAFVIADFLRFGRASLSIVKEEQYIALQQLTRSRFLLVQQLTKEKQHFLQHLTFKFSQFTKEVDSSVFGQAMMDLFSEQYSLDELAVLPLDQLALFLQEKGHNRFGDPKAVAASIQKAVRASYRLGKCVEDSVDLLMGTSMVLIQTMKAQIKTIEKGIAHLLESLPQTLQTVPGIGPVITAGIIAEIGQIDRFQDETKLAKYAGLYWRKHQSGKFTAEDTSLSRTGNVYLRYYLIEAANSVKRYVPDYQSYYLKKAKEVPKHQHKRALVLTARKLVRLVDALLRHHQVYTPEGSRAH

SEQ ID NO: 274992 - protein, 400 aa, unidentified
MISVGIDVSKEKSTVCILKPYGEIVSRPFEVCHTEKELSELTSMLLRLNDDVRVVMEATGIYHLPVLCYLKEKGLFVTVVNPFEMKEYRCQGLRRVKTDEQDAVTISNYGIDHWYRLKEYEAEESIYAELKLLGRQYRHYMRMRVESVLELTHLLDYTMPGIKTLLKGWNETNGKDKLGDFAEEYWHYDNITKRSEEQFIESYLKWAKEKGYHQSQDKAVKIYALAKEGIPTVSSDTPSTKMLVQEAVRVLREVDNTLMTILTQMQALAKSLPEYPVVRAMGGVGNVLAPKLIAEIGDVRRFHSGKALIAHAGIDAPPYQSGQFIGTERKISKRGSSSLRKIGYEVMRCLKTHKEPEDAAVYRFILKKEKEGKSKRAAKIAGLNKFLRIYYARVMEVYQK

SEQ ID NO: 274993 - protein, 419 aa, unidentified
MSFKILKNNCCGLDVHKTWIYACIGITDSFKRTEYKQARFSSFTKGLQELCLWLAKYNCIDVCMESTGKYWIPVFNVLEKNNIFVTLSHPKYTKPQKGNKTDRKDAKWICDLYMCGMVKPSFIPPADIRQLRDLVRYRFKLTCMITGEKNRAHICLTVSNLKLDDVFSDIFGKSSRSITEQILQHPGEVFDVAPFVDSRCKTPIEEIQAAVDGAISHEQAVKLRQCLKHIDELEMHKAEIEREIFRLSQKYESVLDLIRTIPGFDKNPLTAIQVLSEIGADMSVFPTAKNLVSWAGCCPRNDQSSRKIKSTRISRAGSYFKPVLVQIANALIKSKKHPEFTTRYRRIKARRGHKKAIIAICRMILTAIWHILTDLKPYTPEGFLESRPVNKEKVLTISQALNLIKQRGYIIKDDVGPVT

SEQ ID NO: 274994 - protein, 387 aa, unidentified
MPQLNDLSRSLVALDQDSTIIAVVELSQSSWLVAGVLPGIERQPQKKLEPSAERLLGLLHRWRDEAVRAGKKITRIALAFEAGRDGFWLARWLNARGVEAHVIHPSSVAVSREHRRAKTDRLDTEMLKRGFLGWLRGERGHCTMARVPTMAEEDAKRPNRERECLVGERTRIVNRIKATLARMGIRNFKPTLRKAAERLATVRTPEGMPLPPNTLAELQRDMARLGFVVSQIREIEQARQKRLEQETETGPHAMVRQVARVIGIGIETADMLVHEVLSRPMRDRKAVARYAGLTGSPDESGARRREQGLARAGNARVRRGMIQLAWRFLRFQNQSALAQWYRARTADSRLGTRKTMIVALARKLLIALWRFVTTGETLEGVILRPAG

SEQ ID NO: 274995 - protein, 419 aa, unidentified
MSPEYQVAAGLDVHKKFIQATSLWLNGTKIQQTFPRTPDGLLGLNDWIFEHKCDVVACESTSDYWVCIYDLFSDHVPMIVGNAHDIKVLAHKKTDKIDSEMIALLALKGMITPSRVMPRHHRDFRKMARLRHFLVRKRTDIKNRIHSILDGELFHLSRLLSDIFGVWGKRIMQGAVDGASVDDILRSIPLHARARKEAKLRELLTQTLSPGALMQLDHCLRVVKQLDEEIERITDEVRAYVLQKYPREYQILITIPGIGTIAAITLLAEIGNFKEFLSGDRLASWVGIVPKVYQSANHAIKRSITKRGSRLARWVLIQAAHAAARARNSVLRDWYVIKKTVLGTGKAIVGLARKMITIVWHLIVNDEGYVDKYTEPESLRSQKMHTIRIPTSSDYTLEEVLALLADALGFLKKRDLDTI

SEQ ID NO: 274996 - protein, 285 aa, unidentified
MPVDHPSVPSPYRLFAGIDIAATTFTAVWIAPGATPSRALTLDQTPHGFATLQGRLLAAGHARGEILVVMEATGSYWVALATTLAQAGFAVAVINPDQAHNFAKALLQRAKTDAIDARTLARLGTTLQPTPWTPPPAIYAELPQRLAERDALLDRRQQVRNQLHALGQLPVVIPAVRARMEELIATFSAQIAVIEREVERVLPQDAEWAASATLLLSITGIGVLTAAWLLVTTLNFTIGSSAEALTAYAGLAPHPKESGTSVRGRERIGHGGNKRLRTALYMGSE

SEQ ID NO: 274997 - protein, 347 aa, unidentified
MERRMCYVGLDVHKKLVVYCGKAADGTVVEEGEVRATRRELKAWAESRVWPWTGGMEATMFTGWIYDTLRPYAVELKVAHPQMLRAIVASKRKNDRVDAGRIADAVRCNLLPECYMAPQEIRDLRRVMRFRNFTVRLATAIKNKTSGLLMECGAEYDKRRLHGKRYFQELLGGLEETPASVKDLLRFNRAMLELFERTQKRLLGTLRNHPLLSRRVRRLMTIRGVGDVVALTWALETGEPTRFGSIRKAISYCGLCSGESESAGHAKRLPLSKQRNAHLQWVLIEAAKLAVNWNPQLAAVHEKELARGNRNRATLAVARKLVAYLLAVDKSGQVFKPREVNVHDPTR

SEQ ID NO: 274998 - protein, 450 aa, unidentified
MPLPPQLKRVNLDAAGIDIGAEEHWAAVPPGRDTEGQDVRRFGAFTGELCALADWLKQCGIQAVAMESTGVYWIPLYELLVERGFEVRLVDARQAKNVPGRKTDVLDCQWLQELHTYGLLRGAFRPVDQVCILRSYLRQRSMLVAYASHHIQHMQKALEQMNVKLSHVVSDITGLTGMGIIKAILSGERDPVKLAKLRDPRCKSSEATVARALEGHYREEHLFALRQAVELVEFYQQQMTACDRQIEACLQQFEEKSSETPVTTRRRKRRRGGIAFDACSYLYRMTGVDLTRIDSIEANTALTVISEIGLDMSRWPTEKHFGSWLGLAPGSKVSGGKRLSGRTKPSANRAAAALRLAAQSLNQSQSALGAYFRRLKARLGAPKALTAAAYKLARIVYRMLKYGAGYVDQGEAAYEERYRDRLLRNLKRRAAELGFQLTAVELNSGQAALT

SEQ ID NO: 274999 - protein, 367 aa, unidentified
MKKGSTVAAKPSRKISEQKLTIGLDLGDRSSWYCVLDESGSIVLEQKVSTTSKALKEVFGGMPRSRMALETGMHSPWVSRLLSELGHEVIVAHARNVRLIGESRRKDDRLDAQTLARLARIDPQLLSPVKHRSAKAQADLTVIRARAGLVRARTALVNTARGLAKSYGERLRGCNVRNMNPEKAEGLSPELQAALTPLLAGLESLSEQIREYNERIEQLAQSSYPQVALLKQVKGVGTLIALTFLLTLEDPHRFRKSRDVGCYLGLQPGRRNSGQSEPQMHISKEGDPYLRTLLVQGAQHILGPFGVDCDLRRWGLKLAERGGKSGKKRAIIATARKLAVLLHHLWVSGEVYEPLHNHQHRPLAIAA

SEQ ID NO: 275000 - protein, 349 aa, unidentified
MTLIGCDLHTRKQQVAVLETETGEMYERQLSHAGDAVEQCYRALPGPVTVGIESTGYALWFHELMQRLGHTLLVGEAAKIRAMVVRKTKTDRRDALHLLNLLKHAQFPTVWIPDPATRDLRALVTHRMRLVRMRTMVKNGLHAIAMNRRLTLGPSLWSQRGLAQLQNLALSPHTTERRDESLQLLTWLTARIEALDDRVAVAAQADPGARLLLTHPGVGPLTALTTVVVLGPVARFPDSKHVVSYTGLAPAVHASADTCRLGQITKQGSPLLRFVLGQAGLIAAHSEVDLKRHYLTLLRRRGRPKAIVAIARKLLVRLYIMLRDQIDYDEFRRRGRTPRGQEVPPPVLA

SEQ ID NO: 275001 - protein, 371 aa, unidentified
MVKLTRTMNKCHSNTELSSLEETRCQFNGGRCAIKLGIDVHQDFYVVVEQVDGSNPKPPQRFPKAAFLHWAAKLKREGAEVHAVYEACGFGFALQRQLSALSIQCYVVCPQKLDEQNKRVKTDGLDAKALCLKLDRFVQGNRDALAIVRVPSEEEEQARAIHRQREQLVKARKQLEAQGRSLMVNHGIEPVKNWWKPHTFAALPMPQWVKELLKNSQPILIALQEKISALTAQLQSGAAPEQPRGLGKMTSVIIDREIGDWNRFSNRRQIASYTGLCPGEYSSGNTRLQSCVTKHGNPRLRAALVELAWRLVRFQPNYKPVRKWRQILAKGALATGAARKKAIVAVARQLAVDLWRIKTGRLRAEELGLIN

SEQ ID NO: 275002 - protein, 428 aa, unidentified
MNCNTQNAKIASITEKTLIVGIDVGSVTHYARAFDWRNYEYTKKPLEFSNTEEGSFTFKAWVENVAEKYGKTAVIPGMEPTGHYWFALGKFLQDCGMKPVHVNPHHVKKSKELDDNNPNKNDRKDPKTIAALVNEGRFSYPYIPIGIYAEIRNLSNLRFQTQEELTRIKNRIARWFSIYFPEYQDVYGDLKAVSGRMILKVAPLPEDIRRLGAEGVNLIWRDAKLRGAGMKRAKTLVTAAEHSVGSKEAPEAARIELRNLLSDMDVYALRLEELLQSIEEKLKEIPYIDKLMGIKGIGLVTVSGFIAEVGDIGRFDNPKQLQKMAGYAIVANDSGKHNGESRISYRGRKRLRYVLYEAAISLIGKNPEFREIHEYYRTRKENPLKKMQSVVAVACKILRIFYKILTTGVAYDAEKLMGDIKRPQLQTA

SEQ ID NO: 275003 - protein, 409 aa, unidentified
MVVQAARVTSSTVVVAVDVGKTEFAFSLTDATRTSLLKPRTGCPMTGPSLSQVVSDIVEVLPVGAVVKVGIEAAGHYHRPLLMAGAWPTGWEVLELNPGHVTEQRRVLGKRTIKTDVIDLQAMAELLLAGRGQPVRDRSLVLGELTAWSAHRTGRVVLRTATKNQLLGQLDRTFPGLTLALPDVLGTKVGRLVAAEFPDPARLAALGSSRFIRFGATRGLQIRKPVADRLVQAARDALPATDAAVARAVLAADLVLLDDLDAQVDQATDHLAALVPSTPFAPLLTVPGWGPVRAGNYGGALGDPARFDNHRQIYRTAGLNPIQYESAGKRRDSVISREGSVELRRALIDLGVGLWLSDPAAKRYGTQLRARGKKGLVIACAMAHRANKIAFALVRDQAGYDPSKWTRED

SEQ ID NO: 275004 - protein, 346 aa, unidentified
MTTVTIGIDLGDKNHEVCVLDNAGEVIDRFMVGNTKIQLQKAFAKYAGALVAMETGTHSPWISRVLVALGCKVLVGNARKLRAIWASSQKSDTKDAEMLARIARLDPKLLYPIRHRSQKAQVDLEQIKARDLLVRLRTDLINHVRGVVKSLGERLSKCATPAFHKRVQKELPDDLRTALIPLLEQIGSLTGQIRAYDKQLEHVAETTYQETVCLRQIQGVGLITALAYILTLESPDRFDKSRAIGPHLGLTPRKDQSGSSDKQLRISKEGDVYLRRLLVSCAQYILGPFAQDSDLRRYGERLIARGGRAAKRKAVVAVARKLGILLHHLWSTGEVYQPLHNAKPAA

SEQ ID NO: 275005 - protein, 346 aa, unidentified
MEKLIRIGVDTSKSVFQLHGVNAAEQAVLKKKLRRKDLVAFLARLEPTVIGLEACGGSHYWARELAALGHTVKLIAPQLVKPYVKRGKNDAADAAAVCEAMSRPEMRFVPAKSPDQQAALMLAGVRDRLIRNRTQLSNAIRGYAAEFGLIAAKGLEKIEPLLARAAADETLPALAREVFASQGREYARLQAQLKEIEAKLMAWHRGNECSRHLAEIPGVGPIGATMLVMKTPDPKAFRSGRYFAAWIGLTAKDHSTGGKQRLGAITRAGDPALRSVLVVGAMAVVRQALSGKGHPSPWLSELLKRKPRKLAAVAVANKMARIAWKLMLTGEHYDARRIASAMPTAA

SEQ ID NO: 275006 - protein, 352 aa, unidentified
MSQTSKIAFAGIDIGKNSFHIVGHDERGAIVLRQKWSRGQVEARFANLPPCLVGMEACVGAHHLSRKLNSLGHDARLMPAKYVRPYSKGQKNDFRDAEAIAEAVQRPTMKFVATKTADQLDLQGLHRVRERLVSQRTGIINQIRAFLLERGVAVRQGLRFLRAELPRILATPPDVLSPRMLRIIEDLAGDWRRLDERVEGLSNEIEAIARQDAGCERLMSVPGIGPIISSAMVAAIGAGDVFTKGRDFAAWLGLVPKQISTGDRTILGKISKRGNRYLRVLFVQAAWVVLIKPQSWERHGLKSWIEAAKRRLHRNVLAIALANKLARIAWSVLAHGRSFEASKLAAAVTQPA

SEQ ID NO: 275007 - protein, 375 aa, unidentified
MDRRGENSPTHTTNVDEESSGKVFTHRDRRFDCKLTSVCPHPSGLNLYPETHTMQTQPQPIALNVGADVAKDEIVVACAEQSFAVHAIANRRATLLTALKSLPAGSRIGMEATGSHHELLATLAHKVGLQVYVLNPKDTRHYAKAVGQRGKTDRVDAQLIARYIAHEHAKLYPWIAPSPQQHQLGRLLRRRGKLSKIQAALTQSLKGLTGFSSDLKALRARIDLTIARIDAKIRTIIEASAPRQEAYSRLQSIPSVGPVVGSGLLIHLERLPFRSADAFTAFTGLDPRPEDSGEHRGRRRLSKRGPSELRRLLYIAAMSARRTPAWKPIYEHHRAKGLATTAALVILARRIARTAWSVYTYKTKFDPQRLTTGLT

SEQ ID NO: 275008 - protein, 387 aa, unidentified
MLLDHTTDGPAAIRTQIGAIFVSLELSRSTWLVTSLSPGKGEKMSKHSVKAGDLAELLKLLAELKCKAQARTGESYPIITIQEAGLDGFWLHRALQQEGIESQVVDPASIATPRRRRRAKTDRLDGETLLRTLLAYKRGEVRVCAMVVAPSPEEEDRRRLCRERRTLIAERIEHVNRIKGLLFAQGIFDFAPLRRDRRKRLEALRTGDGRALLPHLKAQIVRELDRLELLLNQIAAVEREQDELLAASKPAGEKAASDPAAMLLDLKSLGPNFTAVLWSEAFWRQFANRRQLASYAGLAATPWRSGGIEREQGVSKAGNPRLRTTMIQLAWLWVRHQPQSALTQWFKANSVRGKKRTIVALARKLLVALWKYVTAGVVIEGAEMKAA

SEQ ID NO: 275009 - protein, 421 aa, unidentified
MTPTSHDTFAAFIGIDWADAKHDGCLQAAGTAKRECFQLEHTPEAIDAWVTTLRTRFNGQPVAVCLELDKGPLVSALRKYDFLVLFPINPLMLARYREAFTPSRAKDDPTDAALQLELLLTHRDKLHPLTPQSATMRALTQLVEHRRRIVGDKVRMTNRLTSTLKNYFPHVLQWFQDKDTPIFCDFLSRWPTLKAVQLARRSTLESFFRDHHVRSPEVIARRIQAIRAALPLTTDDGVIAPHVLLVQALVAQLRVTLQAITDFDTAIAQRAQSHPDFPLFQALPGAGPVFASRLLVAFGEQRERYPSATALQKYAGIAPVTERSGKKSWVHWRLQCPKFLRQSFVEWAAESIRHSFWAQVYYQQQRDKGNAHQAAVRALAFKWIRILYRCWQERTPYDEATYLQALARRGSSLIQNLAKAS

SEQ ID NO: 275010 - protein, 382 aa, unidentified
MAHNTTTQEELYRRNTLYMAFELSKKNWRVLSSAGGVKNYSAMMTPGNAKELTEIVIRARKKFGLTEDSRVLSCIEAGRDGFWPHRFLLQNGIESLVIDAASMKVSRHRRRAKTDRIDAQQLLADLVRFDQGDKDVWRVIHAPTAEDEDHRHFHRELEQLKKERTQHRNRLRCILATEGVKIPGSLMKALSNLDSLRNWNGDALSKTMLWRLERKVQRLIFVEKQIREIQQHQVQCVKNPATPKLEKITKLNTLRGIGVTSSWILVMESLGWKKFRNRKEVGGSVGLGGTPYNSGQMDREQGISKAGNARVRATLVELAWMWMRYQPNSDITKWFEKRYAGQSKRMRRIGLVAVARRLMIELWHFLEHDVDPPGAIINKKPA

SEQ ID NO: 275011 - protein, 344 aa, unidentified
MQNDTLVAVDLAKTVFQVAVSHHPGQVSKNKRLSRTQFAEFLAQLPKATIVMEACGSAHFWARRMQALHHTPVLLSPHTVTPYVGRNKTDRNDTKGMLEAHRNEEIRPVPVKTLAQQALCSLHRIRAGWIAERTARINTLRGLLREFGIAIPVGAQHAVPNAWLHIEDAESELPDSIRPALAEICTEIRELERRIKMIETQLAALAAQTPAVARLMTIPGIGLIIATALVAFVGDIHRFPSARHFASYLGLTPKEHSTGSRRRLGAISKQGDVFLRTLLIHGARSVLNAATRQKTPDRLHAWALSRHAARGHNKAATAVANKIARIVWAVWKRDQPFHSVPVAA

SEQ ID NO: 275012 - protein, 428 aa, unidentified
MEVIYSKACGVDVHKSFIVAVICDSTSITPKYSRKRFSTYNNSLIEFRNWLLDNDCQNVCMESTGKYYVPVYNALENYISNVVVANPKWVKAIKGEKDDNRDAKWIADLFKMGLVRSSYIPHKNFRILREFTRYRYKLTNTKSSEKNRFTNALTVGNCKLDMVFSDIFGKSSQSIIDIILNNDSFSDEDIINCIDKKCKSSHEDILFSINGIQLTNEQKLRINIVKDHIDYLNNQINNLNDIIDTLVTPYESYLDLLGTIPGIDRNSAIGILSEISNDMSQFKSHYRLTSWAGLAPGCNESAGKKKSVKISRAGVYLKPYLVEVAHCAVKDKSNSYYAKKFDKISKRRGKKRAYIAIARKILVAIYHMFITGEVWNPTDLASVETPIQDRIKYTKNNFNQSFKQLLSLGLTSEELIELINQNANKLPV

SEQ ID NO: 275013 - protein, 351 aa, unidentified
MSQNLNSAVAVIGIDIGKNSFHVVGLDDRGAIVLRQKWSRGQIEARLTNLPPCLIGIEACVGAHHLSRKLKAFGHDARLMPAKYVRPYSKGQKNDFRDAETIAEAVQRPTMKFVATKTAEQLDLQALHRVRERLVSQRTGIINQIRAFLLERGIAVRQGLRFLRAELPRLLAAPPDVLSPRMVGVIEGLAEDWRRLDERIEHLSGEITALAHQDAGCKRLVSVPGIGPIISSAVVAAIGPGDAFSKGRDFAAWLGLVPKQISTGDRTILGKISKRGNRYLRVLFVQAAWVVLIKPQSWERHGLKPWIEAAKKRLHRNVLAIALANKLARIAWSVLARGRSFEAMSVMASAA

SEQ ID NO: 275014 - protein, 322 aa, unidentified
MTHSDLYVGIDVAKFKLDLARSDRSDIEQFNNDQQGIDRIVAMLVEAKPMLIVIESTGGLERALVAALLEADLPASLVNPGRVRHMAKALGIHAKSDQIDARMLVAFGQKAQPRINQKSLKIKDELSDLVTCRRQLCTTRVQQKNRRSTTVSSSAKASIDAVLTTLDEQIKLLDEQIQKLIDADDDFRDLEKILLSVPGVGKTLASVLMADVPELGQIQRQPICALVGVAPFNNESGTIKGPRRIRGGRTHVRNVLYMGALTAMQHNPVIKVFAQRLAAKGKKPKVVITAAMRKLLSLINVMVREGLCWEELNIVKKLSTNP

SEQ ID NO: 275015 - protein, 309 aa, unidentified
MTSNIQYIAIDIAKQTLQVQSDLKSLSLNYDEVGLKQLRAFIKQHEKPMIIAEATGGYERPLMSMLFKYDISVALINPRLARAFAVSEGIKAKTDPIDADMLLRFATEKNPRPTEYIGAEREELGALMDRRSQLTEHIAKEKNRLDKSPKSICGSIKKMIRLLDQELALIEARITKLIDSNEQMKAQSKLMQEVCGVGPNTAWSILAYLSEITALNRNQLVALAGLAPYNRDSGKYKGKRSIQGGRAKVRATLYMAAQTAAIHNPIIKTYVDRLRNEKGKPYKCAMTAAMRKILVHLQSLLKKQQLLLD

SEQ ID NO: 275016 - protein, 363 aa, unidentified
MLHAGLDLSRRRIDVSLLNEQGEHLDQLVTPPDVDALRTLARRIDEVHAEPVCAVIESMTGARLVHDTLEACGWDVEVADAQRVKGLAPLTCKTDKTDSLVLATLSQRDLVPAIWLPDPRVREMRELARFRMHLVHHKSALKNRIHSTLINFGRPCPVTDLFGPQGRRLLAKLDVPGPWRRNVSASIELIDHLEDQIDQINRELRAGHADHPYVPLLMSVPGIRWVLAFTIAAEIGEIERFPSPEKLTGYTGLCPRVVQSGDKDRRGPLSKHGPTYLRWALLEATMHALRHPAYSVRYQRTKKRLGKQRGAKVAQVDRPPTRPCDLAHAHSKRGVRSTRRPVSSGGLTALFGHAPASEASNFA

SEQ ID NO: 275017 - protein, 387 aa, unidentified
MPQPNDLSRSLVALDHNSTIIAVVELSQSSWLVGGVLPGIERQPRKKLEPSPERLLALLHRWRDEAIKAGRNITRIALAFEAGRDGFWLARWLAARGVEAHVIHPSSVAVSREHRRAKTDRLDTELLKRGFLGWLRGERGHCSMVRVPTLAEEDAKRPNRERECLVKERTRLVNRMKGALARLGIRNFRPTLRNAAEHLAGLYTPEGSPLPPNVAAELERDIARLGLVIGQIKQIEEARRQRLEEQPESRPHAMVRLLVRVVGIGTETADMLVNEVLSRPMRDRRAVARYAGLTGAPDESGTKRREQGLAKAGNARVRRGMIPLAWRFLRFQKDSALARWYQARTADRRAGTRKTMIVALARKLLIALWRFVTTGERLEGVVLRPAA

SEQ ID NO: 275018 - protein, 351 aa, unidentified
MQLVQLPVNINFKQCKDMEKDHYIGVDISKKTIDVAIYVKNQAKKGAFPHETFSNSEEGFKDMKKWLRKQHVVLSKSLFCMEATGNYTYELCLFLEQLGVAYSIQSPLHLKRSFGLTHGKNDKVDASRIAYYAYLHREDIKLSKLASDSVRKLKALIVERKSLVVEIARCKAQLKEVGEHAPSAGTVKRTEALQEFLESQVESIEEEMAQTIEADEQMKTNYNLLLSVDGIGIVNAINTIIATHNFAMFDNARQYASYIGVAPFEHTSGTSVRGRTHVEPGAKTLKADLTGAVRSCINHDKEIRKYYDRKIAEGKAFGIVANAIKFKLLLRMFAVIKRGTPFVRKPDFIYQ

SEQ ID NO: 275019 - protein, 358 aa, unidentified
MQSNKISFKGQKIFIGIDVHAKSWKVAITPEVGAVKGHSQKPSAKELFDFLKKNYPDGEYQAVYESGFSGFSTYYALKEVGIECMVIHAADVPTTQYEEVMKTDRIDAAKLARSLKAGQLKGNYVPEKQYIDDRSVVRIRRTIQKQLSGYKSRVKHLLHCHGVEMPERFSKIQTHWSRAFITWLMKDVKLMSDTRTSLDLLIRQVEVIRGTLLEATRQLRKMSQMERYKRRHDLLRTIPGIGPIVSMCILTEVCDVKRFHNENEFAAYLGLVPTSHSSGEKTVHGEKTFRGNKQLGPMVVEAAWVAISWDAGLGSQYFQYKKRMEPQEAIVRVARKLSNIIFSVLKNEKEYVPYQTGN

SEQ ID NO: 275020 - protein, 452 aa, unidentified
MLESDQLQPRELPIVTTSTRIKCHLYIRLHDLPTIAQEELFTVDAILERCAGLDVHQDNIVACFLSGPLDQRPSKEIESFGTTTKELLRLQDWLQDRECTHVAMESTGVYWKPVWNILENTCELTLANPTRIKNVPGKKTDYSDAEWIARLHRSGLIEKSFVPNEEIRDLRDLTRYRRKLLQNVTQEKNRVHKILQDANLKLTTYMSDVFGVSGRALLESIVNGEVLDAEQVRDMVKSTLKRKVPELIEALNGRLRLHHRKMIRRHLEHIAFLEREIQELEAEIEQLLAPYQREKELLETIPGIKQDAAASILAESGPDMSHFPSDAHLASWAGVCPANHESNGKKNEKKNQRGNKGLKSVLCQCSWAAIRVKDSRMSAVYARLVKRMGKQKAIMAVAHLLLRIIYVVLRDKVPYQELGADYLGSREKTIEYWIRKINQMGYEVELHEIKSA

SEQ ID NO: 275021 - protein, 416 aa, unidentified
MSVALPQALFFTGIDWASAEHAVCVLDAAGKITARFTIKHSAEGIASLVRRLARYGDPAGLPVAIERPSGRLVDLLLEAGHPVVPVSPNAIKTWREGEVLSGAKSDAGDAAVIAGYLRLRYHRLAPAAPYCDETRALRAAVRTREDLVQMRVAATNQLSALLEAHWPGARAVFADVESPISLEFLTRYPTPAAARHLGHKRMAAFLVKHGYSGRRPAAQLLARLHGAPAGTAGRALTEALQDAVLAVVAVLRALNGAVKDLDRSVAAHLGEHPDGPVFTSLPRSGQINAAQMLAEWGDCRPAYDGPDCVAALAGVTPVTKQSGKYRGVEFRWACNKRFRRAVTTFAGNSRHASPWAAQIYAEARAAGKDHPHATRILARAWIRVIWPCWVNGVPYDPARHRAAAALAGQTPSQPAA

SEQ ID NO: 275022 - protein, 338 aa, unidentified
MPLYGGIDLHGNNSVVVLINEQDQVLYQKRLPNDLATILEQLAPYHPEIEGLVVESTYNWYWLVDGLMEAGYCMHLANPAAIQQYSGLKYSDDHSDARWLAHMLRLGVLPEGYIYPKAQRPVRDLLRKRKNLVEQQSANVLSVQNIIVRNLGTRLSANRIKQLSLADVETLLPDYDQALAVSSALAVVNCLGQQIKIVEKRVHTQMRTTPLYELLRTVSGIGPILSQTILLETGEIKRFASVGEYASYCRCVNSTKVSNGKRKGQGNVKNGNPYLSWAYAEAATFAIRLNPRVQRYYQRKQAKTNVPVARKTVAHKLARACDHIMRHQVPFDETKAFG

SEQ ID NO: 275023 - protein, 323 aa, unidentified
MSSFVGVDIAKNTFDIATHLPNGKHKTKAKLPNDAKGFKEFEAWLNKQVEPTALIVMEATSVYHLELAEFVYNKGYRVCVVNPATTHAYADSELRRIKTDKSDAKLLADFAREKAEKLQLWAPEPLKYRQLKAMVRRLDDLQEMEQMELNRLDVSDEKVKDSINSVLRHIEKEIAETHKAIKKHIDDDPDMRQMRDLIVTIDGIGQKTLERLLAELGDLRKYDDPRKLVAAAGLNPKLQESGKLKGRTIISRVGSARVRAGLYMPGLVALRHNEAIIAMKERLKANGKAPKQIICAAMRKLLHFVYGVLKSGQPFDPKLALAR

SEQ ID NO: 275024 - protein, 387 aa, unidentified
MPQLNDLGRSLVALDQDSTLIAVIELSLSSWLVAGLVPGLRRQPLKKLEPDEVELLKLLHRWRDEAVKAGHPIRRICVAFEAGRDGFWLARWLRARGIEAYVIHPTSIPVKRDHRRAKTDRLDTTLLMRAFLGWLRGEAEHCQMVAIPTIEAEDAKRPNRERENLVGERTRIINRLKAGLVRHGIRNFNPTLRKAAERLAALRTPEGAPLPPNTLAELERDMARLRFVIEQIKQIEAARQERLAQAPEQGPAAMTRQLNRVVGLGLDTAEMLATEVLMRNLRDRWAVGRSGGLTGAPDESGAKRREKGLARAGNARVRHGMIQLAWRFLWFQKDSALAQWYQARTAGARGDIRKKMIVALARKLLIALWRFVTTGQAPAGVVLRPAA

SEQ ID NO: 275025 - protein, 358 aa, unidentified
MKIIGVDLHARQQTIAMLDTDTGELVEKTLDHESEKVREFYAALPGPILVGIEATGSMQWFLKLMEELGIDCRVGHPAKIRKAETRKQKHDRRDARLLLELLVANRFPSIWMPSTEQRDLRTLLRHRHQWVQMRTRVQNTLQAMALSHGLRRGPSLWSQQGQQVMASLPLPPHGAHRRAELQALYHRLEDEISKLDERVTDQALQRAGAKRLLTHPGVGPITALATDVFLGDPARFADGKALASYVGMIPSEYSSGGRQRLGALSKQGNALLRFLWCEAALHAVQRDPELKRFYRRKLVQKGLGKARIAAARKLGIRLWILLRDQIDYKEFCRRGQMRQKSGGARAGMPGYNNGSALQ

SEQ ID NO: 275026 - protein, 342 aa, unidentified
MYYIGLDVHKKTISYCVKDVSGRICQEGKVGATRWELDIWIKTLPQPWTVAMEATIFTGWIYDHLKPHAAATKVAHPLMLRAIAAAKKKNDSIDAGKIADCLRCDFLPECYMAATEIRERRRTLRYRHLLVRQMVQMKNRVSGLLMETGVSHNKQRLHKVGYFPELLANADAVSASIRPLLQLSRESITRLQRTEGAIIRSLQRDPLLAERVRRLQTIPAVGKVTALSWALEMGDISRFRSIRQAISYCGLCGDEKRSADKVARTPISKQRNKHIQRVLVEAAKLAPRRNPDLALIYENARQKGNANCATLAVARKLVAYLMVVDREQRDFEPVRGLAGTAA

SEQ ID NO: 275027 - protein, 333 aa, unidentified
MYVGVDYHKRYSIVTMMDQRGRVIGQSKLSNDPLTLINYVERLPKGSKVALEATGNWYYFYELVEETGVDIYLAHPKKTRAIAEARIKTDRIDSMILAHLLRADLLPTSYIPPRDIRDIREVLRYRASLVALRTSIKNKVHAILSKNGIRLGCSDIFGKKALRELKELDVRCCYRQALDGYIRLVELVNVLIKEVSDTIKGMVEQRPEAMLLTSIPGISYYSGLLILAEIGDISRFPSARKLCSYAGLVPSVRSSGGKTRYGPITKQGSKWLRWIMVELSIHFLRGSGRMRGIYKRVAARHGPHTARVAVAREMLKVIYYMLRDKRPFVPDSA

SEQ ID NO: 275028 - protein, 420 aa, unidentified
MARKGRSTKGIERAQPFEGISRVNPNAAGMDIGSVEIVASVDGAENTQLVRAFGNYTADLENIGNWLAEHGVETVAMESTGVYWIPIFESLEDRGFECLLISSRSLRRVSGRKSDIADAQWIQTLHSYGLLESSFRPQADLIALRTLLRHRGQLIEHRSPHIQHIHKALLQMNVQLSQAVSDITGVSGLRIITAILNGEREPAKLGALREPGCKKSAEEIGRALTGTWRAEHLFVLKQSFEMYVYYSEQIVDCDEEIKRTYAGLCVENDPGELPPMSRRKRGSHSKNKPKQADEIRAHLKRISGVDLSLVDGFGVSLSQTVLSEVGTDMSKFPSEKHFCSWLGLAPKHEISGGKVLKNRTLKTKNRAGQAFRMAAQSVKRSETVFGMKYRRMRARLGPAQATVAVAHAIARVVYRMLKYA

SEQ ID NO: 275029 - protein, 348 aa, unidentified
MLADQLDYVVGVDPHRDAHALAIVQVVSGLVVFEVTVVASSDGYAQALKLVDEHAPGRRAFAVEGTSSFGAGLTRFLTAHDERVFEVGRLRRERRSGGKTDALDAIRAARSVLASERLATPRAGGERQALQALVAAREGAVNAKRAGLCQLRDLLITTPEPLRSELRPLTRARLLQRLATTRPQGRHDAELRGSLLALRSIARRVLQLTAEERELAREIETITRRLAPRLLDQPGVGPHAAAQLLLSWSHRGRIGSEAAFARLAGAAPIPASSGQTVRYRLDRTGDRRLNRALHMILVTRKRSHPATIAYIERRLQEGKTRREANRCLKRYLARSLYRLLEHGAPLAT

SEQ ID NO: 275030 - protein, 390 aa, unidentified
MIYAGIDVAKDKHDCLIVDSNGKILSQTFTFSNNKQGFDELFVNLKTYSKDLSKLKVGLEATGHYSDNLLEFLIANDLPTTVINPLHTNLYRKGLSLRKTKTDKVDAHSIVTMLRTECLQPYSQSSYHVRELKSLTRYRFSLVQDCAKLKSSYARLCVILFPELEKLVSSLHINSVYTLLSELPNARAISECHLTRLTNLLSGSSKGRYSKDKAIEIRNAAKNSIGSYSEVKSLELQQTIQLIQMMENQIAQVEAKINPIVDSLYSPIMTIPGIGYRMAAIIIAETGNFVDFNKAEKVLAFAGLEPSVYQSGQLTSTHAKMVKRGSKYLRYALFNAAKYVCHWDEGFRQYLKKKRSEGKPYNIAVSHAAKKLTRVIFHLVKTNQPFIRMA

SEQ ID NO: 275031 - protein, 449 aa, unidentified
MRHPHAAGIDIGSRSHWVCVGFAADAASCLIREFPAHTAGLKAIAAFLREHQVQSVALESTGIYWVPLYELLQAEGFEVLLVDPSYSRQLRGRPKADRRDCQWIYRLHSVGLLAAAFRPDEQTCQLRAYLRQRANLVHQASRHVQHMQKALEQMNLKLTEVLSDITGVTGRAILRAILRGTRAPEKLARYRDKQCKASEAEMAQALTGTYREEHLFELKLAYEAWQFTLGQVDKVDGQIALQLGRMKCDRALPPLKPKARPKRRVNSPRFDVRAALYYVVGLDLTEIEGVSELTALTVLSEIGPGVSRFATARKFCSWLGLCPNWQKSGGRVKSSRTRRGVNRAAQALRVAARSLHHSQGALGGFLRRMKGRLGVQAALTATAHKLARIVYLALKHGMTYVRQSQEEYEAQMKEKQLKALQRKARQLGLEVVEKPSVSGATATAAPVQG

SEQ ID NO: 275032 - protein, 439 aa, unidentified
MTVLEGNEDQVSIGIDAAVVADHQIAIRGPGVREDFRASPTLAGMAKLTERLSPYAGSLVVVEPTAGTWLPLTMAVTEAGCRIGFVQNRDSARLRQAINGRTKTDVVDADMLARCEAVLGVADAPIPLPGQVGLRRALRRRHHMTVDAHRAECRLWSLAIWAMPDVWRAAGGHAVAQPLLGRWPDLRALWRARLSSITEIVAAHSRDKDPTRRAERIRDAAQGWHEFWIGRLDLDDLAWEIAEMCDDIDIADQRQREATDHALERWRYHWPDDVLLSVLGVGPICAATTRAWWGDGHHLRSAKAAGAFVGLNPSNWESGLSASPSRSITKEGPAEMRLVYYQAANVARRRDPQLAAHYRRLMCERGHTHIQANCAVARKLAARTWAVLHTGEPYEPRDLDGNPIDEATAAQLAVELEVPTDTRRRNRATNPRRGRLDLR

SEQ ID NO: 275033 - protein, 338 aa, unidentified
MKTFFGVDYHKRFSYGTIMGETGEILKQGRFGNQPEALERFLGEYGGHACSAVLEATRNWCVMHDWLEEVTGEVTLAHPLKVKAIAEAKVKTDKIDATILAHLLRCDLIPAAHVCSPAARVLKNLLRHRMFLVRLQTMTKNRIHVLLDRYPAIRSERRATELFTKIGIAWLKQVELPTYDRHILDSEVLLLGHLQAQVKQADRWLMQIGKKDPRVQRLMSIPGIGKSFALLLVCEIDDIARFASPKKLHAYAGLVPSTYASGERTFHGRITKAGNKFLRWAMVEAVWPAIQKDEALNQYYHRLAQRKGPNPAKVATARRLLTIVYRVLAENREYRCAA

SEQ ID NO: 275034 - protein, 418 aa, unidentified
MVLFVGDDWAEDHHDVEILDDAGRRLAKARLPEGMAGMSRLHELIAEHLDEAANDPETGMLAEDEVIVGIETDRGPWVAALIAAGYRVFAINPMSVARYRERHSTSGAKSDPGDAHVLGEIVRLDRAHHRPVAGDSDQVEGLKLVARTHQSLIWDRTRHLQRLRQALREYFPAAMEALAAGKLELADGDALELLGRAGDPDRAARLSRSKIAAVLKRGRRRDPEGKAELIQATLRAPALRQPAAIERAYATIANTQIQLLTGLNNQIPELEEVVAEGFGQHPDAEIYTSQPGLGTVLGARVLAEFGDDPHRYQDHKARRNYAGTSPVTRASGRKTVVLARYARNRGLGDATHQWAFCALTASPGARAYYDELRARGTSHHAALRQLGNRLVGILHGCLKTRTPYNEATAWAHRQPAAA

SEQ ID NO: 275035 - protein, 493 aa, unidentified
MGACELESGDVALAAIPIRKMTIGIAQTLLLIIDWRIAMPKRTTGDRPELKPVNVGAAAIDIGSKMHMAAVNPASTDVPVRSFGTFTQDLHDLADWFKACGVTSVAMESTGVYWIPVYEILEQRGFEVILVNARYAKNVPGRKTDVSDAAWLRQLHSYGLLRGSFRPDAEIATLRAYLRQRERLVEYAAAHIQHMQKALMEMNLQLHHVVSDITGATGMRIIRAIVAGERNPEVLATYRDVRCHSSIETIRAALVGNDRHEHVFALTQSLELYDVYQAKMLDCDRKLEVLIAALNNKGAKPAGKLSKPRIKTKQVNTPTFDVRSALYGLLGVDLTEIHGLGPSLALKLVGECGTDLRAWPSAKHFTSWLCLAPGNKISGGKVLSSRTRRSSSRAAALLRLAATTVGRSDTALGAFYRRLSSRAGKSKAVTATARKIAVLFYNTLRHGMSYRDPGADYYEQQYRNRVLANLQRRAKSLGFVLQAVPGDADPAVS

SEQ ID NO: 275036 - protein, 387 aa, unidentified
MNRILKIGMDVHSTNFTLCAMEPTIGSEDRIFGEVQVAPDYKEVIYFIETLKQKLGLNDDYSIECGYEAGCLGYTLYHQLTNAGIKCVILAPTTMLTQQGQRIKTDKRDARLIAHCLCYGGYHPVYIPTGEDDAVKEYLRMRDDHKLALKKLKQQINAFVLRHGYQYTGTKWTIKHVAWLRKLELNPMYRETLDEYMASYEEQEAKIERYDKRIEEISTEMRYRENAEKLGCFLGIRTHTALSLIVETGDFKRFAKGNTYAAFLGLAPGEHSSSSNVNRLGISKAGNAHLRCLLIEASKGICKGAIGHKSKALRSRQNGQSAEVIAYADKANTRLRSKYYKMIRHGKKKNVAVAAVARELACFIWGMMTGNIKIASGGTSAPAVSQG

SEQ ID NO: 275037 - protein, 346 aa, unidentified
MQNDTLVAVDIAKEVFEIGVSDRPGRVASRRRLYRHEFLEFFAQLPQATVVMEACGSAHYWARRIEELGHVVVLLPPQYVRPYVVRNKTDRKDVDGLLEACRNDRIKPVPIKSVTQQVLGTLHRLRSGWLADRTRAINALRGLLRELGFFIPEGRKHVLPDAWEIIQDPKSGLPDALKPSLGSLCEEIVSLSTRIEQIEAQLEALAKQIPVVARLRSVPGVGLLTATALYAFVGDALRFPSGRHMASFLGLTPREYSTGLHRRLGRISKRGDVYLRMLLIHGARSVLWHAKRLKQPDRLRAWALRLERKLGHNKAAVALANKLARISWAVWKNDRNFVPIPELQAA

SEQ ID NO: 275038 - protein, 352 aa, unidentified
MRVLIGVDPHKSVNAVAAIDEKGELVAHETFPADRKGLRALERWSKRFPQRRWAVEGAAGIGRPVAQKLIAVGEEEEVVDVPPKLLANVRVLSVGNARKNDRLDATFTALAALSNEHLAAVQPEDGPEGRAEVLRLLTERREDLVAERTRTLNRLHVLLWDLLSDGVAKGLSANAAAKLLRRARPGPETGRVRKRLASELVRDVRALDRKVASLDERIREEIEASGTALTEIFGIGPILAAKLAGIVGDVGRFPSKAHFASYAGVAPIEASSGEVVRHRVSLAGNRRLNKVLHMVAVCQARSDPRGRAYYLKKLEEGKSRREAMRCLKRRASDAVLFRALVADSELALRAVA

SEQ ID NO: 275039 - protein, 399 aa, unidentified
MYDTSGIGVFLGLDVGKGEHHAHGLTPAGKKVFDKRLPNTEPRLRAVFDKLTEKFGTVLVIVDQPANIGALPLAVARDCGCQVAYLPGLAMRRAAEMYEGEAKTDARDAFVIADVARTNPRTLRQITVADETQAELTMLVGFDDDLAGESTRTSNRLRGLLAQIHPSLERVLGPRIQHEAVLELLGRFGSPEQLRKAGTRQIAKVLGPKAPRMAERLAVEITEALSEQTVVVPGTNASAIIVPSLARHLAEILSQRHMLKGQLEALLEAHPLSRILTSMPGIGVRIAATLLVTVGDGATFPDADHLASYAGLSPATKSSGSSIKGEHAPRRGNRQLKRAMFLSAFAALHDPASRAYYDRHRAAGKTHTQALLRLARRRVTVLFAMLRDGCFYDSRPATA

SEQ ID NO: 275040 - protein, 318 aa, unidentified
MDQVYIGIDVSKDTLDVASHTGSQHWQCTNDDDGIGKLISLLKQQSPTLIVMEATGGYETRAAYALQKSGFNCAVVNPREVRDFAKATKKLAKTDTIDAQVLAHFAQVIQPVPRPLSNEQARKLELILARRRQVIEMLTAEKNRLHLAEEPVKGAIQVHIAFLESELAQTDNSLRDRIEESPVQREKYHLLQSVPGVGPNLASTLLIELPELGSLNRRQIAALVGVAPLNHDSGKHRGKRSPWGGRPQVRSALYMATLVASRHNPMIAKFYQRLCEAGKVKKVALVACMRKMLIIMNSMLKHHVPWTFTNPILISINC

SEQ ID NO: 275041 - protein, 507 aa, unidentified
MTRFVGGRLQAEFMARARGLDPARCLVGPVDVGKWSAMALVADHYGEVVVAPFEFALSEPGVQVLLSAICEARRARQAEICRAGVEAAGHYHRTLVARLCEEGIEVVQLNPAAVKEARSQQLLRTLKTDERDLGAMAELMVRGGGRPAQGRPDALAAQLAFVVHRRRKLSAHQVLANQVQSQLDLVFPGLSRCFSGLLGSKAGRVILADICDPDRICRLGPERLRAFVAHRGVRMSRPKAAQVVQAAKEALRLPGTERAVLGAVLSADVALLGSVEAELARAEAALAELLPKTPAQVLTSLPGVGVVRASAYGAGIGDPWRFPDASAAYRASGLVPTQYDSAGRSRRRGRHISREGSVILREAIIELGKGLTGHDADFSAYRRRLIDIEKKTPAVAAVAAGRRAHRLAFAMLRSQEPYDPARWCASVGPERPHPRRAGPKGQGSQRVVAPQVRGDGRSSVPFVQGTGPDGTHGPRSTSYLSTSPRAQAGSSSSGPADSAKSRPSKRR

SEQ ID NO: 275042 - protein, 423 aa, unidentified
MEVMHRRVAGLDVHKETVVACVRVMAGRRPTRECRTLTTTTQGLLELLGWLTASRVTHVAMEATGVYWTPVWKILSEGDFTLIVANAAHIKQVPGRKTDINDAMWIADLLACELLKASFVPPEEIQELRSLMRTRKQLVREQTRHVQRLEKTLEEANIKLGTVLSDLMGASGRRMIEAMIAGECDPHRLAGLAERTIKASHKALYDALHGRLREQHHFLLQLHLQQWDAIDAAIRRIDQRVAEQIERMDAEAADGQPPFRELIPRLCAIPGVSFLSATAILAEIGRDMSRFPTAGHLIAWAGLCPGQNESAGKRKSSRLRRGAPWLKTMLVQCAWAAKRAKNSYYSAQFHRLRSRRGPQKAICAVAASILTAIYHMVKSGAPHRDLGADYFDRRAPEAKAKRLVAQLAKLGFAAQLQPLADAA

SEQ ID NO: 275043 - protein, 427 aa, unidentified
MKEQSSTIVGIDWSADSHTCYDLQADKTFKITDSVEGYEKLLKNCSEAVFVIEEANNRIGDYLLINNREVYVLPPCRSKEARKYHFSSGAKSDNLDAKAIALTFRDHPSYCRRITYSELKATMIKLVTAYNIVSKMHSQQCNRLYSILLRYSPDYLHIMEKQYKSDRSLKILSLCPTVTELKKISNEKLKKMLNKDNHRMTSSLRKKLDKLRSKGIFWGDTSCEAKLILFLVNIILSLREELEALRKEMLRILESSPYRIILSIPGVGAVVGSYIVKAYLTHDFRSYQEMQKYAGTVPFLFQSGKKSIMSMRKKCDNKLRTMIHIAAFASLKNCGWAKNYYKRKRNEGKTYGHALRALGNILLKIAFSVLSNMKEYDESLFLNAKGIKTTQLNDTTFSETSSYPEYSQDAHLSLAATKDVIDNLIVT

SEQ ID NO: 275044 - protein, 395 aa, unidentified
MRFAGIDIGAEQHVVAIVDDTGVLITKSTTFGEDAAGYDRVRTLLGEPKEVLVAMEATGHYWQNLFAVLAGHGYSIALLNPIRTSRFAQEDLVRTKTDALDAIGIARFAQQKRPASTPLTDEATLELRELVLMRERIVQELGDKVRQLHRVVDLGFPELTRHVKGLDSDLALTLLHELPTAAAYQRVSPKWIAALVYDGRHKIGGELAHAIFASASSSVGQHHGPAFQLEVRYLCEHIRLLKAQLKTLETDIERKLKDNEVGQLLTTIPGIGPQTSARIIAAVVDPSRFRDGAAFASYLGVVPGLKHSGKHTPLRAGLSPIGHARLRKNLWMPVLVAVRKNPWLRAFYARLVAAGKLRKVALIAAMRKLAHLIYSVAKNRKPFELRLTAEDGKAA

SEQ ID NO: 275045 - protein, 343 aa, unidentified
MGRKIGVDLHKNSFRVCYYQNDEKYDFETYKVSVKGLDHFKKGLKKTDELAVESTGNTGHFFRAVEGKVNRIRVVNPMQFKVISQSVKKTDDEDALKIAKFLSKDMIPEVRMKSKAESQLGSLIGTRDKFVKLRTALKNKVHNILNANGIVTKTELLTSDKSLDKVLGHKLDETCLFELEIITKEIRNLNEAIVKIDEQIKDKGSKLDGHKNITSITGVGDMSATIFLNTIGDIKYFKDDKALASYFGIVPRIRASNESVHMGRITKMGNKIARTALVQSTFVAIRYSPYLRAFYDRLKVKKGSGKAIIATARKLLGIIYNTLKNKWVFEDFANYKLAPQCAL

SEQ ID NO: 275046 - protein, 316 aa, unidentified
MPYVGIDVAKNKHDVTALNVSGKTVLKPLTFSNNKAGFELLDLSLRQLNQDYLIALEDTGHYAFNLLNFLHEQGYKVYSYNPLLIKKFAKSLLLRKTKTDKKDAHGIALKLLSDPNREQFQHDNRQVELKILARHIHRLKKKQSDWKVQYTRCLDIIFPELDKIVGKHSEYTYQLLTCYPNPQKRLEAGFDKLIEIKRLTASKIQDILSVAPRSIGTTSPAREFEIIENIKHYKRLIDKAETCVNDLMAEFNSVITTVTGIGNRLGAVILAEIQNIHAFDNPAQLQAFAGLDSSIYQSGQIDLAGRMVKRGSPHLR

SEQ ID NO: 275047 - protein, 456 aa, unidentified
MGNARARKVPAQVIEDEEYQLRHERVAGIDVAKAKADVCTRLPAAREGGRRRSRVEDVPATARDIIALAGRLLAERVQLVVMESTSDYWRIWYYLLEGAGLNVRLVNSAQTRQLAGRPKTDRLDAQWIARLAEMGLLRPSFVPPPEIRALRDLTRTRLQLVRDRTREWQRLEKLLEGILVKLSSALSSLARTKSARAILEAIADGERDPRALAALADPHVKGGRAAIEESLAGITLAACHPMLIRLHLDHITLLDRQIARLDDEIEAALEAIPAARGVGADGVPSADPGPGAAVLPADRRLAEIPGVSLELARSIIAETGLDMTRFPTAGHLVSWAGLAPAARQSGPRNRKPKKGQGDAYLKGYCTQAATGAARTDTFLGERLRRLSRKLGGTRARCAVGRSILVIIWHLLANPEARFADLGPDWHDRKTDRDRKTRSHLRGLKDLGYEVIITPAA

SEQ ID NO: 275048 - protein, 467 aa, unidentified
MARRHKNVKRKNRKGQERSLKAVQPHAAGIDLGSREHWVAGPPLPDGSPNVERFGATTPELLRLAGWLEQQHIVTVAMESTGVYWIPLFEILDSRGFEVHLVNARQLSHVPGRKTDMIDCQWLQLLHACGLLRGSFRPCDDICRLRALIRERNTIVDQRSDWVRRMQKSLDQMNVCVHHAVSDITGVTGMAIIRAIVNGERDPHVLARLRDGRCRKSEEQIVAELTGNWRPEHLFNLEQALKVYDQLCAVVADYDAEILKYIESLQSPEDKNSSAPPPASKAKERKFVTRGQEPLRQALYRMSGFDLTRIDGIGLDTAAVVVGELGADFSAFADESHFVSYLRLAPNISISAGKKVPSKFKSTTCTRVGQALRMAATTLRNSKTALGAYYRRISWRKGASVAVFSTARKLAQLIYRLVRYGQAYIDEGADAYEARFTQRRLKLYAKTLKEMGYKIEPLITHKTAEAL

SEQ ID NO: 275049 - protein, 344 aa, unidentified
MTSMHFIGLDIHKKTISYCVKDVSGKVLSEGTVPATRIQLNEWMKTLPAPWTVAMEATMFTGWIYDHLLPHAAAVKVAHPLMLRAIAAAKKKNDRLDASKICDCLRCDFLPECHMVSTEVRERRRTLRYRKLLVRQNVQLRNKVSQMLMESGVVYNKQKLHKVGYFKELMETNQDIGRALRPLLTICRETIVRIGKTESALIRSLRRDPLLQARVERLMTIPAVGPITALTWVLEVDDVARFHSVKQAVSYCGLCGAERSSAETIKRMPISKQRNKHLQSVLIEAAKLGPRLSPDLALIYDTEKQKGHANRASIAVARKLVAYLLAVDRSGREFVVARERKAAA

SEQ ID NO: 275050 - protein, 341 aa, unidentified
MKNLFIGVDFSKEKVDVAIIFADGLTETAARVFNEFKTTVSGYKQLVKWVEQNSYGIDSSLWLFCGENTGDYSKGLCNFLYGKGYDMWLENAKSIKDASGLRRLKSDRADASMIAEYAMRNYDKAIMYEPLSESLAQLRELFLYRQMVVRHRCSFQVRRGEKRLTMEKSPIKTMISQSGRHIVSELNKEVEKIDKRIAELIKSDEELTEVFTIVTSVPGIGTQNAVCLMVYTDNFRRFNYDSRKIACYYGIAPFGKDSGTSVHSDPRVHYMANRQIKAMLTQAALAAVNFNPVMARYYMRLVERGKKKQVALNNVKNKLVHLITAMVRNRQLFTTEYKITA

SEQ ID NO: 275051 - protein, 384 aa, unidentified
MAARRKVADPLEPERHRCARVEMSSNHSRDRGSTMNITTYALDLAKQVFQVHWVEPDTGEIRRKALRRAEVRAFFAQRPPGVVAMEACGSAHHWGRVLRGLGHEVRLVAAQFVRPFVKTNKTDAADAEAIWEASQRPGMRYVALKSEEQQAVLSLHRIRQQCIKVRTMQAHQVRGLLYEFGVVVPKGWRALLAQAVALLADETRCAVPELVRGQLLTQLKGLRALTTRITELERQIGSWERRERECQRIAAVPGVGKLTATAVIATVGDARAYRSGREFAAWLGIVPRQSGTGGRVKLLGISKRGDPYLRTLLIHGARTVLNHQSRADRQLDPWLKGLISRRPKNVVIVALANKMARTIWALLAHGREFDRCWSRASMPAPALS

SEQ ID NO: 275052 - protein, 352 aa, unidentified
MPMLEGRVDAVIGVDTHRDSHAAALLDPNGGVRATLEVPSDRAGHARLLQLAAAQAPGRRVWALEGTGCYGAGLTGFLVDHGERVVEIDRPKRPRGRNGAKSDALDAIRAGREALAREHLASPRQRGHREALRVLHTTRSAIVEAGANARRQLKALIVTAPEPLRDTLRGRTWLQQARASAALVAAPSDPVDHRATVQALRMTAQRVLTARAEAKELEVQLRMLITAVAPVLLAQRGIGPISAAQVLISWSHPGRFRSEAAFAMLAGAAPVEASSGQVVRHRLNRGGDRQLNRALHTIVMIRQTHHQPTKTYTTRRIAQGKSQRDIRRCLKRTIARQLYRLLERTAAHQATS

SEQ ID NO: 275053 - protein, 321 aa, unidentified
MSKYSETYGVDISKDVFDVANTTGFYRQYPNTVAGFKKFIKELEKSAIVVMEATGYYHYCLAQFLFESGQPVSVVNPLSVKRFIQMRLSKVKTDKSDAKAICDYALINPVPLYTGKDQNQAESLQLLRLLELYLKQRTQLKNKIHGEQALGIPSKAVFRSLNRSKKILDKEIKSLETRLLSLVKAEHQQQLTNLKSIPGLGDKTAALLIVLTDGFTKFETASQLCSFAGTTPTIRQSGSSVRGKSRISKMGNQKLRNLLFLCAFSASKYNTACRKIYERIIAKGKSKKLALIAVINKLIKQAFAIAKSGLPYDPNYATKLN

SEQ ID NO: 275054 - protein, 411 aa, unidentified
MRRVIGMDIHRTFAEVVFWEDGKLRPAGRVSMTRSGLEGFGRSLGKEDEVVIEATGNAMAVVRVLSPYVARVIVANPLQVKAIAHAHVKTDKIDAGVLASLRAANFLPEVWLPDSDTERRRRLVARRNQVVRHRTRIKNEVHAILHAHLIPPCPHADLFGRLGQIWLAQQLIPDDEGAAIERHLRELDRLSEDLGVLDTQIAQAGNDDPAVKRLLTITGVNLIVAAGLVAAIGDVRRFTSPQQLVSYVGLNPRVRQSGLGVAQHGRISKRGRSHARAMLVEAAWAAAKAPGPLRAFFLRIRARRGHQIAAVAVARKLAVLCWHLLTKSADYQWARPALVASKLRAMELQAGQPARKGNKRGPAYAYNVKALRDREIELARHAEQAYERFVSQWQRCGRAKQRTGAATEERR

SEQ ID NO: 275055 - protein, 463 aa, unidentified
MAGSQKETRTAGVEAAVQGLPVLRPNVAGIDLASEIHWVCAPNMDGTGREVEKFGATTPELKRMAEWLKQRQVESVAMESTGVYWIAPYEVLERYQFEILLVDTRELARVPGRKKSDHVDCQWIQRLHSCGLLTGSFRPAEQVCRIRTLVRDRGNLVAAAADWLRRMQKSLDQMNVRVHRAVKDIEGATGMAIIRAIVKGERDARKLAELRDPHCQKSVEQIAEQLSGHWREDHLFSLQEALKMYDAVQSGIADYDQEILRQLAEMEREECRGQQAPKLKNVNKAQKIKSRGEETMRQALYRMSGVDATAIDAIGVGTVQVILSEYGPDLSRFATEKQFVQHATLAPHKPTSGGKALKKKKRGSASTRVAGALRMAATSLEHSPTALGAYYRHTARRKGGSVAVFATARKLATLVYRLLRWGQPYIDEGAAAYEKRYQESRIKRLTATAKELGYQLMPKASQA

SEQ ID NO: 275056 - protein, 332 aa, unidentified
MKEQSNRSEFTIGLDLGERRHRFCVLNGKGEVVEEATLGNDRASLARLTARYRGVLAVMEAGAHSPWVSRYLEGLDWQVIVSNPRKVRAIYQHERKSDRRDALMLARIGRMDRALLYPVRHGSEEAQQDLLRIKLRDSLVRARVALINSVRFSLKSLGYAVSHPSSERFHKVAMESLPEVVREMIAPSVQALAELSGRIAVLEREISVLARTKYPQTLWLQQVPGVGAITALYFVLKIEDPKRFKNVRDVGAYTGLCPRRDQSGDSDPQLRISKRGDAYLRRLLVSAAQYILGLFGPQSALREYGLRLAADGTRRARSARSWRWRVNFACSC

SEQ ID NO: 275057 - protein, 343 aa, unidentified
MGEVSTIGLDIAKSVFQIHGVDVDGAVVMRRRITRAKLLDFFASLPACLVGIEACPTAHYWSRRLQALGHTVRLLPPSYVKAYLKRGKNDANDAAAICEAVTRPSMRFVATKSEQQQSGLMLHRSRQLLVCQRTMLSNAIRGHMAELGVIAAKGRNGTAELLKIIANEQDDRVPAAARFSLDVLARQYAVVRAEIVAIEKRIHAWHRSSEESRRLEEIPGVGPIVATALVAEVGDWKEFTSGRSLAAWIGLVPRQHSTGGKQRLGGISKQGNRHLRWLLVAGAMAVIRYARQHGTKRPWLTRLMDRRPIKVAAVALANKIARMAWAMMVRGERFREPKLLPAA

SEQ ID NO: 275058 - protein, 389 aa, unidentified
MIYVGIDVAKDKHDCCILGSDGEILFSPFTIQNTLQGFDELYEKIWSLTQDLGKIKVGLEATGHYHLNLLRSLLDNGLPSYVINPLHTNLFRKGQSLRKTKTDKVDAASIAMMLLTDRTLKPYSDTSYHNEELKSLTRYRFDKVQERAKLKTSVSRLVSILFPELEKQVPIIHMASVYALLSEFPGASFVASAHLTRLKHLLYEASKGHYGRDEAISIREAAISSVGSVMPAKSMELKHTIHLIEVLTEEIDEIETAINSIMDTLDAPITTIPGIKNRMGAMILSEIGDFSRFENADQILAYAGLSPSTYQSGQLTSSYAHMEKRGSRYLRYALFNATQYVCIWDPTFKAYLAKKRAEGKHYYVAISHACKKLVRMIYRMQLTGEPYRG

SEQ ID NO: 275059 - protein, 428 aa, unidentified
MKGSRAYRAKSVKRVDWESVVRGRGTEAANVGTDVSKREVRAVLRWADGRFERPWLVENPGEVLEFVGLLERLRAGRELTVAMEPTGTYGDALRQALTDAGMAVMRVSPKAAHDYAEVFDGVPSQHDGKDAAVVAELSAVGKSRPWGYEPPSGWEQELASWVDWLDAQRVQGVMWQGRLEGLLARHWPEATQWLKLCSPTLWRTLAGYGGPAALAADPQALAQLAAWGGVHLEEEKIRGLIESAASSVGVRQGEIDLQRVRQYAEQVLAAHREVLRSARRLRKLAEGQEVLERQGEAVGVPTACVLWVHLGDPRQYHCAAAYRKAMGLNLAERSSGEYEGRLRITKRGSAQVRRWLYFAALRAVLAGPIKRWYLRKKAVDGDRAKRALVGVMRRLALALYYVGAAGETYDPWRLFPGASASLPRVVMV

SEQ ID NO: 275060 - protein, 387 aa, unidentified
MSKKIVAPSYVAAMERAEADPSTARFWVGLDVGYKSTAVCVLDCDGAIVHQVSMKSNATEIGRYLRKNFKSHVTLIGIESGGLTPHLTTKLRVQGFQVAVLDARQVHRVLSVKRNKTDTNDARGIAEIARTGREYLTEVYVKSNLCFEVRAYLTMRDRLVKQRRETEAMIRGLVRVYGGRIEGGTETAASYRSRAIDQMCLIADTEGVDLRPRVLPLLDLCEGFYVEANRIERELELLAASNPVCRRFMEIPGVGTITAVSFYSAIEDPTRFRHVDDVAAYLGLTPRVYQSGERLAHGGISKMGNQLTRTHLVGAATVMLSNTRSFSTLKDWGLRLSKRIGFNKAKVALARKLAIIMFSLWRDGTHFMAKAADVPAHRQLMQSRMPA

SEQ ID NO: 275061 - protein, 348 aa, unidentified
MRVYTTPHSHYCGVDLHARSLFVHVLDHAGTTRLERDIPASPAAFLDAIGPYRDGLVVGCECMFAWYWLADLCERESIPFVLGHALAMKAIHGGKAKNDRLDAAKIAGLLKGGFFPMAHVYPKDKRDTRELLRRRSFFVRQRAQLIAHIQNTNSQYNLPPFSKKLTDKGNRSAPIADRFEHPSTRLSITADLALIENYDTQIAALGTHLLKSVKVDDPTTFAFLRTVPGIGPILGLVMLYEIDSIRRFPEVGNFLSSARLVACTHESAGKVKGVGGRKIGNAHLKWAFSEAASLMLRSFAPAKSWMQRQSKKRGAKKAHAILEAKIGRSVYHLWRKQIAFDGKKFLAS

SEQ ID NO: 275062 - protein, 423 aa, unidentified
MSCLRHPAGAHLRLEGSISMTSAVADDTTDKVVFGGVDSHADTIHVAVISDNGGHLGDAEFATTAAGYATALAFLGAHGHVISIGVEGTASYGAGFTRAARSAGLDVVEVNRPDRAERRRIGKSDPIDAYAAARAALSGRASSAPKDDTVAGIRALHNAARSAVKARTAALNQITHILVTAPESIRARFGQLKGADRTDALARLRPAGDAVHVAVLTALKSLARRVRELTAEHHALTRALDSEVTAHNPGLRAAYGVGPDTAAQLLVTAGGNPERLRTEASFAALCGTAPVPASSGRTRRHRLSRGGDRAANAALYRIALVRMSSDPRTRDYLARQTAAGRTRKEIIRLLKRAIAREMFRCLTTTVTVPGIADLRPLRQSKNITLTAAARHFGVWPATISTLERGIRRDDDLANTYRDWLTAA

SEQ ID NO: 275063 - protein, 357 aa, unidentified
MKERRDYILGNEKIFVGLEDSKKTWSLCVRSGGTIVHETSMPARYEVLRNYFHNKFPECQIQVMYEAGFRGFELHDQLVADGWECIVTPPHTVTEEKCQRKKNDRTDCRRLAKNLENRDYRRCFVPDKRLREDRQISRTCGQVQADITRVCSRIRRTLEFHGLDNDLPAGRWSGAMYTRVRQRLGEIEMSGSLRFSFEVMFRELEQLRQLKKELVLQLRKLARSDRYKGSVRLLMSAPGIGMLTAIRLALEWGNVSRFGRKEEFASFLGLVPSEYSSGDKEHRGHITKQGNRSVRRWLVECSWVAIRYDPVLLEKFRRVLRSCGSKKKAIVAVARKLALRLRRALLSGEPYIPGVVE

SEQ ID NO: 275064 - protein, 384 aa, unidentified
MGVSILEVFIERCAGLDVHSETIVACVMIGNRDEDLFQETETFPTLTKDLFRLLKWLEDHGVTHIAMESTGVYWKPVYNILEDYFDITLANAQRIKNVPGRKTDVSDAEWIARLLRYGLIEKSFVPPEDIRNLRDLTRLRKKWIGHLTSEKNRIQKVLECSNVKLSSAISDVFGVSGRKLLTKLISKGYVDANDVENSIHGRMAHKKQLITDSLFGTLNDHQIFLIRQSWKHIMYLESLISEIEEKIDEILVNYKEEMDLLLTIPGIKKDSAAIIIAEIGVDMKQFPTSQHLASWAGVAPGNYESAGKRKSTRTSRGNPHIKSALCEVAWAVSRSRNRWLASKYWSIAARRGKKKALVAISHRMLRIIYSMLINKEAYKEPQFN

SEQ ID NO: 275065 - protein, 405 aa, unidentified
MDAAISSRVAGLDWASRLHAVCVLDPDGQVRARFDVPHTGTELRGLTRRLVKLGVGQVAIERPDGPVVEALLAAGLEVVVIPGRQVKALRGRYGTAGNKDDRFDAYVLADALRTDGHRLAPLRPDAPETTALRVVSRARKSLVATRVALANELRANLEISFPGAATLFSDVDSPIALAFLRRFPSVTQAAWLTEARLAAFLRRMGYPGRKAAGELLGRLADAPAGLTGPEGEARAMVTLGLVAALDTVRAQIEELEGEVVERLGTHADAAIFTALPRSGRVRAAALLAEIGDCRARFPDAESLTCLAGAAPSTRRSGKHKKVVFRFACDKKLRAAVMDFAGDSRHDNPWAAHVYQQARARGHGHAHAVRILARAWLRVIWRCWQDHTPYDPARHGSYQRLIAQQA

SEQ ID NO: 275066 - protein, 354 aa, unidentified
MMIIGCDYHPAFQQIALVDTDSGELQERRLQHREEAEKFYRDLAAEGIKVRVGMEASGQARWFERLLAELNFELWIGDAAEIRSKRVRKQKTDRQDAQLILKLMQKDDFPRIWVPSWENCDLRQLLWHRHRMVQARTRIMNQLQAVALNEVLRCKKRLWREAGREQLEAFRLAPWASRRRRDLLELLDRLNPTITELTQTIEQEVEKCPEAQRLMTHPGVGPLTALAFVLIIGTAERFQCGKQIASYLGLVPLEESSGNRRRLGHITKQGNALLRFLLVEAAQVSARSIPEWRNKYFHLAMRRGRKIAKVAMARRLAVQMFWMWRKGWDYEQVRKFGSHAGQPGNRDGVPSNAE

SEQ ID NO: 275067 - protein, 394 aa, unidentified
MKLVGIDVGKNSHHFCVMDKETGEFNVTPTSFSNNKEGFDFLINSLKPYSKKSILIGMEDTGHYHVALLKFLLSNGYTVALINPKTTDLTRKMEGGITKNDKLDTITICDVLDTPERKKQYRITKVDRFDLYEQRQLTRHHHNLKEELNVYCNRLQKSIDLVFPEFNTLFSSKYSIVYMNLLKTFGSAEAIASTDIRTIRKCFEIKGRGNRISLTPEKLKECAKNSIGISSEVETIQIKHLVSQITLIKEQIAEIDKKIEEFSITNNSPILSIPGISHFSGTSILAELGDIGNYSKPSQIIKFAGVAPYHYESSQYNAQHTGITKKGSKYLRKTLYQIILPIINNNPVFQKYYRLKISQGKGHRCAQGHCIRKLLRIIYHLLETGQSFDPALLR

SEQ ID NO: 275068 - protein, 343 aa, unidentified
MQITTIGLDLAKHVFQLHGIDADGHVVLRRRLRRAEVIAFFSSLPPCLVGMEACSTAHHWARELSALGHDVRLMPPTYVKPYVKRGKNDTADAEAICEAVTRPTMRFVPIKSAEQQSVLVLHRTRDLLIRQRTMLANSLRAHCAEFGLVVAQGMAKLAELLARIADESDNRIPSLARGCLLVLAQQLQELQLKIGEVERALHAWHRSSEVSRRLETIPGIGPITASALAVTVTDPTLFCSGRHLAAWLGLVPRQNSSGGKARLGSISKQGDRYIRRLLISGAHTVLQHAKQDRPGSAAWATSLLQRRPFKLVAVALANKTARIAWAVLARGETYRSAPEARAV

SEQ ID NO: 275069 - protein, 343 aa, unidentified
MQSISTIGLDIAKSVFQVHGVDAAGQVVLRRQLKRRYVLAFFQGLPPCLVGIEACASSHHWSRELQALGHTVRLMPPAYVKPYVKRQKNDITDAEAICEAVTRPNMRFVPTKAVEQQSCLMLHRARHLFIRQQTAVINSIRAYLAEFGVVAPVGRRGVEQLLEVVADPADRRLPEVARVCLAALGSQLRALKAQILEFDRRIIAWHRSNATSKRLDAIPGVGPALATALVASIADPRAFRSGRDFSAWVGLVPKQNSSGGKDKLGSISKQGDRYLRSLFTAGALAVIRYAKIHGTAHRPWLTGLLARRPTKVAAIALANKLARMAWAMMARNECYKEPAALTA

SEQ ID NO: 275070 - protein, 354 aa, unidentified
MSQKLNSAIAVIGIDIGKNSFHIVGHDQRGAIVLRQKWSRGQVEARLANLPPCLIGMEACVGAHHLSRKLQMLGHDARLMPAKYVRPYSKGQKNDFRDAEAIAEAVQRPTMKFVATKTADQLDLQALHRVRERLVGQRTGVINQIRAFLLERGIAVRQGLRSLRSELPGILATRTDVLAPRMLRIIEDLAGDWRRLDARIEDLSSEIEALARQDKGCERLMTVPGIGPIISSAMVAAIGTGDVFSKGRDFGAWLGLVPKQISTGDRTILGKISRRGNRYLRVLFVQAAWVVLVKVKCWERYGLKSWIEAAKKRLHHNVLAIALANKLARIAWAVLNKGRAFECVKTNEMASRPA

SEQ ID NO: 275071 - protein, 353 aa, unidentified
MSELAEEREVILGVDTHLDVHVAVLIDVVGRVVATTSVPTTAVGYEHLIEWACGFGRLTRAGIEGTGTYGAALARRVQELGVAVLEINRPDRSRRRLRGKNDPTDAENAARAVLAGEANSIPKAQSGVVEAMRAVSMARRSAVKAKTQAINQLRALLVTAPASIRATLWKVKPEQCVAGCARLQSLGDTPLLKALTSTLRLLARRWMSLAKELHQLDAALEELTKRAGRRLLARFGVGPQTAATLLVTAGDNPGRLRSEAALAALCGASPLEASSGKTTRHRLNRGGDRAANNALWTISMVRMRSDPRTRAYVTRRTAEGLSTKEIQRCLKRYIVRELYPLILADLADSIHES

SEQ ID NO: 275072 - protein, 403 aa, unidentified
MLYLGIDLHLKQMTVSLRNEDGDVALRRQVSTRWPKLEEFREQLRQVAAADEKYVAIVEVCGFHDWLVKWLQQDERCHLVLVVQALGRLATKTDRRDANALSELLWINRERLLRGDRVHGVRTVHQPGEEQLADRRLTAMRERLVRRRTQTLNQIHKILRRHNLEWERPTKTFQTGKVAQWLKTLPLEPMDRLVLNQLLVQWKLWEEQIAKVDTRIGERFLADPDAQLLATIPGVNAFIAVAIACRIAPIARFPHGRSLANFLGLTPGCRSSGETERMGSITKMGSRIVRFLLGQVIVHLQRRDGAVRAWYQRIKRRRGANIARVALMRRTATIMWRMLTTREAWRAGSAAADSAAEEPRQVRPRRARRTVLSALSVSEAASGAASTGSSSLLTGEEVPPCQA

SEQ ID NO: 275073 - protein, 355 aa, unidentified
MSIDPGTAAARVTAGVDWAKDDHAVCVVGGQGEALERFTVRHDAAGLRQMAARLLRAGVLQVGIERSDGPAAAALLRAGLAVFVIPPGQVKNLRGRYRSVGSKDDRFDAYVLGDVVRTDIQRLRPMERDSEQTAALRSAVRARRDLVGHRVAAANQLRAHLQIVFPAAAALFAEVDSEITLAFLSRFTTQEQADWLSPKRLAAWLKSVSYSGRTDSAVLHARMLAAPGGKTGRHARLHAGTTFALVAVLRVLNAQIQALAASIGAQMDAHPDAPVFRSLPRAGTVRAARLLAEIGDARGRFPTRDSLTGLAGVAPYTSQSGKVRTVAFRWEADQTWFNAHTLCTRDGASGCSALG

SEQ ID NO: 275074 - protein, 358 aa, unidentified
MQSKVNELNFKGQKIYIGIDHHLRSWNVTIYTKELKHKTYCMDPNPKQLADYLNRNFPGAEYLSAYEAGFSGFSTHRKLLEVGIMNIVVNPADIPTTDKERKQKEDKRDSNKIAKCLRNQSLSPIYIPSLGVEEMRSLMRYRKTLVKDISRNKTRIKMFLYRNGINIPFELASASKYWSSAFTKWLKAVRLTTDYGHIELNDLVENTEKMRQSLLYVTKEIRKLSHQPEWKRKVDLLVTIPGVGILTAMSFLSELYTIKRFKNLDHLCSYIGLVPTTNSSGENDRTGNITRRRNNHLRTMLTESAWVAARTDPALSLKYNELTKRMKGNKAIIRIAKKLLNRIRFVLLKEVEYQYAIK

SEQ ID NO: 275075 - protein, 333 aa, unidentified
MNMHPQGGVVNCDPRPNVGIDVSKQHLDVCLGSEHQRVANDAGGWEVLTRQFKEAGVDLIVIEATAGYERDLVWTLQNAGLSVARVNPRQSHDFAKSMGELSKTDKVDARMLRDFADVLARHKDRAKYITPLMDAQRLELAQLMTRRRQLMDMSVAEGHRLEHAKGRAVRSIKTVLKTLDKQLEVIDADIDSHLDQHFKSQRNLLDSVKGVGPVTILTLTAALPELGQLGRRQIAKLVGVAPLANDSGQRAGKRRIWGGRSEVRAVVYMATMSAVRFNQPIKAFYDRLLEAGKPKKVAIVACMRKLLTILNAMLRDQSSWSSLKHELSLQQST

SEQ ID NO: 275076 - protein, 448 aa, unidentified
MPQPNDLSRSLAALDQDSTLVAVIEISQSSWLVGGIVPGVNRQPLKKLAADETALLQLLSRWRGEATKAGRTISRIAVAYEAGRDGFWLARWLRGRGIEAHVIHPTSVAVSREHRRAKTDRLDTELLKRAFLGWLRGEQRHCSMAMIPTLEEEDAKRPNRERENLVSERTRLVNRMKSALARLGIRGFKPHLRKAPERLDTLRTAEGMALPPNTLAELRRDMARLRFVMDQIREIEAARLARLEQHPEQANHAMVRLLARVVGVGIETADMLVHEILSRHLRDRKAVARYAGLTGSPDESGARRREKGLSPAGNARVRRGMIQLAWRFLMFFGVRHGLNGDEYRRRWGLRSDHPLTAPAYSEQRSTLAKELGLGRKSTPAVAPALATAEPAAAKIDEKVETSPKRTRTRRSRSKSDSNEAAAEPKARQRRPRSRVAPTQSEPPSTPTG

SEQ ID NO: 275077 - protein, 344 aa, unidentified
MEHFAGIDVSLEHSSVCVVDGLGKIVREAKVASEPEALVRFFRGLETGVTRIGLEAGPLSQWLHAGLVAAGFEVVLLETRHVKAALSAMVIKTDRKDARGIAQLLRMGWFRPVHAKSPRSQEVRALLVARKLLQAKLLDVEFSIRGILRGFGLKMGEVSKGRFAARVRELAAGHAMLERITEPMLRAREALRTEYARLHGEMLAIVKPDPVCRRLMTVPGVGALVAITFKSAVDDPGRFTRSRALGAYFGLTPKKYQSGEKDVTGAISRVGDPMVRVILYEAANIMLSRVTRFSSLKRWALDVAKRRGLERAKVALARKLATVLHRMWIDGTTFHWGKQADAAV

SEQ ID NO: 275078 - protein, 411 aa, unidentified
MEIVHARCCGLDVHKKSVVACVLISQPDGLIERQVRTFKTMTGDLLELADWLNSLGVTHVALESTGVYWRPVFNILEDEERTLLLVNPQHMRAVPGKKTDVRDSEWLADLLRHGLLRASFIPPAPVRAIRELTRYRKTLVQERVDEANRLQKTLEGANLKLAAVASDVLGVSGRAMLAALLDGERDPDVLADLARGVLRAKLPQLRQALDGRVQPHHLVLISQILAHIEFLEQAIAQVQVEIERCLPSFEEALELLQTIPGISAVAAAAILAEIGADMAGFPSTGHLVSWAGLCPSNKESAGKRMKGPVNRGNVWLRGIMGEVAWASVKKRATHFYAQFNRVARRRGRNKAAVAVAHSLLVVIYHVLKTGKPYVELGVDYFDKLDATRIERHHVRRLEQLGYNVTLSPLAV

SEQ ID NO: 275079 - protein, 397 aa, unidentified
MQVDDIDVFIGIDVGKSEHWATALTTAGECLHDRPLPNDEARLREVYEHLGEHGRLLVVVDQPATIGALAVAGGPVGYLPGLSMRRIADLSPGSAKTDQRDAAVIASAARTMPHTLRSITSSDEDAAALSMLTGFDLDLARQVNQVSNRIRGLYTQIHPALEGVLGPWLEHDSVLEVIATWPTPAALRKAGRARIDAKLKANGCRRHAAWAQAIVEALSKQTVTVAGTDAAGVVLPHLARQLIALHTQRADIAAQVEALVEAHPLYPVLTSMPGVGVRTAAVFLAGTLGKTFTTGAHLASYAGLAPVTRRSGSSIRGEHVSHGGNKRLKRAMFLSAFASLRTDPVSRTYYERKRAQGKRHNQAILALAHRRILTLHAMIRNGTLYNPQPAQPLTTTA

SEQ ID NO: 275080 - protein, 352 aa, unidentified
METYLGCDAHKKYSLFVGMNEAGHVGPPVRVEHDRLLFRSFLRGLPEGTPIAVETVGNWYWMIEEMEKAGHRPLLAHARKAKLMMGEINKTDKLDARGLALLLRNGTLPSVWIPPGELRDQRELPRMRMVLRKMRTTLKNRIHATFAKYAIQFPEVSDLFGVQGRKRLAERFGELPPETRRSVEVQLEVLDRIEEQIGGTEEQIRKIIEETPAMKLVMTLPGVGPILAIVIVLEIGQVDRFADASHLASYAGCVPRVHSSGGRAFSGKVRPDVNRYLKWALVEAANAIVVNQQRMAGRHVVQLYRRIQKRKGHAKAVVAVARHLAEATYWVLKKQEPYREPAGPKPISSTQK

SEQ ID NO: 275081 - protein, 404 aa, unidentified
MIFVGIDWSEHHHDVCVVDEQGTQLAKVRVPEGMQGVVKLHETIADHAEEPEEVIVGIEIDRGLLVGALVAAGYRVFAINPLSVDRYRDRHATSGAKSDPGDAKVLADLVRTDRHNHRPVAGDSELAEEIKLIARTHQSFVWERQRHVNRLRSALREFYPQALEAFGTELASADAIAVLKIAPTPELGRRLSRSKIAAALRRTGRQRNLEPRAEQIQRALRSEQLRASEGLERTYGVIVSSLTGLIEGLNTQIAGLQDDLERSFEQHPSAEILRSLPGLGIVLGARVLGEFGDDPTRYADARARRNYAGTSPITKASGTRRVVLARFARNERLFDACFLWAFASLTKSPGARRYYDLQRARGKTHNQALRALANRLVGILHGCLRQGELYREDVAWRGRESLAA

SEQ ID NO: 275082 - protein, 409 aa, unidentified
MSNDFQWFLGIDWGSEKHRVCLLEGGGKVLEQKWVEHSGSALADLVYWLRRFTGEVPGNLAVAIEVPRGALVETLMEHGFAVFSINPKQLDRFRDRYSPAGAKDDERDALVLADSLRTDRHCFHPVRIDDAHTIRLRELSRLEEDLVAERNRLSNQLWEQLRRYFPALLKLSGSADEPWLWELLERAPTPDRAAKLKPAQIARILDQHRIRRLNAQQVHEILASKPLSLATGAAEAATEHVLLLLPRLQLLHQQQADVVRRQQNLLQELATPAGETREHRDAAILLSLPGAGRKVTATMLGEASQAIAERDYHALRCLAGCAPVTRQSGKKKIVLMRYGCNERLRNALYYWAFASIVYDPAARQFYAANRARGQTHARALRGLADRQLGVAISMLRHNTLYDPNRRAAA

SEQ ID NO: 275083 - protein, 355 aa, unidentified
MQKYKVSFKGQNIYVGIDVHLKTWHVTTLTETGCKYSFAQHADAKELFDRLNKKFPEAHFISAYEAGFCGFSVHYALSEQGFENIVVNAGDIPTTGKEKVMKTDAVDSEKIAWALKRGQLTSIYIKDKAFMDDTNLIRLRQRFIKDLSRQKNRLKHLLYTQGVVYPKCFTKSGTHWSCSFMKWLREEVVLLSEEKRTLTLLCDHVDNTRKAILKVTREIRRLSKDDKYKEYFDLLSSVPGFGLITSMSLLTELDNNPTRFPNERKFVAILGLIPTCHDSGEKKISGEKTFRGNKHLGPLIVEASWIAIQRDYQLGAYYTNCCQSMKPQMAIIKVARRLACRAYAVMKTKKAYVHQ

SEQ ID NO: 275084 - protein, 338 aa, unidentified
MKEKEKLYQYYVGIDVSKETIDVSVLNETEKKVQHHQFINETGGYKSMDKWVKKQEKFKYAMTLVCMEHTGIYTRSLQQHLLKQGTNVWLESSLQIKKSLGLNRGKNDKIDSMRIAEYACRFSDKANLQGCYSKNLQTLKDLLSSRERLLKSLKSIKVAIKELKRIDSEEGMKLEALNLSAIRGLEQSKEEIEESIEEVIGKDSQLKEIFGLVTSIPGVGKMLTLKLLVYTHVFTKFETSRQLACYCGVAPFEHRSGTSIHGRTGVSKFANSDLKCTLHLAAMCSVRYNPELKKYYERKVAEGKNKMSAINAVRNKLLSRVVAVVRRRTPYVALPAAA

SEQ ID NO: 275085 - protein, 355 aa, unidentified
MSQEKYIGMDVHAATISAAVKNAEGKLLMECVLETKAATILEFIQGLRGTLALTFEEGTLATWLHDLLKPHVSRLVVCDPRKNALLRDGNQNDRVDARNLAELLRTNQVKPVYHEEHGIRTLKELGRSYSTLTKDSTRVMNRIKSVYRSWAIPCAGTSVYSRRHGAEWLAKLVEPGVRIRAQHLYQQLDSLQPVRQAARRELLRESGKHAAVKLLRQIPAIGPIRSALLVAILQTPHRFRTKRQLWAYSGFAVQTYDSGEYRFVRGKLQRNRERITVRGLNHNHNHDLKNLLKGAAVSAIERPGPLQDFYAALVEKGMRPSMARLTLARKIAAITLTMWKKGVSFDPKQLQRQAA

SEQ ID NO: 275086 - protein, 422 aa, unidentified
MLAHTHDTEEIIDRVAALDVGKATLVCCARVPDDKKPGRRLQEVQTYTTMTRSLLSMSDRLRCLGVTRVVMEATSDYWKPVFYLLEAQGFEVWLVNARDVKHLPGRPKTDKLDAVWLAKVAERQMLRPSFVPPPAIRLLRDLTRYRVDLVEARTAEKQRVEKLLEDAQIKLSVVASDIFGVSGRAMMAALIKGERSPKTLAQLARSSLRGKISALEEAFTGRFSDHHAFLLATMLARVDAINTDIAALDQKITQQIAPLTAAVERLDEVPGIGLTAAHAIIAEIGLDMSRFPTAAHLTSWARFAPTVKESAGKRKGKNTTGHGNRYLARTLGEAAVVVGRTDTFLGERYRRIVRRKGKKRAIVAVGRSILVIIWHLLSDPDAHFVDLGADFYTRRTNPDRRKHNHIRELEALGYRVTLEPAA

SEQ ID NO: 275087 - protein, 362 aa, unidentified
MKEYIGVDLGKRKAVVVKKDRHGKVTGRATLAVTQAALESYFSKQDHKSQVVVEASGNWMFLYETIEKYTPEVVLAHPLKTRAIAEARIKTDTIDATTLAELLRLDGIAKAYIPPREVRDARELLRYRASVVALRTGLKNKIHAVLTKNAIECGWSNILGKKSQQWLKTIALRPCYRQELDGYVRLAEVMTALIEEITETIERLVEESPQAQLLMTVPGISYYSALLILSEIGEIERFPSAKHLCSYAGLVPSIYSSGKKSFHGRITKQGSRWLRWICVEISVHAANGDASFQKLYRRVAARRGVATAKVAVARKLLTVVYAMLKNNEPFRGRNPRQRIIAKAWSKKRSDISGHPPGVMVSA

SEQ ID NO: 275088 - protein, 429 aa, unidentified
MTRISVGVDVSKNRSTVCIMDQDGKFIMRPFLVWHSTEELDFLADTLKRLNGEVRVIMESTSVYQYPIALQLKERGLFISIVNAYKVKKFANTDFRGGKTDKKDSRTIASYGISYWDKLVEWQIPKDTYFNLDLLNRTYMNAKKHRQIILQELQHYIDCAMPGMDKELHSLNLNTKKDFMLDFVEKFWHRDEIVNMTEAEFTEVFTAWAKEKGYRPGKGKAAKIYAIAKSCIPYYPANPTVKTILQCIVDKLSGVNRTLVTIVTQMIEEAKKLPEYQIVREMPGVGDPLAARFFGSVGDIRRFKNSKALVAYAGIDSPPDESGDFSSTHRHITKKGSKVFRDTGYEIMMALRAQKRTWEKVRKNPEVYDYMLKKEAEGKPPKVAKIAALNKFLRIIYARIKELYDNMALAERAKTKTRSKTRAKTKVTA

SEQ ID NO: 275089 - protein, 418 aa, unidentified
MKIHPQLTHFAGFDWAKDHHDTTVVDLRGDIVAEFRIDHSLAGWQQWREKTATYPALGVAIETSFGAAIEGLLDSGVTVYPVNPLNAKRYRERKCASGNKTDRHDAWSLADALRVDGHAWRTLTVQDPVVAELRLMGRDEVALIGERTALVNQLQQALQEYYPPALEAFDDWTSASAWSFVETFPTPEALVKAGKRKWEKFLHSHKLCRPQTYQKRMDTFGTAGQWHVSAPVTAAKSFLAVTRCKQLRVLQSQLASYRKRIEALFASHPDSGLFGSLPGAGPKLAPRLLGEIGSDRALYEDPQGLQCMAGTAPVSYQSGKVHKVRIRRACNKHLRQAIHHFADKSRAQSSWAAVYYQALRDRGQTHPKALRSLGQRWLKIIWKIWQTNTAYDADKHMANQLAHGSWVLKLQPSPATKP

SEQ ID NO: 275090 - protein, 338 aa, unidentified
MYYTGIDLHKFSSFLTTIDSDGRIVKQANIKNVDYNFLHYFSDLSGEHQTTVESTCTWYWLNDLLTSMNIPLTLAHAKYVKAIAYAKVKTDKVDSHILAQLLRLNFIPQAHKISNENRTLRDALRARLKIVQRHTSVTNSIALLLAKYNLTEPEQLQSIAKLQYDQLSVHASLLKEQMLTLEKSLYPYLIPNEDIQRLLWIPGIGKMNAFTILLEADDINRFPDVKNFFSYCRLVPSARNSAGKSKQRSSKDGNRYLKIVFTDAAIHAVQYYPVIRKYHNSLLRKKNKQIAKTIIAKEIAEIVFHVLKNKTNFNNKFKGVELQHKKSLQWPRVVNPYA

SEQ ID NO: 275091 - protein, 340 aa, unidentified
MFKNFIGIDVSKAKFDLALIKDCDKENIIQAVFENTQKGIKEMTRFLEKEYQVQLSDTIFCMEFTGIYCRPLTMFMTDKECNVWLEMPVNIIRSLGLQRGKNDRVDARRIALYAYKNIEDAKLWKPQRDVILKLRDLLSLRERLISSRKSLMAPIDELIAMGDKQGAARVKRGCKLTLSSIDKEIEIIEKDLDDTIKNDPQLKELYNLATSVPGVGKYTALFMICYTNEFSIYNNPKQLACYCGVAPFEHSSGSSVRGKTRVSHMANKVLKRMLHMGALSVISRDPELSIYYQRKIALGKNKMLVINAVRNKIIHRLCAVIKRGYEYQPENLFKERLVLS

SEQ ID NO: 275092 - protein, 393 aa, unidentified
MICVGIDVAKDKHDCFILSSEGEILADVFTIQNNAEGFDTLLQTIRRCTRPEDKMKVGLEATGHYSYNILGFLLNEGLPTYVINPLHTNLYRKSLSLRKTKTDRVDARTIAAMLMSDVDLKPYTDAAYHNEELKSLTRYRFDKVRERAKLKQSVSRLVTILFPELEKLVPTLHLASVYGLLSEFPGAKQVAGAHLTHLKAVLSDASKGRYGRDMATTLRDAARCSVGSVMPAKSLELQHMIRLIRELDAEIEDIETAIQSMMDEIQSPITTIPGIGVRMGAMILAEIGDFSCFDSPDKILAYAGMSPSTYQSGQLSLSGSYSHMEKRGSRYLRYALYNATKYVCLWDPTFAAYLAKKRAEGKHYNVALSHAAKKFVRLIYAMERSQQPYNTAA

SEQ ID NO: 275093 - protein, 379 aa, unidentified
MERLIERCCGLDVHKATVSACVRVTQRPGGELKQEVRTFATTTPELLALRAWLSEQRVTHVAMEATGVYWKPIYYVLEDGFELLLVNPAHFKQVPGRKTDVADCAWLAQLLEHGLLRSSFVPPAPIRELRDLTRYRKSLTEERTRAANRLHKVLQDAGIKLSSVATDMLGVSGRSMLMALVAGTTDPTMLADLARGQLRKKLPQLRQALTGRFGPHHRFMLSRLLADIDYVEEASAELSRRIEELLAPFAAAVERLITIPGVQRRTAEVMLAEIGADMSRFPSAAHLSSWAGMCPGNHESAGKRRSGKSRQGNRWIRTALVEAGGAAGRTKHTALGARYRRMRGHVGHGRAVLAVGRNVLEIAYHLLGEQTTYRELGID

SEQ ID NO: 275094 - protein, 368 aa, unidentified
MMHTTTFIGLDVHARKIVAAALNTMTGEVHSATFGYDAAAVADWIRSVDPSAKCVYESGVTGFDLQKRLTGLGVDCAIGAVSKMIKPSADRRRKNDRNDAEFLARMLSVGNIVEVWIPDDECEAARDLVRALDDARDDLRRCKQRLSKFLLRHGLVFDETTPTGRRKGNWTSAHWAWIRSIEFSEKSDNDVLAYYIDAVRQATEDKKRLERLVEAEASKPRWKKRVDSLRCLKGVDIMTAADIVFEAGEFARFGNARAFAAWLGLVPSEHSSGEKIVQGGITKAGNRHLRRVMVEAAWHYNHCSAHSKDLSAGQAPDPAAMRHAAKGVRRLVERRRGLLGRGMQKNKANVATARELACWCWAVGCMAE

SEQ ID NO: 275095 - protein, 397 aa, unidentified
MYIVGIDIAKRKHEAAVIDGEGAVIIKPFSFTNNCSGYNRLLAMLTKAKLPLDEVSFAMEATGHYWLALFTRLQKEGFRVQVINPVQTNSIRSFYIRQAKTDPRDALLIAEVIRFGHFSESTLHPENIYELRELCRGRHAIVSMQADVKRKAVALLDQVFPEYETAFTNLFSDTSMAILQTCPTPKELSEMPLEELCHLIEVSSHKRFRMVKAQELQELARNSFGFAMAGDVFSTMIRLYAKHLVFLKQQVQEMDRKIAEIMDTLDTPITTITGIGPTLGAYILSEIGDISRFSSAAKLAAYAGIDPTMRQSGEYNGVRNRMSKRGSPYLRHAIWLAASSAVLHDSALKLYFQKKRDEGKPYMASVGHACRKMVSIIYAVMRDNKAYTPHIPNEISA

SEQ ID NO: 275096 - protein, 343 aa, unidentified
MEKIITVGLDLAKSIFQVHGIAENGEVLVRRTLRRSQVLPFFRGLPACLVGMEACASAHHWAREIAALGHSVCMMPPAYVKPYVKRNKTDMADAEAICEAVTRPTMRFVPVKTVEQQAAGMILRTREMLMKQRSQTANALRAHMAELGIIAGTGMASIAKLLVLLRDERDNRIPGAARFALIQFAEQIELLTTRIEKLDREIMVVVRKDPDARRLMSIPGVGPLIAATVRTSVLDPRGFATARDFAAWTGLTPRARSSGGKERLGAISKRGNRQLRTLLIVGATSIIKLAKRGLKVPLWVRTMLQRRPVKVVSVALANKIARTIWALLVRGGIYQPPAAMLKS

SEQ ID NO: 275097 - protein, 339 aa, unidentified
MCKAGTKGEDQALFANIPERRRKMKPSESEVFIGIDVSKDHLDLAVLPSGQTWRTPNRPEELSALAGRLSALSPALIVLEATGGLELPALTALAAEGLPVAAVNPRQIRDFARALGHLAKTDRLDSLVLARFAQSVRPALRPIPDQEALLLKELVSRRRQIVDMIVAEKNRRASTLPALHPMIDAHIRYLEAELKRLDQEMNQRIRQSPAWAAKEKLLTTVPGVGPVVARTLIAALPELGDLNRKEIAALVGVAPLACDSGQLKGKRRTWGGRAAVREKLYMAALVGIRFNQTLQAFYLRLLQHGKPKKLAIVACMRKLLTILNAMVRNQQPWQEHLAS

SEQ ID NO: 275098 - protein, 345 aa, unidentified
MNIIRVGVDIAKSVFHVHGVDRHDQTQWQGKYARHKWLDALSRKVPAGAEIGMEACASSHYWARELQKRGYCVRLIAAQFVKPYVKSNKNDRVDAEAICEAMSRPNMRYVAPKTVAQQDVQATHRIREELVGQRTAKANQIRGLVGEYGIVAPVGIQQLRRALPRWLEDAENGLSDSFRILLNGLADDLRYLDDRIAALDQRITDTVNQDPVARRLMTLRGVGPLTASALSGALGDGQAFRRGRDFAASLGLTPRQHSTGGRDRLLGISKRGDSYVRKLLVHGARAVLRHVNGKNDGLSHWLKGLVSRKHVNVATVALANKTARIAWALVHNGTAYDDKLAAVGT

SEQ ID NO: 275099 - protein, 369 aa, unidentified
MPLVRGERAARFTFGTPSPRGSIWRAFATVLWKPEQLIDFNSHLQGWETENMPELIHVGIDVSKDALEVACGPQSPTQCFTNDDAGHEALVNVLHVHRVDLIVMEATGGYEAPCACALQAAGLAVAVVNARQARDFAKAMGYLAKTDRIDAQVLAALAAVLANRADRQKLIMALPSDEQQRLHALVLRRRQLVQMLVAERNRLPMSHQAARVSIEALIKAIRKQIVDIEADLSSHIAHHHADLAGLLRSAKGIGPHTSMALIADLPELGKLSNREISALVGLAPFNRDSGKMRGKRMIFGGRTQVRCALYMATIVAMRHNRVIQRFYQRLLAAGKPKKVAIVACMRKLLTILNAMVRTGKQWDETFHFA

SEQ ID NO: 275100 - protein, 419 aa, unidentified
MTASLSQHFTAYVGIDWADTKHDICLQAGDDNHRQFDCIPHQVDRIDEWAKALHQRFGGPIAVALELAKGPIVAALLKYDFFVLFPINPSTLAKYRVAFKPSRAKDDPTDAELALDLLLRHPERFTALRPQSVAMRSLLSLIEQRRDLVNDKTRFTNRLCNTLKQYYPQALDWFEQRDTQLFCDFLTRWPTLLSVKRARKTTLEAFFYAHNGRRATLIEARLASIRAASALTEDAGIIEPCRLHVLALVEQLRTVLTVIDRFDKEIERVASALPDYALFRSLPGAGPHLAPRLLAAFGEQRERFHGADELQKYSGIAPVTERSGKKSWVHWRWQCPTFLRQTFVEWAGQTINKSFWAGAYYRQQRAKGSTYQAAVRALAFKWIRILYRCWQTRTPYDETTYLNALRKRGSPLLKSLDLG

SEQ ID NO: 275101 - protein, 424 aa, unidentified
MKRTQNEKILQIKNDTLVVGIDIAKRNHFARAFDNRGLELGKLLRFENSAQGFAAFDAWLHEIQQEHGMTEAIVGFEPTGHYWFNLGDHLEACGHKLAILNPYHVKCARELDDNSPSKSDQKDPKTIAMLVKDGRYRDVYIPDGNYQELRELVCERERLQERLGALSNQIVRWLDIYFPEFVTVFKNWRGKAAWIALRRFSTPERMAEAGAQEILLAWREEMQRPSFKKAEALWLVASESIGRTKGSTSAVRALQNVMTEYELLMMQTEQVEEQMREYLFKIPHAVELLAIKGVGMVTVAIFVSEIGDIRRFKDPRQLIKYAGLNLRENSSGNHKGKTTISKRGRRRLRHALCQAMIPILATNEEFRSLHQRNLTRTQNPLTKMQSLIALCGKLLRVVFALLTKGIEYDPSKIKVEMNEVSQAA

SEQ ID NO: 275102 - protein, 467 aa, unidentified
MKLYLGCDVSKGYADWIILSEKKQAVLENFQLDDTYEGHCKLYAMLEAYIDKYPGLEIYAAVESTGGYENNWFNTLKSYQKVFNLKVARINPLGVNFNRRAGMKRNVTDAISALSIAEYMINHPENVTYDQDDHWKSLCRHWNFVEMQKHQRVQTINQLETILYSANPTLMRFKKDNFPNWLLELIILCPTAEKLAKARPEKLAKIPYLTLERAKELVTEAKQSIASATDKNAETLVSQITLQIKTFDQNIKSQMRLIEQELTCPEIDILKSFVGINTISAIGLLLEIGVIDRFPTVKGFSCYFGLHPKFKQSGDKVIGIRMSKQGSKNMRKILFNIAKGAITYNPLIKDVYEKKVSQGMSKMAAIGVCMHKILRIIYGMLKNKQAYDPCIDKQNFERSKDKQQEKQQQENANIDKSRRYQEFDVKAPISRKQTKKRKEHDLSQCEITSQNTGSTCSSNAKLRKAKK

SEQ ID NO: 275103 - protein, 391 aa, unidentified
MIYIGIDVAKDKHDCFITNSDSEVLFKAFTILNNLDGFNDLYQKIESVMDDVTKVKVGLEATGHYSYNLLGYLIDKGLPTYVINPLHTNLYRKSLSLRQTKTDKVDARTIASMLMSDVNLKSYSDISYHNEELKSLTRYRFDKVKERAKLKTSVSRLVCILFPELEKLVPTLHMASVYALLSEFPSAKHVATAHLTRLTNLLSESSKGRYGKDTAITFRDSARASIGSNMPAKSLELKHTIKLIQELDSEIDEIENEIKIIMDEINSPILSIPGINYRMGAMIIAEIGDFNRFDSPDKILAYAGFSPSTYQSGQLDGAYAHMENRGSRYLRYALYNATKYVCHWDPTFAAYLAKKRAEGKHYNVAISHAVKKLVRVIYHLEKTKQQYIKAA

SEQ ID NO: 275104 - protein, 334 aa, unidentified
MSVLIGVDPHKRSHQAVAVDRDERRLAELNVRAAKDQTQRLLAWAAQFPDRRWAIESAAGLGYLLSQQLVAAGEEVLDVPATLAARVRVLGSGRSQKNDPNDAFSTAIAALRQRGLRQVRADDHRAILRMLATRHHDLGALRTQAACRLHASLAALIPGGFSGRLSAKRAGSLLRGIRPTEGVTAERKAQASELVADLRRLDAAIAATRKRIEVAVAASKTSVTDVYGVGPVVAAIVVGHAGDVRRFFASYNGTAPLEASSGPRKRHRLNPRGNRQLNHAIHMAAVTQIRNDTPGRAYYERKIAEGKTKKEALRALKRRISDAVYRQLLVDADR

SEQ ID NO: 275105 - protein, 370 aa, unidentified
MHKPTTLFVGLDVHKDSISIAHACEDRDAEVTFVGPIGTRQCDIDQLVRRLHSKASRLVFAYEAGPCGYVLYRYLTGKGLDCLVVAPSLIPKKPGDRIKTDRRDAVELARLLRSGDLTPVYVPSIEDEAIRDLSRAREDAVKDLKAARLRLKSFLLRLGLTYEGRADWNDAHLRYLARVVCPTPAQQIVFQEYLHAVTEIADRLKRLESELREHSSSWRLSPLVEAYQALRGVQDTVAITTVAELGDITRFDSPRQLAAFVGLIPSVHATGNSRRLGSITKAGNSHARRVLVEGAWAYRHPAKVSESIRKRLERLPKSIQDIAWKAQVRLCKRFRRLSARGKHPNIIVTAIARELVAFMWAIAREVRLGA

SEQ ID NO: 275106 - protein, 343 aa, unidentified
MQSISTVGLDIAKSVFQVHGVDAAGQVVIRRQLRRQYVLAFFQKLPPCLVGIEACASSHHWSRELQALGHTVRLMPPAYVKPYVKRQKNDSTDAEAICEAVTRPNMRFVPTKTVEQQSCLMLHRARHLFIRQQTAVINSIRAYLAELGIVAPVGRRGVEQLLEVVADTADYRLSEVARACLGALGSQLRALKAQILEFDRRIIAWHRSSATSKRLDAIPGVGPALATALVASIADPKAFRSGRDFSAWVGLVPKQNSSGGKDKLGSISKQGDRYLRSLFTAGALAVIRYAKIHGTGHRPWLTALLARRPTKVAAIALANKLARMAWAMMARNERYKEPAALAA

SEQ ID NO: 275107 - protein, 351 aa, unidentified
MKTNTPPNSETQERIQQLKLGVDWHADHFRVVRMCDGQSPQPAQRFTPASFLPFVQKQLTLAGQVFVVYEAGPGGFHLHRQLTALGVTAFLVHPQKLDPQHKGVVTDKTDARELTLNLDRYLRGNLRAMSVVRVPTEAEEQRRALSRQREQLRRERQRLAAQGRSLCLTQGIRLRGQWWSHALSLPEWLEPRLNVWRKLITAVQEQLEALTQQVEALAPKARPKGLGPLTLGMLIAELCDWSRFKNRKQIGSYTGLCGGVSSSGQSHCDLSITKAGNARVRWALIELAWRMVLYQPQSKAVQRWKHVLLNPKAAARQKKRALVALARQLAVDLWRWQTGKITPEQLGWVMV

SEQ ID NO: 275108 - protein, 432 aa, unidentified
MQKIRENAAGIDIGSKKVFVAIEEQEVRSFYTFTEDFEKLRIFLLENNIKTVAMEATGVYWGILYEMLEEAGIDVWLVDGRQTKQVPGRKTDVKDCQWIQQLHSYGLLNRCFVAESDIKELRSYQRLREDHIRSASMHVNHMQKALTEMNIRLKEVIDQIHGASGLAIIDAILKGERDKEKLLSLCHIKIIKNKKDEVLKALNGRYTKSGLFALRQAYESYCFYQNQIEQCDQMIDAALQKISRGKPDQKNEARRKPIRHNKPDINNLGSMMLKIFAGRDATTLSGITDYSWLQLLSETGSDLSRWPTEKHYTSWLGLSPGQNNSGKTKRNKRKSGRPKAGQIFRQIAQSLLTSKRIALGAFGRRLSVRKGSPVAIKSIARKLAVLYWRVMVKGMSYVEEGIKKYEEQLLLQKQRSLKRLAKELKVQVVYNG

SEQ ID NO: 275109 - protein, 460 aa, unidentified
MNPKRSKSRNSGKMPMMHPNAAAIDVGATMHMAAVRADRAPEPVRSFGTFTADLHRLVDWFTECGVETVVMESTSVYWIPIFELLDARGFTVFLVNARDAKHVPGRKTDVSDAQWLQRLHSFGLLRASFRPKGQIAELRAYVRQRERLLEYAASHIQHMQKALTEMNLQLHHVVADITGATGLRIIRAILAGERDPEALACLRHYSCHSSAETIAKALTGSYRAEHLFALEQALALYDAYHEKASACDVRIEAVLKELSIHRGHGHGSAPRASRRRNRTDQANALAFDVREALFALLGKDITTIDGLGPYLSLKLIAECGDDLSSWPSAKHFTSWLGLAPSNKVSGGKMLSSRTRRSGGRAAALLRLAAVTVGRTDTALGAFYRRLSARIGKAKAVTATARKIAVLFYNAVRYGMDYVDPGASSYETRYRTRVVNNLHRRAKAFGFVLQPLEPKVGAAVS

SEQ ID NO: 275110 - protein, 392 aa, unidentified
MVVSVGIDVSKDKHDCFIVSSDGEVLADVFTISNTLDGFHGLLQRIQECSAPQDKIRVGLEATGHYSYNLLGFLLDNGLATYVLNPLRTNLYRKSLSLRKTKTDRVDARTIASMLLSDAGLKPYTDTAYHNEELKSLTRYRFDKVKERAKLKSSIARLVCILFPELEKLVPSLHIASVYALLEEFPGAKQVAAAHLARLKALLETASNGHYKRDMALEIRDTAKNSIGSQMPAKSLELQHTIRLIRELNREIDEIEEQIQSIMDELHSPITTIPGLGFRMAAMILAEVGDFTRFDSPDKLLAYAGMSPSTYQSGQLKNCYPHMEKRGSRYLRYALYNATKYVCHWDSAFADYLAKKRAEGKHYNIAISHAAKKLIRLIFAMEKSRQPYCSAA

SEQ ID NO: 275111 - protein, 344 aa, unidentified
MTLITTIGLDTAKQVFQLHGVDNEGNAILRRQLRRSEVLKFFSKVPSCVVGLEACGGAHYWAREIKALGHEVRLIPPAYVKPYVKRGKNDAADAEAICEAVGRPSMRFVPLKSVGQQATAMLLKARDLLVRQRTQTINALRGHLTEQGITISRGVGKVDDLAAIVRDEDDARLPPLARIALLPLTHQIEAYTSEIVKLEKHMVRETRQDATLSRLTSIPGVGPITANSIAAFVPDPQAFKSGRHFAAWIGLTPKSNSTGGKSRLGRISKMGNPVLRSLLVVGASAVIQHARRGAKVSAWLSELLRRRPYKVAAIALANKMARIVWALLVRGGQFHSTANETMAA

SEQ ID NO: 275112 - protein, 421 aa, unidentified
MHVLYQRCAAVDIGKDVIAVAVRLPGDGPEHRQTIKRTFKTFYGVLKHAAGWLTAQQVTHVAMEATGIYSMPVYHALIEHGQFEKVLVCNAGHVRNVPGRKTDLSDAEWLVHLLECGLLRGSFIPPAQIKAARDVIRYRTKLTESRTSELQRLGNVLQDAGIKVDSVASTIATRSVRAMVEALIDGERRPVLLAELAKGRMRARIPDLQRALEGRFDDYHALMCRLHLDHLDHLEEMIARLDTQIQDMMQPFRAQRELLTTIAGIGPFAAAAIISEAGADIGETFPSAGHFASWIGVCPGNHESAGKRHSGKPRKGNQHLQHVLVECAWAASRTPGYLQSLYRWHVRKFGGSRNPTAKNKAIVAVAHKLAIIIWHVLATGKPYTDLGADYLDRRIDPAKETRRLTARLQALGHTVTIEPAA

SEQ ID NO: 275113 - protein, 334 aa, unidentified
MLDPTTGEVVERRLEHENGEARTFYATLPSPARVGMEATCNAPWFERVLREHHHELWIGDAAEIRAAMVRKQKTDARDALHILDMLLTDRFPRIWVPSPAERDLRQMLRHRHKLVRFRTSVMNQLHALAMGEGVCRRKKLWTKVGRKDLEGLLLDPWASLRRQELLQLLDQLDPWIKKLDEAVIQAAESRPPAVCLMQQAGVGPVTALAFVLIIGPVSRFANSKKLVSYLGLNPSEDSSAGRQRLGAISKQGNPMMRYLLVEAAQTASRLDPELRRDYQRLKFRRGSGVAKVAIARKLAVRLYWKLREAEQPVPSARMQGSPASPVVGESLSPN

SEQ ID NO: 275114 - protein, 320 aa, unidentified
MMAQNDRVVVGIDVAKDKVDSCIRTLASRQTFPNTVQGHRRLVGWLRKHQVNKAVMEASGGYERVWTKLLREAGIEVRIVDPKRVRSFALSAGRLAKNDAIDAEMIAWFAETFSEAPSQKHDAAHEELQTLVKARLSLIDTRIRLVSQSEHAAAGLVQKAHAHILKSLASEIAKLEAAISAKIKSTPDFAERAEIIESVPGLAETSSANLVAGMPELGQVSAEIAAALIGAAPYDDDSGKRRGERHIKGGRRWVRNAIYMPCVGAATQNNPVLKAYYQRLIAKGKEPKVAIIACMRKLIIILNTMIARRQKWDPGRYALN

SEQ ID NO: 275115 - protein, 337 aa, unidentified
MVYGAIDLHMRYSQVRILDAEGQLVRETRVATTPERLTAAFAAAGPMRILLETGTESEWVAQLLEAAGHTVIVADPNFAPMYGDVRRHVKTDSRDVTALAEANRRGWYRAAHRTSAVQRERRQLLRVRRQLVQMRTGTISVIRALLRQGGYRAGTGGSEAFGDRLTRLTLPAPLAATIAPLVRTLATLRTEIRACDAHVERVAATDPLVRRLQTVPGIGPVVAVTFRAFVDDVARFPSAAQLSAAIGLVPREDSSGERRQRGHVTKAGPRELRSLLVQAAWVCWRRCRRSPLRAWTDQLAARRGKRIAVVALARRLSRILYAIWRDETVFDGSRVAA

SEQ ID NO: 275116 - protein, 421 aa, unidentified
MQEEASGFAAFVGIDWADRKHDICLQVAGGDSVELSVIEHRPKAIEDWAQKLRERFAGRRIAVCLELSHGPIVSALLEHDIFVIYPVNPSTLAKYRRAFTPSRAKDDPTDAAIALELLRRHPEKLKHLRHESPNMRALRRLVEARRDLVQDRVRITNRLTFTLKAYFPQVLDWFRDKETEVFAAFLERWPSLPDAQRARPETIVGFFHAHSVRRASAIDRRVDAIKSERPLTSDAAVIEPARLLVEALLPQLRAVSAGIARLDDEVARRCQQLPDYSLFADLPGAGRVFSARLLAAFGEQRDRFADAAAFQKYTGIAPVTERSGNKHWVHWRWACPTFLRQTLVEWVASSVPRSFWARAFYDSHRAKGASHNATIRALAFKWIRVLFRCWVDRTPYNESRYLAALQKRQSPLLKFAAQTPS

SEQ ID NO: 275117 - protein, 358 aa, unidentified
MAKLSLSRLAAFVLGFEATVFRVGIDVHKRSYSLALVREDGANFTWTGPSKAETLLEPVKRFGLRISAVAYEAGPTGFSLARKLKRAGLRVIVVAPSRVPRPVRAGAKCDRLDCIKLAEYAGHRMAQAIAVPTEAEEAARSLLRRRHALADGRRRCKQRIKAHLLYLGVEAPEGLDRWSQASVAALGGLSLRPSARLTLESLMRELAFHNEELRRVEDQLVELMSSGSHGKPLGLLRTVPGVGFLTAATYLLELFRPERFTNARQVASYLGLAPMVRHSGDRKPRGKIVPVGQSRLRSLLIEAAWVWKTRDDYAGQLYKRFLSRMGIAQKAIVAVARRLAIILWRLCIEQRAYRANPA

SEQ ID NO: 275118 - protein, 387 aa, unidentified
MQKLNDLSRSLIALEPDGTLIAVIEMSLSSWLVAGIVPGVERQPLKKLAADESALLKLLHRWREEAEKAGRRIERIAVAFEAGRDGFWLARWLKARRIEAHVIHASSVAVAREHRRAKTDRLDTELLKRTFLGWLRGERNHCKMVAIPSINDEDAKRPNRERENLVSEQSRIINRMKAALIRLGIRGFNPKLKRAAGRLEDLRTPEDEPIPPNTLAELRRDMERRRLVRDQIRQIEEARLQRLDHAPYDGPHAMVRLLARVIGVGIETADMLVYEVLSRNMRDRRAVARYAGLTGSPDESGRKRREKGLARSGNGRVRRGMIQLAWRFLLHQKDSALVQWFRARTENARGTRKPMIVALARKLLIALWRLARQGVVPDGVVLRPATQ

SEQ ID NO: 275119 - protein, 360 aa, unidentified
MIGSDGHEGRVTVGVDLGDRTSQCCVLGEDGQVREEFSLPTTQQAFRRRFLRQEQACIVLEAGLHSPWASRLLGELGHQVIVANPRRLRLIYGNDSKNDRADATYLARVGKLDPSLLSPLAHRSATSQADGALIRSRQALVRTRATLINHSRGLVKSFGERLPRCSTRAFAKKVDEHLPEPLRPALGPVLSMISALTKEIRGLDQKIETLARESYPDTSLLSQVQGVGSLTALAYVLRVEDPARFPRARAVGSYFGLRPRQADSGKLKPQLHITKAGDQMLRCLLVGSAQYILGPFGPDTDLRRFGLALAARGGKSAKKRAAVAVARKLSVLLLRLWVTGEVYEPLRNARLRGEMAPASP

SEQ ID NO: 275120 - protein, 417 aa, unidentified
MEHFAAYIGIDWSDQKHDVCLVDITTGDHELSVITHTPEALNEWASAVRSRFGGAPVAICLEQSRGPLIYALLKYDFLTLYPINPQTLAKFREAFSPSRAKDDPTDAEYLVELLLYHRDRLTAWLPDDEKTRTLQLLVEHRRRLVGDRTRISNRLTALLKGYFPQVLAWFPDIRTPLVCDFLLRWPSLAALSGVRRTTLEKFFRQHHSQRTETLERRLTAIKEAVPLTTDPAVINSSVLMVKALAAQMQTTIAAIKEFDSEIEALCQTHQDRELFASLPGAGAVYTSRLLAAVGTRRERWASADELLRYSGVAPVIERSGKSSWTRWRYFCPKFIRQAFVEYAGESVRHSEWAKAFYVSQKAKGKSHQAAVRALAFKWIRIIYRCWQTRTPYDEARYLECLRKKGSKFVSAPAGATP

SEQ ID NO: 275121 - protein, 425 aa, unidentified
MEVTAKSNTWKSHGYFMGCDWATRHHDVVVLDREGRIVLDLQISHTAEGWRHLRDKLVHLAGPDLRVVAVTIETTCGPAVEQLLALGCIVYPLNPKAGERYRDRKAPSGVKTDHLDALSFADALRTDGHAWRHLNPEDPKVQELRLLCRDEIQLIEQRTALVNQLRQALEEYYPAVLEAFDDWLLPAAWDFVERFPTPQELKKAGKRQWEKFLHTHRLYRSSTYSKRLEIFARATEFCGSQAITNAKSVLAVAVVKQLRVLEQQLRVYRDRIELLFREHPDHDLFGSLPGVGEKLGPRLLSECGEDRGRFEDHEALQSYAGTAPISFQSGQAHRVLFRRACNKHLRAAVHLWADLSRAQCTWAQVYYEQKRREGKSHACALRCLGQRWLKILWKMWQTKQPYDEQLHTRNQVKHGSWVLALTPSK

SEQ ID NO: 275122 - protein, 380 aa, unidentified
MAEITRGLIARVGVDLAKQAIQVHAVDAAGHRLVARAFKRDQFLAWCAQLPAGCVVAMEACSSAHHWGRKLTALGLQPKLIAASFVSPYRMEGRSGKNDMTDAAAICEAASRPTMRFVRIKSCEQQGVMSLHRFREGYKEERTACINRIRGVLAEHGLVFGKSPKVLRAALADVIEDASNELSGRARLVVQRAFEHWRELDEHMGWSDGQVGQHVRGSPQAKRAAKVMGIGELGASALVGGVGEFKQFKSGHQFGAWLGLVPSQNSSGGKASLGRITKRGDDYLRTLLIQGAKSAVMSAGKRDDPISKWLQQLILRVGWQKACVAMANKNARILWAVMTREAAFDAEYVSVKPAGKCKAPSAPTKPIPTVKSAQVAACMA

SEQ ID NO: 275123 - protein, 339 aa, unidentified
MNTIYYVGLDVHKKTINYCVKQLDGTKLQEDRLPATRLALDGWCKQLPGPWMGALEATMFTEWIYDHLKPQSVDLKVAHSARVKALLAGKKKNDRIDAETLADLLRCNLLPQVHMMPTPLRELRRLLRYRHLLVRQSTQLKNRMAGLLMQGGIEYNKQKLHGQRYFQQLIENLEGVPESVVDLLKMGRQSLEFLKSLEKRLIHSLMDNESLHQRVDLLQSIPSVGLMTALTWALEIGDVKRFPSISQAVSYCGLTSTLRESAGKQRRMPLSRQRNKYLQYMLIEAAKLAPRFYPPLDQLYQREKQKSNPNQATLNVARKLVAYLMAVDRRQRPFEPPSP

SEQ ID NO: 275124 - protein, 422 aa, unidentified
MNFGPVAGIDVSKRFSDMCILSPDNKIFAQEKIYHDETSINRANTLLQKAEQIFSSKPVIVMESTSHYHLILFQFFSEHGYDVIVVNPLQSSSMKDFSIRKRKTDRVDAFKLAMMYRTKTLRPSQVPQTALRALRQLCREWVEFLNDVSSYKNRLTAFLDQAFPGYDKVFSDLGGITSCAVLVRFPTPAILLAAEEAELVEVIAAASKSGYGFAKKKAELLISAAQKAQTLGIHSCADETLIVCTIQMLRTLSESVFQIEKAIDNLLVQIKEMRNNVSLLQSIPGVGSHSAALLLGEIGDFTLFKKPKQLAAYFGLDPSERQSGTFRGTKNKISKRGSPYARASLHMAVVNAICKHGKQPAPNPVLLSYYEKKCKNKPAKVALAASMHKLVFIIFAVLRDQKPFELKTPEQHAAEQGFVKAA

SEQ ID NO: 275125 - protein, 341 aa, unidentified
MSELYAGMDLHSGNTYVGIIEKGTTKRVFEKRVRNNLDELVWTLSPYREEIRGIAVESTFNWYWLVDGLNEVGYDCVHLANPAAIQQYKGLKYADDRHDAFWLAQMLSLGILPEGYVYPREERPIRDLLRKRSFLVKQRTAHIISLQSMIERNTGLHMSANALRKIKTEDVQQILKEDHLVLLGTTSLETIAFLGKNIRNIEKTVKREVKTRGDFDKLHMVPGIGDILAMTIMLEVGDISRFARVGDFTSYCRCVPTGRLSNGKNKGKGNAKNGNRYLAWAFVEAAYISLRQSPRIAGYYKRKASKTHRMVAIKTIASKLARACYYMLRDGVEFKEEMLLC

SEQ ID NO: 275126 - protein, 338 aa, unidentified
MNHYVGIDVSLEASSVCVVDGNGKIVCEGKIVSEPDALIAWLKGLKLGLTRIGLEAGPLSQWLYAAMRQAGFAVELLETRHVRNALKTMPVKTDRNDARGIAQLMRLGWFRPVHCKSLAAQETRALLAARKLVQVKLHDVEMSLRGILRGFGLKVGPTTPVRFEGRIRELVAGHPSLEAIAQGLLAVRVGLRREFDRFEKQVRAIARSDTRTRLLMSVPGVGAIVSLTFAAAIDDPARFNSSRQVGAYFGLTPTKYQSGETDIDGRISKIGDAWVRAVLYEAANIILTKPLKGCTALKSWAMKLAKRSGMKKAKVALARKIAVIMHRMLADGMSFRNV

SEQ ID NO: 275127 - protein, 412 aa, unidentified
MNAVGIDVSKGKSTVTIRRPGDIVLMPPCDIPHTQSAINDLIERIRGLDGDTKVCMEHTGRYYEPVATWLSDAGIFVSAVNPILIKDFGDDSLRSPKTDKADSKKIARYTLDRWAKLKQYGSMDKTRNQLKTMNRQFGFYMDQKTAMKNNLIALLDQTFPGSNDFFDSPARSDGSQKWVDFAYTYWHVDCVRSKSLDAFTEHYRNWCKRKGYNFSTQKAATIYQASSDLIAVFPKDGCTKLLIRQAVALLNTASETVESLRLKMDQTASTLPEYPVVMEMNGVGPTLGPQLMAEIGDVTRFTHRGALTAFAGVDPGKDESGQHVRKSVPTTKKGSPYLRKTLFQIMDGLIKRSPVDDPVYAFMDKKRAQGKPYYVYMTAGANKFLRIYYGRVREYLAALPETSDGEAQNDGI

SEQ ID NO: 275128 - protein, 418 aa, unidentified
MIEDVQWFVGIDWATQSHRVGLLDIEGRHVSERDFAHGGAGMTELRDWLLEKTKAAPGQIAVAIETPHGPVVETLLDHAFQVFAINPKQLDRFRDRFTVAGAKDDSRDARVLGSALRTDRQAFRRLVVDDPLVIELREWSRMADELQQERTRLANRVRQQLWRYYPQAVELTDDVADDWFLALWQRVPTPVTAAEVPEEAITRILKDHRIRRLDATTVLQTLRKTPLFVAPGTTEAACAHIRAVAARLSLVNQQIKQTHRALDGLCAKLEAATESPSGQNREQHDVMILRSWPGIGRIVLATLLTEATEPLRRRDYHALRALAGTAPVTRRSGKQCFVIRRLACNKRLQNAVHHWSRVAIQHDTAARRRYDALRRRGHGHARALRTVGDRLLYALCTTLERQMPYNPNCQTAQVTVGL

SEQ ID NO: 275129 - protein, 421 aa, unidentified
MAKKDDTKIVQVLHPICCGLDVHKESVTACLIVQTSTGESLEQCEFGTFTRELRRLKEWLLDNECPVVAIESTGVYWRPVFNVLEGAVQVVLVNARHTKHLPGRKTDMSDSKWLAGLLRHGLVRGSFIPPEEVRQWRDWCRQRKTLVDTVGDYKRRIHKMLEMANIKIGSVLSDIFGATGWNLIRLLLNEAPITLSDVEECLRGSLRGKDREQKAWVLYDAIRGFFTDHNREVLKPLLRIIGIIENEIALIEGRLTKLFAPYKDLVERLDAVPGIAYVAAWAIVAEVGPTLETFPSVQAFCSWCGVTPGNHESAGKRKSARSPVRKKMIKTILVEVAWAAIKNKRSYYRDKYFRIKARLGSKKAIVAIAHRIAKALFYIIKHGQHYRDLGMDYLNLLHIDRRHAYLSREAKTIGYKLVPIA

SEQ ID NO: 275130 - protein, 519 aa, unidentified
MAKTTRRRSSGRRSASSLGKPRGVLHPRVQQVGPEHFGIVCFDCAKVRSKFLLADFYGRPLIPPTIVQHNRPELDSALAQIRRAFEQHQLRDGLVAIERTGRYHRIVQRTFAAAGFETRILHPFATKQYRQPVDPGNKTDDTDLAAIHRATVTGCALLEATRDEAWTTLQLLIRHRRDLVRKGAALNCQIRDHLEAALPGYAACFDKLWESPIPWHLLRHYSTATQLHDAGRTVLCQSLRQAGIRFQQRTIQTVVDWAEQAAPGDVAASQHLRIALALYEDRQRKTQAIKALERDIASRLVQTPYVLLLSFPGINVVSAADFAGEMGPIEHYLNAKSITGRAGLRPSRYQSDQVDKANGPLVRHCNRSLRAAILGIADNLIVCNHHFQVLATQWRAQGKDPRHTRVKVGLRFCRIGFQMVAGRQVFRHPSIQGRHYILDKLTAFHREHDTNMPDVLRDLQAAIAQIPHREYASEATPLLDAYQKIQNGRRRGPQLLGDILPLVFARLGVGVLQSEESGG

SEQ ID NO: 275131 - protein, 428 aa, unidentified
MAVIGRAIGLDVHLDFCEVAIVEAGELRSAGRIETTPERLELFAGSLGPHDRVALEVTGNAWEIARILEPHVARVLVVSPADTGIRQARAKTDRLDARTLAKLLAAGELDAVWTPDEWTRVMRRRLGRREQLVRSRSRAKNEIHAVLMRRLKGRPPVSDLFGVKGRQWLRELEFPVEEQETVDGCLRHIEFLDREIAEVERLIATEALDSAEIRRLMTVPGVNVIAAATFMAAVGDIRRFRTQRQLVGYLGLDPKVRQSGIAPAKSGRISKQGSASARWALVEAAWSVVRQPGPLHAFYQRLRVRRGSQIATVAAARKLACLFWCLLTRDEDYAHQQPSLTAKKLRLLEIRAGAPTQKGTPSGVWATRQAMRDAERRLAEQAEASYTRMVRDWQAATPASAKVGASVTPGRASQKPSKGKVARQTTSP

SEQ ID NO: 275132 - protein, 436 aa, unidentified
MTLINFVAANQKYYAFNLLSVFIMVFWSVQYLLQHLLVQTQVSHQLLQPLILILQLPQTPQFRHARPGKFFLPVNGMDCFLPLRLTVRNVLTRRITMNIVFLGIDLAKNVFQLCGLNQAGKPVYTKRTGRKELLQTLANIPACLIGIEASTGAFYWQREFEKLGHKVKVISPQYVRPFVRGQKNDGNDAQAIAVALMQPTMQFVPPKSPEQQDIQALHRARQRIVNHRTATVCQIRGLLLDRGIPIGSAVSRARRAIPLILEDAENGLSSRMRRTIAELYDLFNDLGRRIHFFDKEIETVFRQSEACPRIAKVKGIGPKTATAVVAAIGKGTEFKNGRHFAAWLGLVPRQHSSGDRQVLMNMTKKGDKHLRTLFIHGARAVVRVATNNNDGHMNQWVNQLKERRGFNKTTVAVANKNARIIWSMLRNDTGYQVVCN

SEQ ID NO: 275133 - protein, 417 aa, unidentified
MSPEHSIDIFLGLDVGKSEHHACALDRDGNKVFDKPLPQLESELAGVFHQLQKLGTVLVIVDQPNTIGALPIAVARDCGCEVGYLPGLAMRKAADLYPGRAKTDKRDAFIIADTARTMPHTLRAVDRNDEVLSALKMLSGFDDDIARDCTRTVNRLRSVLTQIYPSLERVFAGSTLTRTPILELLIHYKGPQGLKRAGYQRVLNWMIKRTRKDPTPLVDDIFAALKAQTVTVPGSDAAELVIPQLAANIKALKEQRNTIAEQVEEMLADFPLCEVLMSMPGVGIKTAAQILLAIGDGSDFASAGHLAAYAGIAPVTRRSGSSIRGEFPARSGNKRLKNALFYSAFAVIRSHEPSRRYYERKRAEGKRHNAAVICLARRRCNVIYAMLKNKEFFGLRVKMCVWLGVSRGLDLAFLNAD

SEQ ID NO: 275134 - protein, 329 aa, unidentified
MKKSFIIGVDVSKLKLDLHCYGQCQSFVLSNNLKGFKGFLKWIKKEISKDKEQILVVMEYSGIYSYNLEKFLFEQGISYVKRPALDIKRSMGMKRGKTDKADARMISQYGWYRREELKSMKPVSQAQQELQQLMTFRDKMVADNASYKTRLKELREQLKNALPAGIIKSTEQIVEILKMEINKTEKAIRELLADNPDLENNYQLMTSVRGISFVTGIHLLITTENFTRFTDPRKFACYSGVAPFEHTSGSSIRGKTKTSQLANKKIKSLLTMAAICAIKHDPDLKAKYEQKLKEGKAKMSVINMIRFKLIERIFAVIKRQKPYILSPAA

SEQ ID NO: 275135 - protein, 315 aa, unidentified
MTASGTFIGIDVAKRQLDVMERPSGERWTAVNDVGGIAGLVERLRARSDVALIVLEPTGGYEMPVVAALSAAPLPVVVVNARQVRDFARAVGKLAKTDTIDAAVLAQFAEAVRPEVRALPDELTQTLHGWLGRRRQLLEMVLAEEQRLAMAARVIRPQIQAHVVWLRSQLRDVDGELHTVIRSSPVWREQEDLLRTVPGVGPVLATTLLADLPELGRLNRKQIAALVGVAPLNWDSGQHRGTRHIWGGRAPVRTTLYMATVSAVRCNPVIRAFFDRLCAAGKPKKVALTACMRKLLTILNAMIQHRTGWKPALAA

SEQ ID NO: 275136 - protein, 317 aa, unidentified
MQIPINIGVDVAKDHVVVASAENILPSCQVPNQRADLLTWLKTLPPGSRLGLEATGQYHEVLADLAHARGFTVFVLNPKDTRHYAKAMGTRAKTDRVDAVLIARLVAHEHQQLHPYVPPTTQQRQVSRLLKRRAKLTALKGALKQTLQGLPGFSTERKAMIAKFESLIAKIDVQLARFSEQSPENHQAKQRLQTIVGVGPLVGTSLTHYLARTSFKNADAFVAFTGFDPRPCDSGRKTGRRRLSKRGPSELRRLLFNAAMSGSKTTTWKPHYEHYRAKGWSSTAALVIIARKIARTAWSIYHYNTTFDTRRISSQLA

SEQ ID NO: 275137 - protein, 446 aa, unidentified
MTREPEVIDADDSGEVVQRVGAIDVAKASGMVCTRVPHPSVAGRRLTKIWDVGATTRAVMDLADELARQHIERVVVESTSDYWRPFVYLLEARGLLVWLVNAHDVKQVPGRPKTDKLDAVWLAKLNERGMLRPSFIPPAEIRQLRDYTRLRVDLVEDRTRHKQRIEKLLEDSLIKLSTVATDIFGKSGRAMLDALITGERDPEVLAEYALGKMRPKRAALKEALTGRFDAHHAELIAMLLDEVDALTAKIDTLTARVDQLLADIPAACAPPPGPSAADGGAAPLGAVARLDEITGIGIAAAQTIIAEVGLDMTQFPTAGHLISWAKLSPRTIQSGTRHRSTKTGKGNPYLKRVLADAAASVARTDTFLGERYRRLVKRRGKLKAIVAVARSILVIVWHLLADPTARFHDLGADFYPRAVNTQRRTRNLIHQLEILGHHVTLAPAAA

SEQ ID NO: 275138 - protein, 427 aa, unidentified
MDVHCSITKTLVAIDVAKFHDDVLIECPDGSRRRMRISNTRVDWEKLAALIRGLAAPCEIAFEATGDYHRPLASFLDQQGYTLHLVSSIAVARTRDALFNSWDKNDPKDAQVILHLLKTGGTQEFHDPLKSGYHDLLEIANTYEQIARRKLALWNAIVTHYLPLYFPEAEQYSHSSRAEWFTQLLILAPCRAAVAKYSEAELRKAARKIGGAKTDKMRWLSDFYRTAIDSVGLPVKEDSEAIRMFRLVLGECLAVCKLRARLEKDIVDGLKDHPDFQRLQTIPGIGPILALIILAESGNMRRFSHHRKFLKYCGLDLSTEQSGQFRGTSKLSKRGNARLRYAFWMAGAVAVRARQNTFREKFERYIRRDPTTPTSNVRRTRLWRPSWRGWPTRSSKPAPIIAASMRRRVQAEEFVRFGPWRRLRPRR

SEQ ID NO: 275139 - protein, 456 aa, unidentified
MKIPQSTIRLLTGRLVKILLYREVSTMKSNTQNAKIEAITEKTLVLGIDVGSETHYARAFDYRGIEYSKKPFKFSNTEVGFATFKEWILDLKERHEKDKVVPGMEPTGHYWFNLGKFLQDNEMKPVLVNPHHVKKSKELDDNNPTKNDRKDPKVIAGLVREGRYMIPYLPDGVYADLRTASNIRFQLQAELTRIQNRISRWFNIYFPEYKTVYGKPDAKSGMLILKAAPLPEDILTLGIDGVNQIWRDAKLRAVGKARAKTLIEAAEHSIGSKEGTVSARMEIRMLLEDYESKNMRLQEVMVLIEELVKEIPMAEKLLEIKGVGIRTVSGFLAEVGDISRFNNPKELQKLAGLALVENSSGKHKGKTTISRRGRKRLRYLLFEVAMSLVAKNPEFRELHNYYTARRLNPLKKMQSLMAIAAKLIRVFYAMLTKDVDYDPKKMISDIKRPTVYLQAA

SEQ ID NO: 275140 - protein, 475 aa, unidentified
MNLKGTKKKNQVVTVNIFEQQEMIVKAEVIRKNLKAFTWHELETNGKFDKNAKLTFISDDMLILGCDVGSETHYVRAIDTRGRELSKSAFPFSNSVEGFQNAKEWAVKIAATNNKNQIVMGLEPTGHYWFCLATWMISNGISVVQVNPYAVKQTKEVEDNSQLKDDTKDPKLIANLVKDGNFGMPYLPEKLYGELRRLSMFRDQLTEDRIRSLNHMHRELKIYFPEYKDAYGKVDGAFSLELLKKAPFPTDLIVLGVDGIRQIWHNAKLRGRGYSRAGEILQYAEKSVGIKDGAEASKTAVKWFVEKIMEIDEQLSDIENRINQKCQEIPHAENILEIPGIGAHILSGILAEMGDISRFDDVKEIQKLSGLGLVACSSGKHKGETKISHRGRKRLRFWLFQAAKSAVSHAEEFKELHLYYTTRTDNPLKKMQSLIVIACKLLRVIYTILTKGTNYDPKKMLMDIRRPAKQEALAA

SEQ ID NO: 275141 - protein, 348 aa, unidentified
MMHSVGIDLHRSRSYVAVIDDQGDVLLSRRIINDPETFLELLGEIDGECRIALEATYGWEWLADVLQDAGYELHLAHPLRTKAIASARVKTDAVDAKTLAHLLRTDLLPEAYIAPRELRDLRDLLRHRVALTRMRAALKNRVGAILAKHGIARPYSDMFGPGGTHFLGELELREMPRRRLDSTLALIGDFTREIEQTTREIETRAKDDPYVEVLCQIRGVGRYIAMLVIAEVGDITRFATARRLCAWAGMTPTVRSSDMHTRLGHISHQGSPALRWALVESAQHAATGGGPLRQTFERIAKRRGRQVAKVAVARQILTLCFYGLRDGEIRCLAPRAPVRTIRPTAVSA

SEQ ID NO: 275142 - protein, 365 aa, unidentified
MASIAQGRFTYLGMDVHKDSISVGILEPGHESAVVERIFHDECSVRRLIARFPDPRALRTCYEAGPTGYELHRLLSAMGVACQVIAPSLIPRTPGDRVKTDRRDARRLARLHRAGELVAIRVPTPQEEAIRDLCRARGDMVADRTRARHRLGKFLLRHGRVFRGTRAWTMAHGRWVAAQSFSEPALQATFGHYRAVLESRDAQIFAIEADLVPWFTSERYGDQVARLGAYRGVDRMGALTLASEACDWRRFDRGTRFMGFCGLVTSEYSTGQSVRRGHITKAGNVHLRTQLVESAWAYQHHPSVGARLRAHQRGLPPEVVARAWGAQLRLCGRFRRLAQRKTSKNVVATAIARELAGFLWAEMTA

SEQ ID NO: 275143 - protein, 381 aa, unidentified
MTTPATRNVQERPTEGTLFVAFELSEKTWKLGFTTGHGQKPRERTVPARQQERMLDEIAHAKRRLGLPDTAPVVSCYEAGREGFWLHRFLQGHGITNHVVDSSSIEVNRRRRRAKSDGLDVRKLLSMLLRYAHGERQVWQVVKVPSVEAEDQRHLHRDLETLKQERASTMTRIEGLLSSQGLRVTSLTKLPEQLEALRLWDGSPMPPGLRRRVMRVYAHYTFLSEQIAAVEVERRAQLQTSADASLDKIRQLMQLKGIGINGAWLLVMEFFGWRAFKNRREVGGLAGFTPTPYQSGESAREQGITKSGNRHVRWMTTELAWSWLRFQPDSALSVWFRERFGSGGKRLRRIGIVAVARKFLIALWRFLETGVLPAGAVLKEA

SEQ ID NO: 275144 - protein, 410 aa, unidentified
MRRMKGKRSASSIVGCAPKCAEPHAETPEGVLPQTFRGGRPVSKTITSFVGLDVHKDSTAIGEAEAGRENPRFIGTVGSDLGQLLKALKSLGKPETMLVVYEAGPCGYGLARQLRSRGYSCEVVAAGKIARRPGERIKTDRRDALTLARLARSGDLVKVLVPDERDEAMRDLSRTREDAVKARLKARQQLKALLLRHGHRYGGKSSWTLAHERYLATVGFAHPAQDIAFAEYRQAVREGHKRVERVTQALRTQTEQWRLQPLVAALSSLRGIDFVAAVTLAAEVGDCGRFAHPTELMGFLGLVPSEYSTGNTRRQGDITKTGNSHARRVLVEAAWNYRFPARLSRILQIRQEGQPKAVREIAWRAQLRLAHRYRRLSSRKLHPNKICVAIARELAGFLWDIARQVKVAEA

SEQ ID NO: 275145 - protein, 357 aa, unidentified
MRKVQTYVVKGKEVFVGLEDSKKTWKVCVRSGRRVIHESSMPAKYEVLRAYLRNKFPECRIQVMYEAGFSGFWLHDELVGDGIRCVVTPPHTVTQEKCQKQKNDRIDCRRLSKNLENGDYRRCAVPDKQRREQRQVSRLYGQVHKDITAVKNRIRRALEYHGLDCHFPAGRWADGEYRTLEVRLRALDISPSRWFCFTSLLAQLANLRSQKKTVLLELRRLARTQAYRPTVKILTSVPGIGTLTAIRLALEWGDLRRFKRKECFASFLGLIPGDHSSGEQDRKGHITKQGSRAVRRWLIESSWVCIRKDPVMLAKYNQVLHNSGDQKKAIVAVARKLALRIRALLIAQQPYVVGVLE

SEQ ID NO: 275146 - protein, 365 aa, unidentified
MSSVPSAAELIHLGMDTSMNEIVAGVLRPGEEMPVVSRILNDEESIRRLIGRFPDRRLLSACYEAGPGGYELHRLLTSMGVACDVVAPSLIPKGATDKVKTDRRDSVRLTLMHRAGLLTAIRVPSPAEESVRDLVRARGDLLDDRKRMQQRLNAVLLRHGRTWRGAKWTYAHRVWVDKQAFDEPALAEAFALYCGGLDAREAELRAAEARLAAWAGRDPLAGPVARLGAYRGIAQLTGLTLAAEVVDWRRFASARAFMGFAGLTPTEYSSGSRTRRGHITKAGPAGVRTALIEAAWAYRYRPAIGVTLARRQAGQSPDTLARSWKAQQRLHARYKKMTARGKPGGVAVVAVARELAGFVWAEMTS

SEQ ID NO: 275147 - protein, 399 aa, unidentified
MAQPTLWAGIDAGKAAHHCVAINTGGQRVLSERVINDEGALLDLIRAVKELADGGSVQWAIDLNSGGAALLITLLLDDDQDLLYIPGRTVHHASGAYRGDGKSDAKDAAIIADQARMRRDLLPFRHRDKTAVDLRILCARRTDLASDRNRAINRLRAQLLEYFPALERAFDYAHRKAALILLTGYQTPDGLRRMGAPRLERWLRDRQAYNAGDLAARAIEAANLQRTTVIGQHVAAAVVARLAQTILDLNTELADVDTMIEETFQQHRLAAIIVSMPGFGSLLGAELLAATNGDLASFNTADRLAGISGLAPVPRDSGRISGNLKRPRRYDRRLLRVFYLAANNSIKTSPESRDYYDRKRSQGKRHSQAILCLARRRLNVLWAMQRDQTSYQPGMPRAA

SEQ ID NO: 275148 - protein, 355 aa, unidentified
MKYYTSTTQFNCGIDLHARQMYVCLMDRDGQKLVHTNIKNNDFEFFLKLVAPYRHDLTVCCECMFGWYWLADACQAAALHFVLAHALYLKAIHGGKNKNDRIDSEKIAHLLRSNLIPPAYVYPADKRPLRALLRQRLFFVWRRSELLSRIHSHQLAHNRIPPKQTRRNRDPWEQQLLAAEDHPLRQLALKNDLAMIRHFDTQICQLEEELQRQAKKTAARDYALLQTVPGIGENLGMTILCEIGDIARFPTVKNFLSYSRLVKGTVASAGKIKGLRGAKLGNPYLRWAFGEAAVIAKRDHAVIGPLAQRLEARMNGNKFKANTVVAIKLARAVYFMLKSKTVFDPDRLVAALSRN

SEQ ID NO: 275149 - protein, 364 aa, unidentified
MLYVGIDQHRKQLTVSVRDGSGNVILRRQVSTEWKKVRAFFDEVRELSETHEGYMAVVEICGFNDWLLKLLPEHGCGETIIVQPGEQSAHKTDRRDASGLSETLWINRDRIAQGLPVRGLRRIQVPGPETQADRRLTSQRHDVGRELTRSINRMKAVLRRHNLEQECPTKGIQTQRARKWLNELPLSAVERAELNHQLARQDLLRKQLKELQGEILRRYEANPVAQLISTLPGAAAYSSLGLASRIGDIRRFKHPRSLANYWGLAPGSRNSGEAQQRLGSITKQGSALARFLLGQLVLHVLRKDAWMRTWFRGIKRRRGSKIARVAVMRRLATILWHMLTKNEAYVCGGLPRARLKRAAAVARA

SEQ ID NO: 275150 - protein, 332 aa, unidentified
MDNFYFIGVDVSKKKLDFCVLFEGKVLREEQVSNHQQAVARLIGELKNDLEMDNEQFLICAEHTGQYTFPLVCACKSVECKLWLENPSQIKYSSGMQRGKNDKVDAKRIAIYASRFGDKVKYYDRPTEEIERLKQLERERALYVTDLAKYKGQMYDQKDFMPAALYRKKTKRMKGLIQELQAAIDAITAEMEKIIGSTEVLARQMELLMSIDGVGKVVALNVIIETEAFSRFDNPRKFCCHAGVAPFSYTSGSSQHSKNKVSHRANKNIKKLLHMAGVSVTPRKEGELKAYYMRKVEEGKNKMSVINALRAKIVARMFAVIKRNEVYTPIYS

SEQ ID NO: 275151 - protein, 428 aa, unidentified
MNDTEDTKREHFCQVIGEISGSDEYLVVGIDVAKDKHHAFMGTATGKTLYRRLIFENSRIGFVRLLEQVELICSQNGLQKVVFAVEPTGNYHKPLSRYLVDSGSHLVLVTGKAVKNNREVLDGRWDKHDTKDAANIADLASRGRCQYYDRPSEKIIELRDLLSLRRRLKKEEHGIRVRIRNTLLAKYFPELDRFFNTGRGESLFIVKWCPNPAKIAGMPFDRFFRMVTRKEQGLAQKLRLMKIHQLAGESIGCPMGEAAEFEAKLLVDKLDQIRQDIGAVEKRIKEISEGFAEYRYLLTIPGFGPYISSVVLSAIADPRRFDNAKQVLKLSGYDLCADRSGKRSSEAVPVISKRGSSELRYALYQAAHIASVMNRYFKAYFTGLLQGRQKERGILTKMRVKLAAKMLVIAWAMMKRKEVFDPGRLNIV

SEQ ID NO: 275152 - protein, 391 aa, unidentified
MFYVGIDIGKETHEASTIDEQGNLQGRSIRFSNTLTDFQRFLAWLPQSPVKLAMEATGHYWLPLYEFLREKDFEVTVLNPLQTEAYRRGKIRKTKTDKRDSLIIADLLRTRAISPRYIPDEWIHQLREITRFRFGLIDTVGDLKRQILCTLDKVFPEFESLFSSPFLKLARDLLKDGTMPEELAEMDLSELSQMLSSSSHGHFGIQKAQAIKSTAASSVGVSYLKDSAKVQLRCLLAHLEFIQSQIEEVDEHIRQLMVQKESFLTTIPGINQVLAATITAEIGDINRFESPAKLAAFAGIDPTVFDSGKFSGTKMVMSKRGSPYLRRALWIASATARRFDPELYAFYQRKLAEGKHPNSALGAVCRRLLNRVYSIVKEQRPYQPKTGGLPY

SEQ ID NO: 275153 - protein, 315 aa, unidentified
MRDVPCFIGLDVAKAQVDIAVRPSGERWAVPNDASGGMTLVDQVHALPPTLIVLEATGGLERAVTSALATAGLPVVVVNPRQIRDFARATGQLAKTDALDARALAHFADVIRPAPRPLPDAQTQELRALLGRRQQLIVMRTAAQNRRAGTSARLTKDIAAHIAWLNADITTLDNDLETLLRASPVWRENDDLLQSAKGIGPVSAHTFLLELPEWGTRTRQEMSALVGVAPLTCDSGTLRGKRTIWGGRAHVRTVLYMSTLVATRYNPQIKVFYERLLTAGKVKKVALTACMRKFLTILNALLKHRTPWQPQEVQS

SEQ ID NO: 275154 - protein, 478 aa, unidentified
MTPVYMGIDASKGYADFALVNDQQIPLAKGFQLDDTADGHQQLITYLQQFVSTHPDVTVFAALESTGGYENNWYRCLASLFGHLPVRVARVNPARVTFNNKANAKRNRTDQISAHDIAEYLATHADKVIYNEPAELAQLRRMWSHIQLLTKQQTQLLNHLQSVLYSSMPELLTFCRNHMPHWLVQVLATYPTYYQIRQALLTEFPFVSERKAHTVLARIERGIGDDDIVSGSIISSVATQILHLDQEIKRAKQQLEKSCQHHDELVTLLRSFKGIGTYTAVGLLVYIGDISRFSSAKKLAAYFGVHPIFKISGDGTCGFRMSKQGAGAVRSLLYMVVFSATRSNPIIRELYARCRKKGMKGSAAFGVCMHKVLRIIYGMLTHKTPFDPELHRRHQERTRQHPAPTPRISNVQRREYDQLAPISRRQHKKRKEQTLSQDEKLVKCGITQSAPSLFGVDNTMITNPTSRINKNTKIKNST

SEQ ID NO: 275155 - protein, 349 aa, unidentified
MAMLADTADAVIGVDTHTDTHTACLLDRLGRQLAVITIPADDRGCRMLLAWAQRTAPGPRLAWSVEGTRSHGLGLTRYLHAHGQLVAEAGRPARASRRPGGKSDPADAARAARDALSAQRLAQPRSDGSREALRILLTARAQATTARTAAVNTLKALILGAPDDLRRQLRGLSTPRQASRCRSLRVHASQPIAERVLRAELRRLATHIGGWDKQLRANKAQLRQLVAQAMPVLLEQPGVGPMSAAQLLVSWSHKGRCRSEAAFAALAGVSPLEASSGRITRHRLNRFGDRQLNRALHVIINWRMLHHTKTQDYTTQRRAGQKTDPEIRRCLKRYAARQLFRLMETAATT

SEQ ID NO: 275156 - protein, 449 aa, unidentified
MDERKGKKMEPLKVKRPNSAGVDVGSQTHYVAVPPDRTEEAVRHFGCLTPDLHEMARWLKACGVQTVAMESTGEYWIPVAQVLEDHGLEVCLVDARHVKNVSGRKTDVKDCQWLQELHSYGLLGEAFRPTREMGPLRSYWRQRSALVEGCSQQIHLMHKALEQMNLQLHKVISDVTGVTGLKIIRAIVAGERDPGILAQMRTEKMKSSEETLVKSLTGHWREEHLFLLKQAVELYDVYQGKVKECDREVERYMATLGPKNDDGTPPTNRKRRKNEPHFNLGAELQRMTGVDLTRIDGISALTAQTVITEQGFDMSPFATEKHFASHLGLCPNNQITGGRVKKRRSRRVTSRAATALRVAALSLHRSKTALGAYFRRMKAKLGAPKAVTATAHRLAVLIYRMLKYGQNYVDVGQIRYEEAYKRHVADNLKRQAKRLGYTLVVAGTGEIVS

SEQ ID NO: 275157 - protein, 408 aa, unidentified
MQVTFGIDVSKSTSTVCELIGESKNELTITNNRPGFIQLLHELTAFSKHPQIIFEATGVYSRRLQSFLEDYGYDYVIINPLKAKKEMDMGLRHNKTDKTDAYHLALIQRLYRHPVNQSESQTYKQLNALSRFYDQLTSDLVIAKNRLHQALQSTFPEIENLFSIARGKNYWQIVARYPHCDLVRKDDKKQIINWLMKLKGIAFNHAQRTTDKLIELARLAYPVVSCSDIEVQQAQYYARRLLNLSNQRQRIITKMVKLAKTLPNHDLENLESIPGFAQTTAVRVLAELGDLRRFSNPNKINAFIGIDPGRYQSGEMDSNLSITKHGNAVARKLLYRAIGQIDNAAKTNPCHIADYYESKKLSSQTKGFKKIAIASIHKLIRTIYALIINDQPYDYNVATHNQKDFSRN

SEQ ID NO: 275158 - protein, 313 aa, unidentified
MDTHPFVGVDVSKGRLDIGVGEAGDFWQAGNTEEGIQAIVQRLAQMQPALVVVESTGGLEWPLVSELAARRLPVALVNPGRVREFAKALGLLAKTDKLDAHLLARFGEAAKLQPTLMPDEAVQKLSALMGRRRQLLEMLVVEKNHLLSSRLSLRAGVHAHIDWLQAEIDQLTQQIQHDLQETPGFRDKDRLLRSVKGVGPITSLILLSDLPELGQVDRKQIAALVGVAPFNDDSGTRRGARRIKGGRGSVRHVLYMAAVAAARFNPVIRTFYQRLVAAGKKKKVALVACMRKLLTILNAMIRDMQPWKDPIPA

SEQ ID NO: 275159 - protein, 402 aa, unidentified
MSTFFAGLDWASQVHVVCVIDEHGTIETRFELTHDADGLRELARRLAAFGSIAVAIERPSGLLVDALIAAGFTVVPIHPNAVKASRPRYRSHGAKSDTSDAYLLADLLRTDGHRFKPLVPHSDPIRALRALVRGRDDLVATRVQLANQLRSLLESFWPGAAAVFAEIDSPIALAFIDRYPTPESASHLGPKRMAAFCGQHAYSGRRSPEALLQRLHAAPTPLGSDMESEAKGELARCLGRTLARLVEQIRLLSSRIEHHVADLDDGQILMSFPRAGRICAAQILAELGSDRQRFASDQHLAAEAGVAPLTYQSGKCKAVTFRWACNHRLRAAVTCLADNSRHASSWAAHVYAQARARGCDHPHAVRILARAWLRVIWRAWVDHKPYDPSQHRAAQRLQLARG

SEQ ID NO: 275160 - protein, 408 aa, unidentified
MQVLYARCAGLDVHKDTIVACVRCVSPPMHQEVRSFGTTTAELLKLADWLAEHDCTHVAMEATGVYWKPVWHVLEDEFELVLANAAHIRNVPGRKTDVNDAMWIADLLAHGLIRSSFVPPQAIQQLRDLTRTRKQLVREVSQHSLRIQKVLEDANLKLGSVLSDVLGKSGRAMLDAIVAGETDPACLAALAQGTARNKTAELREALRGRITDHHRTMLRLHLQVVDTLQRTLAELDAAVGKALAPIQQRARLLTTMPGISDLTASVVVAEIGVDMSRFPTAGHLVSWAGLCPRSDESAGKRRSNRVRKSGTWIKTTLVTAAWAAVRVKTSYLRAQFLRIKARRGAKKAILAVAASMLTAAFHMLRDGTEYNDLGSEHFDRQDKSKTIRRLLKRLQDLGCDVPELAHAA

SEQ ID NO: 275161 - protein, 359 aa, unidentified
MEKITRVGVDLAKNVMQVHAVHAVDAADHVIVRKAITRERFVMWFANLEPCLVAMEACTAAHYWARKLRALGHDVRLIPPQFAAPYRKGGPHVKNDAQDAEAICEAASRPQMRFVPVKSSAQQSVLVLHRMRTGFVEERTALVNRLRGLLAEFGVFLPQGIRTLHQHFVDRLEDASNELAGPAREALMRGWAQCQALDQEIAWLDKQIAEHASHDPQARRCMDVCGVGPLTASATVATIVDARQFKNGRQMAAWIGNVPRQNSSGGKQRLGRITKQGSDYLRTLLYQGARSAILTALRRVDRLSRWIVQLQARVGYYKTLVAVANKHARILWVVLAKGEKFDPSHVYIAPHAAIGITNT

SEQ ID NO: 275162 - protein, 411 aa, unidentified
MVRNDTVGRDTPVIAGVDTHKDTHYAAVITSTGQQLEAAPFPATPAGYRALTAFITAHGPLARVGVEGTNSYGAGLARHLIAAGIEVVEVLRPSRQVRRMRGKTDQIDAYAAARTALSGTGCSTPKNGDGLVEAIRVTVVARSSAIKAGTDTTLQIRDLLVSAPDTLRSQFRDLSGSALINMPARTRGHESDDRLTGLTRATLRTLARRIGMLDAEIAGHDRTLRRLVAEANPALLQAKGIGVICAAQLLIAAGDNPERIKGEGAFAMMCGAAPVPASSGKTIRHRLNRGGNRRANSALYHIAVVRLHSDSRTRAYAARRRAEGRTTKEIIRCLKRAIAREVYHLITNPPQPLDTTELRPLREAADLTLAQAADALKCAISTLSTIERGHSSNRQTITTYRDYLTHHQHAA

SEQ ID NO: 275163 - protein, 384 aa, unidentified
MPRYIGLDLHKMYVHGCEWTPTAPDRHKARHFRFPNTEAGWASLLNEVDCTCLVALEVTGSAFEAYDRLSPHVGRVLLANARELKRLGSKRHSDRVDAARLAKALAMDLVPAVWVPPLPMREVRRLLHYREGMSRHRRQCISQAKRVFQRHGILLPPHSDIHHAAATYDLSLIPAGDRVILASALRRAADLEAEILTIESAIAARLEMVPEVRNLLTITNVGLIAAATIWASVGDPCRFTDPKQLGRYAGLDPSFVQSGETLCPGRISKNGNTLLRTVLVEVALGLARHDTGALGQFYERKKTKIGPKKAAIALARKVLIVAWRMLLTGEAYRATKPLQLARKYRLLERLAHYVAPCGVAPTPDIPDAHQRFTRLRHARTRVPA

SEQ ID NO: 275164 - protein, 348 aa, unidentified
MSALRRVVIGADTHLDTNHLAVLTDTGKPLADAEFPTSPAGYDDAVRWAQSLGTICIAGVEGTSSYGAGLTRVLQAAGIEVAEVSRPDRAARGRRGKSDPLDAYAAARAALAGDRLAVPKDEHTTALRALLSARRSAVKAHTAATNQLHALLVTAPAELRERYRRHHITALVAALAQCRPATQGDPTSAAVLTAAKALAQRVKFLEQQRQDLTAQLDGLVGQINPALRAAYGVGPHTAAQLLVTAGTNPHRLRSEASFAALCGAAPVPASSGTITRHRLSRGGDRAANNALYRIALVRMSSHSQTRDYVERQVTKGRTKERDSAAAQTRHRPRSLPPAHPARPGRRLP

SEQ ID NO: 275165 - protein, 398 aa, unidentified
MVGPVTHANVGYTERSSRTVQSQYREDWSVCDPTRIRFVGLDVHKETIALAVADASLPAQALGVIPNDFATLLKTLRRLGPPESIVCCYEAGPTGYGLYRQLRAAGYTCHVVAPSLVPVQSGCRIKTDRRDAAKLAHYLRSGDLTFIYVPDEVTESVRDLERARDDAKIAERVTRHHLSKFLLRHGRIYAGKTSWNPAHMAWVAQQAFELPAERQVLADYREAVELAGARVVRLTARMGEALETWERAPLVKAFQALRGIDMVSAVTVVAEVGDFWRFAKAGDLMAFVGVVPSEHSSGGSRRQGRITRTGNSHVRRIVVEAAWHYRRQPRMSKAIRLRNDLVSPGVRGIAWKAQKRLHGRLNRLLGRNKPACQAVVAVARELVGFLWAISREEVLLAG

SEQ ID NO: 275166 - protein, 355 aa, unidentified
MTRLADTVDGVIGVDTHRDTLAAAAIDPVGGTLGQTAAATDLAGYQRLLAFGQAQVPGRRCWAVEGAGSYGAGLTCFLQARGEWVVEIGRPKRPVRRTGAKSDALDALRAAREALACDHLVLPRRRGDREALRVLLATRHSACRAKVAAINQLKALIIGAPEELRAELRGLGTKRQITRCARLRERPTRSLEHRMTVRVLRCTAQRIRLLAAEAAGLRAELERLVAAIAPWLLELAGVGPISAAQVLVSWSHAGRLRSEAAFAALAGANPIPASSGQVIRHRLNRGGDRQLNRALHTIVVARLRDDPSSRAYAARRRSQGKSTRDVRRCLKRAVARQLFKLLEGHDQAVVEILRA

SEQ ID NO: 275167 - protein, 357 aa, unidentified
MSTTYYIGADVHSNSIEMAIQNRKKIVKRYTIPASISAASQVLDSLQGKKHMAIEEGPMAGWLYRNLRQKVDSFVVADPRRNKLISSDGDHDDKIDSAKLALLLAGGYLREVYHSDDDRRVELKHWVGLYHDRIRDAVRNINKIRARCRMHGLTIPRKVLRQPEHRAAWLSKLKNPVLGKQLLMLWIGYDATAQQAHIAKQHLINLSKKYLIIRLWKNLAGIGVIRAVTIFAFLDTPWRFKKKNKLWKYCGVGLQRTASGTDKKGKPKPARLQLPWASNRILKNAILGAALSAINQKQNTFKSDYERMVQNGIIPSNARHTVARKILTVMWGMWKRSYQFDPAIATLSKPAEQCVCM

SEQ ID NO: 275168 - protein, 451 aa, unidentified
MGNSKTRANQSIVVKQEATQRIINVAHVSAIGIDVHLDLLVCAYQASTEGEIITEVRNFGTSYSQLKSFASWCAERQPEIVLMESTGVLWQSPYAALEAHGFTNDRLALVNARDVKAAMGRKTDREDAIRLAEFARMGRVRKSFVPKPVFREMRLLARLFQKAKNDLARKSNRYQKLLNAAGCRASTVFSDVVHGKAASRILDAFLWQSPELYAIVQKESKRLRASPEEIMDALHAQVPPVLVEQLREERLAINHEADYCDCTMGRLKNLQKPYEPFIKLLCTIPGIQETSARLIFAELSDDLEQHFRDSEHFASWMGLCPGNHLSAGKSYSSKTPKGNKWLRRVLTECAHGIALSRKGALWARFTAYKLRRGTKRAIIALAHKLALIIYSCMTSGECYVERETTALRDVCKNRLANAHKLYQMHGQEVRKQAVRPAISRRDTGATQVAVC

SEQ ID NO: 275169 - protein, 362 aa, unidentified
MAQVRSWAGLDVHARSVLAVTVDAISGEMRTRRLPGTTSEVVEFCSGLPGPMRVAYEAGPTGYGLARALHAVGIGCVVAAPGKIERPSQDRVKTDQRDAERVLRLLMIDGLHPVRIPSTEEEALRDLVRAREDLRGDLMRARQRLSKLLLRHDILYEDTASAWTARHRAWLTTIDLGAGGAQATLLDYLGAVDTLVIRRDILEATISGLVPDSPWAQTVARLRCLRGIDTLSAVGLCAEVGDFDRFQRPAKLMSYLGLVPSENSSGETRRQGAITKTGSGHARRLLVEAAWHYRKLPARGAALKRRQDGQGANIVAISWQAQQRLHRVWRRLDAERAKRRTIVAVAVARELAGFCWALARAD

SEQ ID NO: 275170 - protein, 455 aa, unidentified
MARKRKQDRAGKQVVMPVMRADAAGIDIGATEIFVAVPPDRAVENVRSFPTFTQDLYALAEWLTQCGVKTVAMESTGVYWIPLFQILEERGFEVYLVNARHVKNVPGRRTDVSDCQWLQFLHSVGLLRASYRPEPEVCAVRSLLRHRESLVQMAATHVNHMQKALDQMNLQLHHVISDITGQTGLAIVDAILGGERNPQVLAELRHERIKASAEVIAKSLVGDYRPEHLFTLQQSLMAYRSYQQLIADCDREIRRALETFHPPDPTQASANDSAAASPPTKKLSGDGVLRSELQRAFGVDLTQIPGIRTGIAQTLFGEIGPDFSKFRSASAFASWMGLCPDNEISGGKVLWVGTRKVNCRAATALRMAAQSLHHSQSALGDFYRRMRAKLGAPKAITAAAHTLARIIFHLVTTRQEFAARHFAADQLRFQKRQEAKFRAKARALGFQLVPLEQTA

SEQ ID NO: 275171 - protein, 410 aa, unidentified
MGEGMVAGIDWASEVHVACVLDGHGAVASRFSFTHDGPGIAAMAGRLRAADVAGVAIERGDGPVVEALMEAGLAVFVVPSRQIKGLRSRYGSAGNKDDRFDAYVLADTLRSDGHRWKPLRPDTDPTRALRAACRSRKDLVETRVQVLGQLRANLELAFPGAIGLFTKLYSTISLAFLQRFPTAAKAAWLSPKRLASWLRSMGYTGGVSARILHDRLAAAAPGLAGAEGEARGQITLALVTVIGTLNTQIAALDAEIGRLFAAHPDQHIFASLPRSGTIRAANLLAEIGDCRQRFPTDDALAALAGACPSTRQSGKRTPGRVPLVLQQETPCRGDGLRQRQPHGRPLGHRHLRRRDRPRLPALARHPDPGPRVAAHHLALLAGRHRLRPSPPPQPPLDIGHSYVKRRSDAA

SEQ ID NO: 275172 - protein, 454 aa, unidentified
MARKRKNGVKSSPEPLVIHPNAAGVDIGATEIFAAVAADRDEEPVRSFPTFTQDLNALADWLQRCGITTVAMESTGVYWIPLFQILETRGMDVCLVNAHHAKNVPGRRTDVSDCQWLQYLHSVGLLRASFRPAQEVCAVRTLLRHREGLVQMASGHIQHMQKALDQMNLQIHHVLSDITGVTGLAIIEAILSGEREPKTLAKLRDWRVRASEEVVAKSLVGDYRREHLFTLRQSLVAYRQCQQLIAECDKEINRGLETLPSAADSLQAPLPPAKPVSKKRRGGEPEYDLRAQHYRILGVDLTQVPGISSLIVHTILAEVGPDFSKFRSASAFASWLGLCPDNDISGGKVLWVGTRKVNNRAAKAFRLAAHTLHHSHSALGDHYRRMRAKLGPPQAITATAHKLARIAYHLITTRQTYDESVFARDEEHYKKRTEARLKAQARALGFQLVPVEIG

SEQ ID NO: 275173 - protein, 406 aa, unidentified
MNAVGIDVSKGKSTVAVLRPFGEIIVSPFDVSHSPKELSKLVTLLKTLNGDTRVVMEYTGNYYLPIALFLRNNGIFVSVVNPILVKDYGTKSLTVRKVKTDKKDALKIASFALDRWNELSPFSAQSEARLLLKSYNRQYNQYNKLKIILKNNLIAILDQTFPGANTLFSTPARKSDGHEKWVDFVLKYPHSECISKKSFSFFLKSYLSWCRKLGYKFSESKARAVYDFACNCSPSLSFSNGSALLVSNAISQLNSINETLSSLASEMNKIAATLPEYDTVMSMFGVGSVLGSQLIAEIGDVSRFFNKKALVGFAGLDASPFQSGNFNPQSRPISKRGSAALRKTLFQVMSVVLQRAPTNNALFQFIDKKRSEGKHFYVYMTAAANKFLRIYYARVTEHLNSLKTAA

SEQ ID NO: 275174 - protein, 377 aa, unidentified
MHKVRHLGFDVHAESLVVALAEPSGEVRRVGEIPNRLDALRRLVKRLGPPSALRACYEAGPTGYVLYWQLTALGVHCDVVAPTLVPTKPGDRVKTDRRDAVRLARSYRAGELTPVWVPDAAHEALRDLVRAREAATQDRLRARHRLSKFLLRQGQRPPPGVRPWTQKYRTWLQGDVHFEQRAQELTLLDYVGEVDHADARLERLERAIDEVVAMAPVAIRAVIEALQALRGIAKVSAVTIVAEVGPLSRFACPRQLMGYGGLGSQEYSSGPRVRRGPITKTGNAHLRRIVVEAGWAYRHAPALRGKLKQRQQGLSPTVREIAWKAQHRLHARLRKLLGRGKTKQQAVTAVGRELLGFIWAIGVAVEHELRDAARRAA

SEQ ID NO: 275175 - protein, 348 aa, unidentified
MKRNITIGMDLGDQKNVVVAMDETGKEIETKTIRNTEPTLRKFFSRYCDATVAIVAGTHSPWISRLLKEIGCTVYVGNPRKLRIIWDSNDKSDLRDARILAMVCRVEPRLLWPIKHRDRQAYADLGIIKARDTLVQNRVRMINHIRSVTKTSGCRIPKCSTPSFSKRAPDYIPKELRGPLDPLIITIDHLTRQIKEMDRQINKLCKKYPETEKLLQVPGVGPITALAFVLTIEDPHRFTKSRQVGAFLGLTPKRDQSGKCDKQLRISKAGNTYLRSLLVSCGHYIIGPFGPECDLRKFGLSIVLRGGKNAKKRAAVALARKLAVLLHRLWISDQKYNSFYSAVANTAA

SEQ ID NO: 275176 - protein, 473 aa, unidentified
MRRLLGIDLAITAENRACITDETGQVIAERGFGRTRSELESLHEVATDGMNEGDELVVVMEPTANAWVAPAALFSSKGAVVHLVPPEQSADLRRYYAKHVKNDRIDAKLLARLPLLHPEGLHRARLPEGARGTLRRVVARRARLSAECARHRCRIRSLVQLSMPAMPAALGEELGKGALAVLGRYGDPRSLLRLGRARLTQVLIKATRGAWRAERAEQVLGAARDAVELWRGLQGCDFAEVAEDLASEVRLIRALESELRELDVRAAGLLDEIDPAGLHRSMPGFGERTATTVAGRLGDVSRFSGASKVRSFAGVIPGTNQSGEAESRPHLTKAGDRVLRHALFMAAETARRIDPQLAAIYHRQVIERGSHHTKAVCAVATALATRLVAVLRDGRPYEIRDTDGTPVDARDAKTIIAERFSVPPDIRAARRQPRSAQRMKGRLVHGIRSKASPPSPPVDEASATDATRVLIGG

SEQ ID NO: 275177 - protein, 345 aa, unidentified
MELHTIGIDLGKTVFHLVGLDLRGEVVVRKKFSRTQLLRFTANVHVGLIGMEACGGSHFLGRALREQRHEVRLIPAQYVKPYVKTNKSDYIDAEAIAEAVARPTMRFVPIKTDDQLDMQSLHRVRERWVMRRTAVINQIRGLLLERGITLRKGRHHVHAALPLILEDADANLSGAVRLLLTQLKLDLDQLSVRIDEADAVIQKTAHENEACRRLVAIPGIGPVTATALIAAIGNGGAFHKGREFAAWMGMVPREHSTGGQQKLLGISKRGNSYLRRLFVQGARAVLLQRTKQSSGLSAWLAQLTSRTHRNVAAVALANKLARIAWAVLAKNEQYRPAVVPDVAAA

SEQ ID NO: 275178 - protein, 336 aa, unidentified
MYSGIDLHSNNSVVVVIDDADRVVAQKRLANDVTKIVGFLARWKDELAGVVVESTYNWYWLVDGLQDAGLHVHLANTAAIKQYDGLKHSGDETDAQHLAHLLRLGILPTGTILPREHRAVRDLARKRMQLVHSRTTHVLAVENIMARQLGGRMTSNQIKRLTAAAIDKLPLAADVGLAIKTNVAVIATLQAQIEVVEKRLQERVKPRPQYGFLTSVPGIGQTLATVILLETGPIDRFAEVGNFASYARCVDSLHTSNRKKKGEGNVKNGNKYLAWAFVEAANFAVRFCPEAKRFHERKKATTNNIVATKALAHKLARACYHILKEGKPFDVTRCFA

SEQ ID NO: 275179 - protein, 331 aa, unidentified
MNYIGMDIHKQFTVAVVKDEQGNKLNEDKFTNSEENFGSFMEQYKPEETKIVIESTCVWEYIFEILEAKKYEVKLANPSRTRAIAEARIKTDSVDASTLADLLRANLIAESYIPPKEIRRLREITRERRTFVKQTTQIKNRIHAILIKRGIELGYATLCNGAILWMREKLSNEKIVLHYLDLLEYHEQKLKEIDKSIAEKSYADNNAKLLMTIPGIGTTRSLDIIAEIGEISRFPTADKLCSYAGLVPSIHQSGNTLRFGKLVKQSSKTLKYTLVETCWNIVRTKESNPMQEFYKKLVKKKGKQKAICATARKLCCVIYAMLKNQEEFRYL

SEQ ID NO: 275180 - protein, 341 aa, unidentified
MFIIGIDPHKGSHTAAVLDCHEQLVGELRVCADRSQRDRLLAFAQRFEPHVWAIEGATGTGALLAQQLVGAGESVVDVPPQLSARARLLDSGRSDKTDAHDARSAAMVAMRHRGLRAVGVEDHIAVLRLLAKRHHDLVARRTQSICRLHAVLCVLVAGGLSRNLSAARAASELRRVRGADAVGLERRRVAHELLGEVRRVDAELSALKARITVAIAASGTRVTDVFGVGPIVAAYLLGYSGDVARFASAGHYARYNGTAPIEASSGAKARHRLNPRGNRMINYGLHMAAVTQIRNDTPGRAYFERKVAEGKTKKEALRALKRHVSNAVYRQLLTDAHRCRS

SEQ ID NO: 275181 - protein, 415 aa, unidentified
MKVHRNCCGLDVHKQTIAACLIHEDGIGNTCKEKRLFGTMTRDLRELAQWLRGAAVSAVAMEATGVYWVPVWNVLEREGLHLLLINPEHYKAVRGKKTDLKDGERIAELLQDGRLEGSFVPPTQLRILRDLTRYRVKLVEHQSSVACRIQKLLEQCNIKLGSVASNVLGVSGTAMLQALASGETNPERLADLAKKQLRKKIPQLRLALDGHLMPHHRFLLRDMLDELAHIEGQLERLETEIEVQMQPFQKTLQAWMSIPGVKHRVAWTLVAEIGPDVQPFPSPAHIASWVGVCPGNNESAGKRKSGKTRKGNRWARRALCEAAWVAAKAKKSYLAAQFRRFAATRGSKRAIIAVAHTILTIGYHMLQRGTTYQDLGANYFDQRHILRTTKRLVKRLEALGHRVILESPVLGPQAA

SEQ ID NO: 275182 - protein, 313 aa, unidentified
MNIPKVHAGLDISKAFLDLAFLTPCARGALRFPNNPRGIASLIARLQSHGGDLHVVVEASGGYERAVVNALHKHAITVSLVFAGRVRQFARSSGILAKTDAIDARLLARYGEAISPRPTPPADPQVAALGELERQRRHLTVLCVAEQTRLHQLTEKTMIKAQKQLIALLKRQVSSLQARIKDLIEQSAPLRTKAKVLTAFQGVGPCTCASLLALMPELGSLNRAEAASLAGVAPFNRESGCWRGKSMISGGRKALRCALYMATLSTIRFNPLLRDFYQRLRSKGKPSKLALTAVMRKLIIALNASLKPPFSTS

SEQ ID NO: 275183 - protein, 367 aa, unidentified
MSRMKRLAVQQLDVSKDYLVIGLDLAKTDTAVIAITTDGELYAIDRLKYSDLLNQARQLGSTVFAMEPCNGMTYLVHELEELGHECRVINGEAVKDYVKSHFAGQKNDLNDAQAIAFLAQDEMLKFIRVKAKSEMTMQTLQVVRQQLIKQRTCSVVCIKGICQNYGLVISKSIMSEAKIRPIIEETQKLPDEIKEPLKRLLRNAARFTIDIKQIDKAIEQGLKGNETTERLLEVPGLGPQCVSRLLTTIGDINRFEGPKNLAAYYGLVPRSHITGHNEKMGKITKHGDRLMRAFLVQGAHAVLIQHTKGRLPKSALKKWIDKKLSAGMPCSKLSIALAAKLLRIAFAVLKYKKKFDIKKAGVARCSL

SEQ ID NO: 275184 - protein, 345 aa, unidentified
MGAAGVRFLGEIASSPVRVERLVGKLASRYDKLHFCYEAGPTGYGLYRQIRELGHDCAVVAPSLIPKRPGERIKTNRRDAVTLARLLRAGELTAVWVPDAVHEAVRDLVRARAAAAQDLRGKRQQLLSFLLRHGRIFSGRQHWTLAHRRWLAEQSFAHPAQQVVFQDAVEAIAEALARLQRLEQQLVAIVPSWSMAPVVEAYQAMRGASFLVAVTFAAEIGDVRRFDNPRQLMAFLGLVPGERSTGETIRRAGLTLAGNRHARRVLVEAAWSYRHPGRVSPTLRARLEGLPKPVRDTAWKAQVRLCARYRRLSAAGKKLPVVIAAIAREMAAFLWAIARHVAPAV

SEQ ID NO: 275185 - protein, 427 aa, unidentified
MRDIALDVHIDFCEVAIAEGGEVRSAERIAAKPEELALFAQSLGREDRVALEVTGNAWAIKRIIEPHVAEVIVVSPTDTGIRGARAKTDRLDARILAKLLAAGELDGVWMPDRNTQVMRRRLGRRTQLVRTRARAKNEIHATLMRCLVGRAPFSDLFGKRGGQWLAGLELPAEERESVDAALRQVEFLDSEIAAVERLIAAEALESAEIKRLMTVPGVNVIVAATFMGAIGDVRRFSSPRKLVGYLGLDPRVSQSGSSPATHGRISKQGSVSARHALVEASWSVVRQPGPLHAFYGRIRARRGHSVAIVACARKLACLFWFLLTREEDYAYAQPSLTAKKLRLLELRAGAPTRKGILSGTWPTRQRMRAAEQELAARAESAYKRMVAEWQRTQAKQSKGAGATPGRASSGPSSGQAARQDEAPSPAL

SEQ ID NO: 275186 - protein, 291 aa, unidentified
MDIAVLGIDLGKNVCSVVGLDASGAVVMRRKVRRETLIAVVAKLPPCVVGMEACCGSHHLGRLFAAHGHDVRLMSPEYVRPYVKAQKNDDRDAEGIAEAATRPTMRFVGLKSQDQLDVQTLHRSRDRLVGERTALINQLRSILLERGLVAPQGKRKLEQFLAVLMNEQGGAGLSPRMVALVADARTQWAGLDRRIAAFDAEFVCWAKENEDARRLTTIPGIGAIVATALVAAIGRAEVFDRGRDLSAWLGVVPRQFTTGGKPKLLGISKRRQYISPQAADPWSARGVASCS

SEQ ID NO: 275187 - protein, 278 aa, unidentified
MKSFIGCDAHKRYSVFASINEAGQKGADVRVANNRALFRQFLSQLPPGPVIALETVGNWYWMVDEMEKAGHAPRLAHAAKAKLMMGQINKTDKLDAHALALLLRNGTLPTVWIPPGELRDQRELPRMRMALVQMRTKFKNRIHATLDKYALQIPDVSDIFGMIGRLILRNRLRELSPYTRQSVETQLELLDQVENHIRLCEKNIEEVVKKTPTMEPLMTLPGVGYILAVVMELEIGKVGRFLSSHHLASYAGTVPRIKEGGGKSFQGKVRPDVNRYLN

SEQ ID NO: 275188 - protein, 413 aa, unidentified
MRLFVGDDWAEDHHDVELMDAGGRRLAKARLPEGVAGIARLHAMIGEQLGEDADEDDAGQVAIGIETDRGPWVAALIAAGYTVFAVNPLQASRYRERHGVSGAKSDAADAHVLADMVRTDSHQLRPVAGDSALAAAVKVVTRTHKTLIWERTRCTQRLRHALRDYFPAALEAFEDLDAADTLELLARAPEPASAAKLTTAQISAALKRARRRGVAAKAERIQAVLRAAHLGQPDVVAAAYAASVRALTAVLITLNEQVKTLHGQVEAYFGQHPDAEIIASQPGLGGVLGARVLAESGDDPTRYASAKARKNYAGTSPITRASGKKKTVLARHVHNDRLIDALMSQAFTALRVSPGARAYYDLQRARGSGHNPALRQLANRLTGILHGCLKTRTLYDEATAWPQHPTATEKTAA

SEQ ID NO: 275189 - protein, 351 aa, unidentified
MAQRRAGVIGGVDCHSRTHHAVALDDRGQRLGDAEFPATLAGYQALHSWLAGFGAIEAVGIESTSSYGAGLTRWLTGREVRVLEVNQPHKHTRNRRGKSDPVDAEAAARKVLAGEVAVVPKDTAGPIESIRQLRVAREGALKARSAALCQLGDLIVTAPAELRESLPRKTVLGKARLCARFRPDPGRLAEPLHAAKFAMRSLALRIATLDEEIGRLDQALEVLVRQAAPRTTSLLGVGIHHAGQLLVTAGQNIGRLRSEAAFAHLCAANPIPASSGLTRRHRLNRGGDRSANRTLHMIAVVRLRYCPRTQAYAARRTAEGLSKREIIRCLKRYIAREAYRALIADLRQIDS

SEQ ID NO: 275190 - protein, 453 aa, unidentified
MCLEDRPVLEPNAAGVDVGAREMFVAVPPGRDEKPVRVFPTFTEDLERLTDWLEQCGVTTVALESPGVYLIPLFEILEQRGIRPCLVNARHMKNVPGRRTDWHECQWLQFLHSVGLLRAAFRPGQDVCAVRTILRHRNELVAAASQHVQHMHKALTQMNLQIHHVISDITGSTGRAIVDAILAGQRDGAELAKLRDPHIKADTETIRKSLEGNWRSEHLFTLGQSRDLYRIYQQQIVNCDLEIEKMLQGFAPRTDPVARPLPPDRKRNRAGIKRRRKNGHPRPEFDLRTEAYKLFGVDVSQIPGLEENALPLFSEVGRDMSRWPSAGNFVSWLALCPDNDISGGKLLWRGARKVKNRAGHLFRMAAYALHRSPTPLGNYLRRMKAKLGPQAATMATAHKIAVIFYTMIKNQVEYDETIWDARDAQREKRLEAKLKRQAKQLGYQLVPIEPKAA

SEQ ID NO: 275191 - protein, 368 aa, unidentified
MKTIESISSSSNNQASLADDVNRVLKLGLDVHYRQVTVAMQEDGGRIKSAGKMGHADFLHWVQKKLEEGWQIYSCYEAGASGYWLHRELMKLGVKNLVVVPKAMGQGGKKQKTDKRDSGELCDALDRYLRGQDKALSVVAVPTEDQEQKRALIRYHRQIMADRGRCEARGKGLLCAQGIEVHGRWWHGDGWIEVQHDPRLKDWMKEQLIGWRNKILSTDEEQSALRERIAALAPAILPKGVGAYSAAVLHYEMRGFERFSNRRQVGSITGLCPGIHLSDGRGKEGSINRCGIAIVRWTLVEMVWRLIIWQPQYPPVRRLAAGLVKGKRAKKRLVVQAARRLAIDLWRLSTGQTTPEKLGLIMHNTSEK

SEQ ID NO: 275192 - protein, 335 aa, unidentified
MKNYQTIVGIDVSKLKLDVTLMQDALANQHHHFVVTNNEKGLKQMIKVIKAKKIELTTCLFCLENTGVYSMPVSFYLSNLKLEYWVVPALEIRRSKGIVRGKTDKIDSKDIAFYAHTHQHKLQLTELPEQAILKLKLLFTEREKLMRAIKLLDTTKENQSFLPKEILKETLSVNRKVLTLLKKSLKEIETKMMEIIKQNQTMKNQFDLACSVPGVGPQTATYLIITTKSFTAFSNWRKLACYSGIAPFEYSSGTSIRGKTRVNDMADKKMKSMLNMCALNCKRVDTEINQYYTRKVEEGKNPMSVMNAIRCKVISRVFATINRGTPYVDCKKYLN

SEQ ID NO: 275193 - protein, 344 aa, unidentified
MEKISVIGLDLAKNVFQVHGAGSDGKKRLSKKLKRSELLEFFAKMPRCLVGLEACGGAHEWARRLEALGFTVKMMAPQHVKPYVQGNKTDARDAAAICEAASRPAVPAIAIRTRDSQQMQCLHRVREGWMKQRTAVMNRIRGLLGEFGVAVSRGEKSLRLQVRQWQAEQALELPLVGRLMDESLDELDELDKRLAEVMAMLSQAHQADAASQLIASIPGVGPLSATAVISSFGRAQSFSNARKFASAIGLTPREHSSGGKQRLGGISKRGNSYIRKLLVHGARAVLWARMKKPDYADDWVVQLAQRRGHNVAVCALAAKNARRIWAILHSDKVFNPEHAKMASA

SEQ ID NO: 275194 - protein, 342 aa, unidentified
MKDTMIGVDLAKNAFQLHCASMTGQVKFRKKLTRLQFLKFMAEQLPTVVVMEACGSASYWAREMVKFGHEVKLIAPQYVRPFVKRQKNDMADAEAIVIAAQRPEMRFVEPKSEKQQARAVMFRSRERLVHQRTELVNALRAVLYEYGHTIPLGIRQLKRIEALLDEPNSDLPALVRAECRDMMAQIAEKTTRIEARTKRAAELAASDDMAKRLQTMPGVGPLTALAVEAFAPDMTSFRRGRDFAAWLGLVPRQHSTGGKQRLGRVSKAGQADIRRLLIIGAMSRLNWLGRRTIPEGSWLARMAERKPRMLVAIALANKMARAIWAMLTKNEDYRDPAWAAAA

SEQ ID NO: 275195 - protein, 342 aa, unidentified
MTPSPAPCYDLFVGIDIAATTASVAWMASDRKVSRALTIDQTPQGFTSLQQSLLTTGHLAQSILVVMEATGSYWMTLATTLAQAGFAVSVINPAQAHHFAKALLKRAKTDAIDAQTLAQLAALLRPAVWNPPPAIFVELYQRLTERESLMQMRQQLLNQLHALAHCSSVIASVHARMKHLVESLTKQIIEVEAELDEALTLDPTWAASARRLQTITGIGPLTAAWLLVTTLNFTLCDTVEELTAYAGLAPHPFQSGTSVHGRSCIGHTGNAALRTAVYLATLSAAQHNPVIKAFYDRLRAAGKPMKVARCAAARKLLHLAFAVVKNEEDFDPLYAHKQQKAA

SEQ ID NO: 275196 - protein, 378 aa, unidentified
MTRVFRSTMQGIRGLRAWLEAEQVSVAVMESTSAYWRTVWNGLENASFEVILANALAVKQMRGRKTDMSDAAWLAKIAALDMAPPSFVPPQDFRDLRLVTRIRAKTVARTTSVTASLEKLLEDTGSKLSSASSKLLTVSGRAILEAMCRGVTDPAVLVRLSKLRNVTGQELVEALECNIRPVHLVMIRHHLDLIDSLTRQVNRLDKTIKKLMKPYKKQVDLLDSIPGVDRVLAYAILAEIGVDMTVFPTEHHFAAWAGVAPGSHESAGKTQQAGARKGNRYLKAYLGQAARSAVLTKGTYLKAQFKKVRSTRGPSRAYTAVAHSIATEIWYMLTRNEPYADLGADYFTRTATPAQKARSQAYAETTLNNLGVKYIIEN

SEQ ID NO: 275197 - protein, 319 aa, unidentified
MLIGIDVAKADLVVATRPTVARWTVGNDASGVQTLVERLRTLAPELIVLEATGGYELLCVAALAAAALPVVVVNPRQVRDFAKATGQLAKTDRIDADLLALFAERVRPAVRPLPDADAQDLDTLLGRRRPLLEMLQAERNRLGQVFGRDKPLVKQRLQTHIAYLEREVGLADAELATLIRESPAWRERDDLLRSVPGVGPVLSVTLLAELPELGRLTRRAIAKLVGVAPLSRDSGTLRGRRVVQGGRASVRAVLYMAALCAAKRNAVIRVFYQRLLAAGKPKKLALVACMRKLLTILNTMARTHERWAVDHATPSLVPA

SEQ ID NO: 275198 - protein, 421 aa, unidentified
MPNIEIGVDSMVKENFIYVGIDLHKETHTAVMIDCYNQKLGEITFPNRPADFPKLVTKVKKCNTDGKEVVYGLENAYGYGRALAVWLIDKGYLVKDVNTAISHRQAKHRGAMYRKSDSDDAKAIALATLNMLDKLPDACPNDAYWSLGQLVHRRDNIMKQRTRLVNQLHEQLCIAYPSYKQFFNDISRPTALYFWEHYPSRKYLKGKSVEDLRAELVPVSHNKCSTKTCEKILDAIAGDKVKNNAYQDARDMVTLSIVSDLQHYDKQLAEVDKMLEQMYKMLGCTLTTIPGVNVITAVKILAEIGDIKRFSNANKLAQFAGIAPLHLSSSGKGKDVATKQGNRRLQATIYFLAIQMVQLSSKGTPRNPVVRAYYEKRKAEGKTSQQALICISRRLISIIYGMLKNGTEYRMPVVENAGEKL

SEQ ID NO: 275199 - protein, 329 aa, unidentified
MFTTQPIVGVDVSKDTLAVCHQVGAHVQHLEVANTPAGFRQLVRCGGATSLYVLEATGPYYLTMAYHLVAAGAQVAVLNPLVVKRFIQMHLGKGKSDRKDAQWLLRYGQQQATPRWQPEEAVLVECRQVEQVVELLIRQKTMVHNALEALQAQPVISPAALEHLRHTLLRLEEQVQQLETKLLTTVEARYPPEMQLLCSIPGIGRKTAAYLLLFAGGFTSFQNHRQLIAKAGLCPREFSSGTSVRGKARISKMGGALIRSKLFMCSWSARRANDACRLLYDRLVAKGKNGKLALIAVCNKLLKQAFAVVTSGVPYQADFTKKVVAPLAF

SEQ ID NO: 275200 - protein, 363 aa, unidentified
MNSVCHTELSSLEETHGQFNGGKADIKLGIDVHQDFYVVVMQEGGSNPKPPQRFHKQAFLLWAAKLKSRSAEVHAVYEACGFGFSLQRQLSQLSIHCYVSCPQKLDEQNKRVKTDSLDAKALCLRLDRFVRGNREALAMVRVPSEEEERSRAIHRQREQLVKVRKMLEAQGRSLMVNHGIEPVKNWWKRNNFAALPLPAWIKELLQNSQPILIALQQKISALTLQLQVAAAFNQPRGLGAMTSVMIDREIGDWHRFNNRRQIASYTGLCPGEYSSGHTRLQSCVTKHGNPRLRAALVELAWRLVRFQPNYSAVRKWKERLAKGTLTTGAARKKAIVALARQLAIDLWRIRTGRLSAEALGLEI

SEQ ID NO: 275201 - protein, 326 aa, unidentified
MDVAKATFDFCLLSGSGACLWRGQFSNDARGIERFFHQLRAHGWKFQQIHFALEATGVYGQKLIAALHQAGLAVSVLNPAQVKYFALSVLRRTKNDTVGAEIIARFCRERKPLATRALRSIETQLKLLVRERESRVVEQTRERNRAKKDPYQIELPKLIRRQRQQRLKQLQKEIAQLDAQIDSLITSDELLRTQRQLLCSIPAIAKLTAAKLLSELAGKEFQSARQLGAYAGLTPAECRSGYSLYGKTRISKIGNAFLRKALYMPAAVARRWCKPLQPWIAILENRKLHDLAIRGAIMRKLLHIAFGVLKHQQPFNPMLASIPKTV

SEQ ID NO: 275202 - protein, 378 aa, unidentified
MQPNNTNSPTILLAIELSASTWLVAARLPGLEKPHLHRIDGGDTVALLNLISSLQARVARRLDATISTVCCFEAGRDGFWLQRLLTAQGVDTHVLEPTSILINRRARRAKTDRLDAVGMLRVLAAFLRGDRQSCSMVRVPTPDEEDAKRTHRERESLVQERVRIDNRIEALLFTQGIRKRPSLRSWDRDLAVLRTGDGRVLPIHLRSELDRLRRRLVMTLELIREVESERDEAAEATPQNQTCLKIAALGRIRGVGDNFAAVLTREVFYRSFDNRRQIASYVGITPMPYQSGSMDRDRRISRAGNPRARTTMIQLAWLWLRYQPGSELAEWFRNRVGTLAGRTRRIAIVAMARKLLIALWRYVETGVVPAGAEIRAEA

SEQ ID NO: 275203 - protein, 424 aa, unidentified
MKVTYPTCCGVDVHKSFLVATIIKTTGGIEPSYQKKRFSTFNNSILDFKSWLLENECHDVCMESTGKYWVPVFNLLEDQINVTIANPKWVKAVKGNKDDTKDSKWIGDLFRLGLVKGSYIPCKSIRILREYTRYRYKLVSCRSSEKNRYQNALTVCNVALDSVVSDIFGKSSSSIIDYLLEQSGTTINHEEIASKLLKRLKSKEDVVIESIEGYQMTDAQKYRMRLVRAHIDYITAEINDVDKQIESLISSVPDYVKAIRFLTTIPGVKHDSAITIISEIGIDMSQFCNSKRLCCWAGLTPGNNESAGKKKSVRITRAGVYLKPALVQCAHAAVKSDKSPYYKKKYESLVKRRGKKRAIIAIARMILTAIYQMLSTGEVWNPSDLYKIDMPAPLVERQKAKAIKQAKKLLQKEGLLPPDEPLAS

SEQ ID NO: 275204 - protein, 417 aa, unidentified
MFLRGARRTPVLFVGDDWAEDHHDVEVVNDDGRRLAAKRFPEGVSGLAGLHALIADHLPDDADPADVVIGIETDRGPWVQALIAAGYTVYAVNPLQAARYRERHGTSGSKSDPGDAHVLAELVRLDRAHHRPVAGDSDTAEHVKVLARTHQSMIWSRQRQSNMLRSMLREFYPAALVAFGDDLTGRDALAVLAVAPSPEQGRRLTTARVVTVLRKAGRKRNHQVIAEQIVAALRTEQLAARPAVVGAYAASAAALVAVLAALSLQIDLLAEQVAAGFGRHPDVEIYLSQPGLGEILGARVLAEFGDDPKRYVDARARKNYSGMAPVTKTSGKSRVVLARHTRNKRLADALYQQAFSAISNSPGARAFYDAHRARNNTHHQALRALGNRLVGILDGCLRHHMKYDETIAWPDHNAATA

SEQ ID NO: 275205 - protein, 332 aa, unidentified
MSIIGCDLHSRYQVIAMLETKTGEISTRRLEHEGGEAKKFYAGLEKPALIGIEATGYTQWFERLLADLGHQLWVGDPAEIRARAVRRQKTDTRDAEHLLDLLINQRFPRVWVPTPEERDVRQLLKHRDKLVKMQTSVRNQLHFLAMSQGVCRKRALWSERGRQELEALELGPWASRRRQALVDLLDGLGPRIEEMDRAVKAEARRRAEAVRLMEQQGVGPVTALAFVLTIGPVERFASSRKLVSYLGLNPSEASSGGHQRLGHISKQGNEMLRWLLVEAGHTAARLDPELRRVYQRLKFRRGGKVAKVALARRLAVRLYWKLRNGTAASHAQ

SEQ ID NO: 275206 - protein, 343 aa, unidentified
MVYGAIDLHARFSQIRIVDEAGTVLSDQRVPTSRERLVAVFSGHGAMRLLVEASTESEWVAQALEAAGHEVIVADPNYGPMYGSLRRRVKTDKRDVAALAEAVRRGWYRPAHRVSRTQRTVRQRLSIRRQLVRVRSGLIAKLRAVLRQEGLRLPRGTSRTVPDRVEGLTLPAGLQEVLSPLIDALSALGPILAAQDRALVQHAATDAVVERLQTVPGVGPIVALTFRAALDRVDRFPSAAHASSSVGLVPREDSSAERQHRGHITKLGSTEARSMLIQAAWSCWRSRTVRTTRLRAWADALAARRGKRIAVVALARRLSRILFAIWRDETTFRDPVTEALTVA

SEQ ID NO: 275207 - protein, 452 aa, unidentified
MEEPQEVQDEEYERVYQRVAAIDVAKASGVVCTRVPDESRPGRRRTKVWTVIATMNAVTELADHLRCHQIQVITLESTSDYWRIWWVVLEAAGLKVQLVNARSVKNVPGRAKTDKKDAVWLAKLTERGMLRPSFVPPPEIRRLREFTRLRADLVHERTRYWARLEKLLERALIKISSVASTLDTDSTRAMIEALIAGQRNPKALAELAIGKMRPKRAQLAEALDGKFEPHHGELARIILDQIDALTARIDQLSDRVTELIDQIPAAQGVDADGTTGPGAGTGPGAPVLPAVARLDEITGCGVIAAQAVIAEIGLDMTVFGTPGRLVSWAKRCPQTRQSGKKTTSGKAGKGNPYLNGILGEVAASASRTDTFLGERYRRLARRRGKRKALAAIARSILVIIFHLLADPEARFHDLGPDFYDNRISRERKIRNHVRQLEALGLTVTLAPKEEAA

SEQ ID NO: 275208 - protein, 412 aa, unidentified
MEVLVERCAGLDIGKKQVQASIRVPDGEGGRRKETRTYSTFTPSIETMAQWLADEGVTEVVMESTGPFWKPIWYVLEERGFDLKLVNSRHVRILPGRKTDVKDAEWLAELLEHGLLRGSFVPPPAIRKLRDLTRYRKRLIQTRADECQRIQKTLEDAGIKLSSVATDILGVSGTAMLKALVAGERNPEVLAELARGRMRSKVPELTQALRGRFSEHHALLIRISLDLIDHLDTAIAPLDGQVEAAMAPFAEAAVRIDTVTGVGQRAAECIIAEIGADMSVFPTASHLASWAGCCPGNNITGGKRRSGKTNKGDQWLNDVLIQCAWAAAHSHDTYLSAQFWHLARRIGKKKAAVAVAHSILVIIWHLLTNHCDYQDLGGDYFVKRDAERQRDRAVNELMRLGYKVTLEEAYAA

SEQ ID NO: 275209 - protein, 338 aa, unidentified
MLHVGLDLHKRFSTVTVMDDDGTILEQDKLYHDDRARLTEFFRRLAGKAVVTVEATRNWYWLYELLEELGLTVKLANARKVRLIAEARLKSDKVDPGSLAQLERTGFLPEAYIPSRAIRDNREYLRYRLTLVRLRTGLKNKVHALLDKLGISHQFADLFGPAGRRFLSQLTLRPVYQKELTNYLALADDLERRIMAATKEIKQQLKPDPRAGLLMTIPGVGHLTAYLLLNEIGDVQRFPTPGKLCAYGGLVPIVRQSADHRWQGHLTPEGNHYIRWALTESACKAPNKDYALGSFHRRVALRRGPLKARVAVARKLLVAVWCVLTYGEPYKVTKLPTI

SEQ ID NO: 275210 - protein, 408 aa, unidentified
MFYAGIDIAKRNHEASVIDASGQSLMDSLSFPNSQAGCEKFCQLLERLNIPRHDLIIGMEATGHYWLAIYAYLTENGYTVHVINPIQSDAFRRMSIRQTKTDAIDALLIAQVIRFGQYSTTTLSEENIIALRQLSRYRLALVDICGDSKRRVIALLDQVFPEYERLFCDMFGTSSRELLLRCQTPEDMLAISSEELTVLLSKASRGRFTQGKALEIQQAASSTFGISYAKDAFAFQIKQLIEQICFSEKQLEQLEVEIADILHRTNQVITTIPGVGETLGAVILSEIGDIHRFDSPAKLVAFAGLDVRVNQSGEFTGTRNKISKRGSPYLRRAIWLAASRAAFCDPTLSAYYQSLKVRGKHHLTAIGAVSRKLCNILFVILRENRPYQPLPPKAVSIQLSEPEPPELR

SEQ ID NO: 275211 - protein, 392 aa, unidentified
MFYIGIDIAKHNHEVSIIDDNGKALGKSFSISNSQKGVDKFNTYLDSFNITSENCVIGMESTGHYWINLFSFLVNLKFNVFVINPIQSDAFRKMYIRKTKNDSKDSYIIAQIMRFGEYSSSNISDENIFALRQLSRYRTSLVDECSSWKRKIISILDQVFPEYSNLFSDTFGVTSKELLSKYPLPENMLELSTEELTNLLNKASKGRLGNEKAQEIKESAKNSFGVSFAKQTFSFQIKQIINQISFIESQLKELDNEISNMLKELNSEITTITGIGDVLGACILSEIGDISRFEKASQLVAFAGLDVAVKQSGEFTGTEMKITKRGSPYLRRAIWLAATVASFKDPALSIYYKSLIARGKKHLTAIGAVSRKMCNIIFSVLKNKKAYTPNIW

SEQ ID NO: 275212 - protein, 410 aa, unidentified
MDTLYPRCCGLDVHKRDVVACLIIPGADGLPAKSIRTFGTMTEDILALSDWLSAIGCTHVAMESTGVYWKPIYNLLEEGFVLLLVNARHIKAVPGRKTDVKDCEWIADLLQHGLLQASFIPDRPQRELRELTRYRTSLVRERTAEANRLQKTLEGANIKLASVATDILGKSGREILAALIAGTTDRHALAQLAKGRLREKLPALERALVGQFGPHQRFMVAEQVAHVDYLDAAIDRVSAEIAQRVHMCDDLIDRLDAIPGIGRYVAEALIAEIGTDMSRFPSARHLASWAGMCPGNRESAGKRQSGKTRKGSPWLRVLLVQAAHAAGRTKGTYLSAQYRRLTTRRGRNKAAIAVGHTLLVIIYHMIERGTGYEDLGPQHFDEHDRQVIERRLVRRLEGLGYTVSLEPRAA

SEQ ID NO: 275213 - protein, 339 aa, unidentified
MMKLYCGIDLHSNNSVVVILDEADKVVYQKRLNNDLALILEQFSVYKDKITAIAIESTFNWYWLVDGLMEAGYTVKLVNTAAVQTYSGLKHTDDKDDARWLAHLLRLKILPTGYIYPKEERAVRDLLRKRSQLVRQSTTNILSLQNILARNTAQSLSSYKIKTLDDAYAEKLLDDPNTTLALKCNLNVIRCLQSTIAEIETTVLQQARIRAEFKYLLTVSGIGEILGLTIMLESGDMRRFPKVGNFSSYCRCVKSEKLSNGKKKGEGNRKSGNKYLAWAFIEAANFAIRYNDRIKAFYQKKKAKTNGIIATKAVANKLARACYHVLKHQVSFDVNKSFS

SEQ ID NO: 275214 - protein, 457 aa, unidentified
MESYYMGIDVSKGYADFVILDAKKNVVEPNFQLDDTFSSHCRLFEILKRFFVSHSESVLFAAVESTGGYENNWLHSLGGFQGTLDIRSARLNPLGVRANSKASLRRIITDKISARDVAEYLIAHPEKVSYQQEDSLAGLRRQWGFVRLLVKQKTQILNQFESLLYTANPELIAYCQSGVPAWLLKLLKQYPTATKLAKARATSVARIPYLTAGRAKELIDQAKKSVASATDETTGSLITAMTEQIIRMEETIRTQTQQMAKQCAISEVALLKTIPGISDASAIGLMLEIQSVKRFSSVKKLAAYFGLHPAFKTSGDGTSGVRMSKQGRKEPRKILFMVAMVSLTANPHIRKIYEEHTEKGMKKMAVIGLCMHKILRIIYGMLKNNQAYDSLVDQKNRENRTARQATHNAKNENRRYEMFDQQAPISRRQGNKRKEWKQSQGDNITQCGIGVPIPSVA

SEQ ID NO: 275215 - protein, 354 aa, unidentified
MVNYYIGADVDSKMVELAIEKNEKIINRYRVPASIPALREVLASISGTKFLTFEEGPMAGWLYRNLKDSVDQLVVCDPRRNKLIACDGDKDDSIDAGKLAGLLRGGFLRSVHQSEDMGMVVLKQWVSLYHDKVCEAVRQINKIRARCRMYGIRIPRCTLREQVSRHQWMSELKEKALAEQLAVLWLGFDAAATQVKMARKQLIRHSKDYEIIKYWSDVPGIALIRATTMLAYLDTPWRFSNEKKLWKYCGVGLQRTASGTDRFGKPNRGKLQLAWAVNRRLKGVITGAAMSAINQKNNIFASEYGRMIGNGLTASNARHAVARKLLSVLWAMWKTSSRFDESLVCYCPVTVKAS

SEQ ID NO: 275216 - protein, 349 aa, unidentified
MKKVMAGIDLHSNNAVIGIMDTDGKRVASGKLPCELKEIVKFLAPFKKRLEKIAVESTYNWYWLVDGLQELQYPVVLANPAGMEQYSGIKHADDTNDAFFLAELLRLGILPTGHIYDARLRPVRDLLRRRLTLVHQRTALMLSFKSLYTRTTGQEMTLKTLKDLEVKAAQDLYEHPANQIIAGMHIQHIEQLSESIRKIEKVVMASARALPSYGKLTTLPGIGIILGMTITMEVGDSKRFASPGDFASYCRTVQAQRTSNDKKKGENNSKCGNRYLAWAFIEAANFARRYDQQCRKWYDRKAAKTGKIIATKALACKLAKAAWYLMVEGSDYDAQRMFGQPAQTKTMKT

SEQ ID NO: 275217 - protein, 338 aa, unidentified
MKLYAGIDLHSSNNYISIIDEEDQRLFQKRLPNNLEIILPALEPFKESLEGVVVESTFNWYWLVDALQDHGYKVHLANPAAIKQYEGMKVIDDKYDAFWLAHLKRLDLLPEGYIYPKEERQVRDLLRRRLLFVRHRTSHILSLKSSISRNLGVSMSVGEIKKLECKDTEKLFDDAYLALAAKNSISLIRFLTGRVKEVEKEVLFHVKVRPEFRSLLTMPGIGKILALTIMLEVGDIKRFPTVGDYSSYCRCVKSERSSNKKKKGEGNRKNGNKYLAWAYVEAANFAVRSYPDFQSFYNRKKSKRNGIVAIKALSNKLARGSYYVMRDKVPYEASKMFR

SEQ ID NO: 275218 - protein, 418 aa, unidentified
MNAEGHTRGTRRYIALDIHKHYCVVAGVDRDGRVMLHPQRVEHADLEGGLKKNLFANDHVVIESTTNAWHVYDLLEPLAERVVVANPIQVKQIANARVKTDIRDTRILARLLAANLVPEVWVPPQHVRQLRQLLSQRRQLVETHTQIVNRMHSVAHRHHLSHARGKRFNEKTTLWQKDKRLSSVEQFQLELEMENRAYMEKQISRIGKEVAKMSHQKPWAQSMTYLMQLPGFGVITGMTVLAAIGDIQRFDSARHLASYSGLTPGLEQSGTKYREKGITKEGRKELRWAMVEVAQRAVKSDPLWKHRFQELQKRMHRNQAIVAIARRLLELVWYVLTRRQPYRHFSHERIAYKYLTWAWQMDDEARAGLTRQQFARYYLMRLGIGHDLTRIALNPKYPRKLASEAELLALRPELNHIE

SEQ ID NO: 275219 - protein, 359 aa, unidentified
MDGSKEHPHMTAGLDLGDKYSYLCFIDQHSGEVIEEGRLRTTPEAFLRRFASEQPMRIAIEAGTHSPWVSRVLEECGHEVLVANSRKLRLIYANKRKTDEIDAENLARLARVDPKLLYPLKHRGEESQAHMALIRSREALVGCRTQLVNHVRGAVKSFGARLPKCPASSFHKNAVEHIPEALWPALGPILEQISSLTERIRQYDRKLQTISKESYPETNLLRQVEGIGPLTALTFVLTPEDPYRFERSRSVGAYLGLVPASDRSGDSDPQKRISKDGDQMLRKLLVGSAHYILGPFGSDSDLRRHGEKIASRGGKNAKKRAAVAVARKLSVLLHHLWITGEVYDPLYNMHRHQEQEEAA

SEQ ID NO: 275220 - protein, 413 aa, unidentified
MNVLHPRCCGLDVHKSSISACILLREGGRVQKHQRRFGTMTQELQELAEWLRQFGVTEVAMESSGVYWKPVWNILEGQFTIVLANAQHIKNVPGRKTDQKDAEWIAQLLQYGLLRASYVPCEIIRDLRDLTRMRASLSQEASRISSRIQKLLEDANVKLASVATNVLGKSGRAMLQDIITGEDNPEQLASLALGHLRVKIPQLQLALEGKIRFHHRFLLRRLLDQVQFVEHEIALLDERLEDIGRQRPDLAHAVARWDTIPGIDRVAAWALLAEIGDNMGQFPTAGHLASWAALCPGNHESAGKRLRGTTRQGSPWLCRMACQCAWAAARTKNTYLSSQFRRLAARRGKKRAIIAVAHTLIVIGYHLQKNQSNYDDLGGNYFDHIHSDGLKRYLVKRLQQLGHKVTLEPIETA

SEQ ID NO: 275221 - protein, 344 aa, unidentified
MEYYAGIDVSLESSSICVVDGSGRIIREAKVSSEPDALLTWFKGLGFGLARIGLEAGPLSQWLYAGMRAADLLVELLETRHVRNAFKAMPVKTDRKDARGIAQLMRLGWFRPVHCKSLPAQELRAVLTARKLVQSKRQDVEMSLRGILRGFGLKVGPTTPRSFEGRIRELVSGQAMLEEIADALLIARISLGEQLARLQKRLVSLARDDQRARLLMSAPGVGVLVALTYVAAIDDPGRFKSSRATGAHFGLTPKKYQSGETDVTGRISKIGDVSVRTALYEAANVILTRPVKGSTLKSWAMRLAKRAGMRKAKVALARKLAVVLHRMLVDGTTFVAEKAAALAA

SEQ ID NO: 275222 - protein, 309 aa, unidentified
MRQLYTGIDLHSNNSHIGIINQEDKRIFHKRLPNQADVVLAELEPFRKEIVSITIESTFNWYWIVDCLFDVGYTVHMANPTAIQQYKGLKFLDDKHDAFWLAHMDRLGILPQGYIYPKEVRPIRDLLRKRGHLDKLRTSLINSLQEIISRNCGYSLSGKKMKQLRENHVTPLLAGNEDLALSGEVSKQSIDFLGSQITKIERICQDRMKLHPQYTGLLTIPGIGKILALTIMLETGPIERFKKVGEYSSYCRKVPTTWMSTINKKEKVIAKTATSTFPGLLPRLRNLPAGMITRLRHSSIENRQKLEQR

SEQ ID NO: 275223 - protein, 417 aa, unidentified
MSEYAALVSIDWADQQHAVCLLDPNTGEREPTIVKHTPAALQEWALGLHQRFAGAPIAVCLEQSRGPLIYALLQYDFLVLYPINPATLAKYRQAFSTAHGKDDPTDADYLLDLLEHHRKRLRPWHPDDQKTRTLRLLVEQRRRLINDRTRVSNRLTALLKGYFPQVLNWFEDIRTRLVCDFLERWPELSLLQRARPATINQFFRSHHSTSNSTNHRRLAEIKSAIPLTTDEAVMTSSVINVKVLVAQMRTVITAISEYDRQLEALCLTHDDYHLFAALPGAGPVHAARLTAALGSDRSRWQTADELLRFSGIAPIIERSGKQFRIRWRYFCPKFFRQTFHEFAAQSIQDSFWARAYYFSQRAKGKDHHAAIRALAFKWIRIIWKCWQTRTPYNEVIYLESLRKKGSSLLKFAADYQQ

SEQ ID NO: 275224 - protein, 323 aa, unidentified
MNKDIKYFGIDISHLVFDVTDSDGNYYQFKNNPSGFKKFVKLMEIDSHCVMEATGYYHYQLAYYLLESGVKVSVENPLAVKRFIQMKLSKIKTDKSDSRLICEYAKQVDMKLWQGNSKHQTECLQMTRLLSVYTKQSTMLKNKLHGEAVLGNPSKAVVSSLKRSLKQLQKEIKSLEDTLLILVKQTHQDLLTRLKSIPGIGPKTAIILVVLTDGFERFTSGSELCSYAGLTPVIRKSGSSVNGRSRISKIGNQKLRNLLFMCSFNACKYNKACREIYERLVAKGKSKKLALIAVCNKLLKQAFAIAKSGLVYDQTYRSVLVTN

SEQ ID NO: 275225 - protein, 340 aa, unidentified
MKLYGAIDLHSSNNVAVVIDEQDQVIYQKRLPNDLSKIVEQLSPYRSSLEGMVVESTYNWYWLVDGLMEHGYRVHLANTAAIQQYEGLKYTDDHSDARWLAHILRLGVLPQGYIYPKQERAVRDLLRKRSQLVHYRTANLLSIQNLFTRNTGSSINANRIKALDGHQIDELVSDVDLALAVKANLSVMQSADEQVEILERTVTERVELRAEFCFLKTVPGVGQILALTIMLESGDIERFRSVGNYASYCRCVGSQKLSNGKRKGSGNTKNGNKYLAWAFVEAANFAVRYQPRIRRFYQKKKAKSHGVLAIKAVAYKLCRACYYIMKDRVAFDLNKAFAPK

SEQ ID NO: 275226 - protein, 374 aa, unidentified
MLYIGLDVHASRSSLCILNDGGSAVNRVEVKGPWSKLVEAVRSIDPPFSICYEASCGYGYLYDRLRPLAARVAVAHPGKLRLIYRSKRKNDRLDAEKLAKLLLDMVPAVAVPKTQVRNWRGLIVWRQRLLDQRVSWKNQVRAALRGLGIASPKGTTMWTKKSMAWLGQQPLGSLEQLKLEMALHELQHLDEQISRVETELARLSGQQPGVALLRTIPGVGLRTAEAFCVWVDDPTRFRRNGQFGAYFGLVPCQDSSADKNRLGHITREGPSVMRKLLTEATWMAVKLCPHMKAFFERVMGSKPDRKKIALVATSHDLVRVMGTMLQRGEVYTPDRGASGQCGRGGENPIRPQAVLSAPPAPTSPLCGFPSSPGI

SEQ ID NO: 275227 - protein, 344 aa, unidentified
MANLNQFCDFTKLIGIDIAKSVFQIYSCDTQTGEITNVQIKRDKVLESLANCGKCLIGMEACGSSQYWARKLQALGHTVRLMDPKLVKPFVRHNKSDKADAEGVYHALVSGVRAVAVKTETERDIQTLLTMRALLVKQRTARINHVRGLLAEYGHVMPKSVDQFDKKVDECINSLEGVAVQLVIDMLRDTVKSIRDEHDRIKTLQREISRLANQTRNAKHFLTVPGVGDTIMAYMCVLLADPTQFSSGRQFAAYLGLVPMHTGSGGKTVTTKIPGRCDKALRALLVQGAHAVARSKYRTDWVKNILAKKPKKVAMVAIANRMARQCWAVASKGQDWRRMPVTAA

SEQ ID NO: 275228 - protein, 443 aa, unidentified
MVNAHAAGIDIGAKEHFACVPPGSAPNPVRSFGTFTADLEALANWFQECGVTTVAMEATGVYWIPVFQILERRGLQVILANARQTKNIAGRKSDVLDCQWIQRLHTYGLLQGSFRPADAYCVVRTYLRYRDELVSARSTQCQHMQKALQQMNLQLMQVLSDVTGLSGLAIIGAILQGERDPVKLSQLVDRRVRATPAAIQKALVGDYRSEHLFVLQQAFGLYHTYEEKIQACDQEIVRSVTQLPDRVDLSRQPVPARKEGRRAALDQMAGQDMREVLYRKTAVDLTAIEGIGPLTSLVLFTEVGPDVSRFPTEKHFCSWLGLCPDNRISGGKVLSSRTRRVVNRASDALRMAATTLERSQSALGGFYRRMKARLGAAEAVTATAHKLARIIYRLIKHGEAYVRQGMESYEVQFQTRKLRALQKAAKNMGFELIQKQMLPAPVS

SEQ ID NO: 275229 - protein, 337 aa, unidentified
MYEPRRVTTCVGIDVSKDRLDVHLRPSGEAFAVARDGKGLETLVERLAALDVSLIVLEATGGFETTVAAALAGAGLPLAVVNPRQIRDFARALGKLAKTDAIDAKVIALFAEKIEPPARPIASPEAQRLGELVARRRQIVEMIGMEQNRRRRAGDKRLVKKIDRHVAFLEKELADVDADIDAGVRASPVWREAEELLVSVPGVGPITARTLIAELPELGRIDRRKLAALVGVAPFNRDSGTWRGHRMISGGRASVRTTLYMAALVAARHNPLIKATYQRLVTRGRPKKVALIACLRQLLTILNAIVRDRTPWTIQNALRPRQSLKTRSGEISISPDA

SEQ ID NO: 275230 - protein, 336 aa, unidentified
MFQLGIDVSKKTLDLCLLREGVKGSVKTRKLQNDINAVNAVIAWLSKQHCKPEDVHIIMEATGVYHESLAYGLHKAGGRISLANPHRAREFARGMGMLTKNDRVDAYMLACYGALKAPEPWLPPPEEVRHLSALLRRRDDLVADSTREKNRLEKYLATDTPSVIAESVEAMIGQLNAEIKRLDRLIRSHLNQHPELKKDFDLLTSIKSVGYQLGLNMLVILRSHDFATAEQAAAFLGVVPVEKYSGTSVRGCPKLSKIGPPEIRAKLYLASLCGLRFNPLMKAMYERLCLRGKGKMCAIGALMRKLVHWCYGVLKTQKPFDVGYLSSYARSACKAA

SEQ ID NO: 275231 - protein, 402 aa, unidentified
MNAVGIDVSKGKSMVAIMRPFGEIVSAPFEIKHTASDIHSLVELINSVEGESRIVMEHTGRYYEVLAHQLSEANLFVSAINPKLIKDFDNDSLRKVKSDKADAVKIARYALDKWQNLKQYNVMDELRNQLKTMNRQFGFYIKHKTAMKNNLIGILDQTYPGVNTYFDSPARSDGSQKWVDFASTYWHVDCVRKMSLNAFIDHYQNWCKRKKYNFSQSKAEEIYGKAKELVPVLPKDAITKLIIKQAVDQLNSASTTVESLRTLMNETASKLPEYPVVMAMKGVGTSLGPQLMAEIGDVSRFTHKSAITAFAGVDPGVNESGTYEQKSVPTSKRGSADLRKTLFQVMDVLIKTHPQDDPVYQFLDKKRAQGKPYYVYMTAGANKFLRIYYGRVKEYLSSLPES

SEQ ID NO: 275232 - protein, 347 aa, unidentified
MRFYNRQHRHYCGIDLHVKTMYVCILDATGQVLVHRNVTSSPEAFLDIVAPYRDDLVVAAECMFTWYWLADVCAAEGIAFVLGHALAMKAIHGGKAKNDKIDSHKIASLLRGGLLPQAYVYPAGMRSTRDLIRRRLHLVRKRGELLAHIQNTRAQYNLPAFARRLAYPANRDGISAHFADPSVRKSMDVDLALIDQYDTLILDLELTIVREAKRHDADAFHRLRSVPGIWKVLALTILYEIHDVTRFDRVQEFASYARLVKCVHQSAGKKLGTGGAKMGNVHLKWAFSEAAVLFLRHTKDGKKILAGIEKKHGKGKALSILAHKIGRAVFYMLSRGTVFSMEKFLAA

SEQ ID NO: 275233 - protein, 412 aa, unidentified
MSLALPEALFFVGIDWAAAEHAVCVMDTTGKIVSQFVIKHSTDGIAGLVRRLAKLGDPADIPIAIERPNGRLVDLLLEAGHPVVPVKPNAIKTWREGEVLSGAKSDAGDAAVIAEYLRLRQHRLRVATPYSGETKALRTVVRTRDDLVEMRVAATNQLSALLEAHWPGAKAIFADVESPISLAFLTRYPTPAAVARLGEKRMQAFCVKHGYSGRRSAAQLLDRLRTAPAGTTDDALTEALRDAVLAMAGVLTALNTAIKDLDRSTVAHLGEHPDGKIFTSLPRSGQINAAQMLAEWGDARQAYDSPDSVAALAGCTPVTKESGKHRAVHFRWACNKRFRRAMTTFADNSRHASPWAAKIYKDATAAGKDHPHAVRVLARAWIRVIWRCWLDQTPYDPAQHGALQRHTTPTAA

SEQ ID NO: 275234 - protein, 359 aa, unidentified
MQGKVKTISFQGQNIYIGIDAHLKNWTVTAMTENSLTKTISQNPDAGTLYTYLQRTFPGGNYLSAYEAGFCGFSAHRNLEKYGIKSIVVNPADIPTTDKERKQKEDRRDSRKIARSLKNGELTGIHVPDKETEELRSLVRYRKTLVKEISRHKSRIKSHLHCFGIAIPGPLAQASTYWSGKFTQWLEEVQQSTPYGGMVLQSTLATVKHLRAELLKINRKLRELEKEVMYGFKIKLLRSIPGIGLIVAVTLLSELETILRFKNLDKLCSFVGLVPRTNTSGENDKTGKITSRSNKPLRGIIIEAAWIASRNDPALAQCYLELCKRMKPNKAIIKIAKKLLNRIRYVMKNEKEYVHSVVQ

SEQ ID NO: 275235 - protein, 370 aa, unidentified
MAAWVDAVGSEHSDHRSLAMGKLTIAIDLAKSVFEIAVADETGTVVERKRLGRTQFIRYFDNRHFDRVVMEACGSSHYWGRWFQARGMEVAMLPAHYVRAYVRRDKTDRADATAMLDAAKAPDIKPVGVKSIEQQAIQSLHRVRDQWMSTRTARINILRGLCREFGVIAPVGAKRGMPLLIEEITDSESAVPELVRRTLRRLLSEIRSIEENVRGVERELAHCASQSIVCERLRRIPGVGLLTATAMLAAVADIHTFRSGRRFASWLGLTPREYSSGAIRRLGSITKRGDKYLRVMLVHGARSVVFTANAAKRAGRPLDAFRQWAAQLRARLGHNKAVVAVANKMARIIWASWYRDRDYDFRGPILEGNV

SEQ ID NO: 275236 - protein, 293 aa, unidentified
MEQYAGIDVSLELSSVCVVDAQGKIVKEAKVASEPEALIGFFETLGIAVNRIGLEAGPLSQWLRAGLKRAGFEAVLLETRHVKAALSAMTVKTDRKDARGIAQLIRMGWFRPVHAKSIGAQEIRALLVARKQLLGRLIDVELSIRGILRGFGLKVGPVTRKNFEARIRELVTGQATLERITMAMLSARAALKAEYAKLHKAVLTIVRDDAVCRRLMTVPSVGPLVAITYKSAIDDPHRIAKSKAAGALFGLTPKKYQSGEKDVTGGITLAGDEMVRTALYEAGVSEALCKGSL

SEQ ID NO: 275237 - protein, 344 aa, unidentified
MTEVAIIGVDLAKSVFQVHGAGADGTVVYRKKLSRTQFRKFMAEQPVGIVAMEACGSAYYWARQMDKLGHQVRLVPPIYVKPFVKRQKNDSADAEAIAEAASRSNMRFVPVKSERQQSRSMLFRTREMIIGQRTQTVNALRSHLAEFGAIVPKGIHNLKRLAAYVRDVEAELPSEVQQIGELYLEQIACQTDRIRVLEKAIRELSDTSEVARRLRTVPGVGPITAMAIEAFVPDIKAFDRGRSFSAWLGLVPMQHSTGGRQILGRTSKMGQKDIRRLLIVGAMSAINSQLRKPEEERSTWLSRLLDRKPRMIAAIALANKMARAIWAMLTKGEDYKVPATEVAA

SEQ ID NO: 275238 - protein, 338 aa, unidentified
MKLYGGIDLHSNNSVVALLDEDERLVYRRRLANEAPSILEALAPYREGIVGLVVESTYNWYWLVDALMEAGYPVHLANTAALVQYSGLKYSDDDSDARWLAQLLHRGLLAEGYIYPKEDRAVRDLLRRRSRLVQQHTANLLAIQNLFARDRGRSLNANEVKRLTPETVSRLLPDPNQALAVQATLLPMRGQEAAIDLLEREALAQVRLRPAYRQLLSVSGIGQVLGLTILLETGPIERFAAAGHYASYCRCVGSERLSNGKRKGHGNTKNGNKYLAWAYVEAANFAVRYNAIINRYYQRKRAKSNGVIATKTVAHKLARACYHILREGTDFDVAKAFA

SEQ ID NO: 275239 - protein, 361 aa, unidentified
MGGTMTWVGLDVHARSTHAAVIDSMSGELSRVRFGPGIEAPVVWLAGLPGPVRACYEAGPTGFGLYRAAVEAGIAMEVIAPGKTPRAPSDRVKTDRKDAELLARLLLAGSLTRVVVPPPEVEAAREMTRSHDACRRDLMNARHRVSKMLLRHGRVYSKSTTWTAEHRRWLSLQYFDEPASDLVFADLLASVDGLTARKQAIALRLSDLATDERWWPTVARLRAFRGIDTLTAFSIHLELGANWKRFEKPSSLSAWLGLTPSLSQSGESSRQGSITKTGSMLARRLLVESAWHYSRQPRLGATLANRQAGQPDHILAISNRAQQRLYNVNRSMRSRGKPHNVTVVACARQLACFLWAAATAD

SEQ ID NO: 275240 - protein, 344 aa, unidentified
MLMKYYIGLDAHGNTCTFVVVDAQGVETHCVRVATTEKNILNFVRSISGGKSLTTEEGQLSQWLYSLLKNEVDNLVICNPLFISKRSGPKDDAADARHLAQQLRGNFLTPVFHEVSSLMESRSLMTAYLDVVKQCTQTQNRYKALFAKHALVTTGKRIYRLRDRIAELPNESDRFVAQGLFEQIRVMRESRLSYARRFREFSDTHSEVKALTTIPGIAEIRACLIAASVTNPARFQDKHHFWSYCELVRHHFISDGVIYGKRTKRANRHLKAVFMGAAKTAMTEPGALRDYYDAMIKKGLPHKAARKNLARQIASVALAVMRTKKPYDDSKVKEKIRSSTVEKI

SEQ ID NO: 275241 - protein, 307 aa, unidentified
MFIGIDVSKARLDVHVRPTGDSFVVTRDDEGLVTLVARLGLLQPRLIVLEATGGLQLRASAVLAAAGLPVAVVNPRQVRDFARATGRLAKTDTLDAEAIARFAEAVQPEPRALPDAETEQLAGLIARRRQIIEMMTAEKNRRHQVTRADLKADLDAHLEWLAKALNRIDEDLDNAVRASPIWRAKEQLLKSVPGIGDVASRTLLAELPELGRLSRRQIAALVGLAPFNRDSGTMRGRRTIWGGRAALRATLYMAALAAIRHNPAIKAFNARLRAAGKPAKVAITACMRKLLVTLNAMVRDDKPWHTA

SEQ ID NO: 275242 - protein, 340 aa, unidentified
MENIALIGIDLGKNSFHIHCQDRRGKAVYRKKFTRPKLIEFLATCPATTIAMEACGGSHFMARKLEELGHSPKLISPQFVRPFVKSNKNDFVDAEAICEAASRPSMRFVQPRTESQQAMRALHRVRESLVQDKVKTTNQMHAFLLEFGISVPRGAAVISRLSTILEDNSLPLYLSQLLLKLQQHYHYLVEQIKDLESQLKRKLDEDEVGQRLLSIPCVGTLTASTISTEIGDGKQYASSRDFAAATGLVPRQYSTGGRTTLLGISKRGNKKIRTLLVQCARVFIQKLEHQSGKLADWVRDLLCRKSNFVVTCALANKLARIAWALTARQQTYVGKVRTSS

SEQ ID NO: 275243 - protein, 353 aa, unidentified
MNNIKYVGMDVHKSVTVIAVLNEQGQVESLTKIKTKAENFRDFFRGLSGTTHVVFEEGGWSAWLYKLLKPMVNSVTVCETRHNKLIGAGNKTDETDAEILARLLRLGELKTVYKGDDQQQQLRELFRAYDNLVEDSTRVQNRLKAIYRGRGIDCDGHNLFRPDQRSDWLAKLPEQAARFRAETLLSELDTLQELRKAAKIKLLTESKQSADYSLLLKLPGIGPVRAATLLAIVGRPERFRTKRQFWPYCGFAVVIHTSADYIDIGGRIIKQQKKASTRGLNRNHHPRLKAVFKGAALTAIQNETWQDYYYGLVNKGTKPELARIAVARKLAAVTLAVWQRREEYDQNKVFAKA

SEQ ID NO: 275244 - protein, 340 aa, unidentified
MKKNKQFYLGIDISKPFFDVSVLAVTQTAKQEMQTAQFGNDASGLRLFAKWLTGLGVSYDENSLVVIENTGIYHRPVWNFCSSKNLPIHIGNAAHIKWSLGITRGKSDKIDSQRLCEYGYRHREELKCTAALNPVFLQLKDLMTNRTRLMHQLTSLKSYLKELKGVSGKSFISVQQRCNKAVIAGLKKSIGLIDEEIKKLISQDKQLLTNYQLLKTVPGIGHWIAVYLICCTRNFSNGITGKQLACYAGVVPFEHSSGISIRGRNRVHKMANKDLKKLLHLGALATLKYYDEFKQYYNRKKEEGKHSMSILNAIRNKIILRAAAVVQNQQPYVNYSANNV

SEQ ID NO: 275245 - protein, 349 aa, unidentified
MYKKKIETIDSKINSDNYDYYIAIDWSQRNMAVATMKKDSNKIRIIDVESDLGALKTYFKSLSGSKILTIEETTPTHYLYVELFDYVDRILICDPYKNKLLSDGPKTDKIDAGKLCMLLKGGFLREVYHSINKKYELRQYVSEYEQLVKFGVSVKNQKSAIYRSMGKSYQKKEEIDDAASKFIIEKKDQRIELYESQKKDYEKMFANLIKLDKGLKHLRGINGIGIIGAVKILATVIDANRFENAGKYLSYCGLVKHQKMSGGRNYGQKNPRYNRRLKSVYKTAAMSVIGGKSPLSEYYNSLLKQGISEDKARHRLARRIAIISFGVMKSGMPYDPYKWRNTVEKENKD

SEQ ID NO: 275246 - protein, 443 aa, unidentified
MNLHAAGIDIGAESHYVAVPEGRDPEGRDVRQFAAFTADLQALADWLTRCGIETVAMESTGVYWIPLFELLAERGFDVKLVDPRQLKSVPGRKTDVVDCQWLQQLHTFGLLSAAFRPDDQVCVLRSYLRQRAMLVTYAAHHIQHMQKALEQMNVKLAHVVSDLTGVTGLAIIRAMLAGERAPEVLATLRDHRCKHDEETIARSLAGNWRAEHLFELRQALELVEFYRTRVVACDHEIEAQLARFDDKRGGQHLPAEPRQRKIGRNEPHFDGRNHLHRLTGVDLTRIDGIDAHTALKVVGEIGLDMSRWPTEKHFASWLALAPGNKVSGGKKISGRTKASANRAAAALRQGANSLYHSKSALGAYFRRMKARLGAPKAITATAHKIACLIYRMIKFGTEYVDKGQDYYERRYRTRVITSLSRRAQELGYQLTKIADSALTPAPA

SEQ ID NO: 275247 - protein, 341 aa, unidentified
MDIAVLGIDLGKNSCSVVGLDGSGKVVLRRRMQRKTIVGLVSKLSPCIIAMEACCGAHHLGRVFSAQAHTVRLMSPEYVRPYVKAQKNDDRDAEAIAEAATRPTMRFVALKSEEQLDMQTLHRARDQAVRERTSLMNQLRAVLLERGVIVPQGRARLRVRVNDILRQGTEALSSRIRLLIQEMLTRWQALDERISTFDSEFATEVKQNEAARRLTSIPGIGALNATALVAAVGDAETFTRGRDLAAWLGLVPRQATTGGKPRLLGITKRGSKYLRKMLIQGARAALPTLSRGNTRLGQWLRGLLARAHSNTVVVALAAKMARIVWALLRYGTTFEPRAIAA

SEQ ID NO: 275248 - protein, 361 aa, unidentified
MKKPAQHLIAEVPRKRAKVELTIGIDLGDVWSHYCTLNQQGEVVDRGRFRTTPKAIEKWFIDVPIARVAMEAGVHSIWISEPLQELGHEVIVANVRELRAISHSDRKSDRVDAEKLARYARLDPNVLRPIAHRTVEQQQALTLIRARALLVRLRTAAINAVRGLTKACGHRMPASATPCFAQRSLAAMPPGLGQALGPVLQQIAEMTVKIKQYDRQIQQLGQTEYPETQALLKVHGVGHLTALTFVLTLGSKERFERSRDVGCYLGLRPRRSQSGDHDPQLGITHAGNAYLRSLLIECSNHILRPHGKDSALRQWGLHLAARGGKQAKSKAVVAVARKLAVLLHRLWTTQEPYMPFYAVAA

SEQ ID NO: 275249 - protein, 377 aa, unidentified
MSKLRFVGLDVHAETIAVAVAEAGGEVRSLGVIPNRLESVRKMIGKLAPIGTLKCCYEAGPTGYVLYWQLAQMGVACEVIAPSLIPTKAGDRVKTDRRDAEKLARCYRAGELTPVWVPDADHEALRDLVRAREAAKKDQLRHRHRLGKFLLRHGKRPTDAGKAWTQKYLNWIRIHVHFDQPALEATVQYYREEVEHIAERITKLEQAIDEAVQQEPSEIRAVIEALQALRGVAQTTAATVVSELGSLSRFPNPSQLMGYSGLVSSEYTSGNRVQRGRITKSGNAHLRRVLLEAAWTYQHRPNVQGRVLRRQKSLALSEEARQIAWKAQQRLHKRFGALAARGKERNVAATAIARELLGFMWAIAVHTEAQQKQAKAA

SEQ ID NO: 275250 - protein, 351 aa, unidentified
MDGKASDSIVTAIGIDIGKNTFHLVGQDERGAIVLRQKLSRGQVTARLATMVPCLIGMEACVGAHHLSRQLLALGHDVKLVPGQFVKPFLKGQKNDFRDGEAVAEAVQRPTMRFVPTKSVDQLDLQALHRVRSRLVGQRTAIVNQIRAFLLERGIAVRQGLRFLRHALPDILANRVDVLTPRMVHMIEGLAGDLHHLDTRIDEVTGEIEALARNDEACQRLMTIPGIGPIIASAMVATIGDGSAFQRGRDFGAWLGLVPRQISTGDRTILGRISKRGNSYLRMLFVQAARVVLLRPANWPKHSFGRWLEAAAKRMHHNVVAAALANKLTRIAWSVLYHGRRYEPRMRAELA

SEQ ID NO: 275251 - protein, 415 aa, unidentified
MSTSTNTGVAGEAPSFGVFCGLDVGKGDHHAVALDSAGRRLADRPLPNDERALRSLFGELQAHGEVLAVVDQVASIGALPVAVARSLGIVIAYLPGLTMRRLADLHQGEAKTDARDAYVIADAARALPHTLRRIASDEQTIAELTILARYDDDLAAEITRLANRLHDALTHVHPALERLLGKHLNRAGVLELLAAAPTPAQLRALGQDGIQTALAPRSRKLAVRLPEQILSALDEQTVVIPGTDTFGRVIAGLARQLLSARDERDSIAEQLTARLEAHPLSEVLTSMPGVGVRTAITVLIHVGDAKGFRSAAHLAAYAGLAPVTRRSGSSIRGESASRRGNKQLKRALFLSAFASLRDPVSRSYYDRKRAQGKTHTAALLCLARRRTDVLHAMIRTGKTYQPPALQLAQDPSAAA

SEQ ID NO: 275252 - protein, 348 aa, unidentified
MTLVGCDLHSRKQQVAVLDTRTGELIEQELAHEGDAVERFYRALPTPVTIGIETTGYTQWFHALMHQLGHTVVVGEAAKIRAMVVRKTKTDRRDAKHLLDLLQHDRFPTVWIPDPGTRDRRALIAHRVRLVRMRTMVKNGLQAIALNQRLALHSALWTQRGLTQLKALALPPHTTRRRDDSLALLAWLTTRIDQLDAHIAAVASADPRVQLLLTHPGVGPLTALTTVLVLGPLARFPDSKHVVSYVGLAPAVNASADKQRLGKITKQGNALLRWVLGQAAPLAARADDELRRRYFSVLHRRGRPKAKVALARKLLVRLYIMLRDQIDYEEFRRRGRTPRPQHIPGAVM

SEQ ID NO: 275253 - protein, 340 aa, unidentified
MTIAIGLDVHRAQITFDALDLESGEVETGQIAPATRLELRRGLRRWNGEQVAAAVEATTGWRFVVEELRRAGAEAHLAEPAETSARRGNKRRAKTDRRDARHLRELLVEGRLPEAYIPPAHLLDLRARVRWRKTLVDQRTEWLQRIHAVLFHHGLRIPTGRLGGRGAADALAQLDLPESAQCQITIALELIEHVNGQLAPLDAELRSFARRQPGCRALMGHYGIGARTSTAFLAELGDVRRFSSSRQAVRFAGLDVTVHESDRKRRAGHLSRQGPPVLRWAAFEAAETACRPRSPDHDYYLEVKARQGANRACLSVARKLLRRAYHTLRELGDAALEPVA

SEQ ID NO: 275254 - protein, 454 aa, unidentified
MGKPIKGRSLSLECIESSAAGIDVGATEIYAAVPPDRDAEPVRCFKTFTSDLQEMAAWLKQRGITTVAMESTGVYWIPPYEILEEAGIRVCLVNAHYVRNVPGRKSDVSDCQWLQYLHSVGLLKPSFRPDAAICALRSLSRHRTSLVEGAAVHIQHMHKALTQMNLQIHHVLSDITGISGMAIIEAIVAGQRDPLELAGLCHAKVHADRQTVVKSLTGNYRPEHLFTLKQSLAAYKSYQQLLAECDQEIQRLTNSMSGKIDPGAPSSYTKSSPQKRRKNQFHFDMRSELHRLFGVDLTAVPGINALTAHTLLAEVGPDLSRFPSADAFANWLALCPGNKKSGGRVLSSKTRPTNSRLSHALRVAAQTLARSRSYLGNFYRSMRARLGAPQAITAAAHKLARILYHLLTTGDAYDESVFAREQLKQNLRLQKRLSKQAQNLGFQLIPITPAAPCS

SEQ ID NO: 275255 - protein, 387 aa, unidentified
MKRHPDVEFAAFAGIDWSDTKHDICLQAANSEERELAVVPHRPAAIDAWASALRQRFGGQPVAVCLELAKGPLVYALQKYDFLVLFPVHPATLAKYREAFAPSHAKADPTDAQLALELLLRYRVKLKALTPQSVPMRMLLRLVEQRRRLVGDQNRISNRLTDALKQYFPDVLVWFPDRDTPLFCDFLTRWPTLKQLKRARRATLQSFFHDHHVRSPSRIEERLRAIKSATPLTDDPAVLRPNQLLVLALVEQLRVTLQAIESFDAEIATLSETLPDYALFRALPGAGAILAPRLLAAFGEQRERYQSAAEIQRYTGIAPVTESSGKKHWVHWRLQCPSFLRQTFVEWAGATIPRSFWAAAYYRQQRDKGCSHQAAVRALAFKWIRIL

SEQ ID NO: 275256 - protein, 457 aa, unidentified
MATPHRRVAGIDVHKSSISVCILPPQHKPEGMVRHEKFSTFLRPLRKLRRLLTQCQVTEVVMESTGQYWRPVWNALEGLELILLNPAHVKGLAGRKTDRRDAEWLARLAEREKLQGSYLPPREVREWRELTRTRVHWLDDANRIKNRISQLCETANIKLGSVASDLFGVSGRRMLAALVEGAHDAGWIADYARGKLRGKRQELALALECTLTEQQRWLLRQMLDQLARVEGEVAVLTARIAEQMEPARALIERLKTIPGVDEVTAWTVLAEVGMDVAAFPDARRLASWAGLCPGNRESGGKKMSGRTRRGNNYLRRALCQAAWAATRKKGCYLGALFRRIRSRRGHQRAIVAVAHQILTIIYHLLSEGTSYQELGENYYDLRRREQTARRAIRRLHGMGYRVTVEDCGAPLPPVTGLGNPIQQVVAGVRRRGRGRPCKCAERGKVCPHGQGLVAGAE

SEQ ID NO: 275257 - protein, 325 aa, unidentified
MQKQTIVGIDVSSATLDICVSNEQGQLSFVIKNEVKSIKKFFSSYKEQLIIGMENTGRYNWNLYEAFKETGHRIFVVPPLHLKKSLGLVRGKNDKIDAVRIAAFIKKSHAELPQWKPSSQTIQKLKILLTERNSRIKTKVQLLKQQHDYAKMKHLGIYKYLLKMNQEQLALIGKQIKKIETDIEMVIRADEKMDTQVNLIRSVPGVGKVLSWMMLAKTEGFELITEARKMACYSGVVPFANSSGTSIRGRHQVSTYADKAIKSVLHLAAMSAIRLKNDLQHYYQRKVAEGKNRMSALNAVRNKIVHRIFAVIKKQQPYQISLLLS

SEQ ID NO: 275258 - protein, 349 aa, unidentified
MSEYDGKQFVGIDLHRRRSVLVRTSDVGETLEVARITNDPESLAAVMARAGEAPEVVLEATYGWYWAADALEQAGAVVHLAHPLGVKMFEVRRVKNDVRDATDLADLLRMGRLPQAWIAPPSTRELRELVRHRAKLVALRSGAKCQVHAVLAKLGVQVPISDLFTDRGLDLLAAVAAPAPYVARIQSLQRLIEVLDLEIDLSARLARGKLVADPGYRAVQTIPGIGPVLAAVFVAEIGEVTRFPTPAHLASWAGLTPKHHESDRQVHRGRITKQGSKLVRWAAIESVKALGPHTGVGPLKARVAANRGKNIGSVAAARRQLELVYYALRDGHVRALHHPVGRCVGRGVA

SEQ ID NO: 275259 - protein, 423 aa, unidentified
MKTVYPICCGVDVHKKFFVATLITTEELTPRYQKRRFSTFNNQILAFKQWLLENHCRDVCMESTGKYWIPVYNLLEDAIHVTVANPKWVKAIKGNKDDVKDSKWIGDLFRIGLVPGSFIPPKDIRVLREFTRYRSKLVACKSGEKNRYQNVFTVCNVALDAVVSDMFGVSASSVTDYIVNSDTFDPEYCVSLLRNSLKKKADEVVESIEGFQMSGAQKQRARIVKEHYDFLLRQIQRIDEAIDTLAKPFESAIALLCTAPGFDRRSAIAVISEIGTDMDEFGSSKRLCRWAGLTPGNNESAGKKHSVHIMRAGVYIKPMLVQMAWAAVSSTKSPYYAIKYAAISKRRGKKRAVIAIARMMLTAVFHMLSTGEVWNPSDLQQVDMPPEMREKQLQHDLRRAANLLVANGVVAPDAIQIPEQKTI

SEQ ID NO: 275260 - protein, 317 aa, unidentified
MQDKLFFGIDVAKEWLDIACHGRPGGGRIANSPAAIAAWLGALDPAAVGLVAFEPTGGYERLLRKALCESGIRFVRVHPNEVTAFRRRRGRKAKTDAIDAALLAEFAALELAQRGLAPLVEGDPALRALTVRRRQLADALHAERCRAALADNAIVENTLQQVIAALRGALDAVEEAIARHIAAHPKLAATAALLRSFKCVGPVTVHTLLAELPELGQLDGKEIAALVGLAPQTRKSGKQQARALTGHGRPGVRRVLFNAARSAIQWNPAMRQFYRRLVDLNHRPGKLALTAVMRKMLVIANAIVRSGQPWHGASTRP

SEQ ID NO: 275261 - protein, 332 aa, unidentified
MKKIIHFIGIDVSKETLDIALIKNNDKSNIYSSKVTNNKTGFKKMKQWLKLEKVSWQEAVFCIEHTGMYSKPVGQFILSLQGNLWMEMSLKIIRSMGVQRGKNDKIDAMRIALYAQRCQDEMKLYEPPRPIVEKLRTLLQLRKRLINSRNSLQVPCNELTTIDEHAGKEATRLIRSSVTALEKNIDVINEKIDELIASDEQLAHEFEIGISVPGIARITLAYMICFTNEFKNYAGGKQLACYCGVVPFEYTSGKSVKGKPHVHNMANKFLKKLLHMGAIAAVTYYDEFKCYYKRKLKEGKPKMLVLNNVRNKMVLRLAAVIKNNKPYQKIAA

SEQ ID NO: 275262 - protein, 365 aa, unidentified
MNFIGADLHKKSITLCVMDEKLKILARKTVSCDQPDQIVESFRRFRPFKVVVEATASYLWFVELLEPLAEEIVLANPKKLRVIAESTKKTDRLDAQVLAEFLARDMIPRAYMPTPRQRQHRALVRHRQYLRGRMTSVRCKIRHVLADYNADRKDLFSARCGKSYFKQVALSDADGFVLKQLWSEWEDHQARLLAMTKKIRAFIAKAPTREKEARAILKSAPGVGLITAEVVLSEIGDVSRFGNAKKICAYAGLVPAVRQTGGKKSKDLHITKQGSGLLRWALVESAWRLVKSSPKWSALYSRLRKRCGSKRAIVAVARKLLCVLYAMLKTSTPYKIIPAATPAEPPEPTRKRLVRVSTAAQAVTP

SEQ ID NO: 275263 - protein, 394 aa, unidentified
MFLVGIDIGKHKHSFCIINKETGESIVKPKFFNNNKVGFEELLSSFKGLPKKDILIGMEDTGHYHFTLLKFLLDKKYQVALINPVTTDLTRKLSGSHTKTDKLDTLTICDVLTSNQRTKPYRISKVDRFDLYEQKQLTREHHNLKEQSNVLKNRLQKSIDIVFPEFNSLFKSMYGVVYMNILKEFGSADALAHSDIRTIRKCFDFKGRGKRIELTAKELKNAAINSIGFPSIAEVVQIKHLVDQIELVEEQIEELDKKIEEFSIANNSPILSIPGISHFSGTSILAELGDIHNYSKPSQIIKFAGVAPLTYESSQFMAKHTAITKKGSTYLRKTLYQIILPVINNNKVFKDYYNLKLSQGKGYRCAQGHCVRKLLRVIYQLLSTNTQFDPTLLV

SEQ ID NO: 275264 - protein, 372 aa, unidentified
MEEISALYIGLDVSKLKISVALADDGRNGEVRFFGDIDARPATIAAVAAKLAKRGSRLHFCYEAGPTGYDLYRQIVALGHDCVVVAPSLIPQRPGDRVKTNRRDALSLAKLHRAGELTPVWVPDAGHEAVRDLVRARECAMESLRRARQQLLSFLLRHGRVYTGRTPWSKAHSSWLCRQTFEHPAHQIVLAEYRHAIEEAEVRLKRLTEQVTETAASWSMAPVVKAYQAMRGVAFMIAVTFVAEIGDVRRFDNPRQLMAYLGLVPSESSTGERVRRSEITKAGNSRVRRVLIEGAWTYRFPARISRRIEERQDDLPKAVREIAWKGQVRLCGRYRKLIAAGKLKAVTVTAIAREMAAFLWAIGQEVVPVLQA

SEQ ID NO: 275265 - protein, 352 aa, unidentified
MSMLADLVEVVIGVDTHKDTHTAAVLDTRTGGVLARATVSTDPDGYAELVALAGQHSGLRAWALEGSGGYGAGLARHLADVGELVVELDRPQRPARRAGAKSDPIDAERAARDALARTRLAQPKTGAQRAALQMRLTARRAAVEASATTQRQLHAMVITAPEVVRARFRGQSTRIMLTTATRLRPTSNADVDVSTSLTVLRDLARRVRFLEAEATAHEKAIRAIVRSWRPDLLQLTGVGPIVAATVLTAWSHPGRCRNDAAFAMLAGVAPIPASSGKTVRYRLNRSGDRQLNRALHTVVLTRLQRDETTRAYAERRRAQGKTDREIKRCLKRYIARDLYRRLETPPPPLDAA

SEQ ID NO: 275266 - protein, 347 aa, unidentified
MDQVIIGIDTHKSNHIAVAIDANGTRLGSTSIPTTRKGYHDLQVWASQFGHVKAFGIEGTGSFGAGLSRDLLAKGHKVLDVMRPLRQLRYLHGKSDSLDAESAARSVLNGQATALAKTQTGSSEMIRHLKVARDSAVKAKSQAMITLKTLIVNAPAELRDTLDGLRGRITLVRHVAALRPGEITSPIASAKTAMRAIARRWLALHEEIQSHDQELDRLVREKAPELMESHGISTMTVAEMLILVGDNPERIHSEAALAKLCGVCPIPASSGRTNRMRLNRGGNRQANAAIYRVAIVRLRDDERTKAYAARRTSEGKTRREIVRCIKRYIVREIYRALCASPDLDPAA

SEQ ID NO: 275267 - protein, 321 aa, unidentified
MTKDRKIYGIDISKSVFDIYNQDIGHYQLKNDEKGFKKLLKSLSKDALVVMEATGYYHYRLAQFLYKKGVFVSVVNPLSVKRFIQMKLAKVKTDKSDAKSICEYGIFNEVPLYNALTDVQAECLQLFRLLDSYVKKSTATKNKLHGEETLGVPSKTVYRSLKRNLGHLKKEILILEKRLLELVKQDQQEQLTILQTIPGIGLKTALFLIVVTDGFKKFETASQLCSYVGITPTIRESGSSVRGRSRISKVGNKKLRNLVFLAAFSAYKYNRACKALFDRIVAKGKSAKLALIAVANKLLKQAFAIAKSGLPYDENYVSKLA

SEQ ID NO: 275268 - protein, 402 aa, unidentified
MNCVGIDVSKGKSMIAVMRPFGEVVVSPFEVRHTANELSELAGLLKSLDGETRVVMESTGNYHAPVAWLLHDAGLYVSVVNAMLVHDYGNNSLRRAKTDKKDAVKLANYGLDHWLTLPRYAPEEDTRLMLKTCYRQYQQYSKVQTMLKNNLISLLDTTFPNANRLFTSPPRADGSEKWVDFVAAFWHCECVCGLSEKAFTAKYQKWCRKHGYNFSEDKALDIYAFACAHFAVMPKTDTAKLLVEQAVSQLRTTSTALAALKQEMQSLAASLPEYPVVMKMFGVGPSLGPQLMAEIGDVRRFHSKKALVAFAGIDAPPYQSGQMDIHSRSISKRGSASLRRTLFLVMGVILQCAPMNEPVYQFMDKKRSEGKPYRVYMMASANKFLRIYYASVKAYLDSLEHD

SEQ ID NO: 275269 - protein, 406 aa, unidentified
MEVVYERVAAIDVGKKIIAVAVRTPGEHPGKRRQQVRKFNTYYRTLSEMVAWLVGQGVTHVSMESTGIYWRPVFHALCEAEAPLEVLLVNARHVKNVPGRKSDALDAVWLAELTECGLLRGSFIPPAQIAVIRELTRYRKKLVEARTSELQRLAKVLEDGGIKIDSVASALINGERDPGVLADLARGVMRKKIPDLTLACAGRFGAQHALMCTLHLEHIDHLTDMIARLNTRIEAASLPFVHQTQLLATIPGIGERAAQVIISEIGVDMARFPTAAHLASWAGLCPGNNESAGKHRSGKTRKGNTELCTTLTECAWAAGRTTTYVGAQFRRFHRRFGKQGGKKAATATAHTLIVIIWHVLTENTAYRDLGADYFTRRTDHPDARKRQLIRELEALGHKVTLEPATA

SEQ ID NO: 275270 - protein, 342 aa, unidentified
MKITTVGIDLAKNLFQVHGVDERGKTVLKKQLKRDQMMAFFTNLPACLIGMEACGSAHYWANKLQRLGHTVKLMAPQFVKPYVKTNKNDVADAEAICEAVSRPNMRFVPIKNSEQQAVLALHRARQGFVKARTAQANQIRGLLAEHGIIIPKGIAYIGKHLPEILEDGENGLPGSFRILIKRLGDHLKELDRHTQELEVQIQNWHRDSTASRKLAKIPGIGPITASALVASVGDAKNFENGRQLAAWLGLVPRQNSSGGKQTLLGISKRGDSYLRTLLIHGARAVLRVAERQAHQANSWLAGVMERRNYNVAAVALANKNARIVWALLAHDREFEADYGAEV

SEQ ID NO: 275271 - protein, 403 aa, unidentified
MTAVMIGVDPHKGSHTAVVIDLAEVPLGELRVRASAAQARRLVEWAAAWPQRTWAVEGAGGLGHLLAQQLVAAGERVLDVQPKLASRVRLLQAGDTNKNDPNDALSVAVAALRSRTWRQVSADDYPAVLKVWSKRHRDLARTRNQVACRLHAVLCDLVPGGHPKEISAARAARMLAQASPSGAVALARAELAGEFLADLRHLDAQLSDTRKKLAAAVRASRTTLTQVFGVGPVIAGIVIGDVGDVARFPNRDHFAAYNGTAPVEVSSGNRKIHRLSLRGNRRINHAIHMAAITQIRHRHSEGRAYYDKKVAEGKTGKEALRSLKRKISDAIFARLQADARQAATGRVTGPGGQPGNDFASSAAGSHPACRLFGQATPGPATTIRLGTTTRTRSTSRRTSGKPA

SEQ ID NO: 275272 - protein, 386 aa, unidentified
MAALGKGPRFAAVLLPRQRLKLARGAEDKEHAMSEKPNSGIAVIGIDIGKNSFHVVGLDDRGAIVLRQKWSRGQVEARFANMPPCLIGMEACVGAHHLSRGLQKLGHDARLMPARYVRPYSKGQKNDFRDAEAIAEAVQRPTMKFVATKTADQLDLQAMHRVRERLVSQRTGIINQIRAFLLERGVAVRQGLRFLRSELPGILARPSDILSPRMVRIIEDLAGDWHRLDERIEGLSSEIEAIARRDSSCERLMSVPGIGPIISSAMIAAIGAGDVFSKGRDFAAWLGLVPKQISTGDRTVLGKISKRGNRYLRVLFVQAAWVVLIRPKSWERHGLKSWIEAAKKRLHRNVLAIALANKLARIAWSVLAHGRSFEASKLAEVAAKSA

SEQ ID NO: 275273 - protein, 343 aa, unidentified
MAIVAGFDVHRNQITFDALDTETGELCCGRIASTREAVRGWVGRFPGQQVDVAVEACTGWLFVCEALAEAGAVPHLADPAEVAARRGKKRRAKTDRADARHLRQLLAEGRLPEAWLPPAHVCEWRTRTRLRKTLLDERSQWRQRIQATLFHHGIPAASVPTRLLSAEGRRVLAALPLPEAARERTQVALALIDAIDAQLAPLEREIRALARRQAGCQALQRHFGIGPLTAPTILVELGDVTRLSASRKAVRAVGLDIGVHRSDRHSRLGKLTRQGPPEARWALYEAAQSACRRTSPDHQQYLALKARGLSHTQASLTIARKLARRCFHALRALGPAALQPVSD

SEQ ID NO: 275274 - protein, 356 aa, unidentified
MQTQVTKKIDFNGKELFIGLDVHKKSWSVTIVVDGMEHRTFTQPPDPLTLNNYLQRMFPGGYYNSAYEAGFCGYGIHRELNSLGIKNIVINAADIPTSQKDKLQKRDPIDSRKIARALEKSSLRGIHIFDREQEELRSLNRTRFYLMRDLRRSKNRIKSFLQYYGESIPPEYDNNQWSLKYISWLKQIQMQTMSGQDAFTNLIRSYEYHREQLLRLSRQIRQRMREYDNELYTLLKTISGIGPLTSSALITELGDINRFPHIDHLSSFVGLIPRVRDSGETTHTGGITFRCNSFLRTMLIEASWQAIRMDPALMQYYQHHVVNSKGHKVIIKIARKLLNRIRYVMKNRQPYVTGVA

SEQ ID NO: 275275 - protein, 425 aa, unidentified
MNLLILKGVPMALKIVYKICCGIDVHKTFVVACIASTNDKGVTSYESHRFSTYTSGLKTLLQWLLNRNCKDVCMESTGKYWIPVYNILENDCSIVLAHPKYVKAIRGKKTDKKDAKWIADLFKHDLVVGSFMPPADIRQLRDLMRYRFKLTCFQSSEKNRLQNCLTVSNIQLGNVVSDTFGKSAQAILDKLLENPADTSLDLEPLIYKSLKKKLPELRDAIDGYISPEQVGKLKVIKAHYESLESRKAELEELILALAAPYQQELAILQTAPGIRSDFTAIGIISEIGTNMEAFPSAKHLCSWAGLTPTNNESAGKKKSVRVSKAGCYIKPLLVQCANAVVTSKKHPEIRNRYLRLKKRRGHKKAIIAIARMLLTALYHMLKNGENYNAELYRKSDLPPADWEITVEQAIIIARNQGYKIKSATA

SEQ ID NO: 275276 - protein, 411 aa, unidentified
MEAAVITAVGIDVSKSKSTVAVRRPGGEIALRPFEVHHTNSDLKKLASTLKKLGGDIRIVMEHTSTYWRPIALTLKEAGFFVSIVNVMLIHDFSDNTIRKLKTDRADALKIANYALTFWDTLPPFNNEEETRLLLKMQSRANERITATATALRNGLIALADQTFPGVNIAFAPNTKNANGHEKWVDFFLRYRHKDCVCQYSMEAFTESYRGWCKRKNYKFRTDTAHKIYLLAQEGVATLPKCESTKMLITQACKSLNAVCEAKQSTQLEMQRLAAMLPEYEVVMQMEGAGPITGPALMAEIGDVRRFKNKKALVAFAGIDAPPFQSGTFESKSRHVSKRGSPHLRRTIFIVSNIVLTRSNPENAVYCFMDKKRSEGKHYYVYTVAGSAKFLRVYYARVTEFLRSQPSSDAC

SEQ ID NO: 275277 - protein, 359 aa, unidentified
MIAIGVDVHKRQCTVAIQREDGELGCFGPMENTREGWRELLDRLPPEAEIALEVSTSGYFAMSVLEEAGWLDRAHWVHTAGIDSLRKQKYDRLDAQRLARKLSVADRDPLPEAWFPPAEIRQLRLRARQRCWLAVLRTQVKNRLQSLLQMHGLRPTVTDVFGVAGRAWLAGQVLPEATRESVEQLLRVHDFLIQELEKAEAHLRAVDRQFPELRRLRTIPGIGEILAPVIWSEMGRLERFRSAEAWVNYTGLVPSLYESGEVSIRGGITHQGSAWVRWALVQAANGVIQGVNPFARRYRRLRRRKVSNVAKTAIARSLARCVYGVLKSGGDYQAARWGRCPAEFARSSGAGKPEVAMGH

SEQ ID NO: 275278 - protein, 315 aa, unidentified
MNIIAGIDISKATVDVCVAGKTRSFANDLQGYRQVAKYCKAASLVVMEATGTYHLGLACYLHSRDFKVAVVNPARPCYYAKSLGLRNKTDKVDARVLAEFGRTHELELFVPPTDAELNLCRLVRLRSDLVAQRVQGKNRISDPAVTGFEGSLLAAQAAFLDEQIDQVEREIVRVLKSDEALGRACDLLTSIPGIGAVTAWSILAEVRDVRRFASAKKVAAFAGLCPSLRHSGTSLTGSGKLSRQGCRPLRKALYMAAVAAIRCSGPFEDFYERLLAQRKAKRAALVAVMHKLIRVAYGVLKGGVPFDCQPGLTPS

SEQ ID NO: 275279 - protein, 321 aa, unidentified
MSKYHLGIDVAKDKFDVALLIEEKFKTKTFNNTTKDFTALLEWLNKHNCSYPELHCCMEATGVYGHELATFLIENRLKVSMVNPARIKSFGKSEMLRTKTDKSDSKLIARFCQAMNPALWAPAPEHIQLLQGLVRRLDSLIAIKLQEENRLAVTNEISIQESINSVIKVVEEQILEVKNKINNCIGNNDDLNKKRELLATIPGVGEATINTVLAFLVGYEQFDSAKQMAAFIGLTPRHHESGKSVKGRTRISKVGDAQVRKSLYFPAIVAKKHNPIIKAFCEKLEKNGKTKMEIICAAMRKLIHIIFGVIKNKKSFDPKMA

SEQ ID NO: 275280 - protein, 366 aa, unidentified
MAITHVALDDSKRVIVAGILRADATQPELREIPNDPRQVRRLFERLLREAPVRACYEAGVSGYDLYRQLTALGVDCAVIAPALTPRKPGERVKTDRRDAAKLVRLFRAGELTAIHVPTEAEEGVRDLTRCRDDVRADIVRWRHRVLKLLARHGRVYQAAKNWSQAHWTWIRAQRFEDAALARTLEAALEALDQAMRRRADLDRAIEDIATEPPYRDAVGALRCFRGINTLSAMILVAEIVDFERFRRPRALMAYLGLVPSEYSSGDRHRRGALTKAGNTHARRVLVEAAWHYRHRPALGPRLARHTADQAPAVVAEAWRAQHRLHRRYRHLVGHGKRPTVAVAAVARELAGFIWAAMTQAPRVRAA

SEQ ID NO: 275281 - protein, 346 aa, unidentified
MSKIYQEVNMKYVGLDIHKEFCVATEMDEEGNIIRDGRIETSREAIEEFFSSVERGKVAIESTGIWDYIYEILDVLGLEVKLVNPVKARAIAAAKIKTDKVDATILAHLLRSNLIPEVYIGNREMRELKRLINERLLMKKIGNQIKNRIRSELLRRGIRPEMNIFTKKGEQYLRALRINSIIRELRVLESVEKEIHSIDEELLEYYENNEDAQLLATIPGVGYYTALTLAAVIGDINRFPSSERLSSYFGIVPSTKQSANTVYRGPITKEGSSTVRWLLIQCAWVHVTHCTDSFLTKFYQRIAKKKGKRKAIVAMARKMTRVIYWMLKTKEPFHVEGYKIRDIHAE

SEQ ID NO: 275282 - protein, 350 aa, unidentified
MMIIGCDYHPGFQQIAFVDTETGELQERRLEHREEAEKFYRDLGAQGVQVRVGMEASGHARWFERLLCELHFELWTGDAAAINAKRVRKQKTDRQDAQLILRLMLKDDFPQIWVPSWENRDLRQLLWHRHRMVQARTRIMNQLQAVAINEGLRCKKRLWRDAGREQLETFRLAPWASRRRRDLLELLDRLTPTIAELTAAIEQEVERCPAAQRLQTHPGVGALTALAFVLIIGRADRFQCGKQIACYLGLVPLEKSSGNQRRLGHITKQGNSLLRFLLVEAAQVTVRSLPEWRSKYCHMALRRGRKIAKVAMARKLAVRLYWMMRKEWDYEQLRKFGSYAGKPGHRDGVK

SEQ ID NO: 275283 - protein, 319 aa, unidentified
MKTTSKPNIHRNGRHVGIDVSKATLDICVLESDLHWTADNAEAGIKHLTSRLARYKLSRIIVEATGGYERKLVAQLAAKGLPVVVVQPVQARQFAKAQGVLAKTDKIDARILAQFGAIMKPDVRPIQSANIRKIRDLLARKRQLSESRTQELNRNHKAEKLLRPSHRRLIKFLDKEIKWVDSCLQKAVADVTEWKATYNLLISVPGVGDGVAYTLLGELPELGSLTSRQVAALSGLAPYNHDSGNMRGKRRIRGGRAPIRTMLYMAMMCAIQHNPVMKSFYDRLVSQGKHKKVALTACMRKLVTILNAMVRDGKAWQQA

SEQ ID NO: 275284 - protein, 418 aa, unidentified
MEDENNWFVGVDWASQTHHVRLSDAKGAKIGERAFVHGGEGLKEMADWILKSTGAAPEAVMVAIEVPHGPVVESLMERGFQVYAINPKQLDRFRDRFSPAGAKDDSRDAEALADALRTDRRCFRLLAPLDPVVVELREWSRIADDLRVERNRLSNRVRELLWRYYPQFLELSDDFAADWFLDLWRLLPTPDKAKRVRETTVERLLKRHRIRRITAAEALERLKAPSISVAAGTVSAATGHLEAVAGRLALVNRQIGEANGKIDRLTERLGGGEETAEGQREEQRDVTILRSLPGVGRIVLATLLAEAQDALQRRDYHALRCLSGVAPITKRSGKSKIVLMRQAAHVRLRNAIYHWARTAVQHDPRSRSKYAALRARGHGHGRALRSVGDRLLAVACAMLESRTLFNPSLPAKSCYPRP

SEQ ID NO: 275285 - protein, 361 aa, unidentified
MSESMALVGLDVHRAQTVAAVLDPVTGELSVERLRGAPAQVVLAFLEELGRPVRAVYEAGPSGFGLARAAEEHGIDVRVVAPGSIPRAPGDRVKTDRRDAKRLVRLFAAGELSFAFVPSETDERFRDLVRCIDDARKDLMRSRHRLSKFLLRRDLRFTGRSWTVPHQRWLGNLVFDDALSRATFIDYRCAVEALAQRRRALIGVLEEAAPQSSHGETIARLRCFRGIDTLTAAGLCAEVGSFERFAKPALLSGFLGIVPCEYTSDTKRVQGQITKAGPPHARRLLVEAAHHYRHRPAVGETIAARQAGQDPRVAAIAWRAQKRVNARWTHLGARRGKHTGTVAVACARELAAFCWEAATLD

SEQ ID NO: 275286 - protein, 346 aa, unidentified
MLYCGLDLSRKRIDFHVLDQGGVVVEAGAVGADVDALAGLARRLAGYELPVRATVESMNGARFVHDELERHGWEVLVADAAKVRGLAPLACKTDKIDARVLAELTCRDLVPAIWLPDPDVRGARERARFRLHLVRHRISLKNRIHQTLVTHGVPCPVSDLFGLKGRQKLERMQLPEPWAGTVQASLRLLDELAAEIDQIERELRVLGADHRYVPLLTTVPGIAWVLGYTIAAEIGDIDRFASPKKLAGYTGLCPRVYQSGNSDRRGPITKTGPKYLRWALIEATSHACRHPAYAARYQHTKTRLGRQRGPKVAQVDLARRLSEAIWYMLTRNQPFAPAGATQVLAA

SEQ ID NO: 275287 - protein, 392 aa, unidentified
MIYVGIDAAKRKHDCCILDPQGKPYPVFSFSNSHDGFQSFFQKLFSICSDKGPIKIGLEATGPYSENLFNALVDRSLPVLRINPLLVKNFKSSMSLRRTKTDKVDAQAIAQMVKEKGDSLQTYSTSLYHMEELKSLTRYRLKLVGEQSKLRVSVSRLVTLLFPELESLVSSLHLASIQALLIEWPGHQQLANCSLKRLTNLLKKHSRGQFGKPKAIAIQQAARQSIGKVSPSKSLELRQTLKKVAYVQQDLDEVEAQIKEMVDSLHSPILDIPGIGYTTGAMILAEVGDFNRFANADKLLAFSGMSPSKYESGEFKGTTGKMEKRGSSYLRYALYTAAKLVSQFAPQFKSYYQKKRAEQKPYNVALSHVAKKLTRVLYKLGTTGEAYQPQVA

SEQ ID NO: 275288 - protein, 436 aa, unidentified
MQVNTTIPKVSIGIDAAVVAAHQVAVRGEVREDFRVAPTLAGLATLIERLEPFSGAMVVAEPTAGTWLPLAHAVAEAGCRIGFVANRDSARLRRAIVGASKTDVIDADMLARCEDVLGVDPAVVPPPGQIALRRAMRRRHVVTIDAHRVECRLWALAAWAFPDLWRATGGHTLAQPLLTRWPHLDQLARARSSSIARMINAHSRDRDPARRAARIRDAAAGWAQFWGGRLDLDALAWEVNAMLSDINAADGRHADTTDHALGLWRTHWPDDVLVSIPGLGPICAAAIRGWWGHANQFHSAKAAAAHAGLNPSMWSSGLTEAPSRRITKQGPAELRLALYQAANVARRRDPQLAEHYRRLMCERGHNHISANTAVARKLACRAWAIATTAKPYEPRDLDGNPVTLDQAAQLAAGLEIPAEIRRRTRGNSRRGRLNPT

SEQ ID NO: 275289 - protein, 324 aa, unidentified
MHTDQPSDPPIVIGIDVSKAELVIAVQPTGERWTSATTPAALDAVVTRLQAAHPTLIVLEASGGYEAPLVAACATAGLPVAVVNPRQVRAFAHAIGRSAKTDAIDAELLALFGLRVQPAPRPVPDAATQALAALVTRRRQLLEMLTAERQRLAQAPPTGPVTRDLRNHIRWLERRLQDVDDELDRTIQASPIWRVKEDLLRSVPGIGPTTARTLLAELPELGRLNRRAIAALVGLAPFNCDSGQRRGQRHIWGGRATVRASLYMAALVACRHNPPLAAFYQRLRARGKRPKVALVAVMRKLLTLLNAIVKHRTPWQPAQADLAV

SEQ ID NO: 275290 - protein, 408 aa, unidentified
MNKLFVGIDVGSRDNAAYIMLPNGDKYSSFPVQNNLGGAMAVSKRVVAALTELGLPCASIGIEATSVYGENLIYFLREDGALARFERKLFILNPKQVKKFKDSYSDLPKNDPVDAFVIADSLRFGRIGNPIYNLDDYRYVALQKLTRARLCAVQNLTREKQRFMNQLFMKCSGLAQDKVFSDNYGAAALAVFEEFESPDDIVNMDVDSLAAFISEKGKNRSPHPDEIAKAVQAAARGSYRLPKTVNDTVNQVLSISISSMRAIQGQIKLLDKEIERQFANIPNTLISIPGIGPVLSAGIIAEVGDINRFDDQACLAKYAGLAWKENKSGMFEGQITRQIKSGNRFLKYYLCEAASSLVRCDTEYRRFYDLKFKEVNKYQHQRALALTARKFVRLVFRLLKDNRLYIPA

SEQ ID NO: 275291 - protein, 391 aa, unidentified
MPMYFVGIDISKYKHDCCIISAADQQIISKFTITNDKDGFEQLLTALNSLSNPEDIKIGFESTAHYALNLELFLENAHHSFMEVNPVLIKEYKKSTTLRRTKTDSVDCESIARWLITVEYKPHSKGFYHAYSLKSLTRLRDRLIRQRSFYLVKITNVLDHTFPEFKPFFNERLSKTALYLLENYGSAEKMARMNSASYDKLRCISRGKFSIQQFLRLKELAANTVGVNNSIFDLELNTLLTLYKSLSDEINTLETEIIKLIEEVHPHYMSIPGIGPISAAVIYAEYGDISNFSNPGQMLAFAGIEPGINDSGTESHGGRMVKHGSSQLRYVLLNACLPLIRFDLTFATYYEKKRAEGKKHRVAITHVAKKLIRVIYALERQDVDFNVQKLR

SEQ ID NO: 275292 - protein, 352 aa, unidentified
MKDRVVAKGRRALSPKEPEQLSGPNKPVSARKGDKGEKAVEKEKVYVGIDVAKANMDVAVHPSGKRWSFTNDDRGISEAASSLRELFPTLIVMEATGGIEAPLVAALGVAGLPVVVINPRQIRDFAKATGKLAKTDVLDAQVMAHFAATVQPKPRTLPDAQSKEFAAILARRRQVIEMLTAERNRLSSAREVVRERIEAHIAWLEQELDSIDSDLRSSVRESPVWREKDNLLQSVPGVGPVLSATLLADLPELGTLNRRQIATLVGVAPLNRDSGTLRGKRTVWGGRAKVRPALYMSTLVAIRHNAVIRAFYQRLCNAGKEKKVALTACMRKLLTILNAMLKHRTPWNYAVA

SEQ ID NO: 275293 - protein, 447 aa, unidentified
MTLDVVHKTGKTPVLGGILSQYVGRKTSCIENEITKTRNHSRQRGNIMRVVFGIDVSKASSEVAILVNGDKVHGYTIPNDSIGFNRLLGDLKTVHNPEIVFEATGVYSRRLQAFLEDNSYAYTRLNPLAAKKQLDSLRVRKTDKIDAEKLAQSQFVLNRQPTYVQEEVYQELRDLSRFYQNLTEDIVRAKNRLHKVLQVTFPELESLLSSPTGEQYWNLVIAFPCKEMVLELSSDDLSTVIRNSTSKRISDKRVTYLTEKLTDLAHKSYCAVKKTSPMLEEVRYYAQELLRLSERRQVVLDEMVSLAQPLPEYEILLSIPGIAETTVTSLIGELGDIRRFQSANQINAFIGIDLRHYESGNFLAKEHITKRGNPYARKILFKCIHNIASASHTNPCHIADFYEKRKRQSQTTSTKPHTIASIHRLIRTMYYLITHNKIYDYNLATSQ

SEQ ID NO: 275294 - protein, 390 aa, unidentified
MPQTNDLSRSLTALDENSTLIAVIEMSQARWLVGAIVPGVERRPSKKLETSEELLLALLHRWRAEAVKVGRSINRIAVAFEAGRDGFWLARWLRARGVEAYVIHATSIAVSREHRRAKTDRLDAALLQRAFLGWLRGERGHCSMVTIPSFEEQDAKRPSRERESLVGERTRIGNRIKGTLARLGIRGFKPAVRRAAERLALLRTAEGMPLPPNTLAELNRALTRLRFVSNQIAEIEATRLERLRTEPDRHCHPMILLLARVIGVGIETADMLVQEVLSRKLRDRRAVARYGGLTGSPAESGARRREKGLARAGNARVRRGMLQLAWRFLMFQKDSALAQWYRARTTDTRGATRKTMIVALARKLLIALWRLVTTGAVPHGVILRPAAAAA

SEQ ID NO: 275295 - protein, 356 aa, unidentified
MNYVGIDYHKKYSVVTAVNKEGQVLRACRLDNRPEQFHDFLTGLGGPCKAVVETSHTWGLLYDLLEEIDCVEDVTLAHSLKVRAIAEAKIKTDKIDSHILAQLLRVNLIPAAYIPAKETRTFKEMIRQRVFLVRMRTRLKNRIHVLLDRRHIALPPISDIFGRQGTDYLKKVKLPGVDGFILKENLKLLELFNEQIKKTEHEIQHLIGSDPRVNLLRTIPGLGPILAAVIALEIDDISRFTSAPKLASYTGLVPSTYASGGKVFHGRLLRMSNKWLKWAFVEAAWVAMRCSPYCRMFFESRKRNKGCHTAIIALARRISEIAWHVLAENREYQERPFKALKKTTGKKISPAALTIT

SEQ ID NO: 275296 - protein, 439 aa, unidentified
MNHQRLQTQREALAGKIVIGIDPAKDKHQAAVVDAHGNQRGSSFSFPVSATGYSETLWRNMAKVVPNCNVQNVVFAIETACNLWETLAFYLRSRGYAVVLVSPLSTHHSRPIMSMEFSRTDPKDAYLVATVAQRGAYHAYEQFPPESHAMHLLAITYDKLRKNRAQNRARIRSLLDRVFPEFPRILDIDTDTAVYLLRKYLFPDEFLAMDIRSETKTIEQISRRQCGRATLEKLQAAARTTIGIVRQSDERLADRLALDAYLALIDTLERHMHRVLEELIVRAKQLPQYERINSLSGAGPKLTALFLGEVQDLSRFTHYRHLEKLAGLNLRLYDSGRYSGTRHISSIGNNRLRWIIYKMTEETAKRVPEVRIKYLRRQLKRRKHVKNVVAAVPQLLQLIIAMEKHHHTYTQRAEAVAAMHELEKHYNTLKASSHKRTAA

SEQ ID NO: 275297 - protein, 342 aa, unidentified
MQVTTIGLDIAKNVFQVHGIDAAEKVVVRKQLRRSQVLAFFKALPPCLIGMEACATAHYWARELTKLGHRVRLMPAKDVKAYVKRNKNDAADAEAICEAVRRPTMRFVQTKSAEQQGRLMLHRVRDLLMRQRTQVINALRAHLAELGITAAQGTAGLKELLKIIASDADERLPVDAHASLVVLAAELQAMQTLVGSLEKRIMAQHRGNEASKRLETIPGIGFIGATAIAATVTDPTAFRSGRDFAAWIGLVPRQDSTGGKQKLGPISKQGDRYLRRILVVGAHAVLRYAKQNPEKYPWLTQLLARRPFKVVAVALANKMARMAWALLAHGGTYRAPALAAAA

SEQ ID NO: 275298 - protein, 359 aa, unidentified
MRALYAGFDLHGNSNYLGIIDGNGKRVFGKKLSNDLGWIREVLVPFKGEVVGVVVESTYNWYWLVDGLMGEGYKVHLANPSAIQQYVGLKHADDKHDAFWLAEMLRLGILPEGYIYPKEERPVRDLLRKRGHLVRLRTSLIISLQNILSRNLGRKVNVNDVKALKEDRVTPLLESSEDLALAGRVSKEAIDFLTHQIRRIEGVVEKRIELREEYRYLLTLPGVGKILALTIMLETGSIGRFATVGDYVSYCRKVPSQWTSNGKRKGSGNKKNGNKYLAWAYAEASELARRFYSEPRAYYHRKMQKTNAPVAHSALAHKLARAGYYVMRDQVPFEAQKLFGRGRGWNGEPELGLVKNHET

SEQ ID NO: 275299 - protein, 377 aa, unidentified
MLSIGIDVSKGKSTVCGMKPGGEIVYTPFEVQHTREGMSELVSLLRGSGEEVRVVLESTGSYHCPVVAALLENGIFVSVVNSLRMKRFCSQSIRRVKTDQIDAMQIALYGLAYWPELQPTRLPENTYRELQLLARQYYQMTSLLIKAKVDFNAICDQVLPGMQELMNDHAGRHKLSDFVLRYRHTTHILEMGETRFRKDYCKWAEKKGYRNRERMAALIFATAQNGIPVLPDAPSTQIVITEAIRVLHTVEASRDAILTQMQALAKTLPEYSLVREMPCIGDTLAPRLIAEIGDVRRFHSKRALIAYAGIDAPPYQSGKFSANNRHISKRGNRYLRKTGYEVMQSYVMHKPANDPIFTFIEKKRGEEIGRASCRERV

SEQ ID NO: 275300 - protein, 496 aa, unidentified
MTVVLPNPPPPADAQPSRRRQAGGLPILQPDTAGIDIGATQVYVAVPADRDPEPVRCFRTFTADLHALAAWLQQCGIRAVAMEATGVYWIPTYQILAAAGFTVCLVNPRHFKHVSGRKTDVSDCQWLQHLFSVGILQPSFRPADEICALRTLFRHRQHLVAQAAEQIQLQQKALDQMNLHLHHVLADLAGSTGTRIVEAILAGEREPAVLAQLRDPRVRADAETLQAALTGDWRPEHLFTLKQARESFLHYHQQLTACDAEIEQWLERHPVRVTPPADPALPADPALPADPALPADPAPAAAPGETPPPPRRHSHRNAPVLSRLDLGSELAQRFGVEVTAIPGIGVSTASLLYAELGADLHAFPTSAAFCSWLGLCPDPRKSGGQVIRHRTRGLKHRVAGIFRQAAQALARCNNSLGSFYRKIRGRCGGPAAVTATAHKLARIFYHLVTTKEAYDAAVFAWEDARQQQRRLKALERQAKSLGYSLAPLPEKTATPA

SEQ ID NO: 275301 - protein, 346 aa, unidentified
MKTFIGIDVSLASSAVCVIDEHGQVVKRAQIDSEPEALIAFLRDLPFAIEAIGLEAGPLSQWLHRGLGEAGFELVLMETRQVKAVLKAMPVKTDRRDAEGIARLLRMGWFRPVHCKSVSAQEMRALLSARKAVQKAALDIEQSLRGVLRNFGMKLGPVGKGKGRYESRVRELVAGNAALEAAASAILDARTVLRDRLSALDRRVLELARRDDACRLMMTMPGVGAVVALTVRSAIDDPARFRSSRDVGPWVGLTPRREQSGERDVTGRITKAGDAALRTALFNAATVMMHNARPCWLKAWGMQVARRRGSKRATVAVARRIGVVLHRMWLDGTEFRPERKPVPTTA

SEQ ID NO: 275302 - protein, 377 aa, unidentified
MKAPSTRPAAVLGLDVGKSSHWARLVDRDGEVLASAPVRNREAELDALFASAPAGTLVVVDQFRNIGSLAVRRARAAGLGVAHLPGLAASRAAGLFAGEAKTDERDAAVIARTALGVPDSLSGVPGRGEALEAARALSSQRDHVVACATRDKNRLRAVLLESCPALEAAVDLSDRRWLELLAGFGGAWGIARSGAGGPRAEAAGEAAAASTAPPPALIEAENRQVRFLAARISEALDEAGALEAETAGLLEGDETYACLLTVPGIGPRTAAQLAVSVDIARFPDHDHLASYCGIAPRVRSSGTSVRSVRASRRGDARLKSLLIFSCNSLVRSSGRYGEYYRACRARGMGHGRALKAVARKRLRAIYAVMRDRVPYRE

SEQ ID NO: 275303 - protein, 367 aa, unidentified
MSRMKRLTVQQLDVSKDYLVIGLDLAKTDTAVIAITTDGELYAIDRLEYPVLLNQAKQLGPTIFAMEPCNGMTYLVHELEELGHECRVITGEAVKDYVKSHFAGQKNDLNDAQAIAFLAQDEMLRFIRAKAKSEMTMQTLQVIRQQLIKQRTCSVVCIKGICQNYGLVISKSIMSEAKIRPIIEESQRLPEEIKEPLKTLLRNAARFTIDIKQVDKAIEQGLKGNETAERLLEVPGLGPQCVSRLLTTIGDINRFEGPKNLAAYYGLVPRSHTTGHNEQMGKITKHGDRLMRTFLVQGAHAVLVLHTKGRLPKSALKKWIDKKLSAGMPCSKLGIALAAKLLRIAFAVLKHKEKFDIKRAGVARCNL

SEQ ID NO: 275304 - protein, 397 aa, unidentified
MWTLGIDVAKNRHAATLLDETGKRVFKNFKFANTHEGVESLQARLEEMEISKQNILLGMEATGHYWMVLYHFLSEAGFQVRVINPLMTAARRNIGIRGTKTDSADSELIARILREADPKFSAVPDDQTRQLRDLMRLRYECAQTLISEKQRLTALLDLVFPEYAQHFSNIFGAASLELLSQFPTAKDLAEVDLRKLTKILKDSSKGRMGRQRAQQIKSSAKNSFAINQAIDSFAIEIRFIVQRMNLLSAQIEELSSQAKNHLAEQQQLLQSIPGIGPVWAATILAEVLPVFHPEKKTGARKLVAAAGLDVRLNESGESTGKGKMSKRGSKYLRTAAMQAAEVAALIAKDPMFKSVYDKQRNRGKKHGVALSHTANKMLHVVFSVLKNHEPYELRLNH

SEQ ID NO: 275305 - protein, 446 aa, unidentified
MSSASLRLLMLMRVPRSARLLAVREGEPTVEIVYERVAAIDVGKKIIAVAVRTPGERAGKRRQQVRKYNAYYRTLVEMVRWLLAEGVTHVSMEATGIYWKPIFHALCEAERPLEVLLVNAQHVKNVPGRKSDALDAVWLAKLTECGLLRGSFIPPREIAAIRELTRYRKKLIEQRTSELQRLGKVLEDGGIKIDSVASALTTVSARDMIEALINGERDAVVLADLARGVMRKKIPELTMACSGRFGAQHALMCTLHLEHIDHLTDMIARLNTRVDEASLPFVQQTTALATIPGIGERAAQVIISEIGVDTRFPTASHLASWAGLSPGNNESAGKHGSGKTRKGNKELCTILIECAWSAGRTSTYVGAQFRRFHRRFGKKGGQKAAVATAHTLIVIVWHVLAETTAYRDLGSDYFTRRIDHPDARKRRLIRELEALGHKVTVEPAAA

SEQ ID NO: 275306 - protein, 346 aa, unidentified
MMIIGCDFHPSWQQVCWLDTETGETGEQKLVQAAGDAERFYRQVPAPALIGMEATGNCHWLVDLLSELGHELWVGDAAQIRASYVRPQKTDKRDAAHILKLLVEGRFPRIWMPSSEVRDLRQLLLHRYKLVIIRARVKNELQHLCLNQGVQRQHKLWSRAGQQVLRELPLKPWAARRREDLLRLMAMLDQQIEPLDQAVKAEAQRDKMALLLQTQPGVGPITALAYVLTMGEVSRFPRGKQVASYLGLIPREHSSGGRQKLGAITKQGNRMMRMLLVEAAQAAVRYDPEFRKEYRHRCHRKPKAVAKVAAARKLAIRLYWMLRTHKPYPEVVRIESSPRVPLVGAS

SEQ ID NO: 275307 - protein, 346 aa, unidentified
MQYTAFDAHKHYTWARVERPDGTVVREKKILHERGAFRQFLASSEPGSLVAVETVGNWYWIVDEVEAAGCMPQLVHARKAKLMFGSVNKTDRLDARGLVRLQRAGTLPVVWIPPRALRDARELPRTRMVLVAQRTRLKNRIHAALSKYGILLADASDLFGKRGRQELQARLGELPPHTSFVVTRLLEQVDQLDREVEALEQRMGELFEVDEAIQLLMTLPGVGFILATVLRTEIGEVSRFSRGEQLAAYAGTVPRVHESGGRRHYGPVRSDVNQYLKWAFVEAANVICRHRRKHPQRHTSRLYDRVAKRKGHQKAIGAVARHLAEATYWMLAKGEAYRDPGSSTGA

SEQ ID NO: 275308 - protein, 319 aa, unidentified
MTSDTVMEYIGVDVSKARLDVAIESTGQTWAVANDEVGIASLIVRLSKLNLGRIVVEATGGQERLLVAELWQAGLPVALVNPRWVRDFARATRRLAKTDKLDARLLAHFGLKTEPALTQLPSEAERTLEAFVTRRRQIIDMLTAEKNRLGTVPPAARDRLTEHIGWLEREAADLLAEIEALIHKVPALEDKGHLLRTTPGVGPVLTATLLSELPELGRLDRRQIASLVGLAPFNCDSGKKRGHRHVAGGRAEVRSVLYMATISALKCNPVIRRFKQRLCAQGKPTKVAITACMRKFLTILNAMLRDQRPWSADFTAAPT

SEQ ID NO: 275309 - protein, 387 aa, unidentified
MPQPNDLSRSLVTLDNNSTIIAVVELSQSSWLVAGMLPGIERQPCKKLEPSPERLLALLHRWQDEAVRAGRTITRIALAFEAGRDGFWLARWLAARGVEAHVIHASSLAVSREHRRAKTDRLDTELLKRGFLGWLRGERGHCSMARVPTIAEEDAKRPNRERDCLVRERTRIVNRIKSTLARLGIRNFKPTLRKAGERLATVHTPEGMPLPPNTVAELQRDMARLGFVVGQIRQIEEARQKRLEQQPETGPQAMVRRLARIVGVGVETADMLVHELLSRPMRDRRAVARYAGLTGSPDESGAQRREQGLARAGNARVRRGMIQLAWRFLMFQKESALALWYRARTADSRSGTRKTMIVALARKLIIALWRFVITGEPLEGVVLRPAS

SEQ ID NO: 275310 - protein, 406 aa, unidentified
MRGPVITVDVSKGSCHYQPYIEKGQPLRKPRVLHDTIEGFSDLQEAIEKTKEKSGSNEVPVVFEATGIYHRCLQKYLDDHDIHYYVISPLLSAAYRKTNLHANKTDDLDCAHIAKAYYNEDYLLPYRKQEDRFVRMQRMNRYYETELSHLRKRKVAFRNALDIIYPRLDRCFKGKAGLYDQVPMEILKTYPHPSLLLKHREETVVKTISKKTGHNESFVREIVSRFYECTRHCYPGVNVNEIEVIKFSEMIEKLQDQTQLCDRILKELIEEARKIDYYPGVVSITGIGENLAARIIAELGDMSRFKNRRAISAYAGLNPKIQQSGETDGTHLRISKKGNRRLRCLLYLGAACNYRLKRHDELYEFNQKKRQQSITPLKTKAANIATAHKLLIIIFSLCRTGEKYRS

SEQ ID NO: 275311 - protein, 428 aa, unidentified
MADRANATPGCNLVAIDVGRYSNAVLIEATSGKRHRFKMANTAADFGRLLGFLRGLPGSCRVGLEPTGDYHRPIAHRLLSAGFEVMSINSVALSRYREAIFNSWDKNDPKDAGVILEMLRRGAVQRYVDPMVAGTHDLQELAKTYYQVSRARTKVQHSLINHGLPLYFPEMHRYWATTRNEWFVRFLLQFPTPAHVRSLSCAQFVEAAWDVVGRKVNKRAKLEEIWEVAGSTAALPHALDSLAVETFRITLRRYQELNALRGELEQRAERALEANADFAHLKTLPGIGAVIAMTILAEGGDLRRFGHHRQFLKYCGFDLAKNQSGTQRGKEQLSKRGNARLRLAFWLAAVAAVHMRENSFRAKYERYIRTAPEDPDLRRKALTAVAAKMARVAYGMIKKNQPYRQFFEQSLPSGSIPLSAAVGAYATP

SEQ ID NO: 275312 - protein, 311 aa, unidentified
MRTAKEKEIGFTQMVSVGCGIDVHQHLIVASIRKSADEVETREFESYTSSLTSLREWCKSEGVTHVAMESTGVYWKPVFNVLEGDFEVILVNARHVKNVPGHKTDKKDSRWLSKLLLSGLLKGSFIPPRDIRELRDLVRYRKKVVGQIASEKNRIIKILEDANIKLSSVLSNVDGSVGTKVINDLIDGETSINKLMRHYHGKQKASREEFRKALEGHVTEHHRLMLKIHKDSISDKEAQLQCLDEAIGKATEAYTVEIELLQIIPGVGKDSAISIVSEVGVDMSKFPDETHLSSWAGMSPGNNETGGKKKT

SEQ ID NO: 275313 - protein, 366 aa, unidentified
MGRIAGISAIVATVTRIGLDLAKNIFQVHGVDARGEVVLERKLRRDRVIEFFGRLSPCVVAMEACGSAHYWGRELATLGHEVKLIPPAHVKPYVRRNKTDAADAAAICEAAMRPGQRFVAVRSQDNQAETMRHRVREQLTTQRTALLNALRSHLSEIGVIAPQGAQHAYRLKAMLSDGADENGEIRVSDTVRAALSPLALQIDALDKAIDAIDEELLAAAKADAKARQLMTIPGIGPVIATAILATVRDVEVFASGREFAAFLGLTPRQCSTGGKERLGGISKMGDRYLRKLLVVGATSALHHAQGHNDALRCWIKTMLKRKAGLKYAYKLTAVALANKLARIAFAILRSGESYDDRPVAAQAQPA

SEQ ID NO: 275314 - protein, 356 aa, unidentified
MQTQVTKKIDFSGKDLYIGLDVHKKSWSVTIVIDGIEHRTFSQPPDPGALNNYLQRMFPGSSYNSAYEAGFCGYGIHRELNSLGIRNIVINAADIPTSQKDKLQKRDPVDSRKIARSLEKGSLHGIHIFDRELEELRSLNRTRFYLMRDLRRSKTRIKSFLQYYGEPIPAEFDNNQWTLKFVSWLKQVKMQTPSGQDAFSNLISSYEYHRSQLLTLSRQIRERIREYDRELYTLLKSVSGIGPLTASALITELGDINRFTNIDQLGSYVGLIPRIHESGESTHTGGITFRCNSFLRTLLIESSWQAIRMDPAMMQYYHAHLINNKGHKVVIKVARKLLNRIRYVMKNRKPYVTGVV

SEQ ID NO: 275315 - protein, 360 aa, unidentified
MTGTMTYVGFDVHARSAQAAAIDVMSGELTRVRFGPGIQTPVDWLQTLSGPVRACYEAGPTGYGLYRAAVAAGIGIEVIAPGLTPRGRGDRVKTDRKDAELLARCLMAGSLSAVVVPSPGVEAARELTRAHDACRRDLMNARHRVSKMLLRHGRVYPKPSTWTQEHRRWLAAQQFCEPMSQLTYADLIACVDGLTARKKTLAQRISELATDPGWWPTVARLRAFGGVDTLTALAIHLELGADWQRFEKPTRVGSWLGLTPSRSQSGESDRQGSITKTGSMLARRLLVESVWQYAREPGFGVTLRNRQDGQPDHVLQISNRAQQRLHHLYTSMRARGKPHNVTIVAVARELSCFLWAAATA

SEQ ID NO: 275316 - protein, 309 aa, unidentified
MNLICGVDVCADWLDAWTGGEYCRFENTLAGIEALLGFCRGHAVELVAMEATGGYERLAFGRLWAEGMGCAVVNPRAVRQFAEAMGYLEKTDRLDAAVIAGYAGAKRIAAQPPASEVQRQLAALVTRLRQLTALRTMQKNQRRLVEDVDALASIDEMLALIGRQIRGFEAGIITVIAGDPLWTRLDAAFRSIKGVADRTVARVLAELPEIGTLSNKAAAKLAGVAPLARDSGKRAGKRAVRGGRSGVRSVLFVVAEVVRRHDPDFAAFHRRLTLAGKAKKVIRIALAHKLLVRLNAKARDVRNQSQCPA

SEQ ID NO: 275317 - protein, 405 aa, unidentified
MFYAGIDWSDTHHDVLVIDDAGRQVKAPLRVNHTPEGLEELHLFLETITGPGGKEHMACIVETSSGLLVAFLLEHGWSVYPVHPTTVDRRRAASGAKTDAIDAYLLAKTGRADFAELRRLTPDSEKIAELKALTRDQDALVQMQTRLVNQLTACLKAYYPIALDLFAQLQQRSTLTFLRTYPTLQAAQAASVEQITEVLKQAGHTSAGKVAPKIFESLHQPQLVANEVTTRTKSRLMLALVAQLLPLVEQIASYDKEIARLFLSHADSEIFESLPRAGKRLAPRLLAEIGDDRKRYADAASLQALAGTSPVIFQSGTYSRIHRRHACIKPLRNALHQFAWQTTQTETWALEYYQRKRKEGKSHSVAVRALANVWVRILYAMWQNSECYQAATFEQARLQHLRRVA

SEQ ID NO: 275318 - protein, 357 aa, unidentified
MAHLQTIVIGGVDCHLDTHHAVALDALGQRLGDQPFPATGPGYAALLAWLQQFGRVQAVGVESSAAYGAGLTRALLAAGVHVIEVNQPHRHLRSRRGKTDAIDAEGAARSVLSGEARAVPKDTTGSVEAVRYLRVVRASAVKARTAALAQLGELIATAPAAFREQLRRCASVHARVTTCARLRIDPSVLHQPLPAAKLALRSLSRRILALEAEIARFDQQLTILVEALAPRTLALRGVGTITTAQLLITAGQNAERITDEAAFAHLCGAAPIPASSGKTHRHRLNVGGDRQANAALYLIAVGRLRYCERTRAYAARRTVEGRSKRDILRCLKRYIAREIYHTLRADLAALNARQLAA

SEQ ID NO: 275319 - protein, 316 aa, unidentified
MTTNAVVVGVDVAKDRLDVAVRPSGEVWSEANDEAGITALVTRLRPLGPALIVCEATGGFERAAIAALAAAGFPVVVANPRQVRDFARATGQLAKTDQLDAGILALFAERVRPTPRPLPDAAAQLLDAVLTRRRQLLEMLVAEKNRLGFAPKPLHRGIQAHIRWLERQLDDVTTELATLIEGSPVWRAKDDLLQSVPGVGPIVSYTLLGELPELGTLSHKQIAALVGVAPLARDSGTLRGKRMIWGGRASVRTVLFMAALCGRRWNPALKVFYERLKAAGKPTKVALIACARKLLTILNALVRDQSRWTSHVQYSC

SEQ ID NO: 275320 - protein, 372 aa, unidentified
MNYNTVYVGMDVHKESFTLCSCRYEDEKASHYQRTPASYKNVLRYLAFLRTIYGEDTRFVCGYEAGCLGYSLYHQLENFNVECVILAPTTMLEQRSKRRIKTDKRDAEIIARSLAQHNYSPVHIPTETDNQTKEFIRMRDDHKAELKKIKQQILSFCLRQGYQYDGSGNWTAKHVKWLRSLKPAGLYKEILDEYLLTYTILTDKLNRLDQRIEELASKEEYKESVSKLTCFLGIKIHTALSVIVEVGDFQRFVSARKFAGYLGLVPGQHSSGDDRNGLGITKAGNTHVRRLLVESAQSYTRGKIGYKSRVLRSRQAGNSPQVINYADRANERLRRRYYKMVLKDGKKYNIAKTAIARELACFIWGMMTDNIY

SEQ ID NO: 275321 - protein, 395 aa, unidentified
MFIVGIDIAKRSHEAIIIAEDGQVVRKAFSFRNNCTGYNLLLEQVRRLTLVKSQIVFAMESTAHYWLALYARLLKDGYAVMVLNPIQSHSLRELYIRKAKTDARDSLIIADLVRFGRCKASNVPQDKILALRELCRSRAYLVDMAADLKRKLIALLDRIFPEYESLFESVFSKASIAVLSKYSTPQKAKNANLRKLTDLLMENSNGHFGEWKAHQLKEAACSSFGIDDSGGVYSTLLGMFLEQILSLTAQADSLEKQISVFFQEFNNPLTSIPGVGTVLAATILSEIGDITRFSSADKLLAYAGLDPSVKQSGEFKSNQNRMSKRGSPYLRRAIWLASTVAVHRDPMFQTYYEKKISEGLHYMNVIGHVSRKMTAVIFAVLRDGQPYQPILQSAG

SEQ ID NO: 275322 - protein, 347 aa, unidentified
MKAPQYYVGIDIASASFTCSVGKMEGRWQIVVRPASFANEYDSFSAYLNWLHDHGVKPDNSVICMEATGVYNEVLAHFLCANGYTVAIEPPLKVKRAFKPEGHKSDPVDSTQIAEYAYRFWDELSQWTPRKEILEQIKTLLTTREQFVVERSGHQNALQALKRKQVRTPMAERMHERAIEELKRHAQEIEAEIQRLIDQDPDLRNLAALLISIPGVGALLAAHMLLLFKSAPEPYNPKSLAAFIGICPYESSSGTSVRGPSTSRHYGPPALRKLLHLAAMSIATHQQQFRLYYLRKVKEGKPKQLVINNLANKLIKIMVAVARTRTKFIPNYCSVNPALLKMTLTKS

SEQ ID NO: 275323 - protein, 346 aa, unidentified
MGMDISVLGVDLGKNVCSVVGLDASGAIVMRRKVRRETLIALAEKLAPCVVGMEACCGAHHLGRVFAAHGHDVRLMSPEYVHPYIKAQKNDDRDAEGIAEAATRPTMRFVELKSQDQLDMQTLHRSRDRLVGERTALINQLRAILLERGMVAPQGKRKLEQFLSVLMDEQGGAGLSQRMIVLVADARAQWAELDQRIAAFDAEFVRWVKDNEEACRLTTIPGIGAIIASALIAAVGQAESFDRGRDLAAWLGLVPRQFTTGGRPKLLGISKRGNKYLRRQLIHGARAALPYVVKRDTPLGRWAKDLSSRAHRNVAVVAFANKLARIAWAVLRRQERFAATGMPMAA

SEQ ID NO: 275324 - protein, 364 aa, unidentified
MMIEPLVRCCAGLDVHKAVVVCTVLQEDRKGKLRKETREYATFTDELAELARGLASLDVELAVMESTGVYWKSLYEALEAEGLRVYVVNAGHIKRVPGRKTDVSDSEWLAELGRCGLLRPSFIPPRDLRELRLLTRYRQKVSGMMASEKNRLHKLLDDAGLRLGCVVSDIDGVSARQIIAALIEGEARPEQLARLARGRLRDKHEALCRAVVGQLSDRHRFLLRTLQNHLQGLEAEIGEIDAQVVAAMEPYQEPWQILQTLPGFDALGAAMLIAEIGIDMERFGNKGRLSSWAGLCPGNNESAGKRKSGRAYRGNRYVKRLLCEAANSACRTNSQFKGMYQGIVIRRGHKRAIMAIAHKLLEVG

SEQ ID NO: 275325 - protein, 331 aa, unidentified
MDTDTGEFQEKRLAHPAEAEKFYRALVGQKVRVGMEASGHARWFERLVAELQFELRIGDAAEIRTKRVRKQKTDRQDAQLILCLLLEDRFPQIWVPSWENRDLRQLLWHRHRMVQARTRIMNQLQAVALNEGLRCKKKLWRERGRQQLESFRLAPWATRRRRDLLELLDRLTPTIAELSHAIEQEVEKCPAAQRLRTHPGVGSLTALAFVLIIGEVNRFRCGKQVASYLGLVPLEESSGNRRRLGHITKPGSSMMRFLLVEAAQVTVRSLPEWRSKYLHLVLRRGRKIAKVAMARRLAVHLFWMMRKEWNYQQLKKFGSHAGEPGNRDDVQ

SEQ ID NO: 275326 - protein, 413 aa, unidentified
MSHYKQTHIYVGMDLHKAQHTAVIINCWNERLAEIQIENKPSAFEELMKFVKKHTPKGLTPVYGLEDTGGNGRSIAVHLVENKQIVKEVNSALSFNERMSNATTQKSDSWDAFCIAKVLLARLDELPDANPQDIYWTIGQVVARRSAIVKHAATLKNQLHQQLSYHYPSYKKFFCDIDGKAALAFWEKYPAPHHLSSVGAEELAEYLRKASHNTCSTRKAEDILELVSKDGETKRNYQASRDFLVANMVQDMKRSRELIKQTEEQLRQVLVETDFKLQSMDGISTVTAAELIAEIGDIRRFSNADKLARFAGIAPVRFSSGGKGKDQASGQGNRVLNAIFHNLAVQQIQVAKGKNKTQRNPLMYEFYQRKLAEGKTKKQALICVMRRLVNIIYSMMKHKTEYRAATLTERPAS

SEQ ID NO: 275327 - protein, 342 aa, unidentified
MDHYAGIDVSLECSSVCVVDASGKIAREGKVASEPEALIAYFGSLRLPVVRVGLEAGPLSQWLYAAMKEAGLAVELLETRHVRTALATMPVKSDRNDARGIAQLIRLGWFRPVHCKSIGAQETRAVLTARKLVQSKLLDVENSVRGILRGFGLKVGKTTNRSFAGRVEDLVVNHASLHMIAAALLSVHAVLLRELKAFDKQVRSMARVDVKAKLLMSAPAVGPIVALTYASAIDDPGRFTSSRRVGAHFGLTPKKYQSGETDYTGRISKIGDATVRTALYEAAHIMLIKPIKGCAPLKSWAMRIARRSGMKKAKVALARKLAVILHRMLANATPFNAAMAAA

SEQ ID NO: 275328 - protein, 407 aa, unidentified
MEVLYPRCAGLDVHAGSVTACVRIATGVEVRYEHRTVSTTTRGLLELADWLTSQRCTHVAMEATGVYWKPVWHVLEAHFTLVRANAMHIRAVPGRKSDMNDATWIADLLAHGLIRSSFVPPAPIQALRDLTRTRKQLVGEIARHTLRIQKILEDANLKLTQVMTDILGASGRAVLHALIAGETDPETLADLTRGRLKAPRRALVDALHGRVTDHHRFMIEVHLTQIDGLEAALAAIDTHLGDALEPFRAAISLLKTMPGIGDTTARVLIAEIGTDMTRFPSVGHLISWAGLCPRLDESAGKRRSTRTRQTARWLKPMLVNAAWAATHKKEGYLSAQFLRIKSRRGAKKAILAVANSMLTAAYYMLRDGVEYHDLGHEHFAQRDKDRVTKRLLQRLRDLGVVVEVKAA

SEQ ID NO: 275329 - protein, 343 aa, unidentified
MKLIRVGVDLAKNVFQLHGVGRDERIVWRRRLARDRWLETLLEKLEPGCEIGMEACTGAHHWARQLQREGFTVRLIAPQFVKPYVKSNKNDATDAEAVCEAMARPSMRFVAVKTLEQQDIQAVHRIRSGLIEQRTAKANQIRGLVAEYGLVAPRELGQLRIALPRWLENAENGLSSRFRRLLSGLWDDLKVLDDRVCELDREIAAIARNDPTAKRLQRLRGVGPIIASALVAAVGDARQFANGRQMAASLGLTPKQHSSGGKERLLGISKRGDRYLRSVLIHGARAVIRTAKGKSDRLSMWITSLAARRHPNVAAVALANKTARIAWAMLRNGTDYQPDVVRG

SEQ ID NO: 275330 - protein, 365 aa, unidentified
MFVGIDISKGSLMAHAIDQDGKDIFHSFKVKNNKPGCNKLIDFIYKHANQADFDVIKVAMEATNVYWEHSFRLINNSEKLNLNFKLSISTFNPKVVKNFKGAYNNLPKTDSVDTWVIADKLRFDRVSNSSVPEEVYRPLRELTRFRFKLVRNIHSEKSRALNLVFLKFSNFENEAPFKAFSEASLDQIITDLKKAARNSYRLKPKMNQAITQTLSMTFDNIRFLQNQLNKSKKVIKRELKAIPQTLDTVPGIGVILSVGISSEIGDINRFNNQAALASYGGLTWSKHQSGSFIAEETSMTKTGNKYLRYYLVEASNSLRVHNEEYKKYYESQKHKHKRALVLTAHKFVRLVFALLSKGEIYQPRR

SEQ ID NO: 275331 - protein, 390 aa, unidentified
MIYVGIDVAKDKHDCCILGSDGEILFSPFTIPNTLQGFDELYEKIWSLTSDLTEIKVGLEATGHYHLNLLRSLLDNGLASFVINPLHTNLYRKGQSLRKTKTDKVDAASIAMLLLTDRTLKPYSDTSYHNEELKSLTRYRFDKVQERARLKTSVSRLVSILFPELEKLVPTLHMASVYTLLSEFPGASFIASAHLTRLKHLLHDASRGHYSRDMAISIRDAASSSIGSVLPAKSLELKHTIHLIEVLTKEIDEIESAINIIMDTINSPITTIPGIKNRMGAMILAEIGDFSRFDNPDQILAYAGLSPTTYQSGQMTSSHAHMEKRDSRYLRYALFNATQYVCIWDPTFKVYLAKKRAEGKHYYVAISHACKKLVRVIYRMQLTGESYRTT

SEQ ID NO: 275332 - protein, 313 aa, unidentified
MEISNVFVGIDVSKARLDVAIRPSGETQSVANDQAGISALVKHLKPVQPVLIVLEATGGMERQITRALASAELPVVVVNPRQVRDFAKATGRLAKTDTIDAMVLAWFAQAVRPAVKALPDEISLELRALMARRRQITEMIVAENNRLSGAGKAVQKRITVHVHWLETELQRVDTDLDQTIGQSPIWKDKQDLLQSVPGIGPVTSRALIANLPELGELNRKQIAALVGIAPLNRDSGTLRGRRTIWGGRAGVRALLYMAALVASRHNAVIRTFYTRLCKAAKAPKIALVACMRKLLTILNSMVRHKTRWAGALL

SEQ ID NO: 275333 - protein, 444 aa, unidentified
MLPVIYERVAGLDVHKKMIVATRMRVIEGQVEWETNTFGSMTPDLLLLHDWLDEWSCIRVAMESTADYWKPVYNILEEVFEIVVVNSSHVKHVPGRKTDVKDSEWLAELMMHGLLTASFVPPKPQRALRTLTRYRTTLVQERARVVNRVQKLLEEANIKLASVATNIQGVSARAILAELAAGQTDAKHLANLARGKMRSKIPALEKALTGLVQPHHRFLLTRQLAHIDFLDEQVEELNTEIARQVETMSDSSTSTDPSAGAETDRDSSGTEQPRNPLTWNEAVVLLDTIPGVDRCTAEVMLAEMGLDMSHFPTDKHLATWAGLAPGNHQSAGKRYSGRTPHGNRPLSSIMVQAAWAAIRTQDSFLRARYHRLAARRGKKRAIVAVAHSMLVSAWHMLTNRQAYHELGGDYFDQRQKDTKVNYLIRRLEKLTGGSVSVEIQPAAA

SEQ ID NO: 275334 - protein, 337 aa, unidentified
MDYFAGLDISMDETHVCVLDREGMVVRESKAESTAQAVANELAKAPSCRRIVFETGRMAPILFHGLNQLGLPVVCVESRQAYQALKSLATHKTDRNDARGLAHLARTGFFKPVHVKSLRAHALRSLISARKKLVGQRVTLENQIRGLAVVFGVRLPRALTTAFIDQALKASEGVAGLSAAMRGLSAARVAVMTAVAAIDADIRRMTRASAACRRLMTIPGVGQLTALAFVAAIDDPSRIRRSRDIGAYLGLVPRRHQSGEVDYTGGISKCGDGRVRTLLYEAANVMLTRYKGQLKLKDWAFAIAKRSTMRKARVALARRLAIIMHAMLRDGTEFAPA

SEQ ID NO: 275335 - protein, 327 aa, unidentified
MTAFMGIDVSKHKLDCAWLRDPATGKVKTKVMKNNADGWSALQDWLVDQTGQALADCHIVVEATGVYHEGMAYALHNAGATVSVVNPAQIRYFGQGLGVRGKTDAKDSVVLARYGATQRPARWQPEPPAVRELKARTARLEALDTDIQRECNRREKAEVTQAMGIMASIDTVLAALRAERARLARDIDDHIDGHPELKQDRALLESIPSIGPAVSLRLLTTLRSRPFANARQVAAFAGLVPVPWHSGDTVNKKPRLSKAGSPKLRRLLYMAAVVSLRYNPDIAAQYRRLTGRGKTSMSALGAAMRKLLHIAYGVLKTQSAYQAQVAQ

SEQ ID NO: 275336 - protein, 351 aa, unidentified
MEEYIAFDSHKRYTWVEHQEANTGKTRAYRLEHGTGAIRQALAGCAPGTAVAIEATANWYWIIDEIEQASCVPKLVHPRKAKLMMGLINKTDKLDAHGFNTLQRNGTLPTVWIPPGGLRELRELTRTRLVLVAQRTRWKNRITATLAKWGLPPSEYSDPYGKKARAELEQQLERLPEQTRWATRQMLAQLDSLSEQAQQFEKRLEELVEVTPMMQWLMTLPGVGVILGATIALEIGEIERFANAERLASYSGTTPRVHSSGDRTRHGRTRPDVNRYLKWAFAEAANSVAVNHRRNPERHVSRLYARLRASKGHARAVGAVARHLAEAAFHVLQRKEVYRDPSLNPRPEKGV

SEQ ID NO: 275337 - protein, 331 aa, unidentified
MEQRKTIIGIDVSKKTLDIFIKTLNVHLKINNNAEGFKKLLAVLKASKLKLEDCFFVLEYTGGYEYRFVQFCQSKQISYVRISGLAIKRSMGLVRGKNDKIDACRIAEYGDEKQSRLEAETASLDGIVRLKRLLSQRDAFVEDRKAYQNRYNEIQYMMDLPDSDTMLKRYKKMVDELEKLIDKTEQEIRELIKANDAFQFNFDLITSIKGIGEVNGWMMIAYTENFTSFDNARQFGAYIGVVPYPYTSGTSIKGKSRTSKMANQQIKATLDMAARAAVNHDKESAMYYERRIAAGKHHMSVMNEIKFRLVRIMFAVVKKQQPYVDKYKNVA

SEQ ID NO: 275338 - protein, 462 aa, unidentified
MKAKREDKASQNGRMQLQGLPLMKADVAGMDIGSETHWVCAPTRDGSGREIGDFGATTPELIRMAEWFKARQVESVAMESTGVYWIAPHEVLEAHGLKVLLVDTRQLSQVPGRDKKTDPTDCEWIQRLHSCGLLRGSFRPAEEICMLRTLVRDKATLVAESGDWVRRMQKSLDQMNVRVHRAVSDISGTTGMAIIRAIAEGERDARNLAQLRDPHCHKSEEEIAEQLTGHWREDHLFSLCQALKMYEAMVERISAYEKEILRKLGEMEQEEQGGKNAPPLKNTNKAKMIKKRGQEQKRQALYRMSGVDGTQIDAIGVETVEVIVSEYGPDLSRFPSEEQFVSHATLAPRVAKSGGKPVKKKKRNSASTRVATALRMAAQSLRHSDTALGAYYRSTARRKGPGIATFAAARKIATFIYRLLRWGQPYVDEGAEAYEKRYQKQRFAGLASRAKQLGYQLTPLTA

SEQ ID NO: 275339 - protein, 406 aa, unidentified
MELVALHKRVIGLDVHQAQITACAIIEEADGTTRIEQRRFGAFKRDRRALADWAASLLPDEVVMESTGIYWKSPYAALEAVGIRGQVVNARHVKNVPGRKTDVGDAQWLATLARAGLLRGSFVPPMLLRELRLISRQRQKLVGQLASEKNRLHKVLTDGGIRLGVVVSDLHGQSARAMVKAIILGQPPNEVLQFASRRLKASREEIFDALQGELTDSHRFVLDELMRHVEEIEARIARFDARLLDGLKDEQNTLALLQTLPGVDLIGAAMLLVEIGTDMDAFGTADRLASWVGICPGNNESAGKRKSGRVRKGNLYVRRLLCEFAHAASRTTSVFQSKFKSLLVRRGHKRSIVALAHKILRTLFFMIKRREHYRDSATDYEALSVRRNAPRWIKALTRFGFIPAVA

SEQ ID NO: 275340 - protein, 344 aa, unidentified
MKVTTVGIDLAKNVFQIHGVDAHGKAVLKKQIRRDQLMLFFTNLPACLIGMEACASAHYWVRRVQECGHTVRLMAPQFVKPYVKTNKNDAADAEAICEAVARPNMRFVPIKTESQQAVLAVHRARQSFVKARTAQANQIRGLLAEFGLVIPQGIAHIAQRVPELLDSDTCALPGPFRLLVLRLMEHLKLLDQHVRELETQIQTWHRDNPASRKLAEIPGVGPITASALVASIGDAKNFENGRQLAAWLGLVPRQHSSGGKSTLLGMSKRGDSYLRTLLIHGARSAILAAQRKPDTDSWLSRLLGRRHPNIAAVALASKNARVIWALLAHNQQFRPGYATAAAVA

SEQ ID NO: 275341 - protein, 505 aa, unidentified
MNNRAAREKICGEKLLRRGYNSSGRIAPGGSRSYGPQLAKLGRSKPARLSAPAMKSERTIAREAPGIRLTDGNAAVCGKTKGTPVIEFKALEHFAGFDWAKDHHCVVVVDRQGTIVREFEFKHSAEGWREFGEATAPLGGLGVVIETSAGPAVDQLLQRGYTVYPVTPIASESYRRRKVPSGTKTDHHDAWALGDALRVDGQKWKALAAADPLSQQLRLLCKDEVVLIEQRTQLVNQLQQALLEYYPAALEAFEDWTLSFCWEFVVEFPTPEQLAQAGTRRWQRFLHVHHLWRPGTVEHRMEIFGRAAGFQGSPGVVRAKAQLAVSLCKVLRTLEEQLKDYRRRIEKLFRNHPDHDLFGSLPGAGEVLAPRLMAAVGTDLNRYGGELTVLQAYAGTAPISYQSGQIYKARMRWACDKFLRSTVHLWAECFWKYSGWGAVYYRQKRREGKSHACVLRCLGQRLLKILFRMILDHKPYDSDLHARNQQRHGSWVLSLLKNPAAKVCE

SEQ ID NO: 275342 - protein, 347 aa, unidentified
MNFYTQQHKHYCGIDLHARAMYVCILDQHGTKLVHKNLPTTPEAFLRAIAPYREEVVVGVECMFTWYWVADLCQKEGIAFVLGHALYMKAIHGGKAKNDKIEAHKIAVLLRGGMFPQAYVYPSEMRATRDLLRRRCHLARKRAELLAHIHNTNSQYNFPEIGKRLANKSNREDVADHFPDPSVRKAIEVDVSLIDHYDQLLGEVELYLTRSAKAHDVQTFARLQSGPGIGEILALVILYEIQDISRFPRVQDFVSYCRLVKCAKESSGKKLGTSGKKIGNVHLRWAFAEAAVLFLRQSKPGKDYFAKLEHKHGKAKALTVLAHKLGRAVYYMLAREQAFDLKRFMTA

SEQ ID NO: 275343 - protein, 342 aa, unidentified
MTHSKNSLAVHQQGVIPVLGIDVSKLTLDACMITAESISHHRVRNDHEGHQQLHAWALAISPEYCACLESTGSYGEALAKYLFKEQVAVSLVNPAQTAAFAKAQLLRTKTDKVDAESIARFARAMLLEGQLPRYESRSQEDDALQELVRHRDALVTQRQQVINRNGDAELAAIKRSNQKLIDTIDREIKQIESAIRTLIGQHERLKAQYDLLTSIPGVGPVTATTVLAELPAIERFSRANQVAAYAGLTPRTRHSGSRTPLSQPITKTGNQRLRKTLYMAAMVAIRSNPIMKQFAARLYLKGKAPKKVIVAIMRKMTHLIYAILRNEVPFNANHIKVMAGPN

SEQ ID NO: 275344 - protein, 371 aa, unidentified
MNTFNLEAAPTACAIELKIDKRPKAKRILLGIDVHLRGYQAARKIDDGVIGVVDTFRTEVELLLHVAKQQQRAEEVVVVYEAGPLGYTLYRKLKAAGVLCYVCSPDGAEQRRKRRKNNKIDARNLASKLFNYLNGDKEALQLARVPTEAQEQLRLASRQHDQLVEERKRLGAKGNAMLLSQGFGSWSNWWRPKVWAQLSVLVPAWLLERLQIWVDVLKMLDEKLSEAKAALAGACSGPRPKGVGALSQMQLQSEVLDWHSYTNRRKIACLAGMVPSEWSTGDKERRGSITKVGVPAIRRIIVEMVWRMIFFQPQYKPVQKWQEVLKGKNPALKKKAVVAIGRQLIVDLWRLETGRVTAQELNLVMIEAEGA

SEQ ID NO: 275345 - protein, 410 aa, unidentified
MELLHPHCAGLDIHKETVVACVRHLRNGKVMTGIKTFKTTTEELIALSDWLTTEGCTHIVMEATGVYWKPVWHILSDGEFDLVLANAGHVKNVPGRKTDVNDAAWLAELMAHGLVKASFVPDQPTQQMRDLLRTRKQFGRERSSHIQRIQKTLEDANIKLDSVVTDVLGLSGRRILQALIAGQTAPQALAALADRRIHATSAQLEAALRGRVTDHHRFMLKLHLDQIDAQDAAIARIDKEVDGNVEPFRVALEMLNGIPGVSSLSAEVIIAEIGVDMSRFETAGHLISWAGLCPRNDESAGKRRSSRMKKGAPWLKTTLVQCAWAAARTKDSYFQAQYHRLRSRRGPKKAIGAVASSLLTAAYHMLKSGTLYQDLGANHFNHRAKDKQALHLIHRLKNLGFNVQITPSAA

SEQ ID NO: 275346 - protein, 259 aa, unidentified
MEKSGVFVGIDVAKARVDVGVRPSAEVFSVANEAKVLGELVIRLKTMKPERIILEASGGYEVPVAAALAGAQLPVVVVNARQVRDFARATGTLVKSDSIDAGILAWFGEAIRPEVRALKDEETQALEVLLNRRRQLVDMLTADNNRLSSADGAVRRDIKTHIKWLQRRLKDIDNDLNAAVKHSPIWKVTEDLLQSTSGVGRVTSLRLMASLPALGELSGRKISALVGVAPFDCDSGTYRGRRRVWGDKAMYARLCSWQR

SEQ ID NO: 275347 - protein, 350 aa, unidentified
MRTKPDPQTAAFGIDIGKKVFHVVALNAAGAVIQRAKFSRDTLMAFFDVAPKVLIGMEACPGSQWLARRLAAMGHDARIIPARFVKPYVKSNKTDTVDAAAIAEAVTRPTMRFVEVRTPEQVDLQALHRIRDRLVGQRTALMNQARAFCIEYGLAMRVGGGGFHADIRRHLANADNDLTPAMRVLLKELLDDLAYIEGRIKTVNDKVEAYASQDDAVSRLVTIPGIGALGATAIVAAAGDGRQFRKARDLAAWLGLVPAEHSTGGKQTLLGISKRGNRYVRRLIIHGARSCFLHLNRANHALGGWLSALEARTHRNKAVVALANKLTRIVWAILTRPGAVYLQSKGAALS

SEQ ID NO: 275348 - protein, 340 aa, unidentified
MDVVIGIDPHKATHTAVAVGDDEVELARLALRSGPRQVDRLLAWAAPFPQRRWAVEGAEGLGFLLAQQLVAAGQTVLDVPATLAARTRLLGSGRSNKNDPNDALSVAITARRHGDLRHVAAAGHAELLRLLAKRHADLAKQRIRLVSRLHALAAELSPGGIAKTLNSTDAAKFLAATTPTDTVSQVRHDLIGELADDIARLEAQLKASERRLRSAVAASGTTVTDIFGIGPIIAAMLIGNTGDIARFANRDRFAAYNGTAPAEFSSGGRTIHRVSQRGNRTLNHALHLAAMCQLRQPASEGRGYYDRRVAEGKTPKEAIRALKRQISNTVYRHLIADTRR

SEQ ID NO: 275349 - protein, 397 aa, unidentified
MYIVGIDIAKRKHEAAVIDGEGTVIIKPFSFTNNYSGYNRLLAMLTKAKLPLDEVSFAMEATGHYWLALFTRLQKEGFRVQVINPVQTNSIRSFYIRQAKTDPRDALLIAEVIRFGHFSESTLHPENIYELRELCRGRHAIVSMQADVKRKVVALLDQVFPEYETAFTNMFSDTSMAILQTCPTPKELSEMPLEELCHLIEVSSRKRFRMAKAQELQELARNSFGFAMAGDVFSTMIRLYAKHLVFLKQQVQEMDRKIAEIMDTLDTPITTITGIGPTLGAYILSEIGDISRFSSAAKLAAYAGIDPTMRQSGEYNGVRNRMSKRGSPYLRHAIWLAASSAVLHDPALKLYFQKKRDEGKPYMASVGHACRKMVSIIYAVMRDNKAYTPYVPNEISA

SEQ ID NO: 275350 - protein, 391 aa, unidentified
MIFVGIDVAKDKHDCFILNSEGTVLADVFTIANNHIGFETLLSRIQSCSQGESKIRVGLEATGHYSYNLLGFLLDSGLATYVINPLHTNLYRKSLSLRRTKTDRIDARTIAMMLMSDVDLKSYSNTAYHNEELKSLTRYRFDKVKERAKLKSSVARLVNILFPELEKLVSSLHIAVVYALLSNYPGASYIANANTEELAETLCTASKGRYTKSKTAEIQVAAGVSIGSKMPAKSMELKHTIALIRELDKEISEVESAIDKITSQMDSPIFTIPGIGRHMGAMILAEVGDFSNFASADKLLAYAGLSPSTYQSGQLQNCYAHMEKRGSRYLRYALFNAAKYVCLWCPTFSAYLEKKRSEGKHYNVAISHAAKKLVRLIFAMQRSGKAFLADY

SEQ ID NO: 275351 - protein, 353 aa, unidentified
MRKMQENIIRGKRIFVGLEDSKRTWRLCVRCEGMVVHITSIPTLYEGLRTYLLRKYPECVITVMYEAGFQGFWLHDLLEKDGIRCEVTPPNKVNCPKDERVKTDKRDAYRLALNLELEYYTACNVPDKERREDRQISRTLSQIQKDIRAEKNRIRRFLDYHGLNGGLSTGAWTDKDYLLLKNIDLPHSLKASMYGYLTVLETLFAVEKKLEAELKALCEKERYRESVRIKRSVPGVGWLSAIRFTLEWGNLDRFPTGKRFAAFTGLTCREYSTGETIRRGHITGQSSEYIRSWLIECAWRAIRIDPALLDKFRRVWRNSGSKKKAIVAVARKLALRIRAVELSGQPYCISVIE

SEQ ID NO: 275352 - protein, 344 aa, unidentified
MKILKQAVGIDVAQKELVVSLGRLLDNLSTDIYASKVFPNTSKGQNALIDWVSKLSDPGVVIQFVMEATGVYHESLAYLLVDRSFNVVVVLPNKISNYFRTLEVKTINDFTSSEAIVRFALERKLDQWQKPDPVLKRLRQLCRERDQIVTTRTITKNQLHAEQAEAEPNAGTERRLKQHILFLNKQEIQVKGEIEALVKSKEELTQAVKLITTIPGVGRLTAAIVLAETNGFELVRSRKQLTSYAGLDVREKQSGTSIKRKPSISKRGNRYLRKAMHLPALAALRGDSEFKSLFVRLVEKHGIKMKAAVAVQRKLLELIFTIYKTKKPYREDFQAIIKKEKQLA

SEQ ID NO: 275353 - protein, 433 aa, unidentified
MKVLYERVAGIDVHKDMIKVAIRSPGEKPWTRKTEILEYRTFYGVLQAMAAELRRRGVTHVVMEASGVYTEPVYYALAEQDFTEVAVINPAHAKALKGHKTDAKDCARLAELFECGLLRGSYIPPAELKEVRDLTRYRMKTVQARTSEIQRLGKALESAGIKLGSVASSITGASATAMIEALIDGERRGGVLADLARGRMREAGKLADLSMALTGRFTEHHALLCRLHQDRIAGFDAAVAGLDERIAGKAARWQRQAGLLTSVPGFGDVVAQAWLGEIGPAPHRHFTTCEKLASWVTLCPGNNISARKRKHGRTGDAGTYIKPMLVQAAWNAIRVRGRLQARYNRLVRRFGGDKNPGAKKKAIIAIAHTLLKIAYQVLKSGTPYQDLGADFYTRRESPEQKHAWLERQLHKLHPGCTITITISPPEAALTPGA

SEQ ID NO: 275354 - protein, 482 aa, unidentified
MKKKNIFQNQSQEILAIFELAGNRSKVMCIPMDYAKKDHVVMFCNGNGKVIRKPFSIKNSPEGKKYLIDQVTKSCLHHGIKPEHIFFGGEDCGSYADNFIFALRSDNWVVAGVNACDAKKHRDNKQASTDILDLLGICKMLLNCKGNCSPAQTGIYWNLRMLVRQRRKLVQMATGVKRRIHFIVDQIFPGFLDNKKSGIFPFSKGSLALMGNRFSVHQIRRRNRSTLSRFLARNLVHHADHCAKHLQKYTSQVLQPPAKHVATLQLALQQQIKLFVCLQESIQQMEKEIAEHLAQTPGAFLTSIRGIGIVLAAGVCAEIGDPDRQKSLSQLVSYAGIIPRIKQTGGVQGKTQVKKVAKRCNRILKDYVVRSGYHIGVNGPEELKLDHKRRGAQGQHADFGMSRRYLRMAMCLMRTSQTYLPKNLRDTRTPMKERAQFYILTWSTLREKWKRKDALEFAFNKDRPLGQWRNVVQTLYRIELAL

SEQ ID NO: 275355 - protein, 360 aa, unidentified
MDGSKVQPLMTAGLDLGDKYSYLCLIDTGSGEVVEEGRLRTTPEAFRRRFASEQPPMRIAIETGTHSPWVSRLLEECGHEVLVANARKLRLIYANKRKTDEVDAENLARLARVDPKLLYPLKHRGEDSQAHMAIIRSREALVGSRTQLVNHVRGAVKSFGARLPKCPARSFHKRAAEHIPEALGPALEPILEQIGSLTERICQYDRKLETVCEEHYPETQLLRQVEGIGPLTALTFVLTLEDPYRFKKSHSVGAYLGLVPARDQSGKRDPQKRISKEGDQMLRKLLVGSAHYVLGPFGSDSDLRRHGQKIAARGGKNAKKRAAVAVARKLCVLLHHLWVTGELYDPLHDMHRRQEQKEAA

SEQ ID NO: 275356 - protein, 341 aa, unidentified
MDKELYFGVDVSKKTLDLAYYDGETIDWKNAHIKVSNDAAGFKKIGSWVAKVGKDFDTFLFCMEYTGLYNQNFRLWLESKEYIYGMVEPRKMHRFEPDLDDDQRSLDRIKTDKLDAFRIAIYCEQNHKKILRNPSKLPSPVYFKLKRLLAERKQNTKQSTLYKQQLHDICAYDTDLSVERKKLLLKNMQENQKAIDKEIDSYMNEDASISKNYDLLISIPGIGRIIALETIVLTENFTAISNPRKYACYIGIAPFKKESGTSVRKKTGVSKKGFSEAKADLSIAVLSAITYNPAIRGYWIRKKKEKCGGIVLNAIKFKLVLRMFAVIKRGTPYVETDAYKN

SEQ ID NO: 275357 - protein, 465 aa, unidentified
MGAGKMNRKQRKELGRRLQSANPGLEVVHPRAAGIDVGNGAHYVAVRPEQDAEPVRRFECFTADLHRMADWLEACEVKTVAMQSTGVYWIPLYEILEQRGFEVYLVNARHTKNLPGRKSDVQESQWLLKLHTHGLLNNSFQPTAEIRVVRTYWRQRGEHVRGASTCIQRIQKVLTQMNVQLANVISDLSGLTGQAIVRAILAGERDPRKLAELSHPRIRAGREQIAKSLEGNWRSELLFVLKQEMEMYDTYQHKIAECDWELEATLKQFGVPERASTEQPKIPNAKKTKRIQRNAPGFNLTSELHRITGVDLSRIDGVNAIVAQTIISEVGLDMTRWKTEAHFASWLGLCPDNRISGDKVLARGTRHVINRAATALRMAATTLIKSQSYLGAQYRRLRTKLGAPKAITAMAHRLARLVFRMLKYGQEYVDKGTQYYEQKHREQQLHLLKKKAATLGFQVVETGVS

SEQ ID NO: 275358 - protein, 407 aa, unidentified
MEVLYRRCAGLAVHKQSVVACVRITNNGAPTQEVRSFATTTSGLLGLADWLDRCGVEQVAMEATGVYWKPVWHVLEGHFQLILANAAHVKNVPGRKTDVNDATWLADLLAHGLIRASFVPPAAVQELRTLRRTRKQFVRERGSHVQRIEKILEDANLKLSVELSDILGQSGRAVLQAIIDGHTDPEFLLARISSRVKASRAELLEALRGHITAHHRFMLKLHLDHIEALDRAIATIEQEVGAGLEPFRQAAQLVSTIPGISSVASHVVVGEIGIDMSRLPTAGHLLSWACICPRNDESAGQRRSTRVRRGGRWLNTTLVQCAWAAIRVRGSYLQAQFHRLRARRGAKKAIIAVAASMLTAIWHMLRNGTEWRELGAAYFDRADAKKTATRLIRRLQQIGYAVQVTPV

SEQ ID NO: 275359 - protein, 323 aa, unidentified
MGTRMAHHVGIDVSKDWLDTHLLEGATEERRAGADERIAYSAEACQTLAQKLGKLAVQRIVVEASGGYERLLVGTLVAAGLPVVVVNPRQIRDFAKALGLLAKTDQLDAYVLARFAQVVKPPERKIPDEHTQSLRDLLARRAQLIEMRTMESNRLKQAATTRVIKDLKSSLEFIDKRLKKIDEELDEHIRNTPAWQEKVDLLTSVPGIGPQTARVLVLDLPELGDCSRQKSAALVGIAPMCDDSGMHRGDRVIRGGRRAVRCALYMATLAATRCNDLIRSHYQKLRSAGKPCKVAIVACMRKMLAILNAIVRKKQPWQPALTA

SEQ ID NO: 275360 - protein, 349 aa, unidentified
MEQITVIGIDLAKSVFQLEAQSASGVVVWKRRLRRAAFMEFMAMKAPRCLVGFEACGGSHYWGRFLSGLGFRVKMMAPKAVKAYREGPHKNDGRDAHAAAEAASRASVRAVRIKSEAAQAVQGLMRVRTLQIKQMIQTGNQLRGLLNEFGVVLPKGYKRLRDGLGRLHDDPAYNRLPQSLRQAAERLCGQLAEQIERVKQATDAVAEATKDDPSCLQLRSVPGLGPINAAGLSVALEAPRAYRNARAFAASLRLVPRQWQSADKQRLLGIAPESANDTRRHLVLAGQSLLTMVARMERPPRDPFLLWVDRIRQRKNRNVAAVAVAAKLARIAWALMAKDTIYRPWVVTA

SEQ ID NO: 275361 - protein, 389 aa, unidentified
MSPQNDQSKKCFTAFEQASTMVAVVELSKKLWLVAGIVPGIDRHPLKKFEADENRLLALLHHWQQQAVKAGREIQRIVVAFEAGRDGFWLARWLRVRGIEAYVIHPTSVAVSREHRRAKTDRLDTEHLKRVVLGWLRGEPDHCRMVAIPTVEEEDAKRPNRERETLVGECTRIVNRVKACLARFGIRGFNPTLRKAADRLETLVTPEGVRLPPLTLAEMLRDIARLRFLREQIKSIEKARVQRLRDGPATRTNVMVNLIARVFGIGIETADLLVHEILSRNLRDRRAVARYAGLTGSPDESGNRRREKGLARAGNARVRRAMVQLAWRFLGFHPDSALTRWYNKRAADGRGSTRKTMIVALARKLLIVLWRMVTTGEVPADLKLRRTTA

SEQ ID NO: 275362 - protein, 340 aa, unidentified
MSKKLVFSPPLSTQPILGVDVAKLTFESCLLQGAQRSRREFANTPAGFGELFAWLAEAQAGQAIVALEATGPYGEGLAQAAFAAGYRVLVYNPRRVLDFARSPGRRNKTDRVDAELIARYVLSQADRAYPWWQPLPAPQAALRELLRRQADLEASLHAEERRLEVAAPAVQPSVRRAVRWLEAELARLEAMVQKHLQLHAPLAADVARLRAIGGCGEKTARLLVAEIPRHFRTARAVAAWLGVVPRQAESGTSVRKGSHVGHEAPWLRPKLYFPAITAMRCDPRAQALAQRLRALGHTTMSIVVAVMHQLIRTAFGLLKHGTTYDPAHQVRLSAPAPCSP

SEQ ID NO: 275363 - protein, 363 aa, unidentified
MPTLLDTIGLDLHKRETQVCILTADGELIERRIATTRARLTEVLGNRPHARILVEASTESEWVARHLETLGHEVIVADPSYAPMYATRSRRVKTDKRDARTLAEACRLGAYRAVHRVSDAQRHVRSELAVRDALVRTRTRYVALIKARVRSEGLRLPQGEPERTVAKLDALAELPQATRDELAPLLLLLAPLNTAIAAADRHIAELVATDPVVRLLTTAPTIGPVTAAAFVATLDNVTRFASADQVSAYLGLVPSEHSSGERQHRGRITKTGDTRMRWLLVEAGWRILRSTNPDVQDLKAWGQGIAERRGTRVAVRGARAQARHHALCHVARRRAVSCGTSPRHGGRRVARARPVAPHVRATR

SEQ ID NO: 275364 - protein, 387 aa, unidentified
MPQPNDLSRSLVALDQNSTIIAVIEMSQSSWLVGGVLPGIERQPRKKLEPSPERLLAVLHRWRDEAVRAGGNITRIAVAFEAGRDGFWLARWLEARGVEAHVIHPSSVAVSREHRRAKTDRLDTELLKRGFLGWLRGERGHCSMVRIPTIAEEDAKRPNRERECLVAERTRIVNRMKSTLARLGIRSFKPTLRKAADRLATLHTPEGMPLPPNLLAELRRNMARLGFVVSQIREIEEARQKRLGQEPETGPHAMVRQLARVVGVGIETADMLVHEVLSRPMRDRKAVARYAGLTGSPDESGAKRREQGLARAGNARVRRGMIQLAWRFLLFQKESALALWYRARTADSRLGTRKTMIVALARKLMIALWRFVTTGETLEGVILRPAG

SEQ ID NO: 275365 - protein, 341 aa, unidentified
MKIHSIGIDLGKTTFHLVALGEHGKILLKKKLSRKQLLALTANLPTSRIGLEACSGSHFLARALREQGHDARLIPAQFVKPFLKSNKNDFLDAEAIAEAAERENMRFVPIKTDDQLDLQALHRVRERLVSRRTAVINQIRAFLLERGITFRKGASSLRGQMPEILENGDAPLSPRIRSLLAMMWGEWKQLDEQVESFNTQIEAIGSGDAACQRLREIPGVGPLIASAVVASIGNGAAFRKGREFAAWLGLIPKQYSTGGKVKLLGISKRGNRYLRTMFIHGARSLVLRVNRERSPLGGWISRLEARAHRNVVIVAMAHKLARITWAVLSSGERYCPALMAA

SEQ ID NO: 275366 - protein, 366 aa, unidentified
MKKISTVAMGGNEIFKEPKLTVGLDVGDRTSHYCILDEAGNVILERSLPTTPKGIHQVFSKIPRSRIALETGTHSPWVSRQLTQKGHEVIVAHARNVRLIGESSRKDDQLDARTLARLARIDPELLGPVRHRSAKAQIHLTVIRARAALVSTRTALVNAARGLTKSYGERLRKCGTGQMNREIAKGLSQELREALEPLLEEIESLNERIAEYDRRIEKVAKEVYPEVALLQQVKGVGTLIALTYVLTLDDPHRFRRSRDAGCFLGLRPGRRNSGMSEPQMHISKEGDGYLRTLMVQGAHYILGPFGQDSDLRRWGLKLAERGGKNAKKRAVVAVARKLAVLLHKLWVSGEVYEPLRNKHKVVSAVA

SEQ ID NO: 275367 - protein, 400 aa, unidentified
MVRRELLFTLEVIFMVFVGIDVAKDKHELYAVDSDGVVLCDHLTFANSAVGFASLLERVSAWGKIKVGIEATGHYSSNLLSFLKAHDFEVVVFNPLSVSRLRSANSLRRTKTDKNDSRYIARLLMTGNANPYQSQSYDISVLKSLTRARFRLFQEIQPLKNRFRRLLHILFPELQGFFSNLYGNTSLNLLSALPSAKDIAECNILKLTKILSVSSHGKLKRSRAEQLKSLAKSSIAAYNYGDAFELKQTVQRILFLSSQMSEIEKEIDSVMAELNSPITSIPGIGNLLGATILSEIGDIKNFNNPDKLLAFAGCEPSTYQSGKYTASNTPMVKHGSRYLRRALYCAADMAYVNSISFRTYIDRKRAQGKHYYVAMSHGMKKLVRIIFAVLSRNIPFSEPA

SEQ ID NO: 275368 - protein, 375 aa, unidentified
MTDLTLFVGLDVHKKTIAVAVIEGVAGAAVRFYGTIANTPETVRTLCRKLSRDGQQLYFCYEAGPCGYGVQRRLTRLGHRCDVVAPALIPRKVGDRVKTDRRDAMMLAQTLRAGQLTAVWVPDEAHEAMRDLVRLRAQAMRDLRKARQQLLSFLLRHGRNSPYGHWTKMHRRWLGELVFAHPAQHLALEEMLQRIERAEALCDRLKQAILELVPQWSLAPVVQAIQALRGVSLIVAAAIVAEVGCFGRFESPRALMAYLGLNPSEHSSGATIRRGAITKTGNTLARTCLVEAAWTYRFPPRVSQIIRDSQIIRDRLKELPEPIRAVAWKAQVRLSARYRKLTAAGKPGPKVVVAIARELVGFIWAIARMVEPKFA

SEQ ID NO: 275369 - protein, 375 aa, unidentified
MGDDSEAFVAFDTSKLRNAVAIADGGRAGEVRFLGEIENTGPATAKLVRKLSAKYERLTFCYEAGPTGYGLHRQIKGLGHECMVVAPSLIPKRPGDKVKTNRRDAVNLAKLLRADELTAVWVPDQGHEAMRDLTRARETAVMDLRSKRQQVSAFLLRQGKHYPETKKTWTKAHMSWLASQKLEDPQQRLVFEEMMLAIRQAQERRERLEQAIRVAAPDWSLAEVVTALMAMRGIDLIAAATLLAEIGDLARFRTPRELMAYLGLVPSEDSTGETIIRGPITKAGNRRARRMLVECSWSYQHPPRVGQAKQLKVDAAPRAVREIAWKAQCRLHRRYRALIRRGKLKTVAITAVARELAGFIWAVAREITPAHAPAK

SEQ ID NO: 275370 - protein, 363 aa, unidentified
MEQITTVGIDLAKNVFSLHGVDGAGRVLLRRTVRRDQLLEVVARLSPCLIGMEACSGAHEWGRRFQEFGHTVRLMAPKFVAPYRKSGKNDGNDAEAICEAVTRPNMRFVPVKSAEQQALLALHRVRQGFVVERTATINRLRGLLSEFGVVLPLRSMTVRRQAAAAAETLPDLARRAIGDLLEQLRLLDERIGGYDREIEAQARLCQPAQRLMKIRGIGPTTALAIVATVGNAREFENGRQFAAWIGLTPSQYSTGGKPRLGHISKRGEAYLRDLLVKYDGNEELALAAYNAGPTAVDRYGQKVPPYPETVAYVGKVRSATALSVPTRQRIYRVAELVDGREVVRYTNKKPGPTGQEVFSARRR

SEQ ID NO: 275371 - protein, 422 aa, unidentified
MSYCPVAGIDVSKQFSDMCILSPDNKIFAQEKIYHDETSINRANALLQKAERLFFSKPVIVMESTSHYHLILFQFFSEHGYDVIVVNPLQSNSMKDFSIRKRKTDRVDAFKLAMMYRTKTLRPSQIPQTATRALRQLCRHRAELLNDVSSYKNRLTALLDQTFPGYDKVFSDVGGVTSCAVLVRFPTPTILLVEEESELVDVIAAASKAGYNFAKKNAGLLISAAQKAQTLGIHSCADETLIVCTIQMLRTLSESVLQIETAIDNLLAQIKEMRNNVSLLQSIPGIGSHSAALLLGEIGDISLFKKPKQLAAYFGLDPTERQSGSFRGTKNKLSKRGSPYARAALHMGVVNSICKRGKDSAVNPVLLSYYEKKCKNKPAKVAQAASMHKLVFIIFAVLRDQKPFELKTPEQHAVEQGFVKAA

SEQ ID NO: 275372 - protein, 355 aa, unidentified
MNDAKYIGLDVHQATISAAVLDSAGKLVMEAILETKAETILQYIHGLRGSLHVTFEEGTCAAWLHDLLKPHVAQVLVCDPRKNALIKAGNKSDRIDACKLADLLYLNKLNPVYHGETGIRPLRELARSYLALTRDTTRVMNRLKALYRSWAIPCAGQRVYAPRYRSEWLAKITEAGVRRRAEIYYQQLDALRSLREQVRRDLLVEGRKHSAMKLLRQIPSIGPIRAVLLIALMQTPHRFRTKRQLWAYCGLALKTSTSGEYRIVEGRLKRAKKFLAIRGLNANHNHDLKNIFKGAATRAAAVPGPFQEFHAALVARGMKPTMARLTLARKIAAITLIVWKKGVRFDAEYLKQQAA

SEQ ID NO: 275373 - protein, 410 aa, unidentified
MKLFIGIDASQRNNQCCIVDHNGNKVAEIRVSNDLSGAQKMEALIEHKASELNVTEIKAATEASSMYDFHILEFLSKSQILEKHGLKLCRFNPRLIKAFKPSLKIRDKTDPNDAYAIAEYLRFQSEKADEYRAKLDHLPLQRLTRFRWHLVNQLVRERNYFLNQLFLKFSAFGQVKPFSNTFGATALAVIEEFMTPDAIANADDEELIQFVIKHSKNQFSNPEEIVKELKYVARESYRLRPQLAESVHRILCLSLSNIRALKSSLKELDDTISKQLNAFSITLTSIKGIGTVYAAGIFAEIGDINCFPSEAQIARLAGLAWIRHQSGNYEAETRRLDKQSNKYLRYYLVEAADSLRRHNPEFSAYYQKKYAEVTKNQHKRALVLTARKLVRLVDCLLRTNKLYQPNVILT

SEQ ID NO: 275374 - protein, 343 aa, unidentified
MKNTIITIDLAKSVFELAIASQHYRIIQRLRLDRQGFIEFMHQQPAATVVMEACGSSHHWGRRFRELGHEVVLLPVQYVRPYRRRNKTDRADCEAMLEAYRCDGLKPVAVKSLEQQELQLMHRLREQWKQTRIKRQNFLRSVFREQGIPLPTGEREALREANAHVDKLSSLSLQMLRPVLAELQTLENDMNQLEQRIAQLTRGNETVSNLQTIPGIGLLISSAFVAAIGKAEQFQSGRQLASWLGITPREHSSGKRRLLGSITKQGNVYLRTLLVHGARSALVSAKRRLKSGKPLTRLQHWAIQLEQRVGHNKATVALANKMARIVWACWTSGKPYQANHCPA

SEQ ID NO: 275375 - protein, 320 aa, unidentified
MTYIGIDISKDSFVVAYPRKSGYTTKTFMNDTKGVRSFITSLPEDCHCVMEATGNYSMLLLYLLQQAGIPTSMENPQKIKHFSRAMMTVTKTDEIDAKLIAMYGEKMNPAPYKIPSESIMLLKQKRTVLRQLKKQLTAMTNLQHSLSVLPKQDPTAKVATEQTIKFLRKQISKLEEEITNLSNKEFKRQMELLTSIKGIGESIASALITATGGFANFSSAKQISRFLGLCPTYQQSGTSVNVKGHINRNGDSHLRGQLYIVAMASIRCNTACRETYERLCDRGKPGKVALIAVANKLIRQMFAVVTYNRPYIDGYVSSLT

SEQ ID NO: 275376 - protein, 342 aa, unidentified
MIQVHAVDAAGHVVVARALPREKFLAWCAPLPPGCVVAMETCSGAHHWARRLQEMGLQPRLVAGHFVGPYRLQGRRAKNDANDAAAICEAASRPQMHFVPVKSAEQQAVLAVHRLREGYKVERTACINRIRGLLAEFGISFAQTPQALSEGLADALEDATNEMPWLARVALQRARLQWVELDCHIAWCDERIAAHLKPDAQAQTAARLIGIGALGASAAVATVGDFRQFKNGAQFGSWVGLAPSQNSSGGKTKLGRITRHGDTYLRTLLIQGAKSAVMTAHKRDDRISRWLVQLTARVGWQKAVVAMANKNARILWAVLAKGQRFDPDHVSAKPGGAVAAAC

SEQ ID NO: 275377 - protein, 472 aa, unidentified
MRKHKRAKTKSKASKPIHDPQPDSAGVDIGANEIWVAVPAERTEKSLRRFDAFTQDLKALVKWLLDCGVRSVAMESTGVYWIPLFQLLEDAGLKVCLVNARHVKNVPGRKSDVRDCQWLQYLHSVGLLLGSFRPHQAICAARSIYRYRQNLLSMAAQHIQHMQAALDQMNIKLHHVIDDLTGLTGRTIIEAILSGQRDPVQLAKLRDKRIQAAESTIVQALEGDWRKEHLFVLAAAWDNWKQVQQQILKCDQQLWQYTRELEAATTIAKPTKTMRLKPQWIGSSPVIGPQPAPRVRKKTSKNQPEAPWREELSRFFGVDLTAIPGISVLTGLTLMTELGNDLSAFKSQHHFASWLCLCPDNETSASKVLRRATRRSQNRVRQALRMAASSLHHDKSYLGHKYRRLRAKLGAPKAVTAMAHQLARIIWTLIARRVPFDLSIFALQEQANEQRRLNRLAASARQMGYQLTPIAA

SEQ ID NO: 275378 - protein, 420 aa, unidentified
MKEPTIDDFAALIGIDWADDKHDICEMPVGTNDYQLSVISSKPQALHDWALSLKNRYPDKLVAVACELKKGPLIYALSRYEHITIFPINPSTVAKYRKAFTQSGAKNDPSDAFIQTEILMLHMDKLTHIQPESADVRALAQLVEYRRKVVQDRVDLTNRITATLKNYYPQVLDWFKEKDTIIFCDFIARWPSLPDSQKVRKQTLMNFFNQHNSRYPEINEKRFTDIKAACALTNDPGVIEPNKVLIEVLIPQLKLLIEAIDRFDLEIKKYYSCQDDRVIFDSLPGAGVQLAPRIFVAFGSNRERYSTAADLQKYAGVAPVIEQSGKKKWVHWRYSCPTFLRQTFVEWAGLSIRYSFWAKAYYEQQISKGKPHNTVIRALAFKWIRIVFRCWKTNTPYDESTYLKALKKRGSPLLKFAAEN

SEQ ID NO: 275379 - protein, 437 aa, unidentified
MVIIMSKINPLSTLFIGIDVSSRSNVVYAMDFEQNKLLSGSFPNNQPGAEKLEDEIRKCMLAHQNLNTIVATLESTSVYSIHIANFLSSSEVLMPFSPYVYCINPKMTANYRKSFVGLSKTDPLDSFLIADFARVGRVKNCTPWRGSQFLALKRLTRHRLHLAECITREKTYMISNLYLKFSELELLDDDQQPFSNIFGATSSAVLTEFFSVQDIIDASEEDLLRFLAEKSHNRISDLSKTSELLKKAARDSFRLDKCMAEPLTLSLASSFNCINAYDKEIKAINQAIEKTIKGMNPNAFQILQSIPGVGPVFAAGILAEIGDISAFHSDDALAKYAGLTWRNCDSGDFVSEETPVFRAGNTYLRYFIGEATNSARRYIPEYGDYYAKKFAEVPKHQHKRALALTSRKFVRLVFGLLVKNQLYTGEKLDAEPNNEAL

SEQ ID NO: 275380 - protein, 376 aa, unidentified
MKRQGEAFVGIDTAKARNAVAVAEGDRNGEVRYLGEFDNTPDAVAKLVRRLAERYGVVHYCYEAGPTGYGLYRQIRALGQDCGVVAPSLIPRRPGDRVKTNRRDATSLARLLRAGELTTVWVPDETHEAVRDLVRTRAMAIEDYRRKRQHVSSFLLRHGRGYEGSPTWKGLHLRWLDRQAFAHPAQRLAFQELLNAVRAAVERIGRLEAALLEVVPAWTMAPVVAAFQAMRGVSFLTATTLVAEAGDIRRFDHPRQLMAFLGLVPSERSTGEAKRQGALTKTGNIRARRALIEAAWTYRHSAGIGDKHQSRQRHLPERIRDIAWKAQVRLCARYRRLAARGKRVTVVVAAIAREIAAFLWAIARHIDPGSQGAAEA

SEQ ID NO: 275381 - protein, 423 aa, unidentified
MREAPFVGPLRVPPRRWVVSVVAAPVSSSTVVVAVDVGKNCVALSVTDANRHRLFGPVEFAMTRPALERIVARIGDVLPPAGLVKVGVEAAGHYHLPMITGSAWPAGWEVLELNPAHVGEQRRVAGRRRVKTDAIDLEAITDLVLAGRGMPVTAREEVMSELTAWAAHRSRRVGTRTATKNQLLGQLDRSFPGLTLALPDVLGTKVGRLVAAEFADPARLAGLGVTRFIRFAAHRELRVTRPVAERLVAAARDALPTRDAVIARRVLTADLALLADLDQQITQAEREIAELVPASPFRTLTSVPGWGTVRAAAYGAAVGDPTRWPGPSQLYRAAGLSPMQYESAGRRRDGGISREGSVELRRALIDLGIGLWHSDQPARAYAASLKARGKHGGIIACALAHRANRIAYALTRDTANYDPTRWA

SEQ ID NO: 275382 - protein, 366 aa, unidentified
MKKISTMAIEKIQIFKGKQLTIGLDLGDRTSHYCVLNEMGEVIVEDKLATTPKGMEEVFSRIPRSRIALETGTHSPWVSRLLTQLGHEAIVAHARNVRLIWESSRKDDRLDARTLARLARIDPGLLGPVRHRSAQAQIHLTVIRARAALVSARTALVNAARGLTKSYGARLPQCGTEQMDREMAKGLSQELRDALDPLLAEIESLNARIAEYDRRIEQIVKEVHPEVALLRQVKGVGPLISLTFVLTLDDPQRFRRSRDVGCFLGLRPGRRNSGMSEPQLHISKEGDRYLRTLLVQGAHYILGPFGEDSDLRRWGLKLAERGGKNARKRAVVAVARKLAVLLHKLWVSGEVYEPLRNNRKLVAAVA

SEQ ID NO: 275383 - protein, 341 aa, unidentified
MYKVSGWDVTDAREKIMFYLGIDVSKAKLDCALIDSSTSKQKCKVVSNDPDGFAKLLEWLAKQKAGAVHVIMEPTGVYHEPAALALTDAGISLSLVNPAQLRNFAKGLGVKTKTDKADSNVLARFGATQNPELWQPPSIAARTLKALLARRDVLAEHLQREQNRREMIQFSEVPAPVQQSIAASIEFLTGELARLDQQIQRHIDDDPDLRGKKDLLETIPGVGPRVALNMTALLAARHFERAEQLAAYLGLVPVQWESGTSVSGRPRMSKAGPSHLRKLLYMPAVVAIRANPHIKALYERLLIRGKPKMAAIGAAMRKLAHLCFGVVRTGKPYDANLMHPA

SEQ ID NO: 275384 - protein, 344 aa, unidentified
MNSMHYIGFDIHKKVISFCEKQIDGTIVDRGVIRATRQSLNEWVAERKTPWSGAMEATLFTGWIYDYLLPHAKELKVAHPAMLKAITAAKKKNDAADAEKIADLLRCNLLPECYMAPEEHRNLRRILRYRNLLVREAAKMKTKTATLLMEVGAEYNKRRLHGNKYFQELLSTLDHVPESVLNLLQMSRSSMEFFDKMQKSLVRALRNDPQISQRVELLRSIRGIGEVTALTWVLEIGDVNRFGRISQAVSYCGLCSAQKESAGKEIRGPLSKKRNKHLQTVLIEAAKLAPHWNPQLAKVHERELEKGNHNRATLAVARKLVAYMLAVDKNQKRFIPKEVLEKAA

SEQ ID NO: 275385 - protein, 343 aa, unidentified
MYYIGLDVHKKTISYCVKDAAGKIHREGKMGSTRRELDAWIKTLPQPRMMAMEATIFTGWIYDHLLPHAEKVKVAHPLMLRAIAAAKRKNDRIDASKIADCLRCDFLPECYMTSTEIRDRRRTLRYRSLLVKQTVQMKNRISGLLMETGVSYNKKRLHKVGYFDELISGNEEIDDSIRPLLKLSRETINRSQKLDYALVSSLERDPLLKERLERLRTVPGVGPITALTWVLEIGDVARFRSIKQAISYCGLCGSEKSSADKVLRTPISKQRNKHIQQVLVEAAKLAPRLSHELALIHEKEKQKGDRNRATLAVARKIVAWMVAVERRKQAFVPAEKLGGEAAA

SEQ ID NO: 275386 - protein, 409 aa, unidentified
MNPLYVGIDVSSKNNVVYLMKPDGSKIKNFSVPNSKDGSQTLVKEILSAITSFSLTDLIIGMEATSVYGEHLVCFLREDGSLAPFNRKIHVLNPKQVNKFKQSYNDLPKNDYVDSFVIADCLRFGRINKEVYLDDYRYKALQTLTRARFTTVQNLTREKQRFMNVLFKKYSSLAQEKVFSDTFSSTALALYEEFDSADALAYMDLHELTAFLQEKGKNRFANPDEIAKAIQKAARSSYRLPKTVNDSVNQLLSLSISSIRALESQIKQFDKAIAAQMELIPNTLTSVKGIGPVYSAGIIAEIGDINRFPNQAKLAKYAGLSWNQHQSGDFDAQNRRCIRSGNRFLKYYLGEAAMSLVRCDAEYSRFYHLKYKEVNKYQHKRALALTARKLVRLVYRLLKDIRLYIAPEA

SEQ ID NO: 275387 - protein, 338 aa, unidentified
MKDIKYFIGLDVHKERTSYCVRDKLGNILTEAETATLYSELEPRLKPYLAYSLIALEASTSYYTLYQTFLKKGYRIKVANTIQLRQLIAKNDTLDAQRLAEMLRLGTLPCSYIPEERIQHLRSMVQMRHALMQEKVRCNNRIQAFLDRNGVVMPPVKAFSKKWKHALMQHLGTGNASMELRYEYNHYVYLEKTNEQADQEIIGYTKTYWKTEYNLLRSITGFGVLLPCYVIAFVHPIERFLSNRKLRRYAGVIPLSKESGNTTSPGRIPKTTSKALLRWALVQAANTIGKTNTRLGRYYRRKKNQKKKSGIAKIAVASTLVDIIYKVLTTKKPYVPTC

SEQ ID NO: 275388 - protein, 340 aa, unidentified
MGDITTIGLDLAKSVFQVHAVDAMGSVVMRKRLRRSQVLAFFAEIPPCLIGLEACATAHYWARELIALGHEARLMPPNYVKAYVKRNKHDVADAEAICEAVRRPSMRFVPIKTAEQQSALMMHRARDLLVRQRTMLVNALRGHLAEFGLIEAQGLHKVAKLIAIVTDENDGRVPYIARQVLQVMINHIEDIQVRIVGLEKQLLAWHKSNPVSQRLATIPGIGPIIATAIAATVADPNTFRSGREFAAWLGLVPRQNSTGGKARLGGISKRGDSYLRRLLVNSAHTVLLCSKQAKTDPWLTSLLTRKPRLVAAVALANKTARLAWALMSRQDTYRHAAATA

SEQ ID NO: 275389 - protein, 402 aa, unidentified
MNAVGIDVSKGKSMVTILRPFGEIVSSPFEIKHTSSDILSLIKLIHSIEGESRIVMEHTGHYYEVLAQQFSAAGLFVSAVNPKLVKNFNNDSLRKVKSDKADSIKIARYALDKWQNLKQYNVMDELRNQLKTMNRQFGFYMKHKTAMKNNLIGILDQTYPGVNTYFDSPARSDGSQKWVDFASTYWHVDCVRKMSINAFIDHYENWCKRKKYNFSKSKAEEIYGKAKELVPVLPKDDITKLIIKQAVDQLNSASITVESLRTLMNETASKLPEYPVVMAMKGVGTSLGPQLMAEIGDVSRFTHKGAITAFAGVDPGVNESGSYEQKSVPTSKRGSSDLRKTLFQVMDVLIKTHPQDDPVYQFLDKKRAQKKPYYVYMTAGANKFLRIYYGRVKEYLASLPES

SEQ ID NO: 275390 - protein, 359 aa, unidentified
MDGSSEQPRMTAGVDLGDKYSYLCLIDQHSAEVMEEGRLRTTPEALRRRFASERPMRVAIETGTHSPWVSRLLEECGHEVLVANARKVRLIYSNKRKRDEIDAENLARLARLDPKLLYPLKHRGEDSQAHLALIRSRQALVGCRTQLVNHVRGAVKSFGARLPKCPARSFHKRASEHIPEAALWPALGPILEQIGSLTERIRDYERQLQTISKEHYPETELLRQVEGVGPLTALTFVLTLEDPYRFEKSRCVGAYLGLVPASDRSGDRDPQKRISKEGDEMLRKHLVGSAAHYILGPFGSDSDLRRHGKKIASRGGKNAKKRAAVAVARKLSVLLHRLWVSGEVYEPLYNAHPCEGVAA

SEQ ID NO: 275391 - protein, 391 aa, unidentified
MSMYFIGIDISKYKHDCCIISAADQKVVSKVTIKNNKAGFNELLTIIHSLANPADIRIGFESTAHYALNLELFLENSLLTFMEVNPVLISEYKKSKTLRRTKTDSVDCESIARWLMTVEYKPHSKGFYHAYSLKSLTRLRDKLIRQRSFYLVKITNVLDHTFPEFKPFFNERLSKTALYLLENYGSAGKMARMNSASYEKLRSLSRGKFSPQQFLRLKELAANTVGVNNSIFDVELNSLLSLYKSLVKEINTIEKEINKLIEEVHPHYMSVPGIGPLSAAVIYSEYGDISNFTNLGQMLAFAGIEPGINESGTESHGGKMVKRGSSQLRYTLINCCLPLIRFDMTFATYYAKKRGEGKPHRVAITHVAKKLIRVIYALERQDIDFNAQKLR

SEQ ID NO: 275392 - protein, 345 aa, unidentified
MSELYSGRQFVGIDLHRRRSVIVRMTAEGDPLECVRISNDVEMLSTVMARAGESPEVVLEATYGWYWAVDALRDLGAQVHLAHPLGVKAFEYRRVKNDERDARDLADLLRMGRLPEAWIAPPATRELRELVRHRAKLVGIRSNCKAQIHAVLAKCGIQVSMTDLFGLAGTELLDRLELPRPYAARIASLRRIIGALDFEIDAFAGQVRGRLARDPGFLAVQAIPGVGPILGAVFVAEVGDVHRFARAEELTCWAGLTPKHHESDTHVHRGHITKQGSRLVRWAAIESVQILPKHTLVGRIRDRVGDRRGRNIGVVAAARRQLEFVFYALRDHRVRALQGTRPVAA

SEQ ID NO: 275393 - protein, 424 aa, unidentified
MNFTQNDRLKQVTADTLIVGVDVGSQTHFCRAFDWRGFELSRRVFKFSNDRMGFLTFLRWIEELMNKTDMKKVIVGCEPTGCYWLTFQKFLQDHDVKLVTVNPFTVNRSKELDDNSPEKSDLKDPKTIAMLVKEGRYSTSYLPEGVYAEIREASVCRDQIMKQHVRLSNQIQGWLQKFFPEYLDCYSDWDSTSGLMLLKSAPLPQDILKIGAGGINQIWRDAKVRAAGLKRAQTLVEAAQESVGLEAGEAARLEIWVLVNDYILKAEQLKRLDEYLEEKIKEVPNVEKLLAIKGVGMSTVIGFIAEVGDIGRFTDPKQIQKLAGLEIVKKSSGKKKGQPRISKRGRRKLRRTMYESARALMSWNPAFQDVFLYYRNRTRNPLGGMQAKIAVACKAIRVFYVILQTGCDFDEEKFRRDIIRPEAA

SEQ ID NO: 275394 - protein, 433 aa, unidentified
MSKFFNSPTVGIDVSADFSFVAILAPNGDVFKKPFRIKHNVSGFTHLLKEIKKVEEEFNMKTAIFMESTGVYHLSLFHFLNKNFDNIFVINPLVTKCNKNVDIRKVKNDKKDALSIAQIGKFQNIKLSQSVSMDIFQLKSLVREYYKLTDNCSTYKKKLSTDLRVIFPGYKNVFSNVTSNSSIAILNEFPTPQAILSAPKDLIINILMEKSKKGLIWSEKVYSNLINYANEANIIGLPLHGFSIKITSTINIIKALESEIKNLLEQIESLINSPNFSEQIRKNIEFIDSIPGIGRLTAVTLIAEIGDINGFLRPKHLVAFFGIDSSVNESGKFKGNQNKISKRGTRIGRRALYAAALACIRTNRNGVPINKVLLDYYQINLNGKKPKVALVAIMHKIINYIFAVLRNQTPFEVRDPRIHKQMYLENKNKNTAA

SEQ ID NO: 275395 - protein, 338 aa, unidentified
MKKDGYVGIDVSKKWLDVAIFVENSDLLGYFHTQVSNDKAGYKELLRWLKEHDVDASTCMYGMEHTGFYSDGLQHFLDKKGYRYTMLEPAVIKHYPIQPREKNDRLDAAKIADYLFRFKDRIRLSRVPDKTMEKLRELHKERKFYVEDRVAYLNRKQVVGKDEARRLDKMISLLDKQVESVEEKIRDIIQADEALMESYLYLTSIKSIGFVNAVNAIVITQNFTVFKTARDYASYIGVAPHTKTSGTTVRWKPKPYRHCDLTAKADISEAAKCAVIHDVELKRFYERKCNGKDDADTVRKAMNAVKFKLVLRMFAVVRQKHTYKQLTTRYNAFTYCCQ

SEQ ID NO: 275396 - protein, 416 aa, unidentified
MDVVHERCAGLDVHKQTVVACVLRSAAKGVVDKEVRTFGTMTADLEALRDWLAECGCTHVAMEATGVYWKPVYNVLEQAEELTLLVINAQHLKTVPGRKTDVKDAEWIATLLRHGLLRASFIPDRHQRELRELVRYRTALIHQRAAEVNRLQKTLEGANIKLAAVLSDVTGVSGQRILEALIEGESDPEQLAELAHVRVLKHKREALEQAVVGRLSDVLRFVVQQQLQHLHDLEAQIATCDAKVADLLRPFEAALERLRSITGVGPRTAEIILVEVGLAIQRFPTARHVSAWAGMCPGNRESAGKRQRVGTRKGSPWLRAALAEAAWAASKSKDAYLPALFRRLSARRGKKRAIVAVGHSILVTAYYLLTRGAMYQDLGETYFDERDRQNVVRRSIRRLQGLGYTVHLESTDTKAA

SEQ ID NO: 275397 - protein, 360 aa, unidentified
MKYYVGLDVSMKETFICIIDETGTIINQGRKKTEPQLIAEYLKKFNLAIDKVGIESGSLSHWLCEELKKLDIPAICIDARKMAAVLSVQINKTDKNDARGIADAMRCKMYTQVAAKSQRSIEIGTLMGSRRILVEQKVKVTNSIRGFLKTYGIRLPSSGEESFTQMVKGSLPDKHEIANEGIDALLVCFEKLREEIKKLTRKIETLAREDEDVKRLMTIPGIGPITAMAYKIEIDDTNRFGNSRAVGAYLGMTPKQYSSGEIKRQGKISKCGSIEVRGLLNEAATVILTRSRRWSKLKAWGLKIYRKHGFKKACMAVGRKLAVIMHAMWMDQTNFIYGEQKEDTDKTEQKIADLGLARAI

SEQ ID NO: 275398 - protein, 341 aa, unidentified
MEEKLYIGVDVSKRTLDLAYYDGDTVDWKNGHIRVSNDSKGFKEIDKWLKKLKLKHDEILLTMEYTGLYSQNFRLWLEQSGIHYYMVNPRKMHRFEPDLDDGARALDRVKTDEMDSFRIAIYCEQNRKMIKRNPSHLPAESYFKLKRLIAERKQYVKQSVLYKQQLHDISIYDTEPSQERKREQLGHIQTAIDNLDHEIDLIVADDPAIKKNYDLLRSVTAIGRVIALETIILTENFTAIDNPRKYACFIGIAPFKKESGDTVRGATRVSAKGFSQAKADLSIAVLSAIRNDPNIKAYWQRKRAEKKGGIVLNAIKFKLVLRMFAVIKRQTPFVNMDTYKN

SEQ ID NO: 275399 - protein, 339 aa, unidentified
MRSQNAVATVYGIDLGKTYFHVVGTDSTGKPVRRAKLTRNNIFEFFANVPMAIIGMEACPGSQWLARKLLALGHVVKIIPAQFVKPYVKSNKNDTIDAAAIAEAVTRPTMRFVPIKHTEQVDLQALHRSRDLSVSSRIRLISQMRTFCLEYGLPIRMSRAAFKSAIPGIISDDTNDLTPALRRLLESLWQDFRILDDRVAAVTAEIAAIANQSDLARRLETVPGIGPLTATAIVSAVGGGKQFRTARDLAAWLGLTPAQYSTGGKTTLLGISKRGNSYVRRLLIHGARSCVMHLDRTRDRLGAWLVGLESRMHANKVVVALANKLARIAWVILQARRTL

SEQ ID NO: 275400 - protein, 335 aa, unidentified
MKIVGWDLHARQQSIAMVDTETGEFTEKRLMHEGNAVRDFYASLEGPVVVGIEATGAMQWFLELLEELGIKCRVGHPAKIRAAETRKQKHDRRDAEVILDLLVMKDRFPDIWMPSTEQRDLRTLLRDRHQWVKMRTRLQHTLQAIALNHALREGRALWTAAGQGALQGLALPPYTDQRRDELLSLYTQLEKRIQQLDKQVETEAQQRPRARRLLTHPGVGPVTALATEVFLGDPTRFATANQVASYVGMIPCEHSSGKKQRLGKLTKEGNSLLRYLWVEATLHAVIKDAELKRFYRRKLIQKGMGKARVAAARKLGIRLWIMLRDEIDYEEFCRL

SEQ ID NO: 275401 - protein, 312 aa, unidentified
MNDKKTSVYVGLDIAKASLQLHLQSKFFDLPNTADGHAQLIKRLAAIPGLHVICEATGGYERAVVAALHAVALPLSVINPARVRQFARASGELAKTDPIDAAVLTAFGQAFAPEPTPARTATELKMAALVTRRVQLLELRVAEAQRADTCADLELCKLFIPWLAQMEKQIAKVEALIEALLKAQASLADQVQRLDDIMGVGRLTAVMVLATMPELGQLNRRQTAALAGLCPYNRDSGQWAGKRCISGGRAEVRRALYMAALSASRSNHLLKPFYDRLIAAGKPAKVALTAVMRKLIVLMNHLLKNPKFSLAH

SEQ ID NO: 275402 - protein, 459 aa, unidentified
MKKATVSKRANKNKLAVVTHVIEPNAAGIDVGSTEMFVAVPVDRDPQPVRRFTTFTNDLVALADWLKQCSITSVAMESTGVFWIPLFQLLEDRGFRVCLVNARHAKNVPGRKTDVADCQWLQYLHSVGLLRASHRPTQSICAIRSLWRHRESLVQIAAHHTQHMQKALDQMNIQLHHVISDITGVTGLAIIDAILSGERDPNKLAQLRNAGIKASERTVAQALVGDYRSEHLFVLRQSLEAYRQYQRWITDCDREVEEQLRRIESKIDPVQRPLVRTKEARRKPRGNEARFDLRNDLYRIFGVDLTEVPGVSSLTAHLLLTEVGDDLSKFPSAAAFASWLGLCPDNRISGGKILSAGTRHVVSRLAIALRLGAQSLYTSRSYLGDYFRRMRARLGPPAAITAAAHKIARILYHLITTRQRYDESVFAVLEQRAQQRQISILKKRASALGFEVKPAACVP

SEQ ID NO: 275403 - protein, 320 aa, unidentified
MSEEIFIGIDVCKAWLDVAQVPAPSADKSGELAKRVDNDEPGRAVLVSQLKKLGPTLVVMEATGGFEAALASELCAAGIAVAVVNPKRVRDFARSMGVLAKTDRLDAQVLAKFAQATRPQVYALPDETQQEIIELVDRRAQLVTMRAQEQTRLSTVKHVARTSVRHHIEWLTKRIKEIDKDLDGRLKDSTIYQPKYELLESVPGVGKVTIMKLLGRLPELGSLDRKRVTALVGLAPMADDSGKRRGQRYIQGGRADVRTAMYMAALTAKRYDGPIKALFDRLRLAGKPFKVAMTACMRKLLIILNAILKTGQPWRGAEGA

SEQ ID NO: 275404 - protein, 475 aa, unidentified
MTSKRRTSKGKQTRVQKRHQKRTPPRQASAKSMPVMEANAAGIDVGAREMYVAVPPDRDTERVRVFPTFTSDLEALADWLVEQGITTAAMESTGVYWIPLYQILEDHGIRVCLVNARHMKNVPGRRTDWHECQWLQYLHAVGLLRAAFRPESEVVAIRSVMRHRKRLVETAGVHIRHVHKALTQMNLQIHHIINDITGVTGTAIIESILAGQRDAAELAKLRQPEIRADKETIRKSLEGDWRREHLFALRQSWELYGTYLSSIKACDQEICEMLGGHKPKADPAKKPLPNETKRRTKRKHKRTGDFRFDVRTEAYKQFGVDVTRIPGLEGIALVLYSEVGNDMSRWSSASQFASWTALCPDNDKSGGRVLWTGVRQVKNRAGQLFRQAANSLHHSQTQMGEYLRRMKAKLGAEAGITAAAHKIARIFYAVVKNQVEYDDTTWHQQDLARQRRFEAKVRRQARGLGFELVPIQPVP

SEQ ID NO: 275405 - protein, 343 aa, unidentified
MQAVTTIGLDIAKSVFQIHGVDAAGNVIVRRQLKRRYVLPFFQRLPPCLIGIEACASSHHWSRELKALGHTVRLMPPAYVKPYVKRQKNDAADAEAICEAVTRANMRFVATKTPEQQSCLMLHRTRHLFIRQRTAVINAIRAHLAEFGIVAPVGRNGVEQLLDVVANASDKRLPEIARACVLALGAQLRTLKVQILNFDRQIVAWHRSSEASKRLDEIPGVGPALATALVASVADPKAFRSGRNFSAWIGLVPKQRSSGGKDKLGSISKQGDRYLRSLFTAGALAVIRYAKIHGTKHRPWLTALLARRPTKVAAIALANKIARMAWAMMAKGERYKEPVALAV

SEQ ID NO: 275406 - protein, 352 aa, unidentified
MKEHNTKRIVVVGLDLGDKHCQFCGVNGLGEPVLERRFCQTRAGMDRHFQGKGPWRVVVEAGTPTRWIKKHLESLGHQVKVVNPRKMRVIYENDSKSDVVDARELAEGGLSRWNRLPVVTLRGDEAQGKLAVIKTRDLLVRSRTALASQARAFLKQEGLCPPKCTPQAAPRRLRPMVPDTHKVALEALLTQIDALTERIKALEEWIEQQSSEDTAIQHLRSVRGVGPITAAAYVWTLDDPGRFAKSRSVGAYLGLRPRRDQSGEVDRQLRITKAGNGLLRRLLVSCAQYILGPFGPDTALRRWGLERAARGGRLAKAKAVVGVARKLAVILHHLWVMGEEYEPFPESTEAAA

SEQ ID NO: 275407 - protein, 348 aa, unidentified
MALTIVEDTRAITGGVDTHAGTHVAAALDPVGGLLGVREFPVTPAGYTGLLGWLGGFGTVALVGVEGTGSYGAGLARYLIAAGVRVVEVDRSDRQDRRRAGKSDPLDAVSAARAAQSGRARGAPKGRDGAVEAIRALMVAKRSARSERVQTINQARSLIVTGPDDLRARFAGHTAAALVSELAALRPRPGGAVSYATRIALRELGRRAEFLDGQLGRLDELLVPLVTARAPGLLALHGVGPDTAALLLVAAGDHPGRLRSEAAWAHLCAAAPIQASSGKVTRHRLNPGGDRQANHALWRIVLTRMSTHPPTLIYVQRRTKEGLSKKEIIRCLKRYVAREVYHHLRAPG

SEQ ID NO: 275408 - protein, 319 aa, unidentified
MSIQIKPWIGIDVSKAHLDVYIHPAGERYSFKQTEEALMDLGQKIKSTDPALVVLEASGGFESAVASALVNMSIPVVVVNPRQVRDFARATGRLAKTDLIDAQILARFAEAVKPEIRPLPDDCTQKLSSMVKRRQQIVEMLTMETNRLAQSCEPVASSIREHIAWLTQRVKELDKDIKNLLRKSPVWKEKENLLRSVPGVGPILAATIIAQLPELGQLNRKQIASLAGVAPLNRDSGTLKGKRTIWGGRSHLRAILYMGTLAAIRFNPVIKVFYQRLRQAGKAAKLALTACMRKLLTILNAMFKHKTLWNPSNYILYAS

SEQ ID NO: 275409 - protein, 406 aa, unidentified
MEVVHPRCSGLDVHKKSVVACVMVPGRKEVRTFGTVTAELLRLGDWLQEEGVTHVAMESTGVYWKPVFNVLETTGLELLVVNAQHIKAVPGRKTDVKDAEWIADLLRHGLVRASFIPPRPQGELRELVRYRKTVVEQRSRLVQRIQKLLEGANIKLSDVASDIVGVSGTAMLRALADGETDLDRLVELAKTSLRNKREQLRLALQGSFGSHQRFLLGKQLDQLEFLDRQIAELNLEVEQRLRPFEALLARLDAMPGIGPRNAEQILVEVGTDMSRFPTAAHFASWAKLCPGNDQSAGKRRSGRTGIGSRWLRSTMVEAAWSAARVPNSYFAAQYHRLVPRRGKRRAAVAVAHSMLIAIYHLIKDGTIYQDLGPNHFDEIDRQRITHRAVRRLQALGYRVVLNEVPA

SEQ ID NO: 275410 - protein, 327 aa, unidentified
MSASMSPREPSTSASCCPRTRAPARVSFFQCDQEGIDELLGRLGGTTSPKLVVLEATGRYERLCATSSIAARGIIPVAIVNPRQQARDFAKAIGRLAKIDKIDAAFVLARFAASVGPSPSTIPDEQAQALQHILARRRQVLEMLVVEKNRLHQVAPRTLHKRIRAHIEWLEKELSRTDGDLEEDIEASAAFIKANEALLKSVPGGVGPVLLARTLLSRSCPSWESSLTSACALSSVGVAPFNRDSGQGRGGKREVWGGRAPVRAALYMGALVAARHNPTIKEFYERLLGAGKPKKVALVACMRKLLSLLNALMRDRAIWRCPHVLAP

SEQ ID NO: 275411 - protein, 409 aa, unidentified
MDVVISRCAGLDVHQATVVATVRVPSPTGGRDVVTTTFGTMTPDLIALREWLQAYGVTHVALESTGVYWKPVYYVLEDGFTLLLINMQELKRVPGRKTDVKDSEWLAQLLECGLLRASFVPPPPIRELRDLTRYRVQQVRDRAQEVNRLCKVLEDAGVKLSTVATNVIGVSGRAMLQALVEGTTDPAVLADLARGKLRKKLPDLRRALTGRFRPHHAFLLEQVLAKIDFLDEALDRLMAEIESRLGPFASMLTALDTIPGINRVGAISLLAETGGDMTRFATAGHLCSWGAMCPGQNESAGKRHSGKTRKGNRYLRAALIQAALAASRAKGTALQAQYLRIRRHRGHKKAVVAVGHQILEIAYYLMRDGGSYHELGPSYFDQRNKERTIRRHLKQLEALGVHVTIQEAA

SEQ ID NO: 275412 - protein, 402 aa, unidentified
MNAVGIDVSKGKSMVAIMRPFGEIVSAPFEIKHTASDIHSLVELINSVEGESRIVMEHTGRYYEVLAHQLSKANLFVSAINPKLIKDFDNDSLRKVKSDKADAVKIARYALDKWQNLKQYNVMDELRNQLKTMNRQFGFYMKHKTAMKNNLIGILDQTYPGVNTYFDSPARSDGSQKWVDFASTYWHVDCVRKMSLNAFIDHYQNWCKRKKYNFSQSKAEEIYGKAKELVPVLPKDAITKLIIKQAVDQLNNASTTVESLRTLMNETASKLPEYPVVMAMKGVGTSLGSQLMAEIGDVSRFTHKSAITAFAGVDPGVNESGSYEQKSVPTSKRGSSDLRKTLFQVMDVLIKTHPQDDPVYQFLDKKRAQGKPYYVYMTAGANKFLRIYYGRVKEYLSSLPES

SEQ ID NO: 275413 - protein, 391 aa, unidentified
MPMYFVGIDISKYKHDCCIISAADQQIISKFTITNGKDGFEQLLTALNSLSNPEDIKIGFESTAHYALNLELFLENAHHSFMEVNPVLIKEYKKSTTLRRTKTDSVDCESIARWLITVEYKPHSKGFYHAYSLKSLTRLRDRLIRQRSFYLVKITNVLDHTFPEFKPFFNERLSKTALYLLENYGSAEKMARMNSASYDKLRCISRGKFSIQQFLRLKELAANTVGVNNSIFDLELNTLLTLYKSLSDEINTLETEIIKLIEEVHPHYMSIPGIGPISAAVIYAEYGDISNFSNPGQMLAFAGIEPGINDSGTESHGGRMVKHGSSQLRYVLLNACLPLIRFDLTFATYYEKKRAEGKKHRVAITHVAKKLIRVIYALERQDVDFNAQKLR

SEQ ID NO: 275414 - protein, 347 aa, unidentified
MRFYTKQHQYYCGIDLHTKKMYVCILNSSGETVAHRNLNTDPGAFLEFIASYREDIVVAAECMFTWYWVADLCARENIPFVLGHALYMKAIHGGKSKNDKIDSHKIAVLLRGGMLAQAYVYPAKMRATRDLLRRRNHLVRKRAELFAHIQNTGSQYNLPDPLGRIAKPKNREGIVDRFDQPSVQKNMEVDLEMIEAYDRILIPLEREIIKTANGHDALSYNLLKTIPGVGRILALVMLYEIENLQRFETVQDFASYARLVKCAKESNGKNYGTSGKKIGNAHLKWAFSEASVLFIKSNEPAKKYLDRLAQKHKKGKALSILAHKLGRAAYFMLKNKVAFDQDKFLSH

SEQ ID NO: 275415 - protein, 322 aa, unidentified
MQGKELPGRSAGKEVYVGIDVCKDRLDVYLHPVGRKFQVANTDVGLKKLKRQFEGHDVALVVIEATAKYHRLTQRMLHAAGFRVAVINPLRSRLFAQASGQLAKTDPIDARMLALYGEALSPKATAPVPEIVEELQEIVRTRQEATADLTALKNRRTASMVSCVRRELGRLIKNLQAHIERLEVEIGRRIKSDPLLERRYQILVSIPGIGPIAAAVLLVGMSELGSCSGKAAALLAGLAPIACDSGARDGKRHIKGGRGFVRNVLYMAGVAAARCNPDLKAFYQRLSATYPPKYVLTAVMRKLVVLANTLLKEDRLWQPVHS

SEQ ID NO: 275416 - protein, 421 aa, unidentified
MSNSTLSKKLASVKPGTLFVGIDLALDRNVAVVLTEHAEQLTRFGFPNERDGYDYLYRRLDTLREHQQAPAVLVGMEPTNYFWKLLASDMEQQRPDYSYRLVNPYTVKKNREGDQLDRSKDDNRDAFTIGNLLRTGKYTETRLLHGGYAELRQYVTLHERLKGDARRQKILIRNIAGQLFPELPRVFKDLAGETALAMLRSHAAAVTPRNKSQDRFITDVRADFRGRRLQVAKLRRVHVLAERSVGLKDGTEALQLALRTHIETLQVLQQQLEEIRAAQVDTFLALPQSDYLLSVPGLGVITAAKILSEIGDPSNYTSSRQLVKLAGTQPVPNTSGRKTRSKTPMSHKGRPRLRTALFFAVMRLVQVDETFARDYLHLQTREKNPLTKMQALGVLMNKLLRILWALMQNRTFYSPGFSGTA

SEQ ID NO: 275417 - protein, 482 aa, unidentified
MKRRNIYQNQSQELLHLFEEAGSSEKVMCVPMDYAKSDHLVMFCNGHGDILRKPFSVKNTPEGIAYIDEQVTRSCRRRGIKRKHVFFGGEDANSFAKNFVSTLRSKGFVVANVNAHDAKKQRVNMQASTDRIDLMGIATMLLNCRANCCPAQSGIYRNLRTLVRHRRRLVQMLTEVKNRVHGIVDELFPGFLNEKNSGIVPFTQSSLYLMEDRFSPKQIHRRRRHKLIEILKRLGTSKAEKTAAKLQQFAGKVLHSPVEYVDTLQLSLAQHVKHIRCLKQSVAQMEKEIALNLAQTQGAFLTSVRGIGLVLAAGVTAEIGDPNQQKPLNNLVSYAGIIPRVKQTGGYNGKTYTGPVAKRCNRILKDYVVKSAYHLGLHGPQDLMADYKRRNTSGQHADFGIGRRYLRMAISLMRTSQVYLPSNLRKVNSTPQQRAGYYLTSWPYLREKWEKVGALEAAFANNRPLGLWRQIVQELYDIKLKL

SEQ ID NO: 275418 - protein, 329 aa, unidentified
MQSEVHVGIDVSKFTLDVFILEVRSHRRFKNDSNDFPAIHQWIEKCTKYQSAFICFEHTGVYSMALAAFLESQHIVFAMVSPLEIKRSMGIVRGKNDVVDSKRIAEYASRFRDKIVVTKLPAKDITRLHFLLTLRDKTARALAGYIAAVNEVQRGIGHEELPELFASYDTIITALKSEIKKIEAAIKYIINTNPDLKTSFKLITSLKGVSLIVGTYMIVYTCNFTKFATWRKFACYCGIAPFGHQSGVSVKGPAQVSPIANKQLKRLLHLAAVSAASHDPELREYYIRRQSEGKSKMSTLNIIRNKIVARAFAIVKRGTPYVNIKQYAA

SEQ ID NO: 275419 - protein, 351 aa, unidentified
MTMVGGFDVHRQQITFDYVDNDGLVRWGQIRPATRKTLRSWLAAHCPDGDAEFALEGCTGWRYVVEELAAADVGAQLGDPAEIAAARGRKKRAKTDRADARLLRTLLVEGRFPQSWIPPAHVLEIRTLGRLYCTLMDERRAWQQRVHAQLFHQGCPPIRALLSETGRATLASVELSAAGRQYVDTALRRIDQLTTEIEPLRTQLVNFARRQRGCQALQARQYGIGGLCAAIIWAEIGDARRFASSDQLVRFAGLDITVYSSDGKRSPGHLSRQGSPELRWAAFEAAKCAARRGSPDHAYYHKLAAKHDGHNGKNPTLAVERKILRRCYHTLRALGDAALALPTTPPQEVAA

SEQ ID NO: 275420 - protein, 320 aa, unidentified
MMPQSDLVVVGIDVAKDRVDACIRTLSERKTCPTIAPGQRSLIAWLRKHRVAKAVMEASGGYERVWAKALRQAGIEVRIVDPKRVRSFAESAGRLAKNDKIDAEMIAWFAETFNEAPSQVDDPAHEEMKALVKGLRSLIDVRARLEMQKEHEAPVLVRKARARLLKKLAGEIAMIDTAIGAKIKATPAFAERAEIIRSVPGFAEATAMTLLAGLPELGQVSNEIAAALLGVAPYDDDSGKRHGQRCIKGGRRWVRNALYMPCVGAATLNNPVFKAFYERLIAKGKAPKVALIACMRKLIVILNTMIARGEKWDPKRHQVV

SEQ ID NO: 275421 - protein, 452 aa, unidentified
MKKEEVKKGISKFATGMPVFNHHAAGIDIGDTMQCVAVGDGNGGHEVKTTTGFTCDLYEIVNYLVEKEVTTAAMESTGIYWLALYLMLEEAGIDVFLVNAKHVKNVTGRKKDDTDAIWIQKLHTCGLLQKSFQPDNEMRALRDYTRQRRNLITMNSDTVRRMQKALELMNIKIHTVIADILGKTGMRMIKAILAGETDPQKLAELCDVRIKAPKEEIIKSLEGIWKEEYLFMLQQAVDHYEFHMLQINNCDEKIKKQLLKQVAIAKDGDISEIENPTKKKSKVKPRKNELNFDVLPYLSILTTVDLSQIPGLGDTTVLELISEIGTDMSKWKNYKHFAAWLNLAPNSKISGGKILSSKRMKKKNKAGQILKQAASTISNSKDPLGDYYRKMRSKLGGKGAVTATAHKLARIIYTMLLNKTEFNSEIIEGNQKKYTEDKILRLEKLIAKLKAA

SEQ ID NO: 275422 - protein, 341 aa, unidentified
MDHIAIDLGGTESQICVRAQDGSILEEVRVGTLRLASYLKKRPPSRVILETSSEAFRIADAARELGHDVRVVPATLAPSLGVGARGIKTDARDARVLSEVSSRIELPSVHIPSEISRTWKSCCSARESLVTARTQLINAVRGWMRRELLKIPSGGIGTFPRRVRLRAQAAECGLPEFIDSLLCVIDLLNDRIAYADKELKDLATEHPVCKRLMTIPGVGPVTALRFVAAIDRVERFPNAHALECYLGLVPGENSSAKRKYRTGITKAGPPRVRWALGQAAWVLVIKRPLDPLALWAKEVEKRRGKLIANTALARRLAGVMYAIWRDGTRYEPSRLRPRSAA

SEQ ID NO: 275423 - protein, 341 aa, unidentified
MEQANTIGLDIAKQVFQLHGADAAGHVLFRKRISRRKLLAFLAVQTPCVVAMEACAGAHYWAREIGKLGHTVRLIPPAYVKPFVKRQKNDVADAEAICEAAQRPSMRFVPVTSEEQQANGIVFRARDLLVRQRTQCINALRGHLLEYGYIFPQGITHLATLVALVDDPESCLPESARVVLKLLIDTFTALEAQISQLDGEINRRSKADPTARRLMTIPGVGPIVSTAITALVPAPQNFPAGRAFAAWLGLTPLEKSTGGKQRLGAVSKRGERTIRRLLIIGASAVVQQASRRGAPKGSWLAQMLARKPKMLVTVALANKMARIVWALLVKGGIYRVPVAAV

SEQ ID NO: 275424 - protein, 381 aa, unidentified
MPTKTFPTKKEATIKSIHQLSGDLPVAALHSEIAAVIGIDLGDKKSAYCALDANGSDLDEGVVSTTDRGLRMAFEGKGRMRIAIECGTHSPWVNRLLQELGHDVIVVNPRRLRLIAESNRKNDKADARTLATVAQAAPGLLKRVHHRSEHAQLELATIKARDTAVQARSRMVAAMRGIVKSTGARLTVCSTGAFAKKALESCPATLRDALTPLLRIIEQLTVEIRKYDRVIEHKINDEYPEAASILSIPGVGSLTALTFVLLLDNDPNRFSKSRDLGCYFGLQPKQQDSGTFVSQLGITKAGDQLMRSLAVQCSHFMLGRFGRDSALRQWGLSLCLRGGGNAKKRAVIAVARKLLILMHKLWKTQTAFVPFPGIKPVPHAA

SEQ ID NO: 275425 - protein, 381 aa, unidentified
MSRQLAAPAAKLSALMNKELTAKSIEQESGERKCNRVLKLGLDVHYRQVTVAMQEEEGRIKAVGRMGHDGFENWVERKREAGWEIYSCYEAGASGYWLHRELEQMGVKNLVVAPKAMGQDKGQKTDRRDSAELVDQLDRYLRGNRKALSPVAIPTTEQEQKRALIRYHRQIMADRTRYEARGKGLLCAQGIEVQGKWWQPQTWKELKTHGRFQGWMQTQLQGWRRKLLSAEQEQQKLRTQIEALAPALLPKGVGAYSAVALEYELKGLARFKTARALSSYTGLCPGIHSSDGRGKEGSINRCGNAAVRWNLVEMVWRLLKWQPDYQVVRQLGAGLVRSKRARKRLVVKAARQLAIDLWRLETGQVTAQELGLVMQPSLKAK

SEQ ID NO: 275426 - protein, 346 aa, unidentified
MEHYVGLDVSLKLTSICIVDRTGKVEREGVVASDPEAIATFIKLHAPHVVRIGLETGATSTWLWTELNKMGLPVICIDARHAKAALKMQINKSDRNDAVGIARIMQCGWYKEVCVKDLDSHATKTLLVSRALLVKIKRDIENQIRGLLKNLGLVIGRAKMNMFAVRAAQLAKDRSELLAAVDPLLKAREAVEQQILDLDRKVLRLARNNAQVRRFMTAPGIGPVTALCFLATIDDPARFKRSRSVGAYAGLTTRRYASGEIDWTGRISKCGDKMLRSYLYEAANVLLTRVAKWSALKAWGVKLAKRSGLRKAKVAVARKLAVILHRMWIVGTEFKWSSKEATDQPA

SEQ ID NO: 275427 - protein, 358 aa, unidentified
MRRPKEKVIAGIDLHSNNLMIGVINQEGTRLAHRKLACDLKAVVEFLRPYKPCLQSMAVESTFNWYWLVDGLRAQGYPIDLANPAQIEQYSGLKHVDDKDDAYHLAELQRLKILPKAHVYDPQLRPVRDLLRRRTLLVHQRTALLLSFKSLYARTTGQGLDLGYVKKMDPEQAGRLYEHPANQLVARVEAEHMRSLAQSIGVIEQAVLSCTQQLPLYERLLSIPGIGRILGMTITMETGDIRRFRSDGDFASYCRTVDARRLSNGKIKAQNNPKCGNTYLAWAFVEAANYARRYDEHCRRWYDRKASKTSKVIATKALACKLAKVAWHVMSQVCSYEPERMFPELAVQNNKKEKMSAP

SEQ ID NO: 275428 - protein, 342 aa, unidentified
MDITTIGIDLAKNSFALVGMNKHGKIVFRKTLTRNKLLAFIAQCPPCLIGMEACSGAHYWGREFTKLGHRIGIIAAKFVEPFRKGAKNDNNDAEAICEAVLRPNIWFVPIKSPDQQAVLCIHRVRQGLVRDRTSMMNQLRGLLSEFGIIMPKGRYPAQAAIAGILEEAENSLPMIARRVIDNLWQRIKQANGQIEGYNRELAQLVKESTVARQIMTIPGVGAQTASGVVASVADPRMFKNSRQFSAWLGLVPRQYTTSGKIKLGRITKRGDQYLRTCLVHGARAVVAKLGDKQDWVSCWIRALIERRGYLRAVVALAARNARLIWTLMVKQEDYRAMPMAVS

SEQ ID NO: 275429 - protein, 459 aa, unidentified
MNRKQRREVMRKIQAEDLSLEVVHRDAAGIDIGNESHYVAVPSTRDSAPVRCFGCTTAELRQMADWLKQCGIRTVALQSTGVYWIAVYDILEEAGLEVYLVNARETKNLPGRKSDVQESQWLMKLHTYGLLRNSFRPSEEIRRLRTYWRLRNDLVQAAGRHIQRMQKALTQMNIQLANVLSDISGKSGQAIIHAILEGERDPYELAAMCDVRVQASEEEVARSLEGNWQEDLLFMLKQEQDGYEFCQKQMAECDERLYQYLQRRSDRSAGASLPEEKRKGRREKHKKNKPQFDVREQLFRVTGTDLTRIDGIDVLTAMTVISEAGWDMSKWPTEDHFVSWLRLCPDNRVSGDRVIGKGRLPTNNRLSVALRMAANSLRESKTYLGAQFRRLRRRLEAPVAIKAMAAKLARLIYRMLRFGMQFVDQGAEVYEAAHRQREIHNLKRRAAHLGFQIIQAPAA

SEQ ID NO: 275430 - protein, 346 aa, unidentified
MNTAAIASIGIDLGKTTFHLVALDCHAGVIVRKKFSRSQLLAFTANLPFALIGMEACSGAHFLAARLRDQGHEVKLIPAQFVKPYRKSNKNDFVDAEAIAEAVTRRNMRFVPIKTDDQLDLQALHRVRERLVRRRTALINQIRGFLLERGLVFAKRPANLRRQMPLVLEDADAKLTPYFRRLLNDLWQEWKQVQLDIDALTEEMERLSVNDSACQRLREIHGVGPVVASAIVAAIGNGAAFRKGREFAAWLGLVPAQYSTGDKTCLLGISKRGNEYLRRMFIHGARAVLFRVKYDTGAFGEWVKRLESRRARNVVVVAIANKLARIAWAVLSSGEHYQMPRAFAAA

SEQ ID NO: 275431 - protein, 352 aa, unidentified
MRFYKRQHRFYCGIDLHARSMYLCIRDHDDVVLLHQNLPAQADDFLRAIAPYRDGLVVGCECMFAWYWVADLCADHDIPFVLGHALYLKAIHGGKAKNDKLDADKLSALLRGGNFPIAYVYPKGLRETRDLLRRRLFLVRQRAHFVAHIQNTNSQYNLPVFGKKLVFARNRDELDVAERFKDPSVRLSIETDLQMIDKFDEQIYAVELHLERHAKVDDPNTLARLRSIPGVGKILALIFLYEIHDIRRFPDVGQFLSYARLVRCAHESAGKKKGSGGKGAKKIGNAHLRWAFAEAVCLWLRQSDRAKAWMKRHEKKRGKAKALAILGAKLARAMYHMLRKKEVFDEAKVLGG

SEQ ID NO: 275432 - protein, 343 aa, unidentified
MPTNIATVNMKTNAPAVIPAVHMKTNAAPVYVGVDVAKATLQVHLQGAQIQFHNTPKGRSQLCKKMQALAGAHVVCEATGGYEQLMVQALHQAKTLVSVVNPAQVRAAALAKGQRAKNDPIDAQGLTDYGQRYQPQPTPPVAKAQRQLSALTQWLKQLTEAKAIAKTQAEHHQEPFVRKQHQGLIERYESQIERVEAQIQKLMDQDQTLRQRIECLDAIAGVGLRTAVLVLAHMPELGQLNRQQATALAGLAPWTRDSGTMKGRRCIGGGRPEVRTALYMASLSGIKSNPILKAFYLHLTGKGKPGKVALTAVMRKLLIHMNHQLKTLAAPPSDQPKTPPQKN

SEQ ID NO: 275433 - protein, 324 aa, unidentified
MNKNKQFSGIDISKDVFDVFDYTDKHYQFRNDLSGFKEFGKILTEHSHCVMEVTGSYYQNLATWLFSKSIAVSVVNPLSVKRFIQMRLKTSKTDKSDARMIRIYGEYEDPKLWQPPSEYIIEANELHKLIDLLLRQRTALKNKLHGLKSKGILRSSVVASVRRQIKSLDKEVSSLELKLEDLVKEYQAELLTRLCSIPGIGKRTAIFLIVLTQGFEKFENSRQLISYFGLNPTIHESGSSIRGRSRISKTGNNQIRNLLFMCSFTACKQNKSCMEIYQRIIAKGKSKKLALIAVANKLLKQSLAIAKSGLFYDEDFKSVYINIG

SEQ ID NO: 275434 - protein, 468 aa, unidentified
MVDQHKKVNKNDRTRSLRSFKTIEPNAAGIDLGSREHWVAGPPRDDDRPNVARFGTTTPELVRLADWLKEQGVKTVAMESTGVYWIPLFEILDSLGFKVVLANARQLRHVPGRKTDMIDCQWLQLLHACGLLRGSFRPSDGICRLRSLIRERNTMVSQRSDWVRRMQKGLDQMNVCVHHAVSDITGATGMAIIRAIVEGERDPQVLARLRDRRCRKTEAQIAEELTGNWRPEHLFNLSQALKMYDQLCSVIDDYDTEIITYISALHPEEAKDIIVPPPVSKNKAKNIVKLGQESLRQALCRLCGFDLTTIDGIGVDTASILVSELGPRFAMFPDEKHFVSYLRLSPNLSISAGKKVPDKHKASTCTRIGSALRMAASTLRKSRSALGAYYRSVAWRKGASVAVFATARKLAQLVYRLVRYGQAYIDTGAQAYEDRVNHRRLKFYSKILKAMGYNVEPAASGKELPALC

SEQ ID NO: 275435 - protein, 343 aa, unidentified
MKLMRIGVDLAKNVFQIHGVDRHEKPVWRQRLPRDRWLQTVLEKVEPGCEIGMESCGGAHHWARQLEALGFRVKLIAPQFVKPYVKSNKNDANDAEAICEAMSRPSMRFVAIKTIEQQDIQATHRIRAGLIEQRTAKANQIRGLVAEYGLVAPKELLMLRRAIPCWLEDADNGLTARFRRLLDGLWDDLRALDGRVCKLDGEITAIATNEPSAVRLQQLRGVGPMIATALVVALGDARQFANGRQFAASLGLTPRQHSSGGKDRLLGISKRGDTYLRTLMVHGARSALRTAKSKEDRLSQWAVRLAERSHPNVAAIALANKTARMAWAMLHHGTDYQPNQAAA

SEQ ID NO: 275436 - protein, 410 aa, unidentified
MEVLYPRCAGLDVHKATVVAAVRLVAGGRVAREVRTFATTTAGLLGLAAWLAENGCTHVAMEATGVYWRPVWHILAEHGFALVLANAAQVKNVPGRKTDVGDAAWLAELLAHGLIRASFVPDGPTAELRSLLRTRKQLVRERAGHVLRLQKTLEDANVKLDGVLTDLLGKSGRAMLEALAAGEDDPARLAALAHPRLSATPERLREALRGRVTRHHRFLLRLHLDQVDALDAAIARVDGEAEEHLAPFRAAVELLTSIPGVGPLAARVIVAEIGLDMGRFPTAGHLVSWAGLCPRNDESAGKRRSVRLRKGAPWLKTTLVQCAWAASRKRASYLRAQYQRLRGRRGPRKAVCAVAASILTAAYHMLKDGTAYADLGPDHFDRRAKEVQARRLVRRLAELGYAVELAPLAA

SEQ ID NO: 275437 - protein, 349 aa, unidentified
MKKSSKMLKRMRETIGIDLGDKVSRYCMVDQEGEVMEEGTFRNQASSLEKHFGDRPRRIALEAGAQSAWISRELKRLGHEVIVANPRELKWITSSDTKNDPVDARKLALLSRADVRLLAPVEHRSAEQQGELAVIRGRDAILRARTLLINSARSIAKGFGVRLPKSITHTFGERAVDALPDFLRAALTRLLEQIDALSRAIAGYDQQIAELAAKHPELERLESIPGVGRLTAMTFVLTLGRVERFAHSRDVAGFLGLRPKQRQSGARDPQLGISKSGDPYLRKLLVQCAHHILGHYGKDSALRQWGLAKSEGGKKATLRAIIAVARKLSVLLHRLWVSGEYYKPFPKMA

SEQ ID NO: 275438 - protein, 366 aa, unidentified
MRETMRMKTHPQHFISKPRRSSRVGMTIGIDLGDIWSHYCTLNEDGEVVDRGRFRTNPSGVDKRFRDIGPARVAMEAGTHSIWVSEQIRELGHEVIVANVRELRAISHSDRKSDKVDAEKIARYARLDPEILRPIAHRTVAQQETLTLIRARDVLVRLRTGAVNSVRGLAKPCGYRLPASSTLTFAKRCLTVLPPGLAQALGPLLQQIADMTVKIKEYDRAIKQLTETEYPETQALIKVYGVGHLTALTFVLTLGDKQRFQRSRDVGCYLGLRPRRSQSGDSDPQLGITKAGNGYLRQLLVECANHVIGPHGKDSGLRRWGLSLGARGGSHARRRAVVAVARKLAVLLHRIWITQEVYVPFYEVAA

SEQ ID NO: 275439 - protein, 347 aa, unidentified
MTEAYDGRQVVGMDLHRRRSVLVRMTGDGRKLETVRIENSPQALRAVLARAGKNPRVVAGATYGWYWAVDVPGEAGAEVHLAHPLGVKAFTYRRVKDDERDAADLADLLRMGRLPEAWIAPPEIRELRELTRYRHKLVGLRTSCRDQVHAVLAKLGVPVTHSDIFGVHGQAWLDGLRLPQPYAGKVASLRQLNAELSTEITLLEQVIGDLLAGHEGYRAIRALPGIGPVLGAVIVAEIGDIRRFPGPGQLCSWAGLTPRHRESDTKVSRGHVTKQGSRMLRWAVCEAIQRQPAGTRPRQVKDGIIARRGTQAKNTAKVAAARELLTLVFYGMRDGHIRRADRPGQAA

SEQ ID NO: 275440 - protein, 428 aa, unidentified
MNRTEQQVNRGCGIDIDSRTLWATSFVTTRSGRVTWDTEPFDNTVDGIRSLAQWLRKRKVLHVAFESTGIYGNVLYTMLEDEFHVIMANPRQIKQLRGRKTDINDSEHIARLLQMGAIRPSFVPPIDVRELRDLNRQYLNLTEDMVRAKNRITKTLRQGGITLDTCMSDIFGKSGRAIILALISGDDPETAARNAKGKLRPKIPLIVDAVRFPLSEHYRVILARYWRQLESIEEELASLEAEINAKARPFHEAIRCLCTMVGVGRKTACAIISEIGVDMTPFETAKHLCSWAKVCPGNNQSGGKRRSGHNSKGNRFLRRHLGEAVLAAIRTKGSMFRNLYLRRAARLGKKKAIMSIMNKMLRIIYTMLSMGVDYDDTYDETQHRSIQQASARSAMRKLSNEDLVHELISRGAKSVSWTWDEQDLASPT

SEQ ID NO: 275441 - protein, 407 aa, unidentified
MQEATQHDAVDVFVGVDVDVDVDVGKGRHHAVALRRNGKRLYNKALPNDEVKLRALIAELKTHRRLLFVVDQPSTIGALPVAVARAEGVLVAYLPGLAMRRIADLHAGEAKTDARDAAIIAEAARSMPHTLRSLRLADEQLAELTMLCGFDDDLAAQVTQTSNRIRGLLTQIHPALERVLGPRLDHPAVLDLLERYPSPSALAAANEKTLANRLTKLAPRMGKNLAAEIVQVLNEQAVIVPGTQAATIVMPRLAQQLAALRKQRDEIAAEVERLVLAHPFWPVLTSMPGVGVRTAARLLTEAAPKAFATAAHLAAYAGLAPVTRRSGSSIRGEHPSRRGNKVLKRALFLSAFAALRDPVSRAYYSCKIQQGKRHNQALIALARRRCDVLFAMLRDGTIYPPKSAPNA

SEQ ID NO: 275442 - protein, 365 aa, unidentified
MNEIYIGVDFHARQQTVCYLKTEDGELVVRELKHQNKEEVRAFYAQFKGHVIVGLEASGYSPWFEKLLTALGHEAWLGNATEIRRRARWRQKNDRRDAELILDLMLHNEFPRIHRPTSESSEILRMLRYRQKLVKMRTIGKNSLQALALQSGLSLRAKLFTKAGKQELCKATMSPVMEQQREQWLTLLETLDQRILESMLWLKQQSQGDERVSRLRTHPGIGLLTSLGIVHTLWPVSRFRNPRTVTAYAGLEPMERSSAERKHFLGISKAGSRLLRYLVVEAAHTAVKKDEELKRFYRRLEARRGRPKAKVAAARKLLVRGYIMLRDEIDYAEFQRRAVAARLARQSSRLTMPVSLIGQPASPDS

SEQ ID NO: 275443 - protein, 412 aa, unidentified
MEGETVIAGVDTHKDVHVLCLLDGLGRKIWSGSFGADPEGYDRLAEAIGDPGSCMVVGVEGTASYGAGLTRRLVELGYNVVEVLRPKRDKVRPGEGKSDPLDAERAARKAASGRGCSVPKSQDGWVEAVRQLYVARRLAVATSTSCVACAKSMLTTAPGALRERFRGRERPKDLMPLLARGRKAGDALEESVLASLRSVAAVWKEARSQVESLDERIRALLEANAPALLGVEGCGTTTAAALVVAAGDNPGRLKGEAAFSMMCGASPIPASSGKTDRHRLNRGGNRQANWALYEIAIKRMAYDERTRRYVARRTSEGKSRREAVRCLKRYIAREVYHVLMDPNPDGAAPEGPELAKMRKAMRVTQKKAAAELGLSAATLGHLERGKRRSTKLERRYYELLCELERALPQTAS

SEQ ID NO: 275444 - protein, 322 aa, unidentified
MKYIGIDVSKATFVVAYSSDKGGEIRIFNNTTTGIKQFIGALPKDGSIHCVMEATGNYSALLLYMLNVAGITVSMENPLKIKNFARAMLSTVKTDKIDARLIALYGEKMNPQPFKIQGEAILRLRQKRTVIRQLTKQITAMSNLRGSLACLPVPDKGATHTVDETIEFLEKRRDRLQSELTDLVEVEFSRQLALLTTIKGIGITLATALIITTGGFTYFQNAKQVSRYLGICPTYEQSGTSVNIRGHINRNGDVYTRGLLYVAAWTASRFNTKCGETYTRLRQNGKPGKLAMIAVANKLVRQAFAVVTHDKEYVDGFVSNRP

SEQ ID NO: 275445 - protein, 423 aa, unidentified
MEVLYPRCAGLDVHKDMVVACLRVTANGTVRREVRTVGTTTKALLDLSEWLASEGCTHIVMEATGVYWKPVWHILGDGDFTLLLANAAHVKNVPGRKTDVNDATWIADLVACGLIRASFVPDETIQELRSLLRARKQPTREQTSHIQRIQKTLEEANIKLDSVISDIMGVSGRRMIEAMIAGVRNPHQLAALADRRIKAAPKVLYDALHGRLTHHHRFMLELYLGQHDALSQAIAKIDDAVDAATARMDEEVEAGQASFRSLILLLCSVPGINILGATIILAEIGRDMSRFPTAGHLLAWAGMSPGQNDSAGKRKSPRLRKAAPWLKPILVQCARAATRKKDSYYGAQFKRLRAQRGSKKAICAVAASMLTAIYRLLRDGTHHQDLGADHFDRGSNQVKARHHVAQLARLGFHVELQPVAQAA

SEQ ID NO: 275446 - protein, 338 aa, unidentified
MKKYSGIDLHSNNCVVAVIDEADQVLYRKRLPNELSVIVAALGVYRGELHSVVVESTYNWYWLVDGLMEAGFEVRLANTAAIKQYGGLKHTDDGDDAVWLAHLMRLGLLPQGHIYPKAERAVRDLLRKRSQLVRQRTANILAIENLVARNSGQLINGNQVKRLSPADLPAIEPEAERRLAIAANLAVMGTLNEQIKQLEMAVKARTKAHEALPPLKTVSGIGETLALTIALETGGIERFAKVGNFASYCRAVDSRRLSNGKKKGEGNAKCGNKYLAWAFVEAANFAVRYCAQAKRFYQRKRAQTNNAVAIKAVAHKLARASYYVMRDRVPFDPARCFS

SEQ ID NO: 275447 - protein, 347 aa, unidentified
MIIIGCDFHTRSQQIAMLETETGEVVEKRLEHESGEAKRFYEGLKEEALVGIESTGYTRWFAEMLAELGHELVVGEAGKIRAKQTRKQKYDRRDAQHLLNLLVTGDFPKIWLPPAEERDVRVLVEHRHQLVELRTRAQNGLQAIALSYGLRRRQRLWSAAGQEELQKIPLREGMARRREDLVKLVRQLSTWIKELDQRIEEEVARRPEAQRLMTHPGVGAQTALATVLVLGPVERFPDDRHLTSYLGLIPEEDSSAGRQRFGHLTKQGNRLMRFLLGEAAQTASRYDPGLRRTYRRLAFRKGAPVAKVAVARKLAIRLYIMLRDRIDYAEFCRRGSHAGMLVSKPLV

SEQ ID NO: 275448 - protein, 457 aa, unidentified
MNEENVKYLGIDVSKGYADFCMLDSEKRMMDPVFQLDDNRRGHEHLSQYLDQQVGTGAKVICGLESTGGYEQNWLYLLKRMSKKYPLEVFKLNPKGVKHQIESTLQRTITDGISARGIAEYLVNNYFVCKTKWDKNTHHKQSVTAKQHCYNLVMGLIKQQTARYNQLEKLVYQIFPELISYCKHGIPNWMLRLLIAYPGVSAIQRAQIRGINTIKGISLAKAEKIKQLAKESVSASSDEFEEVMIKTLAQDIQYHQNRIDQLKDQLVASAKNDQTDLICSIRGIADWTSVAIFLLLGDVSRFESTDQLACFFGIHPRFKQSGDGKWGIRMSKQGNPAMRAMLYIAANNVVLHEPYFKSVYHHYISKGKKHRAVMGIIMHKLLRIIYGMLKNQQSFNASVDEANKSKAVPAPTKNISAKARRYQPLNEAAPISRSNHKKRRADLECQISTEDIITASS

SEQ ID NO: 275449 - protein, 353 aa, unidentified
MIATYLPTEYDIFVGLDVDKKSFAFTVKDHTDMKRSKKIPSNPEQFFTYLQNNYSDKKVICAYEAGPTGFHLYDYLTRKEIPCLVVSPLAIPKAPNERVKTNRIDSEKLAQDLRSGSLESIRVPQGDYRQLRYLVKTRENYAQLRKKTKQRIKALLLSAHLDACIKDDYKQWSCNYIKELKQLPCSDAVRASLDMLLRDLEYAREQTLEIHQKVKTFCKNTPPIDHYRRCLQSIPGIGFIVATTILGKLGDPGNLRNPREIGAFVGLVPTEQSTGDAIKRGSIIHLGNKTLRFLLIEAAWVAIRKDTKLQQFYHRIKGRHHPRIASKKAITAVARKLTLIIYRVLKEQRMYTP

SEQ ID NO: 275450 - protein, 316 aa, unidentified
MSTPNSPFVGIDVGQSQLDSARHDSPSTHSFPNNPEGLVKILTWIQDVSPSLVAVEASGGYERALVHFLSSAGIKVAVVSPNQVLDFARAHNQKAKTDKLDAHNIAYFASIMNPRVFSPPSPVQEKLLALVTRRRQIAHMIIPEKNRLMQASQDIKPRIQEHIDWLEEEEKEIEEKMRDLINSDPDMQEKLKILSSAKGVGNVSAFSMLAELPEMGTIGGKQVSALLGVAPFNRDSGKKKGKRRTGGGRYNARSAFYMATLSAIRWNPVIKRFYERLLSQGKEKKVAIVACMRKFIVILNAMLRDRKPFMVQSSFV

SEQ ID NO: 275451 - protein, 354 aa, unidentified
MSNPNRWVGVDLHRRRSQIAAVDEHGELTLSRRIVNDRDTFRELLGDPDGTHVALEATYGWEWLAELLQEAGYDVHLAHPLRTRAIAAARVKTDAVDAKTLAHLLRTGLLPEAYIAPPELRDLRELLRHRAVLTRMRTAVKNRVHALLARQGILPEHSDLFGNSGREFLAGLELPDGSRNRLDSLMSLIGDFDREITTTTREIDARAKADDRVDVLCQIRGVGRYTAMLVIAELGEVTRFPTARHLCAWAGLAPSVRSSDGKARLGHISRQGSPALRRALTEAAQKIPTGGGPLRATFERIAKRRGRNIAKVAIARQILTLCYYGLRDGEIRCLKGQQPDIDDHDHDNELAEVA

SEQ ID NO: 275452 - protein, 342 aa, unidentified
MEYYAGIDVSLECSTVCVVDGSGKIIRETKVASEPAALIGWLGSLGFGLGRIGLEAGPLSQWLYAAMKQAGLAVELLETRHVRDAFKAMPVKSDRNDARGIAQLMRLGWFRPVHCKSMAAQEVRAILTARKLVQSKLLDVENSLRGILRGFGLKVGRTTRTNFAGRIRELVKGHPNLETIGKALLSVRAVLRGEFNAFEKQVRAMSRLNANARMLMSTPAVGPIVALTYASAIDDPARFRSSKRAGPLFGLTPKKHQSGETDRSGRISKIGDTAVRAALYEAAHIILTKPIKGCSRLKSWAMRIARRAGMSKAKVALARKLAVILHRMLADATPFNAAAAAA

SEQ ID NO: 275453 - protein, 325 aa, unidentified
MIYQVLGMDVSKETVDISIYNGSYHSHKVLKNTPRALLSYIKKYDKQTLHLVMESTGIYHLRLAMAASEHGYMVSIVNPLIIKRYGEMKMRRVKTDKADAKLIAEYAYEQKPPLFRPASKERSQIQQLLKGLEDLHQSKSQMKNRLEAYDHGLGITPALRESITKIISTIDEQIDKLTDELNDNMDKYYPELKEKLTSIPGVGAKTASTIIAYYGEFENFQTAKQAVSFAGLNPNPRQSGTSVNRGSNISKKGHSIIRKTLYMCSLSLVRCNPEFKCYYEKMVSEGKAKKKALVAVANKILRQIFAILKYDREWTPYYSLKYKNA

SEQ ID NO: 275454 - protein, 315 aa, unidentified
MTSPVFVGVDVAKEQVDVAVRPSGDRWRVVNDEAGITALVARLRPLAPALIVCEATGGFERAAIAALAAAGLPVVVANPRQVRDFARATGQLAKTDELDAGILALFAERVRPTPRPLPDAAAQLLDAVLTRRRQLLEMLVAEKNRLGFAPKPVHRGIQAHIRWLERQLDEVTKELADLIEASPVWRAKDDLLQSVPGVGPIVSYTLLGELPELGTLSHKQIAALVGVAPLARDSGTLRGKRLVWGGRASVRTALFMAALCGRRWNPALKRFYERLKAAGKPTKVALIACARKLLTILNAMVRDQSHWASPVQYSC

SEQ ID NO: 275455 - protein, 357 aa, unidentified
MRHASGASTSFDIIVGVDTHKDVHVAVAIDHLGRNLGLYELNVSNCGYRALEMWAQTLGRVTAFGVEGTGAYGAGLARYLQDQGYVVVEVSRPDRAARRKRGKSDPIDAEMAARAVLAGTATGLAKAGSESIEVLRTLKLTRSSALKARTQAMNQIKALVVTAPARLRASLDGLSSDRLVRRCGRLRPARPLTATSAMKQALHLLAQRWIRLTAEMTAIEADLERVTSTVAPELVEALGVGPVVAATLLVTASDQPQRLTSEAGFAALCGVSPIPASSGKTNRHRLNRGGDRQANSALHHIVIVRLRYDQRTRAYMERRIGEGLSKLEVIRCLKRYVAREVFALLKSQMRAPAQETA

SEQ ID NO: 275456 - protein, 416 aa, unidentified
MKTTTDYAALVALDWGDTTHSFAWQKTDDAKRHGGSLPATPEALHEWLGQLREACGGRRVALAIEAGRNGLLHALFEHEWLTVYPIHPATSARFRLAFAPSGAKDDGPDAEVLLELLRQHREKLTAFLPDTPATRELAALVEQRRGAVDQRTGFGNQLIALLKHVFPQALTLIGDDAVAPLAIAFLRRFPSLEAAQKAGAARLRDFYRRHNVRSSERIEERVARVRQARAFTRDEAILRPAVLELTRLLDVIELMTRHILAYDQEIARVFAAHPKAAIFAALPGAGAVLAPRLLTLLGERTERYPDAASLQKYAGVAPVRERSQGRLWVHWRWAAPKFLRQSLVEWAGQTVPRCAWAKDYYLRQKAAGKGHHAILRALAFKWVRILWRCWKDNVPYDDARYLAALAKRRSAPLTAA

SEQ ID NO: 275457 - protein, 409 aa, unidentified
MLYVGVDWAEAEHAACLLDTAGAVVRRLTIPQRPAGLARLRAAIAAAESEPTAVLVAIERPDGLLVDGLLAAGYVVYALNPKAVDRYRERTRLSGGKTDSADAELLARILVTDRDRHQPLRPSSVVVEELRVLARQDEVASRDQTRLQNRLRQDLLAAFPAVFDAFPDLTTLSALRFLEGWPSATEAGALSEAELAAFLRRQGHNRPDTAAARIHAALHADVLAAPAHLADARAGAIQLGARQLLLLRAQRAAWEKRLRELLEGDHAHPDGEILLGLPGLDARLAARVLGEIGDRRERFPTPAALQSYAGTAPVTKASGRTRVVVARRACNRFLRQALLRWAFCSLTTSAWARTYYDQHRQGGKTHYSALRCLAHRWLVILHHLLATGQRYDEETHQRNRAHASDDTAA

SEQ ID NO: 275458 - protein, 409 aa, unidentified
MRYYIGVDWADEEDAVWVVNDAGDTVLKRQVAHTVGARSEWGRWLREYTAQGMELWAAIERPHGRTVDFLLDHGVVVYPINPKSLDRARDRFRVGGAKSDPFDAQVLALFLRSDHAQLRPLHPNSAGAQELKGLTRDYRRQVHLQTRLRNQLTATLKEYYPRALELCEDLTAAWAQAFLAQYPTPAAAAALTEPAWQTFARAHRLSHTRTAALWAILQQPQLPLPAHVVRTKARLLQALLRELAATQTVVAEYRQAIDDFFATLPTAEIARSLPVGKSGTTVPTIWAELGDQLDRWDSFQHLQGYGGSVPETVRSGKHCVVKFRFACNTPLRDAMHQLAFLSLPHSLWAHAYYDRYRARNHTHHEALRASRSSSPCGDGTRPTVKPITWPASPGNSSSNRRPNFLLDRP

SEQ ID NO: 275459 - protein, 407 aa, unidentified
METDSPRVDRPRVWVGIDVGKAHHWAVAVDESGRQVWSCKIANDEAEILDAIAEALGLAEEVSWAVDINGTTASLLLALLAAHGQETVYVPGRTVNTMTGGYRGEAKTDAKDAFVIAETSRLRRDFAPVQVNAQFVADLALLTGHRTDLVADRVRMINRLRDLLTGVFPALERAFDYSHHKGALVLLTGFQAPEAIRRRGQTRLEAWLRKRGVRGAEQVAQTALAAAAAQHTVLPGQEVAGEIIADLAAQLLALDDRLGRLEAQIKTSFATHPQAEIITSVPGIGPILGAEFVVAAGDLGTYADAGRLASAAGLVPVPRDSGRRTGNLHRPKRYSRRLRRIFYLSAQTSIIREGPNRDFYLKKRSQGLKHVQALIALARRRVDVLWALLRDNRTWTPNSPNPAIPAA

SEQ ID NO: 275460 - protein, 343 aa, unidentified
MQYYTERHRHTCGVDLHGRNLYLCVLDPDRKIVLHRRVDCDEEKVLRALAPYRVVGVECMFKWYWLADICDEHGIPFALGHALEMKAVHGRKSGNDRLDAERIARLLGSGMFPVGYVYPKKMRSSRDVMRRRSYLVNQRSSLITHIQITSLQYNLPELGKISKPKNREGIIEQFQDPAVRASVEADMAVIDILDVVIARLERVIIRAARGHDPVAFTLLKSVHGIGDIIGLTLLYEIHDINRFDSLGGYLSYCRLIKCTKTSDGKPKGTGKRKQGNQHLKWAFSEAAALFLRANPEGQKLHSRLLKKHCKAKALGILAAKLARSVYFMLHRNTPFDMERFVRA

SEQ ID NO: 275461 - protein, 309 aa, unidentified
MKQSVVYIGIDVAKAHLDVAWAGTFRRLPNERSGHAALVRWIKQSTTPVQLICEASGGYEQTLLESLQKSEVKVTLVQAVRVRQYARAAGILAKTDRIDAKVLAAFGSAMQPQPTSPLSAEQKRLRQYEAQRRHLSRTLVAEENRLAQLSCTELRTLTRSLISKIKTQIKTLDRGISDLIAQDQTLCVKAQKLTAISGVGVRTAALLLAQMPELGQLNRRQAAALAGLAPFNHDSGSVRGKRAIFGGRPALRSGLYMAALSAARFNPILSSFYQRLRAKGKPHKLALTAVMRKLLLALNQTLKPRACTT

SEQ ID NO: 275462 - protein, 344 aa, unidentified
MNHYAGIDVSLKSSAVCIVDGAGKIVREAAVESEPAALIDWFKQLGLELDRIGLEAGPLSQWLYAAMQEAGLRVELLETRHVRDAFRAMSVKSDRNDARGIAQLMRLGWFRPVHCKSIEAQEMRAVLTARKLLQSKLHDVENCLRGVLRGFGLKVGKTTERSFATRTEALVAGHSGLTLVVQALLAAHTVLLREFKKLDKQVQQLAKIHPQSTLLMTTPAVGPIVALTYVFAIDDPKRFRSSKATGAHFGLTPRRYQSGETDHSGRITKIGDASVREALYQAAHIMLTKPVKNCSQLKSWAMRIARRAGPRKAKVALARKLAVILHRMLADNMPFNPPAKAAAT

SEQ ID NO: 275463 - protein, 352 aa, unidentified
MIVLGADTHKRSHSIAAVAATTGELLDELTVQVGQRGFDALLRWARALDGERVWALEDCWHVSGSFERFLIGRGERVLRIPTHLSAGARKSARQRGKSDPIDAIGVARVALQEGLESFPVAHLDGPELDLRLLVDHRERLVRQRVALNSTLQWHLHDLWPELELPGSSLFYDRWAPRVARRLARAEQTMRVRIARDELRRIRELSQAIKALEREIASLVAAIAPQLLSEPGFGPLTAAKLVGEIAGAQRFATPAKLARAAGVAPIPASSGNTQRQRLDQGGNRQINAALHRVIVTRARCHPATRDYIARRQAEGKSTREAIRCLKRYLARTVWRLLQPSHPFQGTPPSPSTS

SEQ ID NO: 275464 - protein, 409 aa, unidentified
MRYYLGVDWADQTHAVWVVDASGAKITARAVAHTAEGLGEWGRALDEWRAQGIDLWAAIERPDGRVVDFLLDHGVVVYPVNPKALDRARDRFRQSSAKSDPFDARVLADFLRTDHTHLRALQPSSEAAQELKLLTEDCQRHIRQQTRLVNQLTATLKAYYPRALEVAEVTSALAREFLPAYPTPAAVTALTERQWQRWARAHGLSAARAGDLWAVLRQPHLPVPAHVVRAKARLMQALMEQLMPVVTAVAQYRKAIDDFFASMPAARWARTLPIGKHGITAPTLWARLGDAPGRWESFRHLQAHAGAVPVTKRSGKQQVVHFRFACDKALRHVVDQVAFLSLLSSAWARAYYDQQRARGHSHRQALRALGAKWLKIIFVMWQRQVPYDEQYHLATMTRQQRQRGQKQCA

SEQ ID NO: 275465 - protein, 389 aa, unidentified
MVRRDGKVQKQMRTFGTTTRELVGLREWLLSEGCTHVAMESTGVYWKPIYAILEGALEIVVANAQHIKKVPGRKTDVKDAEWIADLLCHGLLRSSFVPPKPIRELRDLMRYRRKLVESQAAERNRLLKVLETANIKLANVATDVFGMSGRLMLRALIAGKATPQEMAELAKGLLRKKIPELELALEGKLEEHHRFLIELQLQRLEAAEKDLAALEQRIRQKLEPYAAQLALLDEIPGVDWTLAAVIIAELGVDMSVFGSVSQLASWAGVCPGNNESAGKRKSSRIPSGNVYLKSGLVEAANAAARAKGTYLRDKFFRLKARRGYKRAVVAIAHKILVAIYHMLSQQVSYNDLGDLYLDKLNQNHLTRNLVHRLERLGYAVTLTLQQKAA

SEQ ID NO: 275466 - protein, 355 aa, unidentified
MTSTKYIGMDVHKESISIAVRNDAGKVVMESVIETKASMILQFIDGLRGDVQVTFEEGTSAAWLYDLLKPRVTKLVVCDPRKNKSMREGNQNDKIDARRLAELLRLNHLTPVYHGEHGLRTLKELVRSYLTITKDLARVMTRVKAIYRSWAIPCSGKEVYARCHRAEWLGKISEPGVRRRAEFYYLQLDALRMLRQDARRDLLAESKKHKAWKRLCEIPAIGPIRAAVLLGILQTPHRFRTKRTLWNYGGLAIEMHSSADHRSVDGQLQRSRKNVLVRGLNRNCNHDLKNLFKGAAAVAASKPGPFEEFYAALVAKGMRPEMARLTLARKIATIVLIVWKRGVCFDAQYLKPQTA

SEQ ID NO: 275467 - protein, 343 aa, unidentified
MEKIITVGLDLAKSIFQVHGIGNDGRVLVRRMLRRSQVLPFFRALSSCLVGMEACASAHHWAREIAALGHSVRMMPPAYVKPYVKRNKTDMADAEAICEAVTRPTMRFVPMKTAEQQAAGMILRARELLIRQRSQTANALRAHMAELGIIAGTGMASIAKLLGLLREGQDDRIPATARFALIHFAEQIELLTNRIEKLDREILVAVRKDPDARRLMSIPGVGPLIAATVRTSVLDARGFATARDFAAWMGLTPRAQSSGGKERLGAISKRGNRQLRTLLIVGATSIIKLAKRGLKVPLWVRTMLQRRPVKVVSVALANKIARTIWALLVKGGIYQAPAAMLKS

SEQ ID NO: 275468 - protein, 316 aa, unidentified
MENIKVQTVVGIDVAQDSLDLFDTRTQQSVNTQYSSAALQSLIESLGMDRPDLIVCEATGGLERRAVAQLVAAGFAVAVVNPRQVRDFAKATGRLAKTDRIDAQVIAAFGLAVQPAARPPKDELAQHLDDQLRRRGQLIEMLTAEKNRLARASRPVIKSIKLHITWLERQIDNVDHDIDTTLKGSPVWQAKLDLLKDFKGIGPVTRASLMAWLPELGQLNRKQIAALSGVAPFNCDSGTLKGQRHIWGGRQSVRNVVYMATLVGVRHNPTLRAHYRQLRARGKAAKVALVACMRKLLVILNAVFRSGSPYVERATT

SEQ ID NO: 275469 - protein, 410 aa, unidentified
MDAVRECCCGLDVHQKTVVACILYGDLESKPKKVIESFGTTTTELLRLQDWLNAHECKEVAMESTGVLWKPVWNILESSCHLVLANAKQIKNTPGRKTDKKDAEWIAQLHRCGLIQPSVVLPQHLRDLRDLTRYRLRIVVTIASEKNRIHKILQDGNIKLTSFMSDLFGVSGRLLLEKLMDGEVLVEDDVRELVKTKLKTKVPQLVEALNGQLRRHHRVMMRAHWKHLLFEEAQLQEIESLIDEQLEPYRKEIECLDNIPGIDKSCASAIFAEMGPDIAARFPTVEQFTSWAGVSPGNNESAGRKKSRKCLQGNKYLKRSITQAAWANYRSRNRIGEHFRRIRKRRGEKTASVATGHLLIKIIYAMMKEGTPYKEIDMQARMSKQRTANFYVKKLQELGFALQLTENETS

SEQ ID NO: 275470 - protein, 467 aa, unidentified
MCPARAKSLLCSGPDFSPPKRLLRERLQAITIAVAWWLTLKTIDKRNKMKSEKSASKYVIVVGIDRSDKELEVAVRGPEGSCEVETVSTRPEALNAWWERLREAHPQGLIAVGFEQPARALLAFFEFKADVAVYALNPSSIWGYRQSLKVSRAHTDSTDATCIASFLSLHHGELRVYQPASPLARQLQLCCVSRRKIVNSRTALTNRLLAILKDYFPAALDLLSEDVYRPLNVAMLRRWPRLSDIQAASESQLRSFFKKQGSHSETRLQQRLLVISNAQTLTKNEAIIEPNVLQLLCLLDQIEALNSGVLMHDRHIRKLMQQNERAALFIKLPGAGPAYAPRVFAAFEAHAPNCKDAAALASLVGMAPVTEQSGNMRRVYRRLRCDRFLAQSFHEFATESWKHSRWANAFVKHHQAEGKPYHSIMRKLAVRWIRILFRMWQTGQAYDEQKYINSLLKRDHYLTPYLT

SEQ ID NO: 275471 - protein, 427 aa, unidentified
MGAMSESEVQELQFAALVGIDWADQKHAWCLQAADTTQRENGEVQHTPEAIEAWVGQLCRRFDNRPIAVAVEQVKGALVFMLSKYGSLHLFPVPPTMSAKMREALYPSGSKDDPRDADLLLELLLQHRDKLRRLSPDSEATRRVQNLVDERRNLVDEKTAQINRLTHPLKIYFPQMLEWFEQLDTELVCALLERWPTLEELQKVPPERLRTFFHKQRCRYPELIERRLVGIRQAIPAIRDRAVIEAKSAVVKVSAQVIRSLVRGIADLDSKIEEAAAAHPDFFIFESLPGAGAVLAPRLLAAFGSQRERYASAEEVQTYSGIAPVMKRSGKKKWVHFRWACPKFVRQSFHEWAGHSIAHSQWARSYYQQQRERGKGHHAAVRGLAFKWIRIVFRCWKDRAAYDESRYLMTLAKRNSPLTAVPGGTML

SEQ ID NO: 275472 - protein, 398 aa, unidentified
MRTIGLDVHKRFAEVAILNEGERVVRRGDRVDATPAALRAFAATLGPNDQVVLEATVNTWAIADLLRTQAGRVVVSNPMRTRAIADAKIKTDRVDAAVLAQLLAADFIPEVWMPDEATRERRRRIAHRTTLVQQRTRERNRVHAILHRNLVDCPHSDAFGKAGLRWLTHVLLPSGERGQVESALRMLHALETEIAVADADIANEALQDARVKQLMTIPGVGVTTAAALVAVIGDVRRFPRPNQLIGYLGLDPRVRQSGDRPARTGHISRQGQAHARGLLVEAAHSAIRTPGPLRAFYERTRARRGTQIASVAVARKLAVLAWHLLHHGTEYRWASPSLTAGKWRRVELQAGAPRRQGGWPQRLPARPADTRAQERRVLMDAESAYRRFVTTRQVRANP

SEQ ID NO: 275473 - protein, 360 aa, unidentified
MSEITRVGVDLAKRVVQVFAVNAAGQRVTGRALPRDKFLAWCARLPAGCMVAMEASSSAHFWARKLIAMGLDARIIAAQLVTPYRIQGKTGKNDANDAAAICEAASRPHMRFVSIKTIEQQSMLSVHRLREGFKTDRGACINRIRGLLAEFGLVFPQKPAVLRQALPDVLEDATNELSPLARITLQRALQQWQRLDEDMAWCDRHIAAHLKTNEQVRQAEQLMGVGPITASAIVATVGDLRQFKDGAQFGAWLGLTPRQNSSGGKNSLGRITKRGDMYLRMLLIQGAKAAVNSAQKRDDPISRWALQLKEKSGWQKAAVALANKNARTLWAVFVRGKAYDPRHVSVKPASAMARVSAAPA

SEQ ID NO: 275474 - protein, 341 aa, unidentified
MTVIIGIDPHKATHVAVAIDGEERPIARLEVVADRCQTDRLLAWAAAFGCERTWAVESADGLGKLLSQQLLAAGEHVVDVPPTLSARVRLLGSTKAAKNDDNDALSTAIAGLRHCELRVVRRDGHATVLRLLVGRYDDLVGLRTQAACRLHALLREVVAGGTGRRIKADRAAAVLRGVRSDDPVTAARKRLAGELLDDIRRLDRDLAAIKHQLGGAVAASGTSLVELHGVGPVVAALILAHVGDPARFPTPARFASYNGTAPIEASSGPRKRHRLNPRGNRKLNHAMHMIAVTQVRHDTPGRAYYDRKLAEGKTKKEALRALKRRISDAVWRQLRVDLNNT

SEQ ID NO: 275475 - protein, 423 aa, unidentified
MMKLKYSICCGLDVHKNVIVATIVTTNKDGISEYLQKSFSTINSDIQRFHNWLIENNCYHVCMESTGKYWIPIFNYLENDIDICLTHPKYVKAIKGKKTDKKDSKWIADLYKFDLVRCSFIPPKDFRQLRELARYRFKLVCMKSSEKNRIQNCMTISNVGIASVLSDPFGKTATEIMSYLLEHTADSMDEKAVRKLIKKGAKAKSDEIIEAIKGYNIETDQAKKLELAQGHLEYLDDMITQTEVELYVRIKPYYEFVEFVSTMPGMTELSSTIVLAETGVDMDIFDDAKHLCSWCGLSPANNESAGKKKSVRIAKAGDYLKPMMVQCALAAIKSKKQPYFAIKYGLIKKRRGHKKAIIAIARMMMVCIYHMVSEKKPFTPTDYEELMNPQNHVERVVLNENNVFAYLESLGYDSSKLVKRNDN

SEQ ID NO: 275476 - protein, 342 aa, unidentified
MKEVIIIGVDLAKRVFQVHGAAADGSVVFRRKLSRARLLPFLERQPACTVAMEACATSHHWGREIAKLGHVVKAIPPIYVKPLVKRQKNDAADAEAIAEAAARPTMRFVALKTEDQQARGMIFRTRDLLVRQRTQLINALRGHLAEYGVVAAQGIVHVGCLREAIEDPQTRLPAVVRDIGRTCLDQIAACSEKVAEMERTLRAEAAEAATAVRLQTMPGIGPIGAMAIEAFAPPMASFRRGRDFAAWLGLVPRQKSTGGKQILGKTSKMGQRDIRRLLIIGAMSVVRSAVRNGAPEGSWLARMLARKPRMLVAIALANKMARSVWAMLVKQEDYRDPMAAAA

SEQ ID NO: 275477 - protein, 430 aa, unidentified
MKSNTQNAKIEAITEKTLVLGIDVGSETHYARAFDYRGIEYSKKPFKFSNTEAGFVTFKEWILDLKERHEKDKVVPGMEPTGHYWFNLGKFLQDNEMKPVLVNPHHVKKSKELDDNNPTKNDRKDPKVIAGLVREGRYMIPYLPDGVYADLRTASNIRFQLQAELTRIQNRISRWFNIYFPEYKTVYGKPDAKSGMLILKAAPLPEDILTLGIDGVNQIWRDAKLRAVGKARAKTLIEAAEHSVGSKEGAVSARMEIRMLLEDYESRNTRLQEVMVLIEELVRKIPMAEKLLEIKGVGIRTVSGFLAEVGDISRFNNPKELQKLAGLALVENSSGKHKGETTISRRGRKRLRYLLFEAAMSLVAKNPEFRELHNYYTTRRRNPLKKMQSLMAVATKLIRVFYAMLTKGVDYDPKKMVSDIRRPEAYLQAA

SEQ ID NO: 275478 - protein, 364 aa, unidentified
MTNLKYSVGIDGSKKDFKACLSVINQMQEVKVKASGTFTNNLRGFELFFKWVKKNSKEDLPVFYLMEATGVYNERLAWYLYQNGQKCSVILPNKAKRYLQSFGLKSKNDKIDAQGLSRMCAEQSIPLWQPLSKNIYTLRSLTRLHESLHKQRTVLNNQLHAIEYSMYELKAVAKGLQSTLNAIDKQLNIVEKQIKCLINEDISLKEKYEMINKIKGVGLLTFAVIIAETNGFEIFTNQKQLVSYSGYDVVENQSGIKVGKSRISKKGNTRIRRILHMPALCVVTHNEPVFRSLFERVYSKSGIKMKAYVAVQKKLLCLIYTLWKRNEVYDPNFKIIKNTSGNDEPKPFLSLGSVGDKISSLSIS

SEQ ID NO: 275479 - protein, 399 aa, unidentified
MARAWAGVDAGKTHHHCVVIDGDGKKLLSRRVANDEPDLLAMIGDVTALAGEVTWAIDLPDGGAALLIGLLLGSGQELLYIPGRAVNRAAGSYRGEGKTDARDAAIIADQARMRRDLHPLRPGDELAAELKLLTAHRSDLVADRTRAISRLRELLTSIFPALERALDLTTAGPLTLLTGYQTPAAVRAAGPEALESWLRERKVRNAGKIAAAAAAAAARQHAVLPAEKLTAQLTAALAREVMNLNGQVRELDKLIEERFHRHELAPVIESMPGIGPLLGAEFLAATGGDMSFFGTASRLAGFAGLAPAPWDSGRIRGNLHRPKRYHRGLNRVFYYSAMISIATCEESRRYYDRKRAEGKTHTQAVLALARRRVNVLWALIRDKRTYQAAPPRHASTEAA

SEQ ID NO: 275480 - protein, 309 aa, unidentified
MNTQNKNIVAIDIAKSTLQVQTENSSFVIGNDKGGFKRLDKQLSKLSKPHVVCEATGGYERPLVRHLFEQEVSVSVVNPSTVRAFAKGEGIKAKTDPIDAKMLLKYGQTRELKPSSRPDPAREELAALMDRRSQLSGSLTREKNRLDKDPAFTRKLIEKSVRFLEKQIEEVDKRIEGILASNDSLTKLVDRMTEVKGVGKTTALTILAYLPDLDSLSRGQMVSLSGLAPFNRESGKTRSRAFIQGGRAKVRKCLYMAAQSAAQHNDVIKTYVTRLMDSGQPYKSALVAAMRKILICLRSLLINLKFRLA

SEQ ID NO: 275481 - protein, 422 aa, unidentified
MMNQLAEIPFTVYVGIDWADAKHDICVQAAGSEEREFDRIVHKPEEIEVWAQALYQRFGGPIAVALELTRGPIVSALQKYDFIVIVPIDPIRLASYRKTFTPSGAKDDPTDAEFALDYMMRHPERLKVLKPQSVPMRKLTYLVEARDRLKGDRSRFVNRLIQALKQYYPQPLDWFSERNTMVFCDFLTQWPTLEKAKRARKKKLETFFKNHNVRFAQVIEARIDAIKAATALTHDEAIIMAHRLQVEALVEQLRLTIQAMKRFDKEIVATAEQLPDYELLFNPLPGAGKVLAPRLLAAFGEDRERYSCAEELQRRTGIAPVTKRSGQSEWVHWRWQCSKFLRQTFIDWSAQTINKSAWAGAYYRQQRIKGSSHQAAVRALAFKWIRILYRCWQDRPPYDESKYLEALRRSGSPLLKQLAEAA

SEQ ID NO: 275482 - protein, 420 aa, unidentified
MEVAQDDQEIIARVAALDIGKAEVVCCVRVPGVGPRARRMQEVRTYSTMTRSLLAMSDWLTGLGVTRVVMEATGDYWRPPFYLLENSFETWLVNAKDVKHLPGRPKTDRLDAVWLCKVAERQMLRPSFVPPPAFRELRDLTRYRVDLIEARTAEKQRVEKLLEDALILVSVVASDIFGVSGRDMMAALVAGERDPKVLAQMARGRMRVKTARLEEAFTGRFTDHHAFLLRTMLARIDAITADIDGVQGRIDEQIAPFAAVVTRLDEIPGVGVATAQAIIAEIGLDMTRFPTPAHLASWARFAPGVSESAGRKKGNSGTGKGNRYLARALGEAAVGVRRTDTFLGERYRRLAHRRGKKKAIVAVGRSILMIVWQLLSDDEARFVDLGSDYFESRVNLNRRTRNHVRELQALGYKVTLEPAA

SEQ ID NO: 275483 - protein, 421 aa, unidentified
MKHQAHEAFAAFVGIDWADSKHDVCLQAAGSAKRECLILPHTPEAIDAWITTLRTRFNGQPIAICLELTKGPLVSALRKYDFLTLFPINPLTLARYREAFTPRRAKDDPTDAALQLELLLTHRDKLQPLKPQSPAMRALEQLVEHRRRVVDDRVRITNRLTSTLKNYFPHVLQWFQDKDTTVFCDFLSRWPTLKAAQLARRSTLETFFRDHHVRSEDVIDKRLQAIQTAMPLTIDDGVIAPHALLVQALVSQLRVTLHAIEDFDTAIAQRAQSHPDFPLFEALPGAGPVFAPRLLVAFGEQRERYASAAALQQYAGIAPVTERSGKKSWVHWRLQCPKFLRQTCVEWAAESIQHSFWARVYYQQQRDKGQAHQAAVRALAFTWIRMLFRCWQDRTPYNESAYLQALNSRGSSLIQNLGTRS

SEQ ID NO: 275484 - protein, 389 aa, unidentified
MFLVGIDISKYKHDCCIIDSDGVVIREPFSFKNDADGFAMFLDTLHSLPDSEDIRIGFEATAHYALNLKLFLEKAHYAFMEFNPLLLAKFNKSQSLRKTKTDAIDCYSIARWLAAVEFKPHTTGFYHIYSLKSLTRLRDSLVRQRSFYLVKITNVLDVTFPEFKPFFNNRFGATALYLLENYGTAEKMSHMNSTSYENLRKLSRGKFSIQKFMKLKELATNTVGESNKVFIIQLNSLLSLYRKCVSEIKSIEAQITKLISDINPRCMTIPGIGPLSAAVIYAEFGDLSKFNSPAQMLSFAGLEPGYYQSGISEHRGHMVKRGSSHLRYTLMNLCIPLIQYNYVFAAYYDKKRSEGKPHRVACSHLVKKLIRVIFHLEKNGIDFDSSKLY

SEQ ID NO: 275485 - protein, 369 aa, unidentified
MAEVKEAFVGIDVAKLRNAVAVADAGRDGEVRYFGEVDASPDSMRRLAAKLTAKYDQLTFCYEAGPTGYGLYRLFTELGHTCIVVAPSLIPKKPSDRVKTNRRDALSLARLLRAGELTAVWVPDPAHEAMRNLVRARAATVKDVGLKKRQVSAFLLRHSRVFPRKKNWGARYRGWLQTQSFDHVADQIVLQESIEAVRIAEERLVRIERAIDEFLPAWSLAPLVEALQALRGVDLVTAVTFVVEVGDIRRFESPRQLMGYLGLVPGERSTGDSVRRGSITKMGNARMRHLLVESAWTYRHPPRVGATKLAKLARVSPKVREIAWKAQSRLTARYRALTARGKKTTVTCTAIARELAAFMWAVAREAQPA

SEQ ID NO: 275486 - protein, 343 aa, unidentified
MRIAVIGIDLGKTVCSLAALDESGALVKRRRLRRESIVAFSKGLPPCIIAMEACCGAHHLGRLLAAQGHRVRLMAPEYVRPYVKAHKNDERDAEAIAEAASRPTMRFVELKSEAQLDMQTLHRARDRLVGARTALINQLRGILLERGITLPQGRRKLHRQLALLLEEDGGLLISSRMMALVEDMRAQWAELDRRIGALDDEMVEHARNDETVRRLISIPGIGALNATALIAAVGDAGTFARARDLAAWLGLVPRQVTTGGRPRLVGITKRGNSYLRRLLIHGARAALPGLVASETPLGAWLQGLLSRTHKNAVVVALANKLARIVWAVLRRGGRFHGGALAAA

SEQ ID NO: 275487 - protein, 305 aa, unidentified
MKIHIGIDVSKLHLDLCQHQQSTQIPNTEKAIRRWLKSLPPAAVLVCEASGGYEALLISLAHAARRPIARLNARQVRDFAKAKGRLAKTDKIDAQILVDFAETFHPEPLALPDPLQQELAALVKHRAHLLTQITQNNNLAETLADKKLLALVARTVAFLRKQADQLETLMADKISQSPKLAAKSQRLQQVQGIGSLSATALIALMPELGSLSATQAAALAGVAPFNRDSGQHRGQRHIAGGRAQVRSVLYMAALVASRHNPVLKALYLRLLANGKAKKLALTVLMRKLIILANLLLKNPNFILAS

SEQ ID NO: 275488 - protein, 412 aa, unidentified
MEVMYPRCCGLDVHKSSISVCVLLAQSGKPLKHIRRFGCTTRELRELVVWLQEFDVEHVAMESTGVYWKPVWNVLESHFQIVLANAQHIKAVPGRKTDTKDCQWIAELLQHGLLRGSFIPPLVIRDLRDLTRARTSLSQEHSRIASRIQKVLEDANLKLASVASNTLGKSGRAILAAIIGGEESPERLADLALGHLRVKIPQLQAALEGRVREHHRFLLRSLLRQLQFLEAEIALLDARLDQLGQEQGELADALNRWITVPGVDRVAAWSFIAEMGADVSQFPTAAHLASWAGVCPGNNESAGKRTSSKIRKGSPWLRRMACQSAWAAARTKNTYLSAQFKRLAARRGRKCAIIGVAHSILVIGYHLQRNRCAYSDLGGNYFDRLHAEGLKRYLVKRLESLGHSVTLQPRIA

SEQ ID NO: 275489 - protein, 325 aa, unidentified
MQAGEGIIGIDISKDSFDVVLRSTRGEQHRVFSNDQKGYTSLVGWAEKQPERVVHICMEATGSYWEGLAEYLYQGGYTVSVVNPYQIKRYGDHLLNRNKTDKADASLIAEFCEKDRERLRAWKPFSPEIKALRSMGRRLDELQEMKQQEQNRLKSGVTDLVVIASLQEHIKQLKDQIKALWKQIQEHVKQHPDLREQQRLLTSIPGIGKLTAIKLIAEIGDIKDFASASQLAAYAGLAPKQFRSGSSVHKQTRISKQGRTELRRCLYMPAVVASEHNPIIRNLKRRMLASGHVMMEVIVASMKKLLHLVYGVLMSGKPFDPDYGK

SEQ ID NO: 275490 - protein, 386 aa, unidentified
MQKAITYVGLDVHKDSIVVSLAEAGLRGRLREVREYGKVLNTPAALKAMATKLAAGGNELRFCYEAGPCGYGVQRQLSAMGHHCAVVAPSLVPRKPGERIKTDRRDAAKLAKLHRASELTPVWVPDPAHEAMRDLVRARLAAVRNIREARQQLSGFLLRNGYHYHRHPWTLMHRRWMADLKFDQPLHYIVLQDCIAAVEASEQRRDRLEAGIIAALPEWSLAPLVETLQALRGIALVSATTLVAELGDIARFSNPRQLMAYLGLVPSEHSSGRSRRQGGITKAGNAAARRMLIEAAWSYRFPARISRYQLSQQKRLPKLIRDIAWKAQERLCRRHRKLMRAGKPKTVVCAAIARELTGFVWAIATETSPANGKKGTGKPATMGAVS

SEQ ID NO: 275491 - protein, 332 aa, unidentified
MTAILGIDISKKKFDVALLVKDKINHKIYTNNEEGFKLLEAWLISRNIKKVHACMESTGIYSQGLANFLYNKKHKVSVVNPTRIKGQAQSTLCRNKTDRSDAKIIALFCRAQKPSSWEPTKEHIVFLQKLVRRYDQLNDLLYQEKNREESKTIVVETSLHEVISFLKKQIVTVEKQIKDLIQKNQDLAKKEILLNSIPGVGNITIAKVLAFLGETEKFDDAKQVVSFIGLSPKKNESGSSVNKKIRISKAGDPQMRKALYMPALVAIRYNPLVKRFYEHLLKNGKCKKLALCAAMRKLIHIIYGVLKSEKMFDPCFSTLKANANSCLQGNKL

SEQ ID NO: 275492 - protein, 349 aa, unidentified
MNATALSPMVGVDLSKNVFELAVADAQWRVVERARLTRSQFERWCAKRAVGLVVMEACGSAHHWGRWLTGMGIEVRLLPARYVRAYVKRNKTDAADAAALLEAARASDIVPVRIKSVEQQALQSLHRIRSLWMSTRTSRINALRGFCREFGIAIAAGSRIGLEQIGRVLADPHSALPALLRDTMQLLVEEIRLLETRISQLERELTELARQSPACQTLLSVPGIGLLTATALVAATSGQVNHFRDARHFASWFGLTPKESSSGMTRGLGRISKRGDRYLRMLLTHGARSVLRAATVAQQRSRSLDALRSWALNVQGRTHHNRATCALANKMARICYAVLRDGKITASRE

SEQ ID NO: 275493 - protein, 408 aa, unidentified
MNAVGIDVSKGKSMVAALRPMGEVALLPQEFLHTEVGLEQMAYAIIALGEDTRVIMEATGRYHEPVAAALHEYGIYVCVLNPLFIKQSGGGSIRKVKTDKADAMKIAKYGLDNWVDLREYTPMDTVRQQLKLCSRQYNLYMKTVVSLQNNLISLTDKTFPGVNELFSSPERADGHQKWVDFVMTFYHCDCICRVSENAFAERYQKWCKRKGYHFRAEKAQDVYLGSCGHFTTLPKNDNTKLLITTAAQQLLAGKMTLAALRTEMTRLAKQLPEYDIVRAMYGVGETTAVQLMAEIGDVRRFPRRSSIVGFAGVDPAVDQSGKHSAKSVPTTKRGSPHLRKTLYQIVCTYLKKSPVDEPVYQFLDKKRSEGKPYFVYMTAAQNKFLRIYYARVKECLEAFDARQSLAQS

SEQ ID NO: 275494 - protein, 433 aa, unidentified
MLLPVGGREAGLLEETHDTEELIQRVAALDIGKAQLVCCIRVPGPGRQGTRLQEVRTYATMTRSLLVLADRLGELGVTRVVMEATSDYWRAPFYLLEAHGLEVWLVNAKDVKHLPGRPKTDRLDAVWLAKVAERQMLRPSFVPPPAIRRLRDLTRYRADLVAVRTAEKQRVEKLLEDAQIKLAVVASDIFGVSGRAMLAALVAGERDPKALAQLARTRLRAKRSLLVEAFTGHFSDHHGFLLARMLGRIDQASADIAELDRKLEEEVAPFQAAVDRLYEITGVGRVAAQVIIAEVGTDMSRFPTAGHLASWARFAPGVKQSAGKTKGKATTGHGNRYLAQVLGEAAVVAGRTDTFLGERYRRIVRRRGTKRAIVAVGRSILVIVWHLLSDPNLRYHDLGAGFYDTRVNAERAKRNHVRQLEALGYTVTLQPAA

SEQ ID NO: 275495 - protein, 332 aa, unidentified
MKTIPLFAGLDVHSEFTVATVLDEMGNAVRELKVTTNPSGYKRLFYGLKNVQAVFEAGRNWTYIAGLLRPYCSFKMAHPLKVRLIASARIKTDEIDSRVLANLLRTDFIPESYMPGEEIVELRNLVRYRVRLGRMNAHLKNRTHSILAREGHKSDFKPYEKKARLWVQNLKMNPITRDELEHTLKLIDDVNLKIRELEERLEKEKVKYPEADLLTTIPGIATYSALLILSEVGDFKRFPTPDKLAAYSGLVSSTHQSGNSCYQGRITKQGNRWLRWMLTECAHVSVRKSHRLQKFYLRIKHKRGEQKAIVATARKMLTTIWYMLQRNEAYRG

SEQ ID NO: 275496 - protein, 339 aa, unidentified
MGANITNFIGIDISKSQIDIALIKNNDKTEIIPAVFENNANGMKVLTKFLEETHKLDLTQSIFCMEYTGIYNRCILEYLTEKQCLIWLEMPVQIIKSMGLQRGKSDSIDAKKIANYAYMHREDAKIWHPRRAVVNEIHELLSLRERLITSRNMLQVPIDEMKSIGDKKTAALLQSNCKLSLSAIAKNLENINKKLNDIVNSDENIKKLYELSTSVPGIGMITALAAICYTNEHKSYNQGKQLACYVGVAPFEHSSGSSVKGRNRISHMANKPLKKLLHLGAMAAIKSNGELKAYYVRKVSEGKNKMSVLNAIRNKMILRLTAVIKRGTPYQQQYCGVNC

SEQ ID NO: 275497 - protein, 404 aa, unidentified
MKSRAEIWVGIDVGKDAHHACAVDDTGKTVFSQKLGNDQAAIEALIARADQVAERVWWAIDLTSPLALLLITTLLVADQDVTYVPGRVVNTMTRGFRGEGKTDAKDAKVIAQTARMRRDLSRVVMPDELVVGLTQLTRYRTDLMADWVAGVNRLRDLLGSIFPALEAALDYSNRTPLVLVAGMCTPGEFRGAGIDGVTTYLTDNGAWKPAIGKTAAAAIDAAGRQSLALPGETDTAMLVKRIATRLLELDREIKDTDKLITTRFRRHPWAHIIESLPGMGPGLGAEFLVGTGGDLAGFSSAGRLASYAGLVPVPRDSGRVSGNLHRPKRYNRRLRRVFYMAALSSLHNPDGPSRRFYDRKRRERQIHTQALLALARRLVDVLWALLRDGREFTLDTPTPATAAT

SEQ ID NO: 275498 - protein, 358 aa, unidentified
MRELGTFYFALTYSVFVAMNERGEYSPAWRASHDGNEVGRVLDALPAGSRIAVEATGYCYWLIDEMRSHGHKPVMTHPVEAKRRMGKTKKTDRMDARALAMLLRNGTLPEVWIPPAEIRDRREPMRLRMTLSRTRTRLKNRIHGVLGRFNIQIPVSDLFGARGREELAGQRARLPEHTRASVEQMLRVLDFVEQEIEVAEKRIAVMLKQDEAAKLLDTLPGVGPILSAVLALEIGDVSRFPTAGQLASYAGLTPTVHSSGGHTRMGQVGHAVNRTLKWAFVEAAQKAASQEQKHPESHATRLYRRIREKKNHQKAAVAVARHLAEAAFGVLNKKQVYREPMKRGSATGSKQTASLTHE

SEQ ID NO: 275499 - protein, 346 aa, unidentified
MQITTIGLDIAKNVFQVHGIDAAEEVVVRKQLRRGQVIAFFKALAPCLIGMEACATAHYWARELTKLGHEVRLMPAKDVKAYVKRNKNDAADAEAICEAVRRPTMRFVPVKSAEQQGQLMQHRTRDLLMRQRTQVINALRAHLAELGIVAAQGREGIKELLAIVADDQDARLPIDARASVIVLAAQLQALQTLIGSIEKRIKMQHRSNEASKRLESIPGIGVIGATAIVATVVDPTVFRSGRDFAAWIGLVPREDSTGGKQKLGPISKQGDRYLRRILVVGACAVLRYAKQNPERYPWLTQLLARRPFKVVAVALANKMARMAWALLAKGGTYRAPALVPAFAAAA

SEQ ID NO: 275500 - protein, 347 aa, unidentified
MEKASQAEVQVFAGIDVSARELSVAVQCGIKEGIAITTFRNQAAGHKALLAYLLRAKGRARVCLEASGNYSLDLALTLQAHPQVEISVVNPRRARRFAESLGERSKTDPVDARVLCEYALRMPWVPWVPPSLAALRLRSITRAIEDLVAMQAQEKNRQHALLASEALPTLLIRELEQHLRYLRLRITRLRREALRLIARNPELNRRFHLMLTTPGLGETSSLQILGELAVLPETLDARQWVAFSGLDPQQFSSGTSVEKKPRISRGGNRHLRRALYMPALVATRHEPFLRDFYQRLLRRGKAPLQGVVAVMRKLLHALFAMFRRDEAYDGSKLCPAEFARHTAVVCV

SEQ ID NO: 275501 - protein, 385 aa, unidentified
MSELNDLSRSLTSLEQDKTIIAVIEMSQSSWLVAGIVPGIERHPLKKLEPSEEELVRLLTRWRAEAIKKGHTITRIAVAFEAGRDGFWLARWLRARDIETYVIHPTSVAVSREHRRAKTDRLDSGLLKRVFIGWLRGEPDHCHMAAIPTLAEEDAKRPNREREGLVRERTRIVNRMKSCLVRFGIRNFKPTLRKAPERLATLGTPEGAPLPPNTLRELRRDMARLRFVMDQIKEVEEARAERLEQAPQERTHAMVRLIARVIGVGIETADMLVHEILSRKLRDRRAVARYAGLTGAPDESGSKRREKGLAKAGNARVRRGMIQLAWRFLVFQKDSTLAQWYRTRTESAGKKRKTMIVALARKLLIALWRLVTTGEVPAGVVLRSA

SEQ ID NO: 275502 - protein, 379 aa, unidentified
MDHAITDTPAETILHGALELSKNSWLLALQFPDRAQPSLYPISGGDTVGLMAKLTAARDRWAKMSGKAPSIVLCYEAGYDAFWLARFLKARGIECLVVDAASMQVNRRARRAKTDRIDVGMLLRALIAWGQGDRHVWSVVRVPNVDEEDLRRSHRERDRLVRERTAHINRIKGLLFGQGIRSINVKSKYKTLQIDKLVTGDGRPLPPRLASEITREIARLALIQEQIATLERERDQAPTPCKTTEKKRLQLVSLNGIGPAIAAVMTREVYYRQFDNRRQVAGFLGLATSPHDSGDVERSQGISRAGRGQVRGTMIQAAWLWLKHQPKSAITRWFVQRTAGQSGRIRRIMIIAVARKLAIALWRFLEQGLVPQGAMLANR

SEQ ID NO: 275503 - protein, 335 aa, unidentified
MNNYKYFIGTDVSKSKLDICILEGKKVILELCIENTPKALTTFKRQLQKMNVLPGNTLICCEHTGIYTSNLVEWSTQYGYSLWLEKPIQIKKSIGLQRGKNDKIDAYRIATYSFRYQDKARIFKRPRKVIEELKSALNMRQRLIKVKKMLQVPLKELNGFFDKKQIKNRFNGCKQSLKGIEYDIKKINEKIEEIIEEDDALSKSVKFATSVAGVGIITAVSIITATNELKSVHSGKELACYVGVVPFSYQSGSSIRGKSRVSHFANKPLKSLLHLGVLSAKTHSNEFREYYDRKIAEGKHAMSVINAIRNKIVRRIYACITNQRMYEEEYSKIVA

SEQ ID NO: 275504 - protein, 418 aa, unidentified
MTKKLDTTFIQIVHPVCCGLDVHKKKISACLITVDNNGKEQYEIKEFGTFTNDLVEMKNWLLNNECPVLAMESTGVYWRPVHNVLEGFMEVILVNARHIKNVPGRKTDISDSKWLAGLLRHGLLKGSFIPAKEIRQWRELTRIRRTYTESLADFKRRVHKLFETANIKIDSVVSDLFGVTGQNLISLLCDGSELNLATIEQNTKPGLKKKVVELHRSIQGFFEDHHRFQLIGLMEVMRSLEKQIDEITRRLEDLTSGHQDLLDRLDEVPGIDKKSAQSIVSEIGVTLDEFICTAALASWAGLCPGNNESAGKRKSGRASVRSHPFKTILIEVAWAAVRKKGSYYRAKYFKLKSRRGAKKAIVAIAHRISKAIFNIIKNGDHFMDLGEDYLTAQTRQKAINSIKKRANQLGYELVPCAN

SEQ ID NO: 275505 - protein, 411 aa, unidentified
MDKVYDKCCGIDLHKKLIVACFKQGNRQEIRDFGATTRELLEMADWLKEGGCEMVAMESTASYWKPLYNILETCELKAMVVNAQHMKAVPGRKTDVKDAEWIADLLQHGLLTASYIPDKDQRELRELVRYRKSLVGERVRELNRLQKMLEGANIKISGTIRDINGKSARNILEHLLSGRQIDSAEYDILYEKKVIAHNLKATKEQIIDDLNGVMSALQKKMMRIILNHLDELNAHIRELDDDIDNFMKPEEKEAAKVIQDIPGIGNTSAQAIISVIGADMSRFPTDAHIASWAGLCPGNNKSANKRKSGKTRKGNGLLRDTLIVCAHSAVKNKSSYFHAQFARISAHRGSKRAYVAVAHSMLVAIYHILKEGVVFKDLGADYYNQFNRERKINAYLKKLKALGWEVPVVAA

SEQ ID NO: 275506 - protein, 395 aa, unidentified
MYTLYVGVDVSKDSFSARGLDNKGDTCFSLTADMDYKGFSEFLTALSSHSSSLSSVIVGMESTGCYHINLFSFLTEKDIRTFVINPLLISNFAKLSLRKTKTDKKDALTIATFVMLNKDSITDLSISQDYKDLRDMARERESLNKFISSIKNDIKRILQSTFPELESMCNVFSQTMLCFLAEYPSARLIKTEKLKAIAKLLQPSDKRMARPFTAEEIIEASRKSVATINPAKEIILKGKISTLQHLERRLDDVSEILTDMCKAMMIEDLKILTSIKGINVKTAVPFLAELVEIDRFSSYKKLIAFIGIDPAIYQSGKYKGAGKISKRGNRHLRKILYSMVMCVVRHNSFFQSYYLRRKAEGLPPKKALLATAHKLIRVIFAMLSHRTFFNVNQNA

SEQ ID NO: 275507 - protein, 340 aa, unidentified
MVNRTAVGVDIAKNVFQVHYVDQETGEIVNKPIKRAKFLEHFTNRTPCLIGMEACGGAHHWARQLMKMGHAVRLMPAEFVKAFNIRNKNDAADARAIWLAVQQPGKPVAVKTEMQQAMLGLHRMREQLVKFRTMQINGLRGLLTEYGEVMSKGRTALDKAIPEVLCRLAERLPAALVETLRDQWNGLAKLDKQVAEIERRMREWKKEDEAVKAISEIPGVGLLTATAAVAMMGDPKAFRSGREFAAWAGLVPKQTGSGGKVDLHGISKRGDTYLRTLLIHGARSALTHAKEPGPWVEQISKRRPRNVVIVALANKMARTIWAVLAHDRQYQKDYVSVKPV

SEQ ID NO: 275508 - protein, 502 aa, unidentified
MAKEVQPQFVPTGQIRPAKQMPTVHPHAAGIDLGNAAHFVCVPADSVPAGQTPVRQFGVFNPQLDEMVEWLKQCQVQTVAMESTGVMWIPVFQKLEAAGLEVLLVNTKRLKHVPGRKSDVLDCQWIQQLHSYGMLSGSFRPADIICRLRTLMRQRQNVIASASSETQHMQKAMQEMGVHLHVVVGDVTGGTGLRIIDAILGGERDPKELVQLRDRRVRKSTVAQMEAALQGDWREELLFVLRQSRQAYGFFQEQLSALDERIIALLAEIPQAPPPASDGSQAPSASSPDPARPVPGGQNASACTAGSAAAGPKASKAVKGPKRNYRGGNPLPVDIRVQLAQVFGIDLTYVPGLSMLGVLIILSEIGTDLKKRWRDGDTFTAWLGLCPGSKISGGRVLSSRTPHVVNRVAVLLRLAAVAVGRTDTCLGIFYRRLKARHGAPKATTATARKLAVLIYHLVTTREEYQEPDLKQYDERVRKAKIIRLQRQARELGFDLVPREQAA

SEQ ID NO: 275509 - protein, 371 aa, unidentified
MTQLSSTTSPTMWVAIDIAKLHNPVLIELPDGRRRHFRMANTLGDFTKLSAFLTSSGHPCRVAFEATGDYHRPLAHFLQAQGFDLCLVSSIAVARTRDALYNSWDKNDPKDAQVILHLLKAGTIQVYHDPLENHSNDLQELANTYQQISLWKVRLYHSIVTHYLPLYFPEAERYLHSTRAEWWTQLLLLVPCPAAVLSYSLEQFLQAARRLPGQKIDKTRWLTDFYQAARNSIGLPVTENSEAIRMFRIVLNEYLHLCRLRRELEEQVVARLSDHADFRRLQTIPGIGPILVLFILAETGDLRRFSHHQKFLKYCGLHLSTEQSGQFRGTTRLSKRGKARLVSRDLVSLWSKLHPSAGGSRLPQRIDFAGL

SEQ ID NO: 275510 - protein, 295 aa, unidentified
MKSLFYVGMDVHKDSISIAVLRDNNKNVEFERQIRNEPARIKKFFNKYKDESLICCYEAGPTGFALYRQLEEMNITCYVAAPSLLPRKPGDRIKTDKRDALMLAKVLRNQEIVSVYVPSTSDEAKIDLLKDKIDEIAAEARYVEKVSKLRCFKGIDTLTALTFIAEIGDFRRFRKAQNFMSYLGLVPSERSSGNQRRLGSITKAGNSRLRKLLIESSWHYKHYGPSKTLKMRRKGQDCEIVAYADKAGWRLNKKFKKLNYRGKVSQKIVTAIARKLSGFIWGMMLGNTDSITAAQ

SEQ ID NO: 275511 - protein, 402 aa, unidentified
MNCVGIDVSKGKSMIAVMRPFGEVVVSPFEVRHTANELSELAGLLKSLDGETRVVMESTGNYHAPVAWLLHGAGVYVSVVNAMLVHDYGNNSLRRGKTDKKDAVKLANYGLDHWLTLPRYVPEEDTRLMLKTCYRQYQQYSKVQTMLKNNLISLLDTAFPDANRLFTSPPRADGSEKWVGFVATFWHCECVCGLSKKAFTAKYQKWCRKHGYNFSEDKALDIYASACRHFGVIPKTDTAKLLVEQAISQLQTTSSALAALKQEMQSLAASLPEYPVVMGMFGVGPTLGPQLLAEIGDVRRFHSKKALVAFAGIDAPPYQSGQIDVRSRSISKRGSASLRRTLFLVMSVILQCAPIDEPVYQFMDKKRSEGKPYRVYMMASANKFLRIYYASVKAYLESLEHD

SEQ ID NO: 275512 - protein, 356 aa, unidentified
MSRDIQYIGMDVHMEAIVIAVLNGSGKLVMETILETKASSILQFIHGLRGELHVTWEEGTWAAWLYDLLQPQVHEILVCNPRRNALLKEGSKSDKVDARKLAELLRTGMLRPVYHGENGLRTLRELARSYQIISKDLTRVMNRLKALYRGWGIPCAGTQVYAPRYREEWLSKIPQTGVRRRAELLYQQLDGLQALRRNLRPEFLAESRKHKAAKLLRQIPCIGPIRAAHLIALMQTPHRFRSKRQLWTYSGLGIETHDSAQFRFVRGQLKRSKKPQQLRGLNQNHNHEMKEIFKSTATRASCGRGPFHNFYAALLAKGMKPEMARLTLARKIAAITLTLWKGGKRFDAEQLKTQAA

SEQ ID NO: 275513 - protein, 340 aa, unidentified
MKRYMGVDLHRKVFTCCVRLESGRQWVREWRLEQLPQFVKKLRATDEVAVEVTGNTRLFYNAVAPHVARVVVVDPHQFRVISQSVKKTDPNDARSLALYLAKGLLPEVRMKDKEHAQVASLTQTRDRLVKLRTALKNKVNNLLSARGIALRTEELSSEKGLTRVLAIEVEELTRFELQIIVDQVRSLNRSIAELEKVIEREGKKLQGHGNLTSIKGIGPLGASILLSVIGDVRDFPDEGRLASYFGIVPRVRNSNETEHFGHITKRGNKLGRTALVQCALIAKRYSSYLANYYERIRSRRGTGRAIIALARKFLGIIYRTLKNNWVFEDFPNFVLKEVAA

SEQ ID NO: 275514 - protein, 312 aa, unidentified
MDQVVVGIDVSKDKLDICLLPGGDLFVVSRNAAGLSELTERLKGLSVGVIAIEATGGFETVVAASLASSGLPVAVVNPAQVRHFAQALGKRAKTDPIDAFVIARFAEAIRPEVRPLDDQAAQLLSALITRRRQIIDMIVAETHRERSITDKSLKKSIAQLKMALERALSDIDTKIDEQIRSSPLWKAKEDLLSSVPGVGPITARTLIADLPELGRLSPKQIAALAGLAPYTRQSGKWRGKAFTSGGRSSVRAVLFLAAMAACRYNPVLKAFRKRLIDAGKPPKVAIIAMARKLLTILNAMIRENQPWQPKIT

SEQ ID NO: 275515 - protein, 335 aa, unidentified
MALYCGIDLHSNNHMVVVIDERDTRVLERRLPNDLSATLALLEPLRGRLAAITVESTFNWYWLVDGLQAAGYRVKLANPAAIQQYEGLKHADDRHDAFWLAHLLRLGILPEGYIYPKAQRAVRDLLRRRMQLVQVRAQQLISVQSQIWRSTGVRVPSAQIRRPGFVPPLEDPHELRAAQGHLAVLRTLEQQIRALEHCALAAVEPLPGFELLKSIIGVGPILGLTILLETGNVRRFADAGRYSSYCRCVSSQRLSNGKSKGEANRKAGNKYLSWAFSEAAHFSVRFDPLAKRYYERKKAKTNGMVAIRACAHKLARAAYHVMREQVAFESRRVFA

SEQ ID NO: 275516 - protein, 367 aa, unidentified
MKKVSTAATKQSRNISQQRLTIGLDLGDRTSCYCVLDEAGRIQLEQRVRTTAKALQEVFGAMPRSRVGLEIGTHSPWISRLLSKLGHEVIVANARKVRLIGENRKKDDRLDAQTLARLARIDPQLLCPVKHRSAQAQADLMMIRARASLVRVRTGLVNAARGLAKSYGERLLGCNVRNMNPEKAEGLSPELQRALEPLLSAIEELSERICEYNDRIEALAQTSYPQVELLKQIKGVGTLIGLTFLLTLEDPHRFRKSRDVGCYLGLQPGRRQSGKSDPQMHITKEGDPYLRTLLVQGAQHILGPFGIDCDLRRWGLKLAERGGRNGKKRAIVATARKLAVLLHHLWVSGEVYEPLHNNSPMTIAAAA

SEQ ID NO: 275517 - protein, 360 aa, unidentified
MAGTMTWAAMDVHARSTYATSLDVMSGELTRRRFDTGAVDPVVAWLVSLPGPVRCCYEAGPTGFGLYRAAGAAGIDCQVIAPSKTPRASGERNKSDRRDSELLLRQLMAGALTPIAVPSATFEAARDLARAREQVRADLMRCRHRVSKLLLRHGRVYDRKAWTQAHARWLAAQSFEQPNTELAFIDNLAACDGLQTRRAALDERLSRIARDPEFWPLVSRFRAFRGLDTLSALILVLEVADFTRFARAVQLGSWLGLVPSREQSGEHDVHGSITKSGSKYARRILVEAAWHYSRAPRIGQTLAARHDGQPDHILQIAWRAQHRLHRIHKRMRSRNKPANVITVACARELACFLWAAAAAP

SEQ ID NO: 275518 - protein, 402 aa, unidentified
MQDTNHAVCPGTAAREHDTSLFVALELSRSVWLIAVNMPGSDKISKFKIAAADTAALRTLLARLKAQSERCCGSPVKTICIHEAGLDGFWVDRLLQANGVDSHVVDAASIAVDRRSRRAKTDRIDVEKLLRTLMGWARGERRICSMVRPPSAEQEDERRLTRERGTLITERTRHVNRIKGLLATQGIFDFEVIRHDRRKHFEELRRWDGQPLPPRLKTELLREFDRLELVISQIAVVEAERDRALDMKRSVAPAATANGAAVGVPASTDGAGTLLLRLRSIGPEFASVLSLEAFYRSFANRREVAAYAGLVPSPWKSGSIDVEQGISKAGNPRLRKTMIQLAWLWLRHQPGSALSRWFHERVGEKRGKIRRITIVAVARKLLVALWRYVTQGLVPDGAALKA

SEQ ID NO: 275519 - protein, 354 aa, unidentified
MSNNSSPIVATMGIDIGKNSFHVVGLDRRGAIVLRQKWSRGQVEARLANMPPCLIGMEACVGAHHLSRKLQSQGHDARLMPAKYVRPYSKGQKNDFRDAEAIAEAVQRPTMKFVATKSGEQLDLQALHRVRERLVGQRTGVVNQIRAFLLERGIAVRQGLRFLRTELPIILAQRTDVLSPRMVHVIEDLAGDWRRLDERIVGVSAEITALAGQDVACKRLMTVPGIGPIISSAMVAAIGNGAAFSKGRDFGAWLGLVPRQTSTGDRTILGKISKQGNRYLRVLFVQAAWVVLVKIKDWDRYGLKAWIDAAKKRLHHNVLAIALANKLARIAWAVLNKEHNFECVRTTATSSRPA

SEQ ID NO: 275520 - protein, 361 aa, unidentified
MNDGSRAATPMMTAGLDLGDNYSYLCLIDTGTGKVVEESRLRTTPEAFKRRFDSEQQMTVAIEAGTHSPWVSRVLEEECGHKVLVANPRKTRLIYAQGRKTDRLDAEKLARLARVDPKLLSPLEHRGEASQAHLAIIRSREVVVRSRAQLINHVRGTVKSFGARLPKCSTASFHKKVAAWIPEELRPALEPLLETIASLSTRVRHYDRELEELAQEHYPETKLLRQVQGVGTLTALTFILTLEDPGRFGESRRVGAYLGLVPSKDQSGERDPQKRISREGDEMLRRLLVGSAHYILGPFGEDCDLRRHGLKIAGDAAAKSARKRAVVAVARKLSVLLHHLWISGEVYEPLYNARQLKGRAA

SEQ ID NO: 275521 - protein, 347 aa, unidentified
MLIIGCDFHPSFQMVSIFDKKTGEVRQMRLGHREEAERFYRALPPPVRVGMEACGQWIWFERLLAELGHELWLGDAGQIRAMVVRQQKTDRRDADHILTLLLQERFPRIWVPSLEERDVRQLLVHRHKQVQARTRVKNQLQALALGQGVQRKRKLWTAKGRAELEQLPLLPYAAQRRQLLLESLDRLEQEIQQLNLRVEQEVGQRPAALKLRTHPGVGPVTALATVLTLGPVERFGSARQVASYLGLIPREHSSGGRQQFGRLSKQGNPFLRFLLVEAGQSAVRGDAELRRLYQRLAARKHRALAKVAVARRLAQRLYWMLRQDQTYAQLLQGRHAGEPESFCGRGS

SEQ ID NO: 275522 - protein, 377 aa, unidentified
MKKELYLGLDVHKDCIITAVAEEGRKGEVRESGAISNDLHAVEKWIGRLRKRHGKGTLLRACYEAGPCGFGLARRLRQLGVECEVVAPSLTPTRSGDRVKTDKRDARKLARLLRAGELTPVYIPDARDEAIRDLCRARSDAVDDRRRSRHRLKGFLLRHGYRYQGKSSWSAAHERYLRELVLPHPAMKVIMEEYLQGIAAATERIERCEAAMGDLLEKWRLAPAVRALMAMKGFQTVAAMILVSELGEVHRFSHPRQVMAYLGLVPTENTSSERRRQGHITKCGNAHARWLLVECAQHYATPPKVSKELSRRQEGQSAQVRAISWRAQNRLHSRYTRLLARRLQRNKAIVAIARELCGFIWELLCTQDCYQAQSTPV

SEQ ID NO: 275523 - protein, 352 aa, unidentified
MTAITTIGIDLAKKVFQIHGVDAESKLVVARKLRRKEVLAFFAKLAPCLVGMEACGSAHYWAREIAKFGHNVKLMPPKYVKAYVKRGKTDASDAAAICEAVTRPSMSFVPVKGVEQQGLSMLHSARLQLIGRRTQMINAVRGHLSEFGIVAERGLLGFAQLTGIVRDEKDQRLPATARAALMILVRQIERVSAEIAALDTLLRKENKANELGLRLVTIPSIGQVIASALRARVTDPKLFENGRHLSAWIGIVPENDSTGGKVKQKGLSKKGDRYLRSLLITGAIAGVRQAKIRPDKYPGVTKLLGRMSTKQAAVAIANKTARIAWAIMVHGGVYEAGHRASQYRAEACAVTG

SEQ ID NO: 275524 - protein, 432 aa, unidentified
MSHRIFVAEKDNFMAKRIHANGKASVQARYNITGGCDTDKNIIVAAIYHAETGNLEAREFKQHKADALRAAEWFRSHEVELVIIESTANYHMLYYDTLREEGINIAVINPIVVKALLRVEGKSDKGDAMTLARLAANFDLKTSNMPDGQQRELRLLFKRIDSWKQQRTQVTNRANGILTGYGFTVFRLVTLNTPAGLNILQGIIDRRTPEEIAALHRNRNKRPEIVKCAEVPLPDYILPYLEEVLGDVTMLNDRIKQAENEILDKINLSNLENQVDLMTTVPGVTSMLALRIIAELGSNYHQRYCTAEAFSKAIGVVPANEVSGGKLLKRRSSHGNARVKFHLLSASKAFAIHGKGPLKAWFDQYRSRVHYYKATSALARRIAEGLWWVMVKNEPYRYKLGYVENIESRPILVNNRLIDPATGEILKSYVED

SEQ ID NO: 275525 - protein, 420 aa, unidentified
MTVDLERGYKRREPCGPKQYLNLLLRSFLMIYVGIDVAKDKHDCFITNSDGEVLFQVFTIQNNRDGFDDLFAKIHSISTDVSNIKVGLEATGHYSYNLLGYLIDKGLPTFVINPLHTNLYRKSLSLRKTKTDKVDARTIAMMLMSDVNLKSYSDTSYHNEELKSLTRYRFDKVQERAQLKQSVSRLVTILFPELEKLVPTLHIASVYALLSELPSAGKIASCHLTHLTKLLENASKGRYSREKAVEIREAARVSIGSNMPAKSMELRHTLKLIGELDSEISEIESEIKRIMDQISSPILTIPGISYRMGAMILAEIGDFSRFDSPDKILAYAGVSPSTYQSGQLESSYSHMEKRGSRYLRFALINAAKYVCHWDEAFGAYLQKKISEGKHYNVAITHATKKLVRLIYIMEKSGMPYRKAA

SEQ ID NO: 275526 - protein, 357 aa, unidentified
MGEGSWVGLDVHARTVVAGVLDGVSGELRVQRVPPVSEDTVAWLAGLPGPVRVAYEAGPTGYGLARACAQAGIVCTVAAPSKIPRAPGDRVKTDRRDAERLARLLRLGELVAVRVPDPVQEAARDLVRAREDARGDLMRARHRLSKLLLRHGRVYEGGAWTLAHDAWLRRQQFGSRPLALAFDECYGTVLQVKGRRDALDRAIAELADEPPFDEVVSRLVCLRGVSTLTALALTVELGDWQRFRPQSLGPFLGLVPSEDSTGERRRQGAITKTGNSHARRLLVEAAWHQRRPLRASAELERRRRGQPAAVAARADRSARRLHARWHALERRGKRRTIVAVAVARELAAHCWALATMT

SEQ ID NO: 275527 - protein, 405 aa, unidentified
MNLEGFAASFRNEEIGPKIRARRRERFVSDDMDSSRDSRGIEVPESPYAAERSAEKESQMQGTTIAVDLAKSVFEVAVSERAGSVSKRHRLSRTQVSRFLAAQAPATVVMEACGTAHYWAREAYARGHRAVLLPPHSVRPYVLRNKTDGADAKGLLEAVRNEAIRPVPVKSVDQHVLAGLHRMRSAWMATRTARLNALRGLLRELGFAIPVGARQVVPFVWALIGDAESGVPDALRPVLAEAAHEIRELEGRVRAVERSLEGLASASPVVARLRTIPGVGLLTATAFVAFVGDAGRFPSGRHLASYLGLTPRESSSGLRRRLGGISKRGDPYLRMLLIHGARSVLCHAKKTTGEPDRLRIWALDRERLRGHNKATVALANKLARIVWAVWRRERGFGDRNSQGAE

SEQ ID NO: 275528 - protein, 310 aa, unidentified
MDYYAGLDVSMNETHICVVERDGSVVLQAKASSTPEAIAGVLETAPACQTIVLETGRMAPMLFHGLAALGLPVICIESRQAYQALKSLATHKTDRNDARGLAHLARTGFFKPVHVKSLPAHAVRALIIARKKLVGQRVTLENQIRGLAVVFGVRLPRGLSPRFTEQVIQASQEIAGLSSARHGLLAARKAVLEAVVTIDRDMRLLARSSQACQRLMTIPGVGQLTALAFVATIDAPERFRRSRDVGAYLGLMPRRFQSGEIDYIGSISKCGDRRVRTLLYEAANVMLTRYRGALALKEWALGIARRSTMR

SEQ ID NO: 275529 - protein, 415 aa, unidentified
MEKIYDKCCGIDVHKKLIVACMRSGRKNEIREFGTSTKEILSLTDWLTDKGCEMIAMESTGSYWKPIYNIIESCGLQAIIVNAQHMKAVPGRKTDVKDAEWIADLLQHGLLKASYIPDKAQRELRELVCYRKSLIEDEARELNRLQKMLEGGNIKLSGTVSDINGKSSRNMLEVILSGEVLDLKKLESMVSEKKVSKRLKASKQKIVDDMDGVLTALQRKMIRELLKHIDELERHIKNLSDDIDRFMDSGEKAAVKAIEEVPGIGKVSAEAIISVIGTDMSRFPTDKHISKWAGLCPGNNESAKKRNSGRTTKGNKTLKTTLVLCAHAAVRVKESYFAAQFARISVHRGKKRAYVAVAHSMLIAIYHMLRYGATFMDLGSEYYNAFNRERKAEGCLKKLKQLGYAANIATIADLA

SEQ ID NO: 275530 - protein, 347 aa, unidentified
MSHTNIVTIGIDLGKNTFHVVGFDTTGAIILRKKRSRNQLEQSLANVPACLIGMEACSGAHHLGRKLEKLGHQVRLLPAQYVKPYLKGHKNDFRDAEAIAEATQRPTMRFVPLKSAEQLDLQALHRVRSRLVTQRTAVINQIRGFLLERGLPVRQGAAALRLALPQILSAPKDNLSPRVVQLIQDLGEDWRYLDRRVASMTKEIDELADQDPHCRRLMSAPGVGPIISSAMVAAIGTGDAFHKGRDFAAWLGLVPKQISTGDRTILGRISRRGNRYLRTLFIQGARAVLLRRQSWPRHGFGAWLEAAARRLHSNVLVVALAAKLARMAWSMLVNDRDYDANLLGRTA

SEQ ID NO: 275531 - protein, 348 aa, unidentified
MQVTTVGIDLAKNVFRIHGCDAHGKPVLRKQLGRRQLLSFIANLPRCLVAMEACASAHYWAREFEKLGHQVRLIGPRFVRPYVKGNKNDASDAEAICEAASRPSMRFVAVKSAAQQDLQAVHRVRQQLVKARTALANQLRGLLAEHGIVLARGIAQLRRALPVILEDRDNRLSGVMRELLVESSERLKFIDDRLRRYDSTIERLFRQDERCRRLAEVEGVGPLVATALVAAVGNATEFKSGRELAAYLGLVPRHRASGGHTVLLGISKRGDRYLRTLLVHGARSAMRTIERRPGARGVWAARLKLSRGANVAAVALANKNARVLWALLSRGQNYQPTPFPARVPQTGG

SEQ ID NO: 275532 - protein, 344 aa, unidentified
MNVLREVLGVDVAQKELVVTLGRLNQDLSTDLFLRRVFANKETGFLALLKWLKKNTILGSSVRVVMEATGVYHQRFAYFLNEHQIPVSIILPNKISNYMRTLSIKTITDNTCADAIARFGLERKLDDWTPSKKNYKTLLQLTRERDQIVAERVVIKNQIHAEKAEAEPNARSLERLNARLRLMNQQEREIKSDIEVCLKKDDSLKKLVDQICTIPGVGVLTAVTILGETNGFELIRSKKQLTSYAGFDIIEKQSGTSIKGKPRISKKGNRHLRKALHLPALAAIRHDEHYKSLFSRLVSKHGVKMKAAVAVQRKLLELTYILFKNEATYNPKQYAIYEKEQQLH

SEQ ID NO: 275533 - protein, 344 aa, unidentified
MEKHTVVAVDIAKSVFDAAVSHEPGRVAERRRLSRKVFLLFFAQMPAATVVMEACGSAHFWARKLQELGHRVVLLPPHQVRPYVVRNKTDRTDAKGILEAYRNADIRPVPVKSVPQQVLVSLHRFRSGWLAARTAHINTLRGLLRELGLVIPLGAEKVLPEVMALIGDADSGIPDALRPVLAAACEEIQTLSQRIKMTERQIEAIAEQTPVVERLWSIPGIGLLIATALVAFVGDIQRFPSGRHFASYLGLTPREYSSGLRRRLGRISKRGDAYLRMLLIHGARSVLCHAKKTNEHDRLRTWALDLERRVGHNKAAVALANKLARIAWAVWKNDRAFESLPRAA

SEQ ID NO: 275534 - protein, 402 aa, unidentified
MITCGIDIGKGKHAVAIIDELGRQLVRTRFYDNTRAGAEKLMEELARHAEPAQVHVGMESTGNYWRAYYDFLSKKGCVVDVINPIVTSASSAGDIRGRKTDKRDAESIAEVVMRGKYVRRRDEGLQERKLRALTRQRGFIVEERSAAKLHLSSMVAEAFAEFESLFEDPYGPLALAVLSKYPTACHMARARKPSLAKIVRAHTRGRDADAEARRLVDAAKDSISLACEITDALARCIVSSIQTITALDERVKDIEKAIMDFDPPDLAAKLMAIKGSGKVMPMVVASEFGDISRFRTNPKNGSETGMHKRLLAFAGCEPRIRESGKWRGRKFISKRGSRQLRTALYLIANNIRQWDPYFKAVYDRKVEAGKHHNVAVFYVVAKLLEVLCALYKSGRSYAATQP

SEQ ID NO: 275535 - protein, 349 aa, unidentified
MIADTDYWVGIDAGHAECAICILDRAGTVLLEAVRDPNAGAVTDILRVLGVERVQAIMIEAGVGMHIVRKLLDRGLPVKVVDPRKSSKFLSIRRQKTDPSDARGLAELGRLGASIGAGIHINRPDQDDIRIQLNVRRSILNSRIRTDAAIRSILQRHGASLRVGNSPGKLRFEVTRVLRERMRLGYAVRADLMRLVTVGEVLRSQLADLDREVSSLARNIDVCANLQTMPGVGPLTALSFYSAIGDPHRFSRNTDVGPYLGLAPALRQSGATAHRGRVGRFGNKMARSHLIMGATLILSKCKVESKLRTWGLDVMSRTNFIKARVAVARKMAVILLQMWKDGAPFDGKL

SEQ ID NO: 275536 - protein, 347 aa, unidentified
MKKIVRQVVGIDVAQKELVVCFGRMYDDWVPELFANRAFANTAKGFAALILWVKKLAEESCPVRYVMEATGVYHESLAYFLEGNGFEVSIVLPNKISNYFRTLEVKTITDKTASEAITRFGLERKLDRWKRPAEIFRKLKQKTRERDQLVGERTLVKNQLHAEQTEAYPGKESITRMKTRIILLNTQVSEIKEEMNALVKQDKGVNKSVDLISSIPGVGILTAVTVLAETNGFELIRNKRQLTSYAGLDVKEKLSGTSVKGKPRISKKGNRYLRKAMHMPALTAIRNEGRFKVLFIRLVSRHGIKMKAAVAVQRKLLEMIYTLYKTNTAFDEDYLKEEVSVLSTQAA

SEQ ID NO: 275537 - protein, 383 aa, unidentified
MRTVCGLDVHKDSVYLCILSSTGEIYEKKFGVLTTELIEMRDLMLSHHVLEVGMESTSVYWVPIWRVLEPHFKLKLINPYFIKQLPGHKSDVKDAQWIAECMLKDLVNGSFVPPERIQQLRHYDRRIYDLDDEIIRKLAKLDAAVQRCNIRLSNYVSNTDSVSYKAVIDKICEGVTDPNVLVEEIHGRIINHHGKETIIASLTGSITECDIDIMQQLKAEIDLAEQHKQECMDKMLAICENEYSTQLHNLQTIPGVKMRAATSLIAEIGTDMSHFETANHLASWSGLKPRNDQSNKTIKSRRITYGNRYLRRTIIQCSWGASRTKNCFFSRFSYHQTQVRKKNRMKVQVAIARKMLICAWHILKDGVSYKDFNNIIEASVTNG

SEQ ID NO: 275538 - protein, 341 aa, unidentified
MSTVALIGIDLGKHSFHLHGQDRAGRMVFRKKLTRSQMFTLLGNTPACTVVMEACAGAHWVARRVQDLGHQAKLISPQFVKPFVQGNKNDFADAQAICEAASRPSMRFVSPRNQAQQTVSMLHRVREALVRDRTGAINQIHAFLLEFGVGLPKGPAIIRKLPAVLVAHELPPRLVALLERLQAHFKYLDEQIAQTERELSAQLRQDERGQRLLEIPGIGPITASVLTTELGDARQFGSARQFAASVGLVPRQYSTGGKPTLLGISKRGDKNLRRLLVQGARTIMQRVDKRTDTLGVWVRSLLTRRHSNVVACALANKLARIAWAILARGTNYRSEQAVTAA

SEQ ID NO: 275539 - protein, 413 aa, unidentified
MNSHQELTHFAGFDWASDHHDVIIVDTTGALVADFKIDHSANGWKLWKENIAACPKLGVAVETSFGTVVEHLIDSGVSVYPVNPASARRYRERKHPSGTKTDRHDAWALADALRTDGHAWRALGPKDPIIEELRMLCRDEVALIEERTALISQARQAAREYYPTALEAFDDWTLPSTWAFIERFPDAPSLLRAGKRAWQKFFHTHKLYRPETADKRIAIFEAAAQWRINDYMIKAKGLYLLTKIKQLRALQAQLEEYRERIEALFASHPDSGTFGSLPGAGAKLAPRLLAEIGSDRALYESAQSLQCISGTAPVSFQSGKINKVKMRRACNLHLRHTMHLFSDLSREQCAWAKVYYEQVKARGKTHAQTLRALGQRWLKIIYRMWQSRTRYNAELHTQNQLQHGSWVLQIKPS

SEQ ID NO: 275540 - protein, 363 aa, unidentified
MEQITRGQAVRVGVDLSKRVMQVHAVDAGGRVLCSRALVRDKFIAWCAQLPTGCVVAMETSSSAHHWARKLIALGLEARIIAAQLVSPYRRQGASGKNDANDAAAICEAASRPQMHFVPVKSIEQQSMLCVHRLREGLKAERTACINRIRGLLAEFGLVFAQSPAALKAVLADVLEDGANEMNTLARLVLQRAQLQWAELDCHVAWCDERMAAHGRSNPAVKKAATLIGIGPVTASAVVASVVDFKQFRNGAQFGAWLGLVPRQHSSGGKANLGGITKRGDTYLRTLLIQGAKSAVMTAHRRSDPISQWAAALRDRSGWQKAVVALANKNARILWTVMTRGEAFDARHVSVKPAAPAAATAAA

SEQ ID NO: 275541 - protein, 358 aa, unidentified
MKYVGIDVHKKMCQAAILDEEGTLLDEIRFANTPEEIEEFAGKLTTFHDDVKAVVESTGNLWIQIHDRLEEHGFDVALSNPSKTRLIAEAKVKTDKVDARTLAALLRADMLPTCYVPGEELRSRRELLRHRLNMVKIRTGVKNRVHGLLDKHGLRMPGITPFSKENIVWLREQSFGFMDDAIVRSDLAVLEAVDGQVTLIEEKIATIAAEDKRVRLLMTMTGVGYFTAMLVMAEVGDVGRFRGDKEFASWMGLVPSVHQSGERIRMGGVSGPGNKRLRWALVESAQAAVRFDPRFGGMYERVSRRRGKGCAVVAVAHEMARIMYFMLSRGELYRGENRGLTERKLKSMSKKAFNGLRN

SEQ ID NO: 275542 - protein, 340 aa, unidentified
MQVTTVGLDLAKNIFHAHGITSDGTVAFNRALRRGQVLPFFAKLEPCLVGMEACGTSHYWARELTKLGHDVRLMPPIYVKPYVKRGKTDAADAAAICEAVTRPTMRFVAIKSPDQQALLSQHRARQLMIGQRTQLSNMIRGLIGEFGCIVAKGLNHITAFAEALKSGEGPSLLATAQDVIVSLCEQLLALHQRIGMLEKKIFAASRKDARVRLLETIPGIGPVTASAIIATVGTPYQFRTGREFAAWLGLTPLNRSSGGKERLGRISKMGDRYLRQLLVAGMTSRVRAARRRPERVEPWLASLLERKPVRLATVAMANKAARIIWAVLTRNEPYKSPLAA

SEQ ID NO: 275543 - protein, 346 aa, unidentified
MILIGCDYHPSWLQICWLDTVTGETGEKKLEHGSGEAERFYRQLPAAALIGMESTGNCQWFVEMATTQGHDVWIGDAAKIRASEVRAQKHDRRDAALILKLLMEGRFPRIWTPSGQEKDLRQLLIHRYKLVRIRAQVKTELQHLAMNQGVTRKRKLWSKAGEKVLRELPLKPWASRRREDLFKVRGMLDEQIAPLDQAAAEAAEKNEKARLLMTQPGVGPITSLAFVLTMGDVSRFQRGKQVASYLGLIPREYSSGGKQRLGSISKQGNRFLRMLLVEAAQGAVQCDPGFRNEYLHRCHTKAKGVAKVAAARKLAIRLYWMLRTNTGYPEVVRVESSSRVPLVSAS

SEQ ID NO: 275544 - protein, 371 aa, unidentified
MEEFIKYVGMDVHKETIAVSVAPSHAVEVRFIGEIANTAQAIEKLVKQLRKDGSDLKFCYEAGPCGYGIHRQLMELGWECQVVAPSLIPKKAGDRVKTDRRDSLLLARLHRAGELTAVWVPDGAQEALRDLTRAREDMKHLKRQAKQRLLAFLLRHGRSYDGKSNWTQAHYRWLEDAKFEQPVQQIVFQEYVDTVKALSKRVDALDLQLESAASDSVFWAVIQGLMALRGVSLLTATTIVAEIGDLKRFASAPQLMAYLGVVPSEHSSGGKKSRGGITKTGNGHVRRVLVEAAWTYRHPARKTATLQRRAEKAPEAIQEIAWKAQKRMCGRYKLLEGRGKLKVQVCTAIARELTGFIWAIGQAMPQPPVKA

SEQ ID NO: 275545 - protein, 358 aa, unidentified
MKKIIAEKTTRRIKQADGKLTIGLDLGDRSSSYCVVNKDGEVIKRGSVATTKKDLNRIFGALRHSRLALEAGTHSPWVSRHLKELGHEVIVANPRRVRLITASSNKNDRLDADPKMLSPIRHRGETAQADLTVIRTRASLVEARTRLINTVRGLTKSFGERLRKCDARYVNEEMAQGLPGPLKEAMGPLLKQIGQLSGRIKEFDEAIQKMARERYPEVELLTAIAGIGVLIALTFILTLEDPHRFQRSRDVGAYLGLRPRRRQSSQSDPQLGISKEGDVYLRKLLVQGAHVILGRSGEDSDLRRFGQKLAARGGKGAKKKARVAVARKLAVLMHHLWVTGEVYESLRKTQAPGEPVAA

SEQ ID NO: 275546 - protein, 320 aa, unidentified
MQTSSVVRHIGADVAKDEVVFACAEASFTVRGVKNQQAALTAFLKGLPAGSRIGLESTGIYHELLANLAYKLGFVVYVLNPKDARNYAKAIGLRGKTDRVDAEMLARMISREHEKLHVWVPPTPEQREIGQLLNRRAKLSSLRQSLGQTLTGVDGFGADLKSMRKRFDQVLARIDARVKELTDKDPKRKEHVQHMLTLDGVGKVVAPSLVNALERLPLKSADAFVAFTGLDPRPDESGRHRGKRRLSKRGPSELRRPLYLAAMSAKKTKTWKPIYEHYRAKGLSSTASLVVIARRLARIAWSMYTHNREFEPTRIKNALT

SEQ ID NO: 275547 - protein, 386 aa, unidentified
MQASTVGTLTSSHYGTIFVAIELSQKTWLVTLHSPDKGKMSHHHLKGGDHVGLLELIDRVRDRAARALGGVPAVVSCYEAGYDGFWLHRLLLAAGITNYVFDPASIAVDQRARRVKTDRIDGEKMLRTLMAYLRGEPRVVRIVRAPTAEQEDARRASRERDRLVKEQTAHSSRIKALLRLLGMAVGNPRRRDWLSWLATQRDWQGQAVPPQVLSEIKHEHARLMLVRERLDALAKTPAQADRTPAAAQMTERSELLLRLKCLGPAFATTLTNEVFYKDFRNRREVASYFGLTPSPWQSGGINRDQGISKAGNPRARCAAIELAWLWLRHQPDSKLTQEYRRRTLDASKRIKRVAIVALARKLVVALWRYLTTGLVPEGAVLKAVKA

SEQ ID NO: 275548 - protein, 409 aa, unidentified
METLLERCAGLDVHKKTIAACVRLPGAAGTRIQHVQTFDTTTVALLALGDWLAAHGVTHVALESTGVYWKPVYYALEDRFTLVLVNPAHLKRVPGRKTDVQDAAWLAQLLECGLVRASFVPPAPIRELRDLTRYRKTLIDERSREVNRVHKVLQDAGITLASVATDVLGVSGRAMLEALVAGTTDAAILADLARGKLRAKLPALRQALAGRFRGHHAFLVGQQLAHLDYLDEAITTLTARIEEHLRPFADAAARLDTIPGINQRGAEVLLAEIGVNMTVFPTARHLASWAGVCPGQYESGGKTTRGTARKGDRWLRTALMEAALAAIHTKNCALAAQYRRLLPHRGHKKAVFAVAHSILVIAYHLLARATTYQELGAAYCDRRHAERATRRAVHLLERQGYHVTLERAA

SEQ ID NO: 275549 - protein, 363 aa, unidentified
MNKCHLHTELSSHEGTRCQFNGGKGSIKLGIDVHQDFYVVVEQVDGSNPKPPQRFAKEAFLHWTARLKQKSGAEVHAVYEACGFGFGLQRNLTSLGIKCQVVCPQKLDEHNRRVKTDGLDAKALCLKLDRFVQGNRAALAIVRVPTEKEEQLRAIHRQREQLVKARKQLEAQGRSLMVNHGIEPVKNWWKPRTFAALQVSDWMKQLLQNSQPILIELEEKIAALTVQLQRAASPDQPRGLGKMTSVIIDREIGDWHRFRNRRQIASYTGLCPGEYSSGNSRLQCCVTKHGNPRLRAALVELAWRLVRFQPDYHPVRKWRQILGKGALATGAARKKKPSWRWRANSPSICGESKPAGSAQKNWD

SEQ ID NO: 275550 - protein, 387 aa, unidentified
MGKESSTLFVGLDVHKDSIDIATADEGRDGAVRHVGSIGGELAALDKSLRKLVSRGCRLHVVYEAGPCGFVIWRHLTALGTTCEVVAPSLIPKRTGDRVKTDRRDALQLARLARDGNLTAVRVPGVADEAVRDLVRARDDAVREQRNARHRLKALLLRNGIPYAGKSSWTAAHLRWLATLKMQHPAQQIGFQEYLNGISESTSRIARLEQAMRDTLNDWSLKPLVQALQALRGVSLIAAMTLVAELQDFLRFEHPRKLMAYVGLVPGEYSTGPKKRQGSITKAGNSAARRMLVEMAWHYQHPARVTPIIARRQDALPQAVIDIAWAAQLRLSAKFKRLQARRLMKTKAVVAVARELAGFVWAIGCEVQTSGWQGLPTTPDAPQAAAA

SEQ ID NO: 275551 - protein, 339 aa, unidentified
MNITTVGLDLAKNVFHVVCLNKHNNEVKKRKLRRNQVRQFFAQLPACTVAMEACATSHYWGRELIALGHNVKLIPPQHVKPMVQGNKNDYNDACAIAETVNRPKITFVAVKTIEEHDMQAIHRMRTQCIRDRTALSNSTRGLLGEYGISFSKGLATLRRKIPELLEDAENGLSMRFRNLLARRYEQLVELDEHIAFYTKELELLSQQDEACQRLQTIPGFGPIVASAFRSTIGDGSAYTRGRNAAASLGLVPRQYSSGGKNVLLGISKRGDRYLRKLLVHGARTVVLHAANRDDPLSRWINRIRERRGYNRAAVAMANKMARMGWAILRNNTSYETTLA

SEQ ID NO: 275552 - protein, 340 aa, unidentified
MQKRYIGIDLHRNQFTCCIRLENGRSYLSTWKLEDLPRLLKKLRPVDEIALEITGNTRLFYDAVAPHVARVVVVDTNQFRVISRSVKKTDARDAELLALYLSKGLLPEVRMKDKEHGQLASLTQTRDTLVKLRTALKNKVNNILSARGINLPKEALSSEKKLEEVLSLPFDEVVRIELRVIVNQIRSLNKSVAELEKTIAEEGSKLEGHKSLTSIKGIGKITGAILLSVIGNVNDFPDENRLASYFGIVPRVANSNETERSGRIHKHGSKLGRTALVQSALIAANYSPYLKTFYERVKARRGAGKAIIALARKFLGIIYRTLKNKWVFEDFPNFVLEEAS

SEQ ID NO: 275553 - protein, 318 aa, unidentified
MNIIGLDISKDTIDATLHKTNGSIHYIKFKNNDDGLKQFRLWIKGNRIRKVYIGMEATGIYYEKAADMLSSYYTVYVINPLKIKYYGKSRFNRTKTDKADSNLIADYIKRHQDTLIPYQIPKNKALQKLINLKNQLQQQQKQIKNRLHSTEEDFIRNIHQDLIDTIQDKMEQVKIAISEQIKKQTDYNHYRNLQTIPSIGKDTASVLYAQLTEKHFKTANQFVSYAGLSPAIIQSGTSVRGRGRLSRYGNRRLKSTLYMPALCAYRFNAFPKLINNLKKAGKPKMVIIVAIMRKLAKLAYYIVKTGQPYDAERHRFNQ

SEQ ID NO: 275554 - protein, 332 aa, unidentified
MYFDHYLGIDISKATLDAALIIKEGEVVGQTKVANNSHGFNDLASWIRKLKVKLSDVLVCAEHTGIYGYDLQIWLDDMQISFAFVSALEIKRSLGIRRGKNDAVDALRIAEYAYIRRESISLSHKPSDVIFQLRALLGERKQYVRMRAALLARKDALHQYESKESIYRREEIIDKYAEYIASVDKQMRGLMEHDDEIKRNYELISSVKGIGLVNAINTLVYTNNFTSFQTPRQYACYCGIAPFEHTSGTSIKGRTAVSKMGNHQLKCELTMAARSAIIHDPWMKQYYKRKMMSKGNAPGAHGIVLNAIKFKLIVRMFSVVKSGIPYKVMAYC

SEQ ID NO: 275555 - protein, 460 aa, unidentified
MYVGIDCSKGYADIIAFGSNKEIAEPAFRLYDITEGYRQLQSLIARWLDIGFEHIYCGVESTGGYENNWVNYLQQMGKNDPVHIARLNPKGVKSLGEARLTRTITDSVSAENIALYLMDHPGKVHYLKPSQTSKAYSEGRKHNSFIRMLKKQRNQLGNQLEKLLYEQLPPLMCYCRHGQPLWLLLMLEKYATAASIKKAGVSKLSKIKGISEEKAKSVVAKLTGSDIQSSDHIGSIIKSTAAQILHLEGSIKKEKLNLYSRFKHTEEAVLLTSITGIGEQSAVEILVEIEDINRFETAKKLGAYFGTHPMWKQSGDGTWGNHMSKKGRSEIRGVLYMCGMSAVRHDEMFKGIYARARAKGKNHFSAMGVVMNKMLRIIYGVLKNKTKYNREIDYKNQQNAQTKQKQQEQKQEELKQEKQTKLERYNLREVSEMPVSKRYAKKKRQSPKLQPEECTGSSTS

SEQ ID NO: 275556 - protein, 401 aa, unidentified
MKRLTPHSPWWHRLAPQGENALTGARRRGQPWTMLDKKESQICILAEGGELIERRVRTERGRLAEVFEHRPPARILVEASTESEWVARCLEGLGHEVVVADPNFAPMYAARRRTVKTDRRDARALAEACVLGAYRPAHRRSDAQRHVRGRLGVREALVRTRTRYIAVIRARLRQDGGWVPTGSADGFGRRVLALPLPGRLRSEVAPLLAVMRPVHAQLVYSDDRIEALTGTDERGRRLRSVPPVGPVTAAAFVAALDDAQRFRRAHEVEAYLGLVPQAWSSGETQRRGRITKAGSGRVRGLLIQAAVSGAPGARPAAGGVAGRGGADRGPARAEDRRGRAGPAAGRDPVCAAARWDPVRGAGRAAQPPSPGGPGLSGDRARPPRHWPPRTRAARPPTPGPE

SEQ ID NO: 275557 - protein, 295 aa, unidentified
MKYYTSATEFNCGIDLHAHQMYVCVMDKQGKKLVHTNIKDNDFQYFLKLVQPYQHSLTVCCECMFGWYWLADACQQAGLTFVLAHALYVKAIHGGKNKNDRIDSEKLTHLLRSNLIPPAYVYPAKDRPARALLRQRILYVQNRAELLARIQSHQLAHNRVPARQTGRVPGIGPGLGLTILYEIGDINRFPTVKDFLSYCRLVKGTVASAGKIKGLRGAKLGNPYLRWAFGEAAVIAKRDHLVIRPLAQRLEAQMGGNKFKANTVLAIKLARAVYFMLKHKTVFDPERLVATLTHK

SEQ ID NO: 275558 - protein, 455 aa, unidentified
MYLPDWKWIPIRKELSLMSNNVIFNLDELFISVGIDVGADFSWMSIALPNQQFVGKPYKILHSSMDSLTTAVSKIKEAEELYSLESRIFLESTGIYHYPLFCYLRDKGFNCSVINPIITKNSTNMNIRKVHNDRFDSKKAALVGLKPDLKVSIMPSDLALNCRNLCREYYDLMDNRSAYVNKLQGELRMAFPQYLGIFSKVTINTSLTLLETYTSPNAFIEADKQEIIDTIKSTARFGLTYAEKKYNAIIQAAHDANEFGYIIDSNIKRIRLYISFIRKYDEEIAGIMDALHNLVDSNEDTDFVKQIHLIETFKGAGFLSAVSLMGEIGDFSAFTKPKQLFAYFGLDPAVKQSGKFEGTKVQMSKRGSAIARRVIHVLTLQSISTSRTGEAKNPVLRDYYLKKCESKPKLVAMGAVSHKVCNMIFAILRDNKPFEIITPQEHIKQYNSAKCDEAA

SEQ ID NO: 275559 - protein, 400 aa, unidentified
MDRNRIVAGLDVHKDSVFLCIMRYDEAIIFEKTYGTLTTQLRQMRNDMLCHGVTECAMESTAVYWVPVWNELCDYMTLRLANPHFIKQLPGRKSDTRDAQWIAECQLKKLIKESFVPNPGVQNMRKLNRRIFNLNEDLTYNKNKLDAAMQRCGFRLSNYVSNTGGKSYQSVVRAISQGETDAEKLVLLVHGRTVNKHGRDTIAGSVTGNFSPTDIAVIRQYLAMIDLINNQIDECQKALAAMCEEHFPEQYRRLQTIPGVKERAATAIIAETGADMSMFAKATNLVGWCGLKPRNDESNRRIKSNRITHGNRYLRQILIEIAWVASRTRNCFFSNFSYVQVTVKKKRKMKIQVAIARKILVAVWHMLSNEEDFIDIYLKRLEEQRLIQLQIEQLESSMAL

SEQ ID NO: 275560 - protein, 445 aa, unidentified
MDVIFTHCAGLDVHKKTVMACRVTPDPTGQEAEGLSEVREFGTLTRDLLALCDWLAEAGITHVAMESTGEYWKPIFNILEGTCEVFLVNAAHVKNVPGRKTDRADARWLAKLMRHGLLQASFIPPAGQRDLRDLTRYRTKLVQERGREVNRMQGVLERANIKLASVATDVMGVSGRAILAALVEGRADPATMAELAKGRMRNKIPLLEQALTGLVRDHHRQLLAMQLAHIDFLDEQIDTLSVAITGRLTELSAGDPPATPADTAGAMGGAGDANAPAAPLTFTRAITVLDTIPGVDQRGAELMVAEWGIDMGRFGTAERLSAWSGVAPGNDESAGKQRSGKTRKGNRALRTGLTQLAHAAARSKDTYLSALYHRLAARRGKKRAIMAVAHAIAVSAFHMLSRNEPYHELGANYFDEHQREHLVDRLTRRLQHLGYRVSLEPVPAV

SEQ ID NO: 275561 - protein, 406 aa, unidentified
MKRRQEDWFGPHELYLGVDVGKSFHWAVGLDREGEIRISRRVENRPDDVDALLEEAGGDALVVVDQKNNIGSLVVRRCRAKGVDVGYLPGKSMKSARDMLPGTAKNDRIDAEVIAQAGMSLRSAVLPIADTDDLGASMSLLSSQLAYATRRATMARNRLHAVLLESDPAFEAAADLSAAWTLGVMAAFGGAAGIAAAGRRSYGAACARGGATREARDALWSSACASAGSCRHPGSEDLVVRELADEIATADAERSELSAELEGMLSEDETYRCLLTVPGVGPKTAAALVTSIDISLFPGDGKLAAYCGLAPKDSDSGTSLSSTTSTHAGNKALKNLLIFSCNSLVGTKNRFGRYYERCVERGMRHNKALKAVARKRLRVIYAIMRDRVPYVEPSAAADVEKPPSAA

SEQ ID NO: 275562 - protein, 354 aa, unidentified
MQIVGALDVHRRQITTKTLDLESGEVRRGRISPAAREPLREWLERFAGREAHFALEGTTGWRFVVEEIERAGLVAHLADPAETAAKRGRKRRAKTDKADCDLMLDLLAHARLPESWIPPQQILELRVLLRLRKALVDERTAWQQRLHAQLFHQGIPAGINLRRRLGGAALAHVPLSPAGRRLAGVGLRMLERLDGELAPLDRELSAFARRQPGCRALIARLFGVGPVTSTAILAELGDCRRFASSDDSVRHSGLDVTVYSSDRRRAPGHLSHEGPELLRWALFEAAQSAARPQSPDHAYYLVVKQRIDHTRACLSVARKLCRRAFHILRELGEEALAPVDRLLPAGEEEVPAAA

SEQ ID NO: 275563 - protein, 438 aa, unidentified
MSNKVIFNLDDLFISVGIDVGADFSWMSIALPNQQFVGKPYKILHSSIDSLTTAVSKIKEAEELYSLESRIFLESTGIYHYPLFCYLRDKGFNCSVINPIITKNSTNINIRKVHNDRFDSKKAALVGLKPDLKVSLMPSDLALNCRNLCREYYDLMDNRSAYVNKLQGELRMAFPQYLGIFSKVTINTSLTLLETYTSPSAFLEADKQEIIDLIKSTARFGLTYAQNKYNAIIQAATDANQFGYIIDSNIKRIRLYISFIRKYDEEINNILESLHELVDANEDADFVKQIHLIETFKGAGFLSAVSIMGEIGDFSAFSKPKQLFAYFGLDPAVKQSGKFEGTKVQMSKRGSAIARRVIHTLTLQSISISRNGEAKNPVLREYYLKKCDSKPKLVAMGAVSHKVCNMIFAILRDNKSFEIITPQEHIKQYNASKCDMAA

SEQ ID NO: 275564 - protein, 446 aa, unidentified
MAQRTRVKLEIANPNAAGIDVGSASHFVAVPPNRDDEPVREFKSFTEELERLADWLIACGIDTVAMESTGVYWIPLFELLESRGLSVYLVNAQHVKNVSGRKSDVLDCQWLQQLMSYGLLSGAFRPKEEICALRSIMRQRGMLLSYQGQHVQHMQKALAQMNVQLANVIADVVGETGQRILRAIVAGERDPMKLAELKHGRIRASKEQIAMSLHGNWREEHLFELTQAVELFDAYSQALQRCDLKLEAMLARLSRNQDQPGPSKRRRYSKVKNAPKFDVRTYLFRICGVDLTAIDGIDTTTALKVIAEVGPDLSRFKSAKHFASWLGLCPGTKISGGKLLSGSTKRTANRVAQALKMAAISLRASQSALGAYFRRMCARLDKGKAVTAVAHKLARLIYAMLTKGAAYVDQGQDYYEERYRQRVLFHLKRKAAALGLDLVPVQTHPA

SEQ ID NO: 275565 - protein, 392 aa, unidentified
MALFVGIDVSKEKFDACGIEEHGDKVFSLSCSMNRVGFDKLIQQVPSRKKASILLGMESTASYHIALFSYLTAKGYRVVIINPLLIANFTKLSLRKTKTDKKDAFTIAQFLFLKKDALATQESPHLTELKDVSRRREKLVDQMTSLKNDMKRILSVTFPELETVTGVFTKSTLRLLAQFPSALAIRKAGYDAVVDIVVARSRGRKPAASVQTLMDAAATSVGVTSPAKELVLKQEASLLLHLEEQTEETMKLMRCLSGETMKKDMRILTSMKGIGEKTALNFLIEMGGDVKAFETDRKLIAAAGLDPTTYESGKYKGKSKLSKRGNRHLRRVIWLMAVRVIISNQAFRTYYLKRRKEGLIYKKAVLATAHKLIRVMFSMLAHERYFEPERRK

SEQ ID NO: 275566 - protein, 366 aa, unidentified
MLIIGCDYHPSVQQIDGVDTETGECVEKRLMHSDGEAENFYRELKQKGVQVRVGIEATGHSRWFERLLAELGFELWVGDPAEIRARRVRKQRNDRLDAEHICKLLVEDRFPRIWMPSPENRDVRQLLLHRHRLVGMRTRVMNQLHAIAMNEGLRRKKGLWSKKGRARLESFPLAPWMSRRRQELLELLDRLNPMIGELSKAIEQEAERRPEVKLLMTHPGVGPITALAFVLIIGNPERFHCGRQIASYLGLIPCEESSADHRRLGHITKQGNALMRFLLGEAAQVVTRSEPEWRQHYFHLSLRRGRAIAKVALARKLAVRLFWMWRKCQNYQQVKKFGSHTGQLEVPNGVKSITANLIEHPAPSLA

SEQ ID NO: 275567 - protein, 372 aa, unidentified
MSQNVIYVGIDVDDVHYHGCALDKATGEVLEFQCRPTLKGLVGELKKVREYFGGGKLKLCYEASYIGFSLQRDLNGRDYDCEVVAPTSIPRRGGKSVKTDRIDATELAEFYANGLLTIVVAPDADIERDRDLLRSRHQLMQQQGALRKHIQSLLRRNGFHYKAETQRKTHWRKHHYSWLERTVEGCSTGLRTNLSLLLRQLKSLDDILVAYGEEIGALAVTPRYREPVKALTCYKGIKYLFALTMITEIGDVKRFAHPQKLVSWIGMDIREYASGGKSNRFGITRQGNRYLRTAFIEANQRGYRTARLSKDIKARRAGAKPEYIAIADRCLRRLNKKGNRLLLAGKHPNKVKVACAREMVGFVWESLNRAAA

SEQ ID NO: 275568 - protein, 369 aa, unidentified
MNKSITMVGLDAHKDSIEIVTADTIGKQEVRHYGKIGGDMVSLDKAIRKLQSTGAELRFVYEAGPCGYEIYRHLTKKGFPCAVVAPSMIPKKSGSRIKTDRRDAEALARLYRAGELTPIYVPREDDEAMRDLSRAREDASKAQRTARQRLGAMLLRHGYRYPGRKSWTPAHLRWLSDIAMPHPAQQIALQEYIHSVTENTTRVDRLTEQMLALLPAWRMLPIVKAIQALRGVAPIVAITTVAEIGDLTRFESPRQLMAYLGLVPSEYSSGSSVSRGSITKTGNGHVRRVLVEAAHTYCHPARVSRTLLKRQEGLPKHVCDIAWKAQVRLCGRYRTLMAKGKMRTKVVTAIARELSGFLWAIAKEVPVAA

SEQ ID NO: 275569 - protein, 427 aa, unidentified
MNENEVIRYEKFCQFKAEIRSSGDYLIVGIDVAKERHHAFYGTAAGRTLLRRLIFDNNLAGFKQLITRASQLQIEYGLGRVVYGLEPTGNYHKPLSSWLLEQDKMLVLVSSKSISDNRQTLDGRWDKNDIKDSANVADLIAQGKCQFFEMPDTRLVQLRNLLSLRRRLKKAEHSVRMQIRNGLVCKYFPELDRHWGSGLTENLAIVRWCLDPRKITAMGFEQFLRQVTRRDRGIKQQKRLEQIYEVAAVSIGCPMDEAAHFEAHLLVERLEKISERIERTESEIKDICDSFPAYRRLLSIPGFGPYVSAIVLARIGDPHRFIGRRQVIRLGGLDLNANRSGKRSNAAVPVISKRGNSELRYALYQAAQIATYHNDRLRALFTRYLEGREKERGIKTKMRVKMAAKMLVIAWTLMKTDTDFDPLLIKV

SEQ ID NO: 275570 - protein, 325 aa, unidentified
MDVLGIDVAKASLVVVLLASQRQQRAEFANTPAGHAKLLTWLAKRCPAPLHACLEATGTYGDDLAQVLFDAGHTVSVVNPARIAAYAKVQAARHKTDQADAALIARYCQREQPAAWQPPAPELRELRALVRHLDTLQQQRQAEHNRLEAGGHPAAVTQAIQAHLTFLSAQIATLEQQIEAHFEQHPDLKRQRALLDSIKGIAVRTATRLLAELGDVQRFANARAVVAYVGLNPREYRSGSSVQRRTRLSKSGNAAVRAALYFPAIVAKQHNPLVQALCARLTARGLCPKAVIGAAMRKLVTLAYGVLKSGQPFDPKYAQAASGQA

SEQ ID NO: 275571 - protein, 350 aa, unidentified
MKRNETDGQNQVLYVGIDIHKRTWHVTGVFENGVEAFSVSMEAETAVLVRYLERCRHLRIEAVYEAGYYGYWLHDELEEHGIDCMVTPPSLVPGEYGNRVKTDRRDSRKLAMYGAKGLLKRVYVLTPEERCHRQVLRTRRQLIADRKRKQCQIKAFLAQYGMPLPDTSGPWTRTFVTSLHRIRFADNWLQKCFDQLLNAHESVNRQVQEQTDMIRELAQHEKYRDRVALLRRIPGIGLLIAMELLLELQDVARFRTGDELAAYVGLTPSQYSSGDHVRMGHITRIGKPELRGAMIEAAWVYVRKDKHAAETYATIRTRAGGKRAIVAMARRMLLLSRSVLINRTSFVPAV

SEQ ID NO: 275572 - protein, 363 aa, unidentified
MAKRGPHEGGLTASEEKRSHATYVGLDLSVKQTSVCIVDKAGKVIREVKVATEPMAILAVLTEEALAIERIGLEAGPLSQWLYSALAEAGFPVICVETRHMKAALSAQLNKSDRNDARGIAQMMRVGLYRAVHVKTLASQKRRMLLTSRQLLQAKALDIENDLRGTLRNFGLKVGMVGTVKFEARIRELVADHPDLAAIVEPLLIARRVLREQLGVLHRQLLEIVRQDEVCRRLMTTPGVGPVVALTFRATVDVPSRFTSSKAVGAAFGLTPRRQQSGEIDRMGRISKCGDAMMREMLFEAALVLMTHSRKWSWLKAWGMKIARHRGMKRAIVAVARRLAVIMHRMWMDGTEFRWTREEAAAA

SEQ ID NO: 275573 - protein, 376 aa, unidentified
MAAQIFKYSVGCDISKDAFNVCILEVSQDMESKVKASHKFKNETKGFKEFDAWVKKHKRHDVQTSFYMEATGVYYENLAWYLFVQEYNVYVLLPYKTKHYLKSIGIKSKNDKIDAQGLARMGAEQKHNPWRPHSKSIYILRALTRQHESVTKLKTSLQNQLHANEYSAVRNAIVKKQLNATIKLLEKQLTELAGEISKLIDADEKLYEKYRHIESIRGISKLSWATIIAETSGFETFENQRQLVSYAGYDVVENQSGKHVGKTKISKKGNSRIRRILYMPSLVSVRLKEPALFNLYQRVHERTGIKMKGYVAVQKKLLVLIYHIWKNDKAFQSDYSKTFGEEKSKLLFPFGFSETIKESSPDKRATQDEHSYEFSS

SEQ ID NO: 275574 - protein, 428 aa, unidentified
MDVLVQRCAGLDVHRDTVVATVRVPSEGPGRRRRAQHTRTFATTTAGIRELGNWLAEHRVTRVGMESTGVYWKPVYYLLEDQLEVWLINAEHLHNVPGRKTDVADSVWIAQMVEHGLVRPSFVPPPPIRVLRDLTRHRRTLVEERTRVTQRLEKILQDAGIKLTSVACALLTKSGRAILDALLAGQTDPEALADLARGRLRSKIPALREALAGHFRADHHGLLVAQMLAHVDFLDAAILDVDATLTEAAAPFAATLARVRTIPGISHRTAIMLLAECGADMSVFRTAGHLASWAGICPGNNTSGGKNRSGRTRHGSIALRTALTEAAHAAARTKNTYLAAHHAHIRGRRGLPKAIGATRHDLLIAYWHVVHHNVDYADLGPDWAQRRRSTEYRTRRLIHQLEQLGHTVTLQPSPQTTGLRPETARRVT

SEQ ID NO: 275575 - protein, 399 aa, unidentified
MTVINPTAAGIDVSDTEMMVAYPISPEQLEIRVFGCFTRDLHSIANCLKENGTTTIAMESTGVYWIPLFLLLQEYGFEVYLVNAKHVKNVTGRKDDESDAEWIQKLHSCGLLSASFQPDNMERTLRSMVRHRKNLVRTSSTYLNRIQKALELMNIKLHTIISDIDGKTGLLILEAILAGERDPEVLADLRDKRIKASREDIIKSLEGHWTTEHLFELGQCYQLYCTHRQMIDECDKEIEKQLVIQIASKNEGVIPDIPKVKRKVSGKHKVKFNLTADLKEILKVDVTEVFGINELSALTILSEVGCDMTKWKTEHHFTSWLGLAPNTKISGGKVMSSRIMKKKHHAGQAFQMAANGLYNSKSPLGDYFRRLRAKAGAPKAVVATARKLAIIYYKMVANK

SEQ ID NO: 275576 - protein, 411 aa, unidentified
MEVVYACCAGLDVHKATVVACVRVPGPRPGERRGETKTFATTTGGLAELGDWLRGHGVTEVAMESTGVYWRPVYAGLETRVRVMLVNARHVKMVPGRKTDVRDCEWLAQLLECGLLRASFVPPRAVRDLRDLTRLRKALIRERGHQVTRIEKTLELAQIKLGCVVTDLMGKTGRAILPALSTGIDDPDQLADYAQGLLRKKRAALREALAGRLTPPYAFLLQQHLALIDTLDAHIATLDARIDEAMRPFADAAALVQTMPGVAIRAAQAILAETGMDMVAFPTSAHFASWARLCPGNHESAGKRQPVSTGQGATWLRATRQESAWAAIRTKKSYYRALYHRLKGRGGAKKAVVAVQHAMLIALWPMLKHRVPHADLGADYFDRRNTERARRHHVRRLERLGYNVVLVESVA

SEQ ID NO: 275577 - protein, 442 aa, unidentified
MEVLVSRVAGLDVHKDSVVACVLSGAADGPVSKVVRTFGTTTRDLLELKDWLESLGVQRAVVEATGVYWRPVFNVLQEDEELDLVLANPYRIKNVPGRKTDVLDAEWIAQLARHGLVSASFVPPRPIQELRDLVRYRKKLVIALGSEKNRIQKVLEDANIKLGSVVTDILGDSSRAMLEAVVGGESDPMRLSDHARGKLCRKREALQLALQGRPTAVHRFLLGTILKHVDFLEGAIGSVEAEIQHRLEAHTDAVARLCTIPGVSDTVASGLIAEMGADMSVFPSADHAASWAGLAPGSHESAGKKRSARTRRGRGWLKSLLCEAAWGAIRTKNSYLRAKFHKLRARRGPQRALLAIARKILVAAYWILRTGQTYHELGTTSTDSISSEDKQPHPRPGDSRLRCARDSAWRDEPRSRHALNRRFRVSLHLPQEREITLPRVRH

SEQ ID NO: 275578 - protein, 302 aa, unidentified
MVVVAAVAEEVADATGAAVELEGRKFGTGARERNQLVSWLPQHPVREVVLEATGQYGKPVWLDREPHWEKRPLAQAQSNRAPQGRQNDFRDAQRLGRRWLAGELMLSFVPEPEQRTWRWMTRGRLPLVRERVRLPNQVEALLEEARIKLSSVISDLLGVSGRRILEALSQGETDAVKLAELGDDRLRCTQEQLADALRGSPEPSHRALLKLHRERLKLLDQQIDQLSQRSATALKQHQDAVVRLAEVPGFGIESAQQRIAEVGVDAEAFPSAGEFASWCGACPGSAVSAEENYSSRCPKGNR

SEQ ID NO: 275579 - protein, 345 aa, unidentified
MEHFAGLDVSVKATSVCIVDDTGRMVREVKVASEPEALLPVLTNPIYRFKRIGLEAGPLSQWLFSALAEAGLPGICVETRHMRAVLQAQINKTDRNDARGIAQMMRAGLYRPVHVKTLRSQKLRMLLTHRKLLQSKAIAIDNDLRGTLRNFGLKVGVVGALRFEARIRELVENLADLAELVEPLLIVRRALREQIGILHGRLLAIVRNDDVCRRLMTVPGVGPVVALTYRATVDVPARFRNSKAVGAVFGLTPSRYQSGEINRSGAISRCGDEMMRAMLYEAAHIMLVRLAKWCWLKAWAMKIARQRGMKKAIVALARRLAVILHRIWVDGTEFRWTREQAAAAA

SEQ ID NO: 275580 - protein, 496 aa, unidentified
MGCCALEGGDAVSAIPIRNLMNCAAQPFRWRQQEELEMNPKRSKSRHGRKMPMVHPNAAAIDVGATMHMAAVRADRTPEPVRSFGTFTADLHRLVDWFTQCGVETVVMESTSVYWIPVFELLDARGFTVFLVNARDAKHVPGRKTDVSDAQWLQRLHSYGLLRASFRPKGQIAELRSYVRQRERLLEYAASHIQHMQKALTEMNLQLHHVVADITGTTGLRIIRAILAGERDPQALAALRHYSCHSSAETIAKALTGSYRAEHLFALEQALALYTAYREKASACDVRIEAVLKELSIHRGRDHGAVPPPRRRHRTDQVNALAFDVRAALFALLGKDITAIDGLGAYLSLKLIAECGDDLSSWPSAKHFTSWLGLAPSNKVSGGKMLSSRTRRSGGRAAALLRLAAVAVGRTDTALGAFYRRLSSRIGKAKAVTATARKVAVLFYNAVRHGMEYVDPGASSYETRYRTRVVNNLHRRAKAFGFVLQPLEPKAGAAVS

SEQ ID NO: 275581 - protein, 415 aa, unidentified
MALKIVYKVCCGIDVHKTFVVACIASTNKQGVTTYKSHRFSTYTKGLKELLQWLLESNCKDVCMESTGKYWIPVYNVLEKDCSIVLAHPKYVKAIRGKKTDKKDAKWIADLFKHDLVAGSFMSPADIRQLRDLMRYRYKLTCFMSSEKNRLQNCLTVSNIQLGNVVSDTFGKSSKRILDKILENPLDTSFDIEPLIHGSMTDKIPELELAIDGYITPSQAGKLKIIKKHFEDLESRKTELEKLILALAGPYQQELDLILTAPAFNNIFSAITVISEIGVSMESFPSAKHLCSWAGLAPTNNESAGKKKSVRVSKAGCYIKPLLVQCANSVVKSEKHPEIRNRYLRLRKRRGHKKAIIAIARMLLTALYNMLKNNEPYNAELYRKSDILPADREITVEQAVLIAKYQGYRIKSATE

SEQ ID NO: 275582 - protein, 514 aa, unidentified
MFKKPDSNQGLNVKSNRLSLLAFEFNGDTFIVIPIGIISKLVVTFLGAYFIIFKKQTIMKRKQISLEVVNPNAAGIDIGSRSHWVAVGQNAQDVKEFGVYSQVHQELCEWLKKHKVTTIAMESTGTYWQNLFSSLVVFGFDVILVNGRQTKNIKGQKTDILDCQWIQKLHTLGLLSSSFLPDSTTAVIRTYSRHRQNILKQSASAILKMQKYLRLMNMRLDVVVKDIVGLTGTKIITAFIAGEKSGKVLAQNRHYNCRKSEEEISKALQYNGREDYYFALKQEWETYLHLQKQIDQVDVQIKRHLEKVIDTDDDKKQHIASNKPYKRKNKNTIRNTDMNQLSYQYFEGVDLMAIEGVNDALLMAFISEIGLEGIKKFESSKQFTSWLRLAPNNKISGGRVLSHHLPKGSNRLKVALRQAANTIGNLKDGHLSDFFRRINYKKGRATAISATARKLAVIIWNMLTKGIPYHPPTEYLFLDQKRKLKMLSRIKKNIVKFDIRPEDIGLSKILNIST

SEQ ID NO: 275583 - protein, 346 aa, unidentified
MNITQVGIDLAKSFFQVHAVDARGKVLLRKQFKRSQVAAYFAQLAPCLIGMEACGGAHFWARKLTELGHTVKLIAPQFVKPYVKTNKNDAADAEAICEAVGRPNMRFVPIKNTEQQALLGLHRARQGFVIERTAQVNQIRGLLTEFGLVIPVGIRSLERKLPDILEDAENGLSGVSRALFARLFEHFRALDRQVAELEREINAWHREDAASQRLQAIPGIGPLTASALVASVGDAKVFHNGRQFAAWLGLVPRQNSSGGKTNLLSISKRGDTYLRTMLIHGARSVLLHLKSHPDQADGWLARVATRRNPNIAAVALANKNARTVWALLAHGRDYQAGYRSVNPMAA

SEQ ID NO: 275584 - protein, 416 aa, unidentified
MKQEAEEFAALIGIDWADQKHDVCLRVCGSEKLERSTVDHTPEELENWAMMLRERFGGKPVAVCVEMERGPLISALLKYDFIVVFPVNPQTLAKYRQAWHPSGAKDDPTDAELALEVLHKHRDKLKKLSLQSAGMRALQRLVEDRRRMVDERVRLSNRIVAALKDYFPQVLQWFEDRGTVTFCDFVEQWPSVEESKRARRARLQAFFHEHNVRSAARIEERIELIKSAVPLTTDRGVVVPAKLIVSSLLPALRAMIEAIKVYDAEIEKQCTNLSDYRIFQSFPAAAEVFAPRLLAAFGEDRGRFKSAHAVQCYGGVAPVTERSGNQKWVHWRWASTTFVRQTLVEWAAQTIPHSYWAGEFYRRHRERGGTHQGALRALAFKWVRILYRCWVNKTPYDESRYLKHLRARNAPLVTSN

SEQ ID NO: 275585 - protein, 346 aa, unidentified
MMIIGCDFHPSWQQVSWLDTETGETGEQKLVTAAGDAERFYGSIEAPALIGMEATGNCHWLVDLLAELGHELWVGDAAQIRASCVRQQKTDRRDAAHILTLLVEARFPRIWMPSREVRDLRQLLLHRYKLVIIRTRVKNELQHLCLNQGVQRKHKLWSKAGQQVLRELPLQLWAARRREDLLQLMTMLDEQIAPLDQAVKEEAQRDKMALLLQTQPGVGAITALAYVLTMGDVSRFPRGKQVASYLGLIPREHSSGGRQKLGAITQQGNRMLRMLLVEAAQIAVRHDPQFRKEYLHRCHSKPKGVAKVAAARKLAVRLYWMLRTQTAYPAVVRIESSSRVPLVGAS

SEQ ID NO: 275586 - protein, 422 aa, unidentified
MSFKILKNNCCGLDVHKTWIYACIGITDSFKRTEYKQARFSSFTKGLQELCLWLAKYNCIDVCMESTGKYWIPVFNLLEDQINVTIANPKWVKAVKGNKDDAKDSKWIGDLFRLGLVPGSFIPCKEIRILREYTRYRFKLTCCKRSEKNRFQNAFTVCNVALDAVVTDMFGKSASSITDYLITSDEFDPETCKSFLQKSLKKKADAVIESIEGYQMTSSQKERMLMVRSHLEFMQQSIDSLDSKLDELTAPYENAVSLLCTIPGVDRASAITIISEIGTDMTQFNSSKRLCCWAGLTPGNNESAGKKKSVRITRAGVYLKPALVQCAHAAVKSTATPYYKNKCERLAKRRGKKRAIIAIARMILTAVYHMLSTRETWNPCDLYKIDMPKEMQDKQKAKAVKQALKLLISQGVISPESAPTAV

SEQ ID NO: 275587 - protein, 474 aa, unidentified
MKRNNKSKKRNESNSGNNQPPESEAKQLGGTGLPRIRPMVAGMDVGSKEHWVCAPTGKGGTEMRVFGANTPELVAMADWFQRLGVESVAMESTGVYWIPLFELLESRGIEVILTDTRHLTRVPGRKTDFEDCQWIQLLHSCGLLQGCFRPGEAICQLRSLVRNKAVLVAERSDWLRRMQKCLDQMNVRVHRAVSDIDGTTGMAILRAIVAGERDAVKLAKHRDPRCRKSEASIARELTGNWRWDHLFNLEQGLKMYELIEERIGDYQREIQKQMQALRCKQADGNPLQAVKNKEKAKAIKRRGQEPMREVLHGLAGADLTTIDTIGVETAEVVLSEYGADLSRFPTEKQFVKHLRLAPRQSITGGKPMRKGKGGKGATRTGNALRMAATVAHHSRTAIGAYYRRLAARKGSDVAVFATARKLASLIYRMLRWGQPYVDEGVAEYEKRYQAARIRHLQAQANQLGFQLAPQTTTA

SEQ ID NO: 275588 - protein, 400 aa, unidentified
MKYILVLDVAKGKSMFMLSSDVGEVLLEPTEYTHNKTNFELINSNIKKLNIKDNLTVVMEATSIYHKAPERFFKENNYHVIVFNPLIGKEITNTIRKTKTDKQDCIKLTNLFWKGSIPDRNYTEDVIYTKLNELSRQYYHLDEGLNRHKNRYKELLHLCFPEFELCFKDGKIYDLTALNFIKEFPHAYIIKEKRVDALAYNMANTNNRHLNYYKRKANTIKEYAQNSYPGVNKNSKDVDNLKQLVKIIIDITRQKDEVKNQMIELAKQTKHFNNIVSIFGIADLSAALIIAELKDITRFNNVKQINASCGLDPTIVQSGKSINYHGPISKRGNRYARKILFNCSRNIVTISAKCDKENPIYVYYQKKKQEGKHYYACLTACSTKLIRIIYALCMNNSTQN

SEQ ID NO: 275589 - protein, 455 aa, unidentified
MTSAKKAKKIHTKTGVELKIVNPNAAGIDIADTEMQVCVPADRDGDNNRRFGSFTCDLKLISEWLQACGITTVAMEATGIYWIPLYFKLEADGFDVLLVNARDVKNISEKKTDEADAEWLMLLHSYGLLKPSFQPENSARQVRNLCRHRNNLLRAAAKEVQHMQKTMEQMNIKLTNVLRDIVGKSGKAIISAILSGNHDSEFLAQLADRRCKRSKAEIALSLEGTWDADHLFELKRSYELYEFYQKKVEECDWEIEKLLKQFTAKIEVSKTKLVRCNKKICKKNTIGFDVESYAYGIWGVNVMQIPGMSANSVLQLIGELGSDFIEKFETPAKFCKWCNIVPNNRISGGKLISSRVPKRKNPVGQVFRMCANATRDMKNPMGFYFRRLKSRGGHMSAIVATAHKMAEIFYIMVKNKVAYDENKVGLSEEELLKRKIERAQKTLETLNAKLYGTAS

SEQ ID NO: 275590 - protein, 363 aa, unidentified
MAKSTKTKRMMIIGLDLGDRTSDYSVLDEQGSIVEEGRLATTQAGLSRRFGALPRARIAMEVGTHSPWVSRLLKDLGHEVLVANARKLRLIFENRRKTDRVDARLLARLARFDPVLLASLEHRSESVAADLAVIRARDALVRVRTQLVNHVRGAVKSSGSRVARCSTETFPKNAAAHVPDSLRQALAPVLGVIEQVSTKIGELDEHVERLAAQKYPETQLVEAVPSIGALTALTFVLTLQQPDRFANSRAVGAYLGLVPARSQSGASDPQLRITKEGDMYLRRLLVQAAQRILRRSGPDCDMRRFGMRLMERGGKNAKKRAVVAVARKLAVVMHSLWSSGEVFEPLRQASLESSSITLSGAAA

SEQ ID NO: 275591 - protein, 338 aa, unidentified
MYYTGIDLHKFTSYLTTINSDGHIVKQANIKNVDYNFLQYFSDLSGEHLTTVESTCTWYWLNDLLTSINIPLTLAHAKYVKAIAYAKVKTDKVDSHILAQLLRLNFIPQAHKISNENRTLRDALRARLKIVQRCTSVTNSMALILAKYNLTEPEQLQSIPKLQYEQLSDHASLLKEQMLTLEKSLYPYLIPNDDIQRLLWIPGIGKMNAFTIVLEADDINRFADVKNFYSYCRLVPSARNSAGKSKQRSSKDGNRYLKIVFTDAATHAVQYYSEIRKYHNSLLRKKNKQIAKTIIAKEIAEIVFHILKNKTNFNNKFKGVELQHKKSLQWPRVVSPYA

SEQ ID NO: 275592 - protein, 310 aa, unidentified
MDCYIGIDVSKATLDVASLPNGESWTVTNDDLGLAELTPRLVALTPVLVVLEATGGFEMLAAITLAKVGLPVAVVNPRQVRDFAKAMGQLAKTDALDAGILAEFAQRVRPKPRPLPDEAAQLLDSLLTRRRQIVEMLTAEKNRLGFARGPVKRDINRHIRWLEKRLADVDGDLQDAIDASPLYHAKAALLRSVPGVGPVTTLTLLASLPELGQLSRHQIAALVGVAPLNRDSGTQRGKRMVWGGRAPVRAVLYMAALVGIKHNPVLRQFYERLRTAGKPFKVAVTACMRKLLTILNAMVHQNRRWDPQHP

SEQ ID NO: 275593 - protein, 324 aa, unidentified
MSSHEIVGIDVAARKLVMIGERLALAEYENTAAGRSKLAKALSRSPRPVRVVLEATGIYFLDLACELAAAGIAVMVVNPKATHHFAEAILQRRKNDPVDAAMLREFGRRMDFVPWQPPRHELFAFRALTREAQALSKAVAAAKNRLHAITATQLAPDTLIRALERQIAQNQALVDELVAAALAETKTNRELARLVARTDSAPGFAVKAAVLVVGELAVLPPMTARQWVAQAGLDVREECSGTSLARRPRLSKRGNKRLREALFYPALTAARCCPLAGAFVERLVAAGKTRLQAIVALMRKLLHGLHAMWRNDEDFDAEKLFAPA

SEQ ID NO: 275594 - protein, 408 aa, unidentified
MESQIIFGIDVSSKSSTVCVVNDRIKQGESFRISNDSFGYQKLYEQLNQYLITPLVVFEATGVYSLSLQAFLEDYHIKYLKLNPLKAKKLMDNNLRHNKTDKVDAYRLALIQFNAPQKLRDPQPREYHELQNASRYYEELTRSIVTTKNQLHRNLQSTFPQIEEILSHPSGRIYWALVSLFPHAGYVLEKNETQVTQMLNSISGIGQQRARYLTTRLYAFAIEAYPYDSKDSIIVRAIQRNISNLFSLQQERDYVINYMEKLAKAVNARALSIYLSIPGVARITAVRLVAELGDLRRFSTSAQIDAFVGIDPGRYQSGEKDSSLGITKHGNHIARKILYRVIIQMETVKATQPCHITDYYDKKKRSSNSQGYKKIAIASVHKLIRTMFALIKHDQLYDYNIATKNKRL

SEQ ID NO: 275595 - protein, 423 aa, unidentified
MDIMFERVAGLDVHKAMVVATVRVVSGGKVERECRSFETTTSALLDLLGWLTVSRCTHVAMEATGVYWKPVWSILSDGDFELILANAAHIKNVPGRKTDVNDATWIADLLACGLIKASFVPAEEIQDLRSLQRARKQLTREQIRHTQRIQKTLEEANIKLDTVISDIMGLSGRKMIEAMIEGVRQPSRLAALADRRLKASPKQLYDALHGRLTDHHRFMLKLYLSQYDALDKAIIEIDQEVAAAIQRMDAEVEASNATFRSRINLLSTMPGISALSATAILAETGTDMSHFATAGHFVAWAGLCPGQNESAGKRKPSRLRKGAPWLKTMLVQCAWSAVRKKDSYYRAQFNRLKARGGAKKAICAVAASMLTAIYHMLTHGVQHQDLGANHFDRRASDFKAKRLVAQLNKLGFEVALQPLEKAA

SEQ ID NO: 275596 - protein, 351 aa, unidentified
MGKHRLAFVAFDSAKNKHAAAIADDGRDGEVRYLGEIDNSPDAVRKLVAKLSRQYERLHFCYEAGPTGYGLHRQLTELGHVCDVVAPTMIPKRSGDRVKTNRRDSVTLVKLLRAGELRAIWVPDSVHEAVRDLTRARETAMVDLKTKRQQLLSFLLRHGRSFPGGKHWTKMHERWLAKQTFAHPAQQIVFQDQLEAITTAQARLAALEQQLREIVPTWTMASVVAAYQALRGVSFLVAATFVAEVGDVRRFATPQQLMAFLGLVPSERTTGDTVRRGSITKTGNYRARRVLIEGAWTYRFSARVSETLRTRLKDLPLSVRAIAWKAQVRLCARYRRLIAVFRHGIRTPYSG

SEQ ID NO: 275597 - protein, 359 aa, unidentified
MQTQNKMKTPDFTGQNIYVGIDTHFKTWMVSIYSDEFELKTFGQEPDVDRLENYLHKHYPNANLKLAYESGFCGFWIQRSFAKKGINCSIVHAADVPGSNKELIRKTDKVDSRKIARGLKNNELNYIFIPDEQLESDRQLLRSRTRIVRDTTSVKNRIKAFLKFKGISIPDEYRSHKWSKKFIVWLQNIEHNNISSKTAFGSYVDELLFLMQKQMQLNKSIENLAKSENYLDNIHLLMTVPSIGLLSAMTILTELGDINRFQKQDHLYSYCGLTPDCHSSGDIERIGKVSRRGNIFIKTVLIECAWVAVRKDPALLLYYKQQLVKMDRNKAIIKVARKLLNRIRYVLKNKAAYQIGIIE

SEQ ID NO: 275598 - protein, 314 aa, unidentified
MKDISTFVGIDVAKKTLDVATLPATTPRTFSHDANGRRELLDNLPQPETCLVVVEATGGYERLLVADLLDAGYLVAVVNPRQVRDFAKALGILAKTDRIDAAVIARFGQQVKPRPLAEVHEKQGELDQLVTRRRQLVVLRTAEKNRFTMAHSKPVKRSLQLVIDTLNKEIKRMEKEILALVESDDQWRGKADILSSVPGVGDVTAATLIAEFPELGQINRQQAAALAGLAPFNRDSGKFKGKRTISGGRRTVRTALYMAALSAKTHNPLIRKFAERLKAKGKLPKVILTACMRKLLVILNTMLKTNTLWNPRIV

SEQ ID NO: 275599 - protein, 363 aa, unidentified
MFTERTSVGLDVHARSISAAAIDGVTGELFQSKLTPSFDHIRSWMSGLPGPVAAAYEAGPTGFGLYRQLTAAGVRCEVVAPSKLQRPSGDRVKTDAKDAVHLARLLRLDEVIPVAIPSVDQEAARDVVRAREDCRGDLMRARHRLSKLLLRNGIVYYGGAAWTGAHDLWLRRDAAPQLTAASTRVAFDSDYDTVLTVAARRDRLDESIWRLAADSEFTPLVRRLGCLRGVGTLTGFALAVEVGDWQRFTGRTIGSFVGLVPSEYSSGASRSQGAITKTGNSHVRRLLVEAAWHHRARYTIGKTMRDRWDLAPAPARARGDAGNRRLHERWVRFLDRRKRSTVANVAIARELAGWCWSLAVMDE

SEQ ID NO: 275600 - protein, 316 aa, unidentified
MKKNYYTFIGIDVSKEKLDYCIISNDTINSSPQFGIIGNTSKEINKFIASVKKKNINFEHVLFCLEHTGVYGMPLCYWLQSAEAHYWVVPALEIKRSKGIARGKSDKTDSRDIANYAITHEHELQLSKIPENDIVELRLLLAEREKLIKSIMIFGTTSENKNYLAKEVLKATLKNNNTTITFLKKQLKNIDKLIEEVINRNELFKHQNELLRSVPGIGQQTSVILIAYTHAFTLFKNHRQFACFAGVAPFEYSSGSSVRGRTRVSHLANIKIKTALNMAALSAKKYDQQIKLYYERKVQEGKNKMLVMNSIRCKLS

SEQ ID NO: 275601 - protein, 351 aa, unidentified
MLIIGVDYHPSFQQIAFLDQETGECGERRLNHSDGEAERFYRDLKQRGVSVRVGMEATGYSRWFERLLAELRIEVWIGDAAEIKTKRVRKQKTDRQDAQLLLKLLLENNFPRVWVPSPENRDLRQLLWHRHRLVQMRTRIMNQLQALAMNEGKRWKKKLWSEQGRAQLEKLQLAPWASRRRQDLLELLDRMNPTIEELTAAVEQEAKKWPDVLRLMTHPGVGPLTALAFALIIGTPERFHCGKQIGSYVGLIPSEDSSGGQQRLGHISKQGNALLRYLLVEAVQAAVRCDSDWRRRYLHLAMRRERQIAKVAMARKLAVRLYWMWRNGWEYSQSVEFGSHAGQLVTGHGVN

SEQ ID NO: 275602 - protein, 358 aa, unidentified
MQTQNNKLSFKNQDLYIGIDVHKKQWTISITHMNRTIHKKTSIDPSATTLATFLNRRYPQGNYHAVYEAGFSGFQAARELKELGVNCIVTHPADIPTKQKERINKNDHVDARKLSRSLSNHELEGIYIPQVVSEEYRYLARYRYRLIKDQTRMKNRIKSTLYQFAFKMPLEFEDRRWSGSFIDWLSSLRFETEYAQSAFDDQISQLKQMRHRLTQTLKTMKTMVKEIDPNSVYSFLLSVPGIGAITAVALLTEIMDINRFEKTDQLISFIGLAPSVKSSDEKETRRGLTPRRNKHLRSMMVEAAWKAAAIDPVLTMKFGKLCRRMHRNKAIIRIAKMLLSRVHYVWKNQKTYIEGVVK

SEQ ID NO: 275603 - protein, 360 aa, unidentified
MASPTLAQVCKGRAPDVVIGVDTHKDVHVAVALAPNGGRLGEHRIPTTRKGYDDLIVWSEEFGSNPVYAIEGTSSYGAGLTRELLDAGFPVVEVNRTDRSVRRRLGKDDAIDAEAAARAYLAGTATATPKTGADQVEMIRMLKVAKDSATEGKTCAINQIKALLVTAPAALRERLGNLTRRPLIDACAALRPGVLDGPMAAAKRALRTLARRIQSLEQEIEVLLSDLDSLTQAVCPGLRQTYGVGVDSAATLLTAAGDNPERFRSDAGFAALCGVSPLPASSGKTNRHRLNRGGNRQANAALHRVAVVRLRWDEQTQAYAARRTEEGLSKPEILRCLKRFIAREVYRILLGSPPTRTRGA

SEQ ID NO: 275604 - protein, 415 aa, unidentified
MEVVNPRCCGLDVHKKTVVACIITPEKKETRTFSTMTNDLLKLKEWLTEYSVTHVALESTGVLWKPVYNLLEGDFTVLVVNAFHIKTVPGRKTDVKDAEWIADLLKHGLLRGSFIPDRGQRELRELTRYRRGLIQQRADVVNRIQKVLEGANIKLSSVATDVVGASGRAMLEAMVQGTDDPRVLAALAKGRMRNKITQLEEALQGLVGPHQRMLLASQLRHLTFLDEEIERLDMEVAERMRPFEETMERMDDIHGMGRRSSEEVLAEIGVDMSRFPTVAHIASWAGLCPGNNESAGKRKSGRTCHGDTWLQSILVQVAWAAARTKNTYLSALYHRLAARRGAKRAIIAVAHAILTIIYSMLRNHSHYRDLGATYFDQLNRQSVVRRSVHRLESLGYSVTLNPAPSPAVPEPVFSE

SEQ ID NO: 275605 - protein, 387 aa, unidentified
MTIPAQVFEIIPRHYEIFGGLDVDKKNMAVTFTDHEGLMRSLRVPYSSGHLLHYVRKHFPDRRVAFVYEAGPTGFGLHDDLVTAGYRCLVVAPSMVPTAPGNKVKTNRLDSRKLSVQLRGGQLRGIHVPGPRYRELRHLVQLRDTQVGQLTATKCRIKSLLLCEGLAFPPAPESSQWSARVLDELHELPCSQAVRFKLDQLIGTLYFHFNSAGAAQKQIRYFCQNDSELRQSISLLTSLPGIGVIVATHLVARLGDWREISNVRQIAAFLGIVSSEHSTGEKENRGPITRAGDSRLRNKLIQSAWTAIRKDPELRAFYLRIYHRHPKKVAARKAIVAVARKLTTRIYAVLKEQRPYVLRPENFAAPLTAEETVGPRERLDSPQNEQP

SEQ ID NO: 275606 - protein, 378 aa, unidentified
MKRILKIGMDVHTTNYTLCAMEPIIGEDDRVFATIKVTPDYKNILMFIENLKMKLGLNDEYNIQCGYEAGCLGYSLYNQLTAAGVKCVILAPTTMLTPQGVRIKTDMRDAYMIAQCLSYGGYHVVYIPTETDDSVKEYLRMRNDHKLALKKIKQQINAFCIRHGCCYDGTKWTQAHLKWLRKLEITNELYRETLNEYMASYEEQEAKIERYDKRIEEIAEQTKYHDKVKKLECFLGIKTHTALSLIVETGDFERFAKGNQYAAYLGLAPGENSSSDSIHRLGITKAGNSHLRQLLIEASGGICKGAVGHKSKTLRARQNGNTAEAIAYADRANTRLRSRYYKFIRHGKKRNVAVAAIARELACFVWGMMTDNIEMRAA

SEQ ID NO: 275607 - protein, 418 aa, unidentified
MKVVYPTCCGVDVHKKFFVATIIKTEGIEPKYSKKRFSTFNNDILRFKQWLVENDCFDVCMESTGKYWVPVYNLLEDKINVVVASPKWVRAVKGNKDDVKDSKWIGDLFRLGLVPGSFIPPKPIRILREYTRYRYKLVSCKSSEKNRYQNSFTVCNIALDSVVSDMFGKSASLITDYLIKTDSFDPEHCKTLLYRSLKKKYDAVVDSIVGYEIAPAQKERMIFVKAHLEYIEKSLEMMDEGIDRLVEPYENHISLLSTIPGVDRRTAITIISEIGTDIKQFSGSKRLCCWAGLTPSNNQSAGKKKSVRITRAGVYLKPALVQAAHAAVKSKDSPYYKNKYERISKRRGKKRAIIAIARMILTAVFHMFKTGEVWNPVDLFKVDMPPVLMEKQKQKVIKNAIKLLASQGIAVVEIQPMA

SEQ ID NO: 275608 - protein, 401 aa, unidentified
MRFAGIDVGAERHMVAMVGEQGEVLCRSSPFGEDASGYAHLFELLGPPGGCLLALEATGHYWRNLFVALLAKGYAVAVLNPLRTRRFAEEELQRTKTDAIDALGIARFAAQKRPPATQLPDIVTEELRELSRLRDRLQEDFASRLRQLHRAVDLGFPEFTRHVRTLESQLANTILSRYPTAASFRGASVKKVGRIVYDGSHKIGEELARALIEAAANSVGSHHSEPYRLRIEYLCEDLRVLRRRLKDLARDIESKLDDHEVGKLLTTIDGVGPLTAACLIAELGDPARFRSAAAIASYVGVAPRLRQSGKKRFSGSPTIPFGNARLRKALWMVVLNAVRCNPWLRQYYGRLRAAGKPGKVAVIAAMRKLLAAVWSVAIHRRPFVPHLSPIPATADAVTNNV

SEQ ID NO: 275609 - protein, 343 aa, unidentified
MGGSRIYVGVDVHKNFSFICAMKENGEVILEKKVRTEDLEKFLEDIENKTIILEPTTTGINLARKLRKNNEVLLSHPYKTKLIAESKKKTDKVDARVLADLARTNFLPTAYLPPDEIMELREIIRERIRLKKLSTSIKNRIHSILAKNGIKYEGNLFNSEGREFLNSLNNEWINRYLRILSSIENEIKEIDKEIRQKCMENEETMLLTTIPGIGFFSALLIYAEIGDVKRFPNSKKLCSYAGLVPSIRQSGNKVITGKITKEGNKLLRWVLVQCAFVAIRNDEKFRNFYERVKQRKGPQKAIVATARKLLTVVYAVLRDKKPYIIHTPTNYYGEECTPVTNWA

SEQ ID NO: 275610 - protein, 350 aa, unidentified
MSLELQSLLPYPNSCLGASPHQQERDTKMAMRSFCGIDVSKDRLDVMVLPEQQCSSARNDAAGWFQLIEWLRGFSISAIGLEASGGYERGIMRALLAAGMSVRQINPFKLRQFAKASGVLAKNDRLDARMIASFVAVMPTNPVQRQGPAAERLAEMVTVRRQLSDAKIAAENASRMLENAMLQRLSRRRIARLAADIAEIDERLVEIVMSDAALARRYRLLTSMPGVGAVLACTLIALLPELGQLSRTKIAALVGVAPYDFDSGKLKGMRCIWGGRMPIRNVLYMAALSASNWNPRFKAFHDRLTATGKKPKVVIVAVMRKMITMLNAMVRDDMLWAERHSGRHNMPTAR

SEQ ID NO: 275611 - protein, 416 aa, unidentified
MNAVGIDVSSRKSTVAVLRPLGEVVCLPFDVTHDIAGLASLAEKLKAIDGETRVVMKHTGRYYEAVAKALHEAGFFVCAVNPLLIKEYGANSLRRVKTDKADAVKIARYALDNWADLRDFTPMDAIRYDLKTLNRQFQLASKQRTASANNLIALLEQSFPGIRKCFDSPVRSDGTQKWVDFAHSFWHVDCVRKQPFAAFCERYRKWCKRHADLFKLSNAEEVYALAKRAVVLTPKSKVVKVLVQEAANQLISISRSVEVYRAEMDRLAAMLPEYPVVMAMYGVGKSYGPQLMAEIGDVRRFERKQALVAFAGIDPMPNQSGDKNVRSNKSSKRGSPYLRKTLFNVIRTYLQCAPQDEPVFQFLNRKRAEGKPFYVYMLAAANKFLRRYYAKLRDYFASLDTLQPVAPIPTILKATL

SEQ ID NO: 275612 - protein, 359 aa, unidentified
MSKCSTKTQKVYVGFDVSEKKIATFAICGEKTSKDNPEISNDPEAIKQFLKIFPDPKNVCVVMETGTHSLWMSELIRKQGFEVIVAHARDLALIYGTDKKNDQLDAEKLARLAQADRKLLHLVEHMTMERRTDLMVVKSRDLVVRQRVQTINAIRGFLRSCGCKMIEAEYTADSIKKCCSALPAEVKPAIIPLLQHICYCDRIIKDYDRQIRKLCQKYHETDILRQIPGVGELTALAFVLIIGNPRRFKNAQRLCAYLGLVPKQDQSGDTDKQLGITKQGNKLGRRLLIQASHYIMGPFGKDCKLRSFGLRIQARGGNTAKMKSFVAVARKLITVMFALWINPDVPYDPNFKKHGKAAA

SEQ ID NO: 275613 - protein, 392 aa, unidentified
MVVSVGIDVSKDKHDCFILSSEGEVLVDVFTIPNTMDGFNCLLQRIQDCTTPQGKMKVGLEATGHYSYNLLGFLLDNGLATYVLNPLRTNLYRKSLSLRKTKTDRVDARTIASMLLSDAGLKPYTDTAYHNEELKSLTRYRFDKVKERAKLKSSIARLVCILFPELEKLVPSLHIASVYALLEAFPGAKQVANTHLTRLKALLETASNGHYKRDMALEIRNAAKNSIGSQMPAKSLELQHTIRLIRELDREIDEIEEQIQSIMDELHSPITTIPGLGFRMAAMILAEVGDFTRFDSPDKLLAYAGMSPSTYQSGQLKNCYPHMEKRGSRYLRYALYNATKYVCHWDPAFADYLAKKRAEGKHYNIAISHAAKKLVRLIFAMEKSRQPYCSAA

SEQ ID NO: 275614 - protein, 319 aa, unidentified
MALIDNNGTVLAQEKDLNDPKAFKKIIKKWERTMGMLPAECLACVEPTGRYSIIAVVALLELEVPTWLVHPTDVLRSLGNIRGKSDKVDALRLCEYGRRFFDKARLFTHGHLRTRELKELLTLREGFVKQKSSHERQIKEVKRFCSAKYQQVHLSVHKAAVVMASRQIKKLDALILQEIKADPELHRLYNLLLSVDGVGPVLAAHLIAITDGFLRFNDPRKLACHAGAAPFQYTSGTSIKGKTRVSKQSHPKLKSLVHMAALGVIQRPGELQDYYKRKRAEGKHAMLVLNAVRCKIIHRVCAVIERGTPYVGYKTSKAA

SEQ ID NO: 275615 - protein, 403 aa, unidentified
MNNVAGIDVSKGKSMVFVLRPFGEVVAKPFSVGHTGSELKELADYLKSLDGETRVVMEHTGRYYEPVARFLHEEGVFVSAVNPKLIKDYGNNTLRKVKTDKADARKIARYGLDNWAELRQHTPMDTIRMQLKTLNRQQSLYAKTKTMMKNNLIALLDQTYPGVNALFDSPVREDGSQKWVDFATAFWHMDCVRNMSLTAFAERYRKWCKRHGYNFSQSKAVEVHTGAQDLIAMLPKDALTKTMVRQAIDALNAVSASLERLKAEMQALAAQLPEYPVVMAMHGVGDSLGPQLMAELGDVTRFTHRNAITAFAGVDPGADQSGTHEAKSTRVSKSGPPELRRALFLVMDCLLKTQPQDDPVYRFMDKKRAEGKPYLVYMTAGANKFLRIYYGRVKEYLESLEEN

SEQ ID NO: 275616 - protein, 353 aa, unidentified
MERYIGMDVHAQSCTLAVVSAAGKRLGLQVVETNGAALKQAVAAIPGTRHVCLEEGTQSAWIYELLKGLAEVVVTVPDGHRGPKDDARDAWALAESLRVGGIKRRVYKDCGPYSELRAAMRSYLMLRDDVRRTKNRLKAVYRSRGLMPPANTPFHSERHLAWARKLPPEQARTAAMLLEQLQLQEALWTKAEERLALASKKHPVVKLLATAPAIGPIRSAQIVATVVTPHRFRTKRQLWAYCGLAIVMRSSANWELDRNGSLVRSRVQQSLGLNRNRSGALKEVFKGAAHQVATQMTTHPLHRDFMRLIEGGMKPNLAMLTIARRIAAAVLAMWKHEEVYEPGKHVSKITAEA

SEQ ID NO: 275617 - protein, 387 aa, unidentified
MTTRANDMGRCLAAFDQDSTLTAVVEMGWSRWLVAGLIPGVERHPKKKMQPDAEDLLRLLKRWRDEAVKGECPINRITVAYEAGRDGFWLARWLESHGVETHVIHSTSVAVSREKRRAKSDRVDAEMLLRVFLGWLRGERGHCSMVAVPSIEAEDARRPGRERETLVAERTRIINRMKADMARLGVHGFKPHLCSAPKKLGSVRTPEGVAIPPNTMAELERDLARLAVLRQQITAIEQTRLERIEAAPDNGPHAMISLLARVLGLGIETADMLVNEVMTRRLRDRRAVARYAGITGSPDESGQRRREKGLAKAGNARVRRGMIQLAWRWLIFQKESALTLWFKARVEGAPRLRKTLIVALARKLLIALWRMATIGEVPQGVVMRPAA

SEQ ID NO: 275618 - protein, 408 aa, unidentified
MSIVFGIDVSSRDSSVCVLQSGATREYKITNDTIGFKTLLIDLKEYAEHPQIILEATGVYSRRITRFLDEYDYDYVLLNPLKAKKEINQGLRRNKTDRNDAYHLALAQDRNQHQPNRKEPEVYHQLQSLSRAYEELTHDIISSKNRLHKYLQLTFPELETIFNNSRGVNYWYLVELFPHCQDVRNLEVSTIAKQIKDFKGYGINRAQKLAIKLKHLADLAYPAVDQDDPERDEVVYYANRLLRLTADRERRSEAMIKLAKTLPNRDLEILMSIPGIAEITAVRILAELGDIRRFSNPNKINAFVGIDPGRYQSGEKDSNLRISKHGNAVARKILYRAIGQIDLAAKTSPCHIADYYERKKQFSQTKGFKKIAIASIHKLLRTVYILIITDQMYDYNVANNNQKDFCRN

SEQ ID NO: 275619 - protein, 409 aa, unidentified
MRYYVGLDWAAREHAVCVVDEQGTVVIRFMVEHSAAGMADLAVRLCKLAPAGELRVAIERPTGLIVDTLVEAGFLVVPIHPNAVKATRPRYSAAQGKTDPGDAYLLADVLRTDGHRFRVLTPLSDETKALRGRVRLRDDLVAQRVALANQLRNLLEQFWPGAAAIFFEVDSPIALDFLERYPTPSSASALGEKRMAAFMAGHAYCGRRSAAELLARLRAAAVGVTGELEAEAKGDCVRALVAVLRPLVAQVHNLTAAVEHAVEAHPDGRIVTSLFRSGRVCAAQILAELGDDRGRFTSAEHLAAEAGVAPITRESGKHRAVGFRWACNKRLRTALTCLADSSRKTSPWAEALYQRARDRGKDHPHACRILARAWCRVLWSCWQKRVPYDANKHAAARAFVPHLDHQEAA

SEQ ID NO: 275620 - protein, 373 aa, unidentified
MTDYSAFVGLDVHKETIAVGVADAGRTGEVRFWGEIANTPDAVANMLRKLGGRHPRIHFVYEAGPCGYGLYRQIMATDHHCEVVSPAQTPRKPGDRIKTDRRDAIILARLSRAGELTPVWVPDETHEAMRDLIRLRQAMVKDLRAARQRVKSFLLRHGRVFKGTSWKRSHRVWLGNQSFAHPAQQIAFQSYLNAADQAQALRDAVDVQIRQFASEWSMAPVVEALQALRGVAFVTAVTVVCEVGDIRRFAKPRQLMAFLGLVPRERSSGETRRQGGITKAGNVLARAVLVEAAWSYRTPAKIGAQMMLRQEGIPQAAKEIGWKAQVRLCGRYRRLMARGKKSPLAITAVARELVGFIWAIAHTTEPVETEGAA

SEQ ID NO: 275621 - protein, 340 aa, unidentified
MDVHLKSWSVTILSETSVLKKYSQDPSPEALFKTLTTSYPDAEYYSVYEAGFCGFWIHDRLTALGVHNIVVNPADVPTMSSEKLRKTDAVDSKKLAVCLRAKQLKGIYTPDAEALEIRSLIRLKNSITKDTTRQKNRIKSQLRYLGIDIPREYLEPNSNWSKRFIAWLKDVQMKTTSGRQTLDLQIRQFEDLRRQKLEITRALRKLSHSEKFEDTLRLLMTVPGIGQATGLALLAEIVDITRFKNSEELAAYVGMIPMCHSSGEHDGTGDITVRKHAILRANVIEAAWVAIRQDPSMQLCFASNCKRMVPSKAIVKVARKLVNRIYFVLKRRQPYVNAVA

SEQ ID NO: 275622 - protein, 358 aa, unidentified
MQTITIEQKLRQKRAPVQAGVTVKFGLDVHAAQITLCRQIDGQVPQPAQKFGWIECVEWIEAHVQAGAVVHSCYEAGPCGYGLHRRLTKLGVTNHVVVPQRWDEQNKRVKTDARDARELCDRLDRYVRGNTTAFSIVRVPTPEQEQRRALGRQRDTLVWERQRCVVRGHGLMLAQGVRAPEDWWKPKVWEQFCQDLPEWLRPQILVWQEAALRLEAEVEAWTHKVVTQTADQPVPKGVGALTHALLAGEVLDWRRFNNRRQVASYTGLCPSEHSSDQKRHQGGITKHGNPRVRHHLVEAVWRLLQWQPDYPPLKKLRAATGKRTRKRLAVAAARHLAIDLWRLNTNQCTAAKLGLKLA

SEQ ID NO: 275623 - protein, 322 aa, unidentified
MAQQTVKFNQVVECACGIDVHQQKIVATVRHSDDKYETREFDAYTSSLTSLREWCKSEGVTHIAMESTGIYWKPVFNVMEEEFEIILVNARHVKNVPGNKTDKKDSRWISKLLLSGLLKGSFIPPVDIRELRDLVRYKRKLVNQAASEKNRLIKILEDCNIKLSCVLSDVNDGVSATKIINDIIKGETSVDKLMTHLHGRIKADREEIRKALEGRITDHHRFMLKIIKDRIEGTEKIISKVEKQIDKAVKQYQVEVDLLQTVPGIGKDSAISIISEMGVNMDQFPNEQHLSKWAGMSPGSNESAGKKKVPEPPTETNISGQL

SEQ ID NO: 275624 - protein, 343 aa, unidentified
MKLHVLGIDLGKTVFHLVGLDSTGKVVIRKRCSRRQLLAFTANLQVQLIGMESCSGSHFLGRALRNQGHEVRLMPAQYVKPYVQTNKSDYIDAEAIAEAVQRPRMRFVPIKTEEQLDLQALHRVRERWVMRRTAVVNQIRSLLLERGLTLPKGRRYVEEALPRILEDAELPLSGSFRLLLAQLKLELEQLSARIDQLDVAILQRAKEDDACQRLTAIPGVGPVTATALFAAVGNGSAFGRGRDLAAWIGMVPGEHSSGGKQTLLGISKRGNSYLRRLFVQGARSVLQQRHRQAPALCSWLTQLLARKHQNVVIVALANKLVRMAWAVLCKGERYRAPVFAMSA

SEQ ID NO: 275625 - protein, 353 aa, unidentified
MTGTKYIGMDVHKESISIAVRNDAGKIVMECVIETKANVILDFIHGLRGELQVTFEEGTWATWLYDLLKPHVTKLVVCDPRKNSRQGNKNDRIDARELADRLYMNKLSSVYHGGAGVRTLKELARSYLTISKDLARVMSRVKAIYRSWGIPCAGKQVYAPRHRAEWLAKITEVGVLRRAEFYYQQLDALRSLRHDIRRDLLAESKKHKASKLLCQIPSIGPIRAALLIALIQTPHRFRTKRALWKYSGFGIETHTSADYRSVKGELQKSRKQVSVRGLNRDCNHDLKNLFKSAATIASVKPGPFQEFYASLLAKGMRPEMARLTLARKIATIVLIVWKRGVNFDAKYLKPQTA

SEQ ID NO: 275626 - protein, 412 aa, unidentified
MTITCGIDWAEQRHDVAVLDHDGRLLARRRIDVGIGGFTELVGLLSELADDQPAQDVLSVPIAIETDKNLLVVALQAAGFTIYPINPLAVARYRERHGHSGKKSDAGDARVLADILRTDAHRHRTLPAVTEHGSTVKALARQHQEAVWAMQQTANRLRSVLLEFYPQALQAFPNLLHKAAQTVLAAAPTPAHGARLTPKRVVALLHRCGRRNDPSLVEHILTALKAPALRQPAEVEAALGVSAQTLLTVLAAQQAAVETLEKALGERFDAHPLAAILRSAPGLGPVLAARVLAEIGDDPTRFDSPAGLRAFAGTAPVTRASGRSRYVKARKIRNKRLGDACHWWAFAMLTKSPGARAHYDRRRAAGDHHNAALRNLANKLLGRLWWCLKNNEPWNDAAAWRTPTTTPTTAAA

SEQ ID NO: 275627 - protein, 417 aa, unidentified
MQVVHARCCGLDVHKKSVVACVLLTEPDGSVRRQVRTFGTMTADLLALDDWLTGHGVTQITMESTGVYWRPVFNLLEDEERTITLVNAQHLKAVPGHKTDVKDSEWLADLLRHGLVKASFIPPAPIRELRELTRARKTLVQQRANAVNRVHKLLEGANIKLASVASNILGKSGRAMLDAMVAGETDLDALAALAYGQLRKKRVELRRALDGRLAAHQRLLLAQLLAQIDFLTDQIAHLADAIADRLTPMQGTVALLQTIPGISATAAAAILAEIGVDMGRFPSAKHLASWAGLCPGNKQSGGKRLKEQTTSGNVWLKGILSECAWAAARTKETYLAAQFKRLARRRGIYKALIAVAHSLLVIIYHLLQRGETYRELGGDYFAQIDSRRAEGYHVKRLTALGYQVTLTPLPEAEPIPA

SEQ ID NO: 275628 - protein, 433 aa, unidentified
MERTFVAYIGIDWSDRKHDICLYDPESAQREYSVIGAQPQEIANWVATLQQRYGNSPIAICLEQKRGPLIYALCQYDNLVLFPINPRTVSNYRRAFQPSRAKSDPVDAQILIELLLKHPDKIPPWQAASCELRALRQWSESRRMLVGEKVRLTNRITAALKNFYPQVLEWFEDKDTQVFCDFITQYPDLHSAQAVSAEELTLFFQSHRVIRRSAIERRIHQIQTAGIPLTEDPGMVEPMQWLVQTLVIQLKALLHRLDELNQTIEQLFQSLPDAAFFDALPGAGPHLAPRLLIAFGDDRSRFGSAQAFMSYIGIAPVKEESGKKRWTHWRWSCPKFLRQSFVEWADQSRRHSSWANAFYQQHRRSGKSHPKAIRALAYKWGRILWRCWQDRVPYDEDRYLAALQRKKSPLAAMLVQSPVEMTTTADKCGNSMV

SEQ ID NO: 275629 - protein, 429 aa, unidentified
MTRISVGVDVSKNRSTVCIMDQDGKFIMRPFLVWHSTEELDFLADTLKRLNGEVRVIMESTSIYQYPIALHLKEKGIFISIVNAYKVKKFANTDFIGGKTDKKDSRTIASYGISYWDKLVEWQIPKDTYFNLDLLNRTYMNAKKHRQIILQELQHYIDCAMPGMDKELHSLNLSTKKDFMLDFVEKFWHRDEIVNMTEAEFTEVFTAWAKEKGYRPGKGKAAKIYAIAKSCIPYYPANPTVKTILQCIVDKLSGVNRTLVTIVTQMIEEAKKLPEYQIVREMPGVGDPLAARFFGSAGDIRRFKNSKALVAYAGIDSPPDESGDSSSTHRHITKKGSKVFRDTGYEIMMALRAQKRTWEKVRKNPEVYDYMLKKEAEGKPRKVAKIAALNKFLRIVYARIKELYDNMALAERAKAKTKSKTKAKTKATA

SEQ ID NO: 275630 - protein, 387 aa, unidentified
MYYVGIDIAKLNHFASVVSSDGEVLVKPFKFTNDNDGFCTLLSALASYDRGSLIIGLESTAHYADNLVEFLVSKRYQVCVINPIQTSTMRKNNIRKTKTDKVDTLVIARTLIAQPHRFFSQEDIDLMHLKNLGRFRQKNIKERTRLKIQLTTYVDRVFPELQYFFKSGLHQKTIYTLLKEAPTPELVASMHLTHLAHLLEVSSHGHFNKEQAKELRILAQKSVGSSDRALSLQVTQSVEQIELLDRQINDVESEMTEIMLGLDSVIMTIPGIGYINGGMILGEIGDIHRFSTPCQLLAFAGLDPSVYQSGNFNASHTRMSKRGSRVLRYALINAAHNVVKNNNTFKAYYDAKMAEGRNHYNALGHCAGKLVRILFKMLTDDVAFNLE

SEQ ID NO: 275631 - protein, 322 aa, unidentified
MDSHCFAGIDVAKSQLDVALIDPAESWTVANDLEGIATLVERLQTLTPTLIVQEATGGFETDAAAALAAVGLPVVIANPRQVRDFARATGQLAKTDRIDAALLALFAQRVRPDPRPLPDDDALHFQAMLTRRRQIIEMLTAEKNRLGFARPQPIRKNIQKHIAWLERQLAQIDTDLTDAIRHSPVWRAKDDLLRSVPGVGPNLARTLIAELPELGHLNRKEIAALVGVAPLARDSGTFRGKRMVWGGRASVRTALFLSVWSAAKWNPLIRPFYQGLREHGKPPKVAQIACMRKLLTILNAMVRDGSPWDPSHAAGLATQHSC

SEQ ID NO: 275632 - protein, 358 aa, unidentified
MATQSLSNLQSFVAPYHAEPFWIGIDVHKRSYHLALLRADAKTITLVTPAIPEKLVEQLRQIEIKIAGVAYEAGPTGFSLARALQTEEIPVIVAAPSKIPRSISAGAKTDRLDCLKLAQFVSKGLLRPIAVPTPKEEAERALCRRRHQLVDSIRRCKQRIKGFLLYHGFKETESLRRWHTDYPDQIAALPLEAEGRLTIESHLRELTFFENELRSVIEHLEDMNQHPRHQPVIRSLTSVPGVGKIVATTFHTELFRPERFDRAEEVASYLGLAPNVRQSGERAARGHLAPVGQTRLRSLLIQAAWIWRAKDPYAQEVYHRLLSKTGVPQKAIAALARRLAIILWRLSIEQRAYRPLEA

SEQ ID NO: 275633 - protein, 312 aa, unidentified
MFRVMGVDVSKDTLEVCFLPDFVRFEVGNNEEGILRITEYAKKEKADMVLLEATGGYETHVVTSLSMERLPVVVINPRRIRKFAGAMGFLAKTDKIDAEVIAAFGVQIRPPIRSLPEEKYSLLSQLVARRRQLKDMLTMEQNRLSPSIGDMCKNVEEHIRFLERGIEKAEKKIRGEIEKSPLWKQKSDIMQSAKGVGPVLSSTFLAALPELGTMNKKQISALVGVCPYNRESGRWKGKRMIFGGRSDVRKVLYMSAMVARKHNPTIKAFHDRLLKEGKLPKVVLVACMHKLLIILNAMVKNNTPWRSPAPVF

SEQ ID NO: 275634 - protein, 363 aa, unidentified
MVTLLTATPKLYIGMDIHKKSWSIHMRTDISDHKSFTTPPDCEVLYNYVESHFPGYQVALTYEAGCCGFSAARYFLNLGWEVLVVNPSDIPRMDKQQYQKTDAIDCRNLSKQLKADQLKGIYVPGEDQDQLKSLLRQRAEITKQLRSVKAQIKSLLLYHGHQIPDKFDNPNWSKDFIHWLSSIKWTFEPGNTCMESKLRIYEVIHKEHLQLANLLRSYCRKHYKKDYYLLKSIPGIGGYVASAILAEIGDLRRFGSETELASYIGVIPVMRNSGGTESIQRVTPRCRALLRSYIIESAWVALRLDPVMQNYYRKHAGKNPKSIIIKIARKLINRMLSVIKNETPYQINTTKEQIKKQPIKQNN

SEQ ID NO: 275635 - protein, 375 aa, unidentified
MGDHSEAFVGIDTAKLRNAVAVAEAGRRGEVRYLGEVDTSEAATRKLVAKLSATYGKLTFCYEAGPTGYGLHRLITSLGHTCIVVAPSLIPKKAGDRVKTNRRDAEGLARLLRAGELTSVWVPDARHEAMRELTRARDAARQDLTRKRQQVSSMLLRLGRHYPGVRTWGARHRSWLSNVRLDHAEQRFALEELLLAERQAAERIGRLEQAIREAAADWSLAPVVPALMAMRGIDLVAAVTILAEIGDLSRFENPRQLMGYLGLVPSERSTGESVVRGSITKAGNGRARRVLVEAAWAYRHPPRVGYEKQALVAAAPRSAREIAWKAQVRLCKRFRTLLRRGKTSTVVATAIARELAAFIWAIDRAVVGLKAARAV

SEQ ID NO: 275636 - protein, 328 aa, unidentified
MNIIGIDVSKGKLDCALIDNLTHRKLKFKVVSNSEEGFVTLIDWLAKRTKSSISAYHFIMEATGVYHEKCAYWLFDSGARVSVVNPARVKYYGQSLGVRSKNDKKDSVVLAHYGLTQTPMVWQPEALEIRILKALASRLDAIEKDILREKNRHEKSSINPSSQTILNAIETILFTLNKEKLHLEKLIHSHINQYEYLKNNNALLQTIPGVGPVLSRYMLIVLGGRTFQSASQCAAYLGLVPIQNESGSSLRGRSRISKAGSPVIRAKLYMATISALQHNPDIKIQNQRLLKNGKSKMSALCAAMRKLVQICFGVIKHQQPYHVQAKFL

SEQ ID NO: 275637 - protein, 465 aa, unidentified
MPNTRKKHARLQRPPDPTAGLPPLNRHAAGIDVGSAEHDVAVPPDRSPEPVRRFASVTADLHALADWLHACHIDTVVMESTGVYWIPLFPILEARGFAVHLVNARHAKNLPGRNTDIADCQWRQKLHTFGLLNSSFRPTDDICVLRSYLRQRDTLISAAATCIQHRQKALTEMNVQLANVISDISGVTGLAILRALLAGERDPAMLAAFKDDRIKASTHTIAKSLEGNWREELLFHLRQSLELYECYQQKIAECDTQIEAHLLTFDSKIEGSAPPLPTPKRRPKKARRHEPHFDLHTQLYRISGVDLTRIDGIEVLTAQTLIAEIGLDMSRWKSEKHFASWLGLCPDNRISGGKVLTRGTRDVVNRAADALRLAAQNLLHSKSALGAHYRRLRARLGAPKAITAMAHKLARLVYRMLKFGQQYVDKGMEHYEARFRQQRLQWLQRQARELNLQLVPNQPVPSPDS

SEQ ID NO: 275638 - protein, 425 aa, unidentified
MNYKQNEKINQVKESTLVVGIDIGSTTQYARAFDWRGIELEKVFPFSNSREGFESFKAWMQHLQDKYKKLDAIVGIEPTGHYWFDLGAYLEDEGILLVMVNPYAVKQTKELDDNSQSKNDRKDPKVIAKLVTEGRYSAPYTPDGVYADLRIMVANRKRLIREMTQIKNRFARWFAIYFPEYTDVFGDYEAQSSMLLLKKVCTPEAIVELGAEKINQIWRDAKLRAVGMKRATTLCETAKRSIGLKKGSSAARYEMKLLLEDYEYKKAQLDAVMEEIEKLCRKIPESEQMLAIKGIGVITVAGFLAEVGDVRRFESPRQIQKLAGLSLRENSSGKHKGQTTISKRGRSKLRAVLFNAAIPLIAKNPEFKSLHEYYTTRANNPLKKKQSVIAISCKLIRVFYAILANGVTYDAQKMLSDIHRQPQAA

SEQ ID NO: 275639 - protein, 465 aa, unidentified
MMYVNGELQAQFMTRIRGLDPQRCLVIPVDVGKAIAMALVADHYGEIIIAPFEFALTETGFAVLSAAVNRAQNERDALIIRVGVEAAGHYHRTLVARLRAAGLEVVELNPRAVKDARGQQLLRTLKNDARDCGAMAELLIRGTGRPPQCRDEALAAQTAWVAHRRRKVAAQATLANQIHGQLDLIFPGLTGCFTHGLDAASLRVLIRELPDPDRVRRLGVDGVLRYVRRRGVQMTRPKAEQVVAAARVALRLPATERRAPLIVLAADWALFETLDQQIRDATAALAELLPKTPAGILLGVPGIGVLTASAYGAAIGDPNRYRDAAAAYRASGLVPISYESAGRARTRTGISREGSVELRRAIVDLGRGMGLHHPDFIAYRRQLTARGKPPLVALIAVGHRAHRLAFAMLRSQRPFDSDRWERAVAGHRHRVDEQARHGDTATTGPPARRDLPAEPTLTHAEASSN

SEQ ID NO: 275640 - protein, 412 aa, unidentified
METIHERVAGLDVHKDTLVACVRVPGGRGRRESHVHEFSTTTPGLMALRDWLVSHQVGLVGMEAIGNCWKPVYYALEDASECWLLNARHLRNVPGRKTDLADAAWIAQLLEHGLVHPSFVPPPEIRELRDLTRYRKAQIEERGREAQRLDKVLQDAGIKLSLVASHLMGVSAQAMLRAMVAGERDPEILAELAKGKLRRKLPELAEALEGRFRGHHALLVGEILAKLDYLDEAIERLSDEIERVLGPFAPQVELLRTIPGVDRRMAEALIAEIGVDMSRFGSSARLASWAGVCPGQHESAGRQRHGTTRKGSKWLRMHLTQAAKAAARTKGTYLAAQYARLRGRRGGSRATIAVAHSILVAAFHILERGTPYEDLGADWFIRRHSPERHAHKLVHQLETLGFDVRLEERAAA

SEQ ID NO: 275641 - protein, 414 aa, unidentified
MPETAYALYVGIDWGTVTHQVAVLDAQRVLLGERAIAHEAVALHGLTEWLTQLAHGEPARVAVALEVPRGAVVDTLLERGFHVFALNPKQLDRFRDRYTVAGAKDDRRDAFVLATALATDRPAFRALEPEDPLIIELREWSRVEDELREEWGRLASRLREQLHRFYPQALALCPAADEAWFWALVGLAPTPAAALRLRHAAVVTLLRAHRIRRLTADQVLAALQSPPLRVAPGTVQAASAHVALLIPRLELVDRQRRDCARRIERLLDALATTGEHQRHRDVTILRSLPGVGRVVAATMLAEASRLLAARDYHGLRTQAGVAPVTRQSGKRLLVGMRYACNPRLRNALYYWGFISVRYDEHSRQHYQLLRGRGHSHGRALRGVVDRLLTVLMAMLAAQTTYDPARRSALLALAP

SEQ ID NO: 275642 - protein, 399 aa, unidentified
MPRPNDMSRSLVCFDQEASLVAVIELSNASWLIFATVPGIERQPLKKIAPDETALLRLLHRWRDEATRSGRTITRIAVAFEAGRDGFWLARWLTRHGIEVHVIHPTSVAISREHKRAKTDRLDTAMLMRVFLGWLRGERGHCGMVAVPTIEEEDAKRPSRERENLVGESTRIVNRMKAALARLGIRGFNPKLRKASQRLESLRTPDALPIPPNTLDEMRRDLGRLAVVREQITAIERARVERLQQAPQTGPHAMVRLLAGILGVGIGTADMLVQEVLSRTADMLVQEVLSRNLRDRRAVARYAGLTGSPDESGSKRREKGLAKSGNARVRRGLIQLAWRFLRFQKNSALAEWFRNRTEGAKGARKTTMIVALARKLLIALWRMVTTGEVPQGLVLRQPA

SEQ ID NO: 275643 - protein, 341 aa, unidentified
MRMYAGLDIGGKRTAICVIDGSGKAVWRGTVDTHPEMIDRALQRFNGSLDKVGLESGPFTPHLFRSLEAIGYPMICMDARRAADAIKSRRIKSDKGDAWALAEMLRTGWFSSVYVKSVDTHRLKALLGARDQLVKLKRSLGNQVRGLLRPFGIKLPSRAGGKKFDEAAYLATRNDPILHAAIRALLESLASIEGQQARLDDELDELAKRNEIAWRLMSVPGVGRITALAYMAAIENVERFRRMRDIGAYLGLTERRYQSAETDVGMGISKQGDAMARHYLYEAANVLLTTVKKRFALRDWGLRLVKTIGPKRARVAVARKLAVLLGRMWKDGAHFEAAVAA

SEQ ID NO: 275644 - protein, 340 aa, unidentified
MSLYGGIDLHANNSVIVLLNEQDEVIYQKRLPNALPTILEQLAPYHTEMQGVVVESTYNWYWLVDGLMEADYRVHLANPAAIQQYNGLKYTDDHSDARWLAHLLRLAVLPEGYIYPKAARAVRDLLRKRTHLVRQHTANVLSVQNIMARNTGGRFSVKHIQELTKQELTTLLTEETQVLAVTSSLVVLDCLQQQIKMLEKTVHKRLQHTPSYEQLLTVQGIGTILAQTITLETGAISRFPSVGNYASYCRCVDSTKISNGKRKGAGNVKNGNPYLAWAYMEAAQFALRFQPAAQRFYQRKLAKSRNNTVLARKAVAHKLARACYYMMRDLVPFEATKAFG

SEQ ID NO: 275645 - protein, 401 aa, unidentified
MQENQQHSSVDVFVGVDVGKGHHHAVALDRRGKRLYNKALPNDEAKLRALITELKTHGQLLFVVDQPATIGALPVAVARDEDVLVAYLPGLAMRRIADLHAGEAKTDARDAAIIAEAARSMPHTLRSLRLADEPLAELTMLCGFDDDLAAQITQTSNRIRGLLTQIHPALERVVGPRLDHPAVLDLLERYPSPAELASASEKTLANRLTKLAPRMGKSLASDIVQALSEQAVIVPGTQAATIVMPRLAQQLASLRKQREEVASEVERLVHAHPLWPVLTSMPGVGVRTAARLLTEVAHKAFASAAHLAAYAGLAPVTRRSGSSIRGEHPSRRGNKVLKRALFLSAFAALRDPISRDYYTRKVQQGKRHNQALIALARRRCDVLFAMLRDGTLYQPKSAPTA

SEQ ID NO: 275646 - protein, 318 aa, unidentified
MLIHYIDIAKRNFVIAVSSLSKTKTETNNPKGIAHTIEYLKKHKVALVVTESTGGLEIPAAKAIRRAGIAVIIANPRQTHQFAQSQPLTKTDAKDAKMPAFFAQMTAQKEDSQTMPYQPPTEAEEVLEALVNRRNQPADMRTAEKNRLHQVHETQVGSVKQLIAHFDRLIDELDKQIDDHTHTHFDGKDQVAEQIKGIGSITTATLMAMLPELGRLSHKRIASLAGIAPHPRESGETKFKSRCFGGRSAVRKALYMATVAATRFEPLIRDFYQRLPSEGKPYKVAVTACMRKLLTISNARMRDYFAENDTAENGIRTA

SEQ ID NO: 275647 - protein, 453 aa, unidentified
MNNTIGIDISKDTLDAHRLADGQHKQFLNGKTGHAQLVKWIGKQSDPLIIFEATGAYHRQLERVLCTHIIPFVKVNPKQARRFAQASGKLAKTDRVDCEMLAKMGAALQLMPKPFTAENLYDLRELLSARRALIKDRTAAKARKATVINALIKQQLEKRLRQIKNDIAKIDALMLDVAREDQYMSERLDILFSIPGIGVITALMILVDMPEIGALNNKQVASLAGLAPMSQSSGKWIGKARIQGGRPNLRNAIFMPALVAIRHNADLKTKYDRLVTAGKEKKVAITAVMRKLLVLANALLRDNRKWAEKALDQDGYSSLRSRISRRSRSFSSARSKSSFDTTSVSRYAMIHLFSVDMPTPRSSATCLRASPLVSAIRTASWRNSSVRFSPIVNLLCYSKCYQRSGIKPRQVQDASAAIDNWIANTKGLVNIDESLSAQIASCNTSKQAQCTSE

SEQ ID NO: 275648 - protein, 390 aa, unidentified
MKKNSIPAPTGKKVRHRKRSPKNQVVNRRYSGAAPKHTVGMDLGDKTSRYFGLDQDGNQTREAGVATTTKALTTVFGKMPRSRIALEVGTHSPWVSRLLESLGHEVIVANARRVRVISDSNRKNDKMDARLLARLARVDPELLYPIRHRGERAQQHLAMIRSRAVLVDGRTALINSVRGQAKSFGERLGKFDADQMRVEKLEKLPEGMQAALGPVLEIVEQMTKKIHEYDKQLAEIGRTEYPETALLEQISGVGLLIALTYVLTLEDPWRFGRSRDVGPYLGLRPKQKESGESKPQLSITKEGDEYLRRLLVQGAHHILSTRSPDTDLKRWGLTLAGNGSKKGKKRAVIGVARKLAVLLHHLWVSGEVYEPLRQNQAAAQAGTQTAKSLA

SEQ ID NO: 275649 - protein, 348 aa, unidentified
MERYIGLDAHATSCTFAVLSERGRRLDSAVVETNGRALVKFLRNVPGDKHLCLEEGTQSGWLYEVLQGHVRELVVTHACERNRGPKDDQRDAFHLANSLRLSAVSPVYKDAGQMGELRAHADVYAKLVTDVVRAQNRLKALFRSRGVQVVGGAVYTQRDRQAYLDKLARPYRGSAELLYSELDALRAIKKEAEKQLIAQSHQHCISAVLQTCPGMGPIRVAETIPIIVSPHRFRTARQLWAYSGLAIVMRSSSDWVKTPHGWERAQTVRTRGLNRNYNRRLKNIFKGAATTVITQRLEPMVGDYQRGLEQGTKPPMAKLTLARKISATVLAMWKNKEAYHPERYRPTP

SEQ ID NO: 275650 - protein, 358 aa, unidentified
MSHYRVGCDAHKHYSQFAVLDQDGQLRQQTRVDHQPGAIQAFLENLPEGTPVALETVGNWYWIADEIEAAGCLPLLAHAAKAKVMMGNVNKTDKLDAKGLAKLLHLDSLPTVWLPPGEIRDERELHRTRMALSKLRTALKNRIHATLAKYGITSTEHSDIFAGAGKVWLKTTLSRLPPETGRCVAQEIEALDGLQLQITQLEERIRERIALTPSIQLLKSLPGVGDILAIVIDREVGSIDRFDTAGQSTSYAGLVPTVHASGGKTRFGHMRKPSNQYLKWAFIEAANVVVRHRHHPAWKTKYVCQVYDQVCQRKGHAIAVGAVARHLAEAAFWILKRQQPYRPPANRQASPKQVRGRA

SEQ ID NO: 275651 - protein, 370 aa, unidentified
MKKYSELFIAFDTAKKKHAVAVADVGREGEIRYLGEIDSSSTAIEKVLGKLAQRYTTLRVCYEAGPTGYGLYRQICALGHDCTVVAPSLIPRRPGERIKTNRRDAVTLARLFRAGELTSVWVPDAVHEAVRDLVRAREVASRDLRKKRQQLLSFLLRHGRIFTGRKHWSLAHRRWLAGQKFEHPAQQIVFQDAVNAIEDAAARLRRLDEQLVAIVPSWSMAPVVTAYQSMRGVSFIAAVTFVAEIGDVRRFDNPRQLMAFLGLVPAERSTGERVRRAGLTLAGNRRARRVLVEGAWTYRYPARVSETLRPRLEGLPKTIRDIAWKAQIRLCARYRRLIATGKKTPVVIAAIAREMAAFLWAIGRHVEPVS

SEQ ID NO: 275652 - protein, 316 aa, unidentified
MKPQVFIGLDVSKQQLDVAVRPQGRHFVTPNDDRGIKQLVKRLAALKPQLIVLEASGGYEFLATAALAEAQLPVALINPLTVRKFAGATGKLAKTDKIDAQVLAHFAEALRPEPRPLPDQDQQVLKAALQRRLQVVKMIGQEKNRLEKTFIPTLRQDIQAHLTWLSQRLEQLDRDLSNQIRQSPLWRDRDRLLRTIPGIGPVVSRAVIAQLPEAGTLPGKKAVALVGVAPYNRDSGRVRGKRMIRGGRSYLRRMLYMAAVVASRWNPVIRAFYQRLLAAGKPKKLALTACMRKLVLIINAMMKNNQPWNQFINQVP

SEQ ID NO: 275653 - protein, 384 aa, unidentified
MIQSNQATQEMENTAKVEACLFMSMELSLKQWKLGFSDGKSRRVRVVGIRAKAFDELREQIGKARKCFGLGANGPVRSCYEAGREGFWIHRILIEKGIDNVVVDASSIEVSRRNRRAKTDRMDAEKLVEQLIRYAGGETRVWSVVRVPSKEAEDARQLHREMEILKKELKAHQSRIRSILFTQGIDVKLKAKFLQQLEQLRCGDGQALAEEIQQRLVREYHRFQLAQADLRTLEKQQRQQLEHPRTVAQEKIVLLKKLCGIAITSSWTFVMEFLGWRKFNNRRELAAAMGIVPMPYQSGQMNRSQGISRSGNRRVRSMIVEIAWSWLRFQPESELSRWYQDRFGHAGARQRRIGIVALARRLMIALWRYLETGVIPEGARLKAN

SEQ ID NO: 275654 - protein, 316 aa, unidentified
MSTGSLCVGIDVSQGELVVAQQPPADVWTLPNNPAGAADLVRRLRPLGPTLIVLEATGGYERTAVAALATAGLPVVVANPRQVRDFARGLGQLAKTDPVDAAILARFAERVHPEPRPVPDAALHALEAVVTRRRQLLDMLTAERNRLALAAPSVQADLRQHIDWLKRRVAKLDRDLDKKIQASPVWRTRDNLLQSAPGVGPTVSRTLLGALPELGTLTHKQIAALVGVAPMARDSGRWRGRRRITGGRAPVRAALYMAALVATRHNPVIQAFYARLLAAGKPKKLALTACMHKLLTILNAMVKANTLWRPTLAQTT

SEQ ID NO: 275655 - protein, 407 aa, unidentified
MRLFVGDDWAEDHHDVELMDATGRVLARKRLPEGVAGMARLHELIGQQLGEDAEDAEVVIGIETDRSPWVAALVAAGYVVYAVNPLQASRYRERHGVSGAKSDTGDAHMLTDMVRTDSHQLRAVAGDSAGAEAVKVVARTHKTLIWERTRQVQRLRYQLREYFPAALAAFADLDAPDALELLARAPDPARAAKLTRAQVSAALKRARRRDISAKATAILAALRSAQLGQPPAVTAAYAVTVRSLIAVITVLNEQVKALQGQVEADFGRHPDAEIYLSQPGLGLVLGARVLGEFGDDPDRYASGKARKNYAATSPLTRASGKRKVVAARFIRNDRLTDALMAQAFAAMNASPGARALYDAERARGAGHNPALRKLANRLVGILHGCLKTRTVYDEATAWSHHENKLAA

SEQ ID NO: 275656 - protein, 400 aa, unidentified
MNRTRTVAGLDVHKDSIYLCIMGYDQAIIWENTYGVLTPDLRQMHHDMRAHGVTEAAMESTAVYWVPVWTELCESMELRLVNPYFIKQLPGRKSDVKDARWIAECLLKNLIKGSFVPEPIVQDMRKLNRRIMDLCEDTTYNSNKLDAALQRCGFRLSNYVATTKSKSYRSVLKAIIDGQTDPDELLRLVHGRILNKHGRERVKAALTGSFSETDLIVLRQLKETLDLIEEQTADCQQELVRLCKEHYPKPYERLQTIPGVKERAATAIIAETGVDMKMFATAASLVGWCGLKPRNDVSNGRFKSRKVTHGNRYLRQILIEIAWAASRTRNSFFSHFSYLQTTVKKKNKMKIQVAIARKILVAVWHMLSKEEDFIDIYLKRQEELKRTEEQIKLLESYMAD

SEQ ID NO: 275657 - protein, 324 aa, unidentified
MKGNVLGIDVSKRKFDVALQREDGKSRSRAFSNDEAGFQRLQEWLQRLGVERVHACLEATGTYGLALAEYLHGEGHVVSVVNPAQIKAFGESELQRTKTDRVDAKLIARFCRAMAPSPWQPPAPEVAQLQALVRRMESLQQMIQQERNRLEAPGLSPAVQESLERTLELLEAEPQRLQDQIPSHLDQPPGLKEKQELLSSIPGIGESTANLLLSEMSGVDFGSARQLAAYAGLVPHQRQSGSSVRGRARLSKRGNSRLRRALWWPAIVAMRHNPLLASFAQRLREAGKPTKVIIAAVMRKLLHLAFGVLKHHRPFDPNYHPLPT

SEQ ID NO: 275658 - protein, 370 aa, unidentified
MKKNSIDKQSPKRAAARSAGPLTIGMDVGDKASRYCVLGGDGGVQSEGSVATTRTAMARKFSGMGRGRLALEVGTHSPWLSRLLTKLGFEVIVANARQVQLISASSRKNDRMDAHLLARLARVDPQLLRPIRHRSERAQADLMSIRIRAALVEARTSLVNAARGFTKAMGERLPACDTDALDVEKLEALPPALGERLEPLLEQIEALTEQIKKLDGKIEQIARIEYPETQLLTQVSGVGTLIALTFVLTVEDRERFHKSRDVGCYVGLRPKQSESGQSQPQLRITKEGDRYLRTLLVQGAHCIVSRRGPDTDLKRWGLKLAERGGKNAKKRAIVAVARKLAVLLHRLWVCGEVYQPLRNSRPAPASKQAA

SEQ ID NO: 275659 - protein, 416 aa, unidentified
MSRQKDKIEFEQVIERGCGIDVHKKVIVATIRGTDIKTQTRSFNGFTESIEKLRDWLKQNRISHVAMESTGVYWKPVYNILEEDFEIILVNARHVKNVPGKKTDKKDSAWIAKLLLSGLLKGSFVPPHPTRELRNLTRYKRKVIEQITSEKNRVHKLLEEANIKLSSVVSNLSGATATKIIDAMLAGQDDVAELVKLRHGRMQCTVADLAASLTGKITAHHKFMLQIYKDSIESKKSIIARLDEQIQEHLKENEMELDAELLATIPGVGEEGAAYILAEIGDNMEQFPNEHHLTSWTGISPGSNESAGKKKSTRITHGDKYLKALLVQFAWAATRTKNTYLRSKYESLVGRRGKKRALVAVGRKILIAAYFILKDKQAYHDLGPMYLQQRNKNRRIDRHLKQLQELGVEVEIKHVA

SEQ ID NO: 275660 - protein, 356 aa, unidentified
MSHDVKYIGMDVHKEAIVIAVQNESGKLVMESVIETKASSILQFLHGLRGELHVTWEEGTWAAWLYDLLQPHVQHIVVCNPRRNALLKEGNKSDKVDAGKLADLLRTGMLRPVYHGENGLRTLRELGRSYQTISKDLTRVMNRLKALYRGWGIPCAGTQVYAARAREQWLSKIPHTGVRRRAELLYQQLDGLQALRRNVRPELLAESRKHKAAKLLRQIPCIGPIRAARLIALMQTPHRFRSKRQLWTYSGLGIETHDSAQYRFVRGQLHRSKKPQQLRGLNRNHNHEMKEIFKSAATRASCGRGPFHDFYAALLAKGMKPEMARLTLARKIAAITLTLWKKEERFDVEQLKTQAA

SEQ ID NO: 275661 - protein, 343 aa, unidentified
MKLSRVGIDLAKNVYQLHGVDRSGKTVWKRRLKRHQWFKVLLDTVGPECEIGMEACAGAHHWGRELQSRGYTVKLIPPQFVKPYVKSNKSDAKDAEAICEAMSRPNMRFVTVKRVEQQDIQATHRIRAELMTQRTAKANQIRGLVAEYGLVAPKHLSSLRAAIPCWLEDAENGLTGDFRTLLQGVWEDLRLLDDRVGEMDQTIKRLADNNEDCVRLQQLRGVGPMVSTAMIATVGDARQYPKSRQMAAAIGITPKQQSSGDRDRLLGISKRGDVYLRTLMIHGARAVVARAKHKDDRLSRWVTNIANKKHPNVAAVALANKTARMAWAMLRHETDYDPDFALR

SEQ ID NO: 275662 - protein, 456 aa, unidentified
MTTSKNSEMNLPTIHTNAAGIDIGANKHWVSVPPSRAPESVRRFGCFTADLYALSTWLKQCQIETVAMESTGVYWIPLFQILEAQGFEVNLVNAHHVKTVPGRKSDVLDCQWLQQLHTYGLLSSSFRPEAQICVLRSYMRQRDNLIKSASTHVLRMQKALTEMNVQLHRVISDITGTTGLRILRAIVAGERNPQVLAAMKDRRIKASNDDIAPALTGDYRTEQLFVLKQELQLYEVYQQQIAACDVELERHLNDFTAQVDPNIEPPPKPKRRGKKQPGNAPDFDLRTHLYRITGVDLTQIAGLGALSVLVILSEIGLDASQFPTVKHFVSWLGLCPGSRITGGKIKSSKTRRVVNRAANAFRMAAQTLSRSQSALGAFYRRMKARLGGPKAITATAHKIARVFYHVWSKGDAYVDPGVDAYEQKYRERMLSQLQRKAQALGFDLVPKPNDTADCVS

SEQ ID NO: 275663 - protein, 379 aa, unidentified
MRNDSTVYVGLDLHKDSITVAYAIDAGEIELLGKTGTTGADIDRLCTRLQSKAPHVRVVYEAGPCGYGLYRQLVQKGFDCMVCAPSLIPRKPGERVKTDRRDAIKLARSLRADDLSAVYVPGIEDEAFRDLARAWAAAREDLRRARHRLKSFLLAHGVRYTGSANWGEAHRRWLGRCSFPSAWQHLAFDEHRRTIEDRLAQCARLETALREAVISWRFYPVVLALQAMRGVQFVTAVGMISEVGDLSRFEHPRQLMAWLGVTPSEHSSGGKRRQGSITKTGNSYARRLLVEAAWSYRHPARVSPEIQARLEGLPKAIIDRAWDAQVRLCRRFRRLTARGKPINITVVAIARELAAFIWDISRLAMALAIPRSKPPAACV

SEQ ID NO: 275664 - protein, 366 aa, unidentified
MKQVAFLGVDYHTKTITVAVYLDKEKKFYDALRLNNDDKIIKKYMKKLSTQFDLKICYEASSSGYVFQRKMQALGYHCDVIAPSLTPRKPGDRRKNDMRDAKKLAQNYANDLLTIVHPPTQEEESVRSLIRCRIAMKESAKKAKQQINSFLLSQGCRWSKSKWTKQHHLWLSKLEMPNLYLQQVLDEYLGHLSYLESRLQYLEQQIKQIANSELYAPSVKKLRALRGIETLTAMVLIAEITDFRRFPNPRSLMAFLGLIPGEDSSDDTRKDVSITKAGNIRCRNILTESAQHYVKKPRISVKMKQLFSQVDAHSAVTAKKCMYRLHKRYWTLVMKGKARQKTIVAIARELVGFIWAIMQPVSCVVA

SEQ ID NO: 275665 - protein, 317 aa, unidentified
MEQRQTNTKIAGIDVGKSKLDGAVHGLEDTTQVGNAPAGFSELIAWLKAREVGRVGLEATGGYERGVRAALEAAGFEVVVHQPIEVRRFAQMKRRRAKTDRLDAQLIAAATAQVDAVRAAQDPRLQALAERLTAYEQIADQAAQLKTFLEHVTLTDVAKTIRAQIRAMATLKARLAAEILRQIKAHDDLLARYRLLVSLPGFGPIVAATHVIRMPELGQMRRGQAAALIGVAPFARDSGQYKGQRFISGGRSRPRRMLYLAALAAKRWDPHYKTFADQLIARGKPAKLAIVAVMRKLIEAANLVLSRGQPWLRRTAT

SEQ ID NO: 275666 - protein, 422 aa, unidentified
MENIGLDLHQRESQLCILTEEGEVIERRIRTTPERLTAVLGPRAPARILLEASTESEWVARHLEALGHTVIVADPNYAPMYATRSARVKTDRRDARTLADALRLEAYRPAHRSGDAHRHVRAELAVRDTLVGTRTRYVALAKALVRREGFRLASGAAEHPRAKLAALPLPPPLTAELAPLVALLPGLDQEIAAADRRLAQYLAADPVVQRLATAPGIGPVTATAFVATLDEVTRFATAHQVEAYLGLVPSERSSGERRTRHAAGSPKPATPGCAGCWSRRRGGCCAHRALTPRRCGRGPSGSRSAGASGSRWSPWPGGSPACSTRCGGTGPATRSGGAGKRRPPRTAGLGTRCPTGAASTTQLVAAGEAVHQFGAAAPIGSPNAPTTTASSPESAHRRLSGISPEPANGTRTERTRPTPGVA

SEQ ID NO: 275667 - protein, 320 aa, unidentified
MSASSVVVGIDVAKAHVDVSVLGARLDAQRFDNQAEGHSALTAALKPLGVALVVMEATGGYEIELACALQAAGLPVAVVNPRQARDFAKSMGRLAKTDAVDARMLAEFAAVLLRREDLARFLRPLADAQQQWLAALVTRRRQLLTMLHSERQRLQITPKGLHPSIEAIVAAIKAQLDDIEAQMIGHVREHFGELDRLLQSASGIGPVASATLIAQLPELGRLNRREIAALVGIAPMANDSGASRGRRRIQGGRFEIRRVLYMAALTASRRNPAIKTFYERLLAAGKLPKVALVACMRKLLTTLNAMVRTNQPWNNSLHGV

SEQ ID NO: 275668 - protein, 466 aa, unidentified
MKKAGESSKTKRRGVPTALQAIRPMVAGIDVGSREHWVCGPARADGEPNVRVFGTTTIQLKEMVDWLAEQGTESVAMESTSVYWIPLFELLESRGIEAVLVNARQLHNVPGRKTDFQDCQWIQLLHSCGLLRGSFRPGNAIVAMRAIHRQWANLVEERTRCVQWMQKALDQMNVQVHRAVTDLTGTTGMAIVRAIVAGERDPVRLSTLRHHHCKKSVEDIARYLTGTWREEHLFNLKSALQFFDAVEALIATHESRLFEAMVVLQPDERKDAAVQPHPNPAKEKAIKNRGDQPARTALWRFAGIDLTRIDGIGIGAARIILTEVGLNLSVFPSEHHFVSWLRLCPRRPISGGKPLKTRRNALGANRISGALRMAASSLQRTKTALGAAYRRIARHKGAYVAIFATARRLAQLVYRMLRYGQDYVDAGEEAYDRQFEARRLAGLREAARSMGFSLTAQPATTPAKSG

SEQ ID NO: 275669 - protein, 338 aa, unidentified
MKISVIGMDIAKRVIQLHTVCPETGEIGRFKLQRRETLAFLARREPSIVAMEACGSAHWWGREISKLGHEVRLLAPKSVRPFVLRNKTDAADARAIWTAAQQPEARFVAVKTEIQQSVLALHRLRAQLLKFRIMQTNALRGLLYEFGEVVPEGYVALSKALPLALATLDSRLPAVLIDSLCEQWARVQRLDSEIATIERRLAGILKETPQCQSVAGIPGVGLLTATAAVASIGDARTFKSGREFAAWLGLVPKQRGTGGWVRQLGLSKRGDVYLRTLLMHGARAVIVRHSDKPWLAALLNRRPYNVVVAAVANKLARTIWAVLAKGTPFDASQFATAA

SEQ ID NO: 275670 - protein, 318 aa, unidentified
MSHGYDKFVGIDVSKDGLDVHGLPDGSPSRFDNTAAGRAKLLSLLPQAGACLSVVEATGGYERDLVAEAVTAGHHIAVVNPRQVRDFAKALGLLAKTDRIDASVIARFAETTRPVPKGYDERQEQLRELIVRRRQLLDHRTAEKNRSEMAHSSLVRKSVLKLIETLNKDIQRIEKAILQLVESNDDWRERFEKLKGVPGVGGQTAATLMAELPELGHLNRQQVAALVGVAPFNRDSGQFRGRRAIWGGRQSVRNALYMAALSAKKHNPVIREFAARLMAKGKPPKLVLTACMRKLLIILNAMLQSGDSWSPRVATLTP

SEQ ID NO: 275671 - protein, 343 aa, unidentified
MDHFAGLDVSVKETSVCIVDDTGKIVGEVKVASEPDALLPVLTNPTYHFKRIGLEAGPLSQWLFSALAEVGLPVICVETRHMRAVLKAQINKTDRNDARGIAQMMRAGLYRPVHVKTLRSQKLRMLLTHRKLLQSKAIAIDNDLRGTLRNFGLKVGMVGTAKFEARIKELVENLPDLAVLVEPLLMVRRILREQFCILHRRLLAIVRDDEVCRRLMTVPGVGPVVALTYRATVDVPARFRKSKAVGAVFGLTPIQHQSGDSDRPGGISRCGDEMMRVMLYEAAQIMLTRTNKWCWLKAWAMKIARHRGMKKAIVALARRLAIIMHRIWVDGTEFRWTREVAAA

SEQ ID NO: 275672 - protein, 329 aa, unidentified
MKRKSFIGIDISKKTIDICLYTPGSTSPKKFFKTENSLKGFKSFIKELKILKIKLKETFVCLEYCGVYGLELGFFLEGKIEYCFCNPLHIKRSLGLTRGKSDKLDSFKIARFNYLFRDELNPMSMPSECMLRLKSLMAERSRITKAIVIDKQVLTDLQKTLGINARLRAERRLDMLQTDRKAIDKEILHLIESEERILINYKLLISIIGISLVNATMMILCTNNFEGITNPRSFACYCGVAPFEHTSGTSIKGRTRVSPYANKKVKANLTNAAKSAVQHDPEIKIYYKRKRAEGKDHGAVMNAVKFKIITRAFAVVKRGTPYVKLRQAG

SEQ ID NO: 275673 - protein, 355 aa, unidentified
MSYEKYIGMDVHQATISVAVMDVQGKLLMECVLETKASTIVEFIKGLQGPLSLSFEEGTSAAWLHDLLQPHVRRLVVCDPRKAALLRDGNKSDRIDARKLAELLRTNQLKPVYHGEHGMRSLKELGRSYLTITKDATRVMNRIKALYRSWAIPCSGTTVYAPRHRGEWLAKIVEPGVRIRAEHLYQQFDSLQPLRLEARRELLRESYKHAAVKLLRQIPSIGPIRAALLVALLQTPHRFRTKRQLWAYSGFAVETHDSGEYRYVRGKVQRNRERITVRGLNDNHNKDLKSLFKSAAISASTRPGPLRDFYTARVESGMRPTMARLTLARKIASITLTMWKKGASFDPEQLQRQAA

SEQ ID NO: 275674 - protein, 318 aa, unidentified
MDTRINQSEINVGVDTGKYQLDIYVRPLGIFFSVSNDEKGIKEALIEIKKHSPHRIIIEATGRLEHEFIIACSKANLPFVVANPLHIKRFAGAIGRIAKTDPLDAQLIAHYGEAIKPKLSQLKPENIRLMSDLLSRRRQLITMQTMEKNRLKIMPKVISSAIKPILTVIKNQIEKVDKKLLKLIEESPEYQLKNDILQSMPGIGNIVAFSLLSDMPELGTISNKQAAALIGVAPFNRESGSYKGQRRIRGGRYQVRTVMFMAMMSAIQCNPIFKAKYEQLVAQGKPKKLAIIACVRKMIVILNSMLRDGVKWELDYAK

SEQ ID NO: 275675 - protein, 482 aa, unidentified
MKKKNIYVNQSQELLSLFEEAGNNEKIMCVPIDYAKKDHIVMFCNGYGHILRKPFSIKNSPEGIKYLTEQVIRSCSHRCIDPKHVFFGGEDVGSYAENFANTLRSGGWLVAGVNAHDAKEQRANIQASTDRLDLMGIASMLLNRRANCSPAQSGIYRNLRTLVRHRRNLVSMSTEEKNRIHTVVDRLFPGFLDEKNSGIPPFSESSLYLMENRFSPLQIRRRKRHKLIEVLHRYGTSKPEDTSARLQEYAACVLNTPDEYIFTLQLSLVQHVKHFRCLQDSINQLENEIALWLAQTQGAFLTTVRGIGIVLAAGVSAETGDPYKQKPLNNLVSYSGIIPRVKQTGGSEGKTRTGKVVKRCNRILKDYLVQSALHMGLHGPEDLMADYKRREAAGQHADFGIGRRYLRMAMCLMRTSQIYMPQQLRITKVKPEERAGYYLMTWPYLRNKWNKAGALEAAFKNDRPLGQWRNMVQELYEIKLKL

SEQ ID NO: 275676 - protein, 407 aa, unidentified
MAKVFIGVDPHKLSATIEVVDRHERLLGTGRFLTDQAGYTAMRRYVAAWPDRLWAVEGSNGAGRPLAQRLLEAGERVVDVPAKLSARVRLFDTGHNRKTDARDAHSIAVVAVRTKDLRVLRADGDLEALRMLCDRREELTRLRVQTVNRLQRLLAELVPGQAKKDLTALQAKAILATVRPRDIAGKTRRRIAAEELADLVAVEAKMKKSTAELKTMVKARGSRLMDLPGVGPVVAARTLADVGDIARFADRNRFASWTGTAPLDASSGEQNRHRLSRAGNRRMNHMIHIAAISQIRLDTEGRTYYRRKIAAGKTKLEALRCLKRRISDAVYRQLVADAERAQPAHAPRAASTGPGGHCGASLESSAVDLPPHIDTSDQPLPGPASTTLQPSMTAKKSPPRKAPQTTG

SEQ ID NO: 275677 - protein, 346 aa, unidentified
MEPTSSCLLTWMGRRGAPADNPKLGKIMRPSTTSIKAMIRVLGLDVAKATVVLFDPVSGRTLTVTNKPKPLLRALKPFAGYELMVCEATGGHERAALEAASALGLAAHRADAAKVKSYIRSLGGAAKTDAIDARWLSRYGQERGPVLAVWTPPSREREALASLVRHRQDMVAMRTQTKNRLGAPGPQAVKRFLKAQLAFIEKQVAEIDRTMKTLLKASPALGAAEARLRAIKGIGPVSARTLLGLLPELGSLNRRQAASLAGLAPHPNDSGQTSGRRRTGRSGRAGLRPALFMAALSAARTHPHLKLFAQRLIDAGKPKRVVFTAVARKLLVIANTTCKDPAPQLT

SEQ ID NO: 275678 - protein, 350 aa, unidentified
MIIIGVDYHPSFQQIVFVDTETGECGERQLNHSEGEAEKFYRDLTLKKVHVRVGMEATGHARWFERLLAELGFEMWIGDPAEIKTKRVRKQKTDRKDAELLLKLMREDRFPRIWVPSPENRDLRQLLWHRHRLVQMRTRIMNQLQALAMNEGKQWKGKLWGQRRAAFEKLPLAPWASRRRKELLELLDRMNPTIEELTVAVEQEANKRGEVRRLMTHPGVGPLTALAYVLIIGTPMRFPCGKQIGSYLGLIPSEDSSAGKQRLGHISKQGNSLLRFLLVEAAQAVVRHNPDWRRRYLRLAFRREPRIAKVAMARRLGVRLYWMWRKEWTYQQVLQFGSHAGQPVHAHGVK

SEQ ID NO: 275679 - protein, 418 aa, unidentified
MNSFQVVIGIDWADEEHVFYLMDLEKGSNELGKVTQTPEAIADWTDSLRQRFPDASIAICLEQSRGALIYALMQYEFLTLVPVNPKQLARFREALGCSGAKDDPRDAKLLAELFAKHGQCLKVWKPDTQETRMLALLNEDRRNLVNGRRDLTSRLRSLLKQYFPQALQLLRTLHGSLACAMLELWPSLPDLQQASESDLREVWKTNGRSSTKQRDEWLQLIDNAVPLTTDQAIVESRKLLVGAIVRQIVVLNQAIEEYDKRIAALFAEHEDHDIFASFPGAGPSMGPRLLAAFGTDRERFPSASAMQSLSGIAPVTKQSGKSKFVHRRWACSKFLLQTFHEHAAHSLKYSRWAKAYYTMMRKAKGCAHHAAIRALAFKWIRIFQRCWKNRELYDESKYMDALTKRNSPIIEYLETSDA

SEQ ID NO: 275680 - protein, 413 aa, unidentified
MSVTLHSRASRVCAGVDWAKDDHAIAIIDSEGKVMDRFAVNHDAAGLKSLVRRLLTAGVSEVGIERGDGPVVEALLQAELTVLVIPPGQLKNLRSRYGSAGNKDDRYDAYILADVVRTDRHRLRPLVRDTTATTALRGTVRARRDLVEHRVAAANQLRAHLQIVFPAAANLFAAIDSAISLTFLERFTTQSKADWLSPKRLSTWLSSVSYTGRTTPDVLHTHLLAAPRGTTSTDAATHTKTTLAFVAILRALNTQIQALATSIGEQLAIHPDAHIITSLPRSGTVRAARLLAEIGDARGRFPTADSLACLAGVAPSTRQSGKVKAVTFRWGANRELRDAVCDFAGDSRHANPWAADLYTKARARGHDHPHAVRILGRAWIHIIWRAWQDNTAYDPTKHRALQTLLNTTTEKAA

SEQ ID NO: 275681 - protein, 412 aa, unidentified
METVVERPSALDVHKEQVTACVRVPGEGRSREQHVAEFPTTVAGLLTLRDWLAAFGVQQVVMEATGVFWKPVWAILEDEFECLLVNARHVKQVPGRKTDVKDAEWLCQLAEAGLLRASFVPPKPIRALRNLTRYRKTQIQERAREANRLHKALEDTGIKLDCVATDILGKSGRAMLDALVSGTTDPEILADLAKGKLRKKIPALKQALEGRFDHMHSVWIGAILAHLDFLDEQIANLSETIGEQIAPFEQAVELLRTIPGVQRRTAEVIIGEIGIDMSVFPTAGHLASWAGQCPGNDQSAGKRRSGRTRKGSKWLDWALEESAMVAARSNDIYLAAQYARLRPRRGHKKALGAVKHSILTACWHMLSTGELYNDLGGDYYRKRDPEHTTKRLIAQLESLGHKVTLETLPHAA

SEQ ID NO: 275682 - protein, 351 aa, unidentified
MDQQQPARHYAGLDVSLDNTAVCVVDDAGAVVWRGKCPSEPKAIAATLAERAPGLVRTGLETGQLSNWLTLALRRLHVPVVCLDARHAKAALAMRINKTDANDALGLAQVVRTGWYREVAVKGMAAQELRMLLVARAGLVTQRQAMANTIRGLLKSFGLTIPRGPKGLFEGRVRAAAEGNDALLAIVEPLLVAWRTLREQAGVLDSRINARAKADAVARRLMTIPGVGVVVALAYTAVVDDPERFRKSTSVGAYLGLTPRRQQSGETDFSSRISKCGDGLLRSYLYEAANVLLTRHPRPNPIKAWGLGLAARIGMRRAKVAVARKLAVVMHSIWRSGGEFRWEAPVAPAAA

SEQ ID NO: 275683 - protein, 428 aa, unidentified
MKITPAAEKINLNQVMDLPVDVHKDTLCFFFEVGGKEYHDTCANRTTVLEKKLKQYHDIAVENGRKNVRVICEPTGQYHNKLMRSARRLGFFTNLVNAEAVAKFRIVESNDNNKTDRKDPRVIGTLGKLDKVIKFRMIGEEYLMLRKLHKIYDECDGAITSHRCRINKLLVELFCDYSFEKDFLYSNSGLALVEVYGCNPYRIVQDGRQLFYRKMRKAAPRIQTKSLDRLWEDAESSARNDLPTGYIGILEDYLYARLDDYFKVLERKEVVTEQMIEILNKLREDDPLIPPPTPHFISEKNLARLLAETGPLADFENWRKLMRYAGLNLKTRQSGKFKGQDKISKKGRPLLRKVLQGIALCLVKRGRLYGEYYHGKKEAAKMPGNKAMTIVARQLLRKIYGWSRSRKAFDETRFFTCKSRYTKLAEAV

SEQ ID NO: 275684 - protein, 456 aa, unidentified
MKIPQSTIRLLTGRLVKILLNKEVSIMKSNTQNAKIEAITEKTLVLGIDVGSETHYVRAFDYRGIEYSKKPFKFSNTEVGFATFKEWILDLKERHEKDKVVPGMEPTGHYWFNLGKFLQDNEMKPVLVNPHHVKKSKELDDNNPTKNDRKDPKVIAGLVREGRYMIPYLPDGVYADLRTASNIRFQLQAELTRIQNRISRWFNIYFPEYKTVYGKPDAKSGMLILKAAPLPEDILTLGIDGVNQIWRDAKLRAVGKARAKTLIEAAEHSIGSKEGTVSARMEIRMLLEDYESKNMRLQEVMVLIEELVKEIPMAEKLLEIKGVGIRTVSGFLAEVGDISRFNNPKELQKLAGLALVENSSGKHKGKTTISRRGRKRLRYLLFEVAMSLVAKNPEFREIHNYYTTRRLNPLKKMQSLMAIAAKLIRVFYAMLTKGVDYDPKKMISDIKRPTVYLQAA

SEQ ID NO: 275685 - protein, 340 aa, unidentified
MPNPAVIGLDIAKNVFQVHGADAEGRCVLRRRLRRAEVITFFARLPKALVGIEACPGGHHWARELRSLGHDVRLIPPQYVRPFVKTNKNDAADAEGICEAIVRPNMRFVPIKSVAQQAAMMLHRTRALLLRQRTQLINAVRGHLAEFGLIARRGAHNIRELDDLVRDTEADKLPDAARAMLVLLLEQIREAQLRVRKTEQALEAWAKQSDACRRLLSIPGVGIMSATALVLAMDDPKRFRSGRHFAAWLGLVPRQSSSGERQVLGGISKRGDGYVRTLLIHGARSLTRWHRESWGWLAGLLMRRPTNVAAVAIANKTARTAWAILARGRQFQPNRRAEAA

SEQ ID NO: 275686 - protein, 422 aa, unidentified
MKNNAARKLRQVPEGYLIIGVDPHKKKHAAVAITQDLTIHDRFKVDNTREGLEFLLKRVKTEMVKSGSRGIMFAIETGGHYWRNIAYYLDERGVPFRFINQYTLKRRREGKDLNKRKNDYRDSEVAAQLLCTGEFVESGIPQGVYAELRTAHNAYRRLVKERTRITNLVKGLLDALFPEFVRVFKDPCGLTSLSVLSTCSTPGIIAEMTEDQFIALIEAAHHGRRLMRKKLGELRSVAKSSIGIKAGAHSVSVEIAFLIEKQKLIKGQIQTIERTLIKLVDASEEGKYLLSIRGIHYIAVAGLLAELGCFKSYRTAKQMIKMAGSNPTESESGGKRRSRTPMSKQGRPVLRYCAWTSVIPMLRLNPDFRAWAKERRERPAHANPLNGREVVGAALNRLLRLCFAMVKNKTYYRSPHLVQVSS

SEQ ID NO: 275687 - protein, 312 aa, unidentified
MVKEMVIQNNQNGYRYLKNYIKHLDSLFILFESTGIYSRGMKRFCEIHKIDYLEMNPLEAKFKTSSLRSWKTDKSDAHKLALLAFRMKDSKVQRQSEEIYFELRERARFHLEMEINQNRLKVELVETLHQTFPGLEKLFTNRYSKIALSIAKAFPHPDFVSTLTHDELVEKVLHSTDKGISVNKAHKYVQKLIEIQINSFPNVDKSSFLLQKVQYLCDKLLIGIEEMKEFDQEMIDLAKNTTEFENIISIPGIGELTAALLIGELGNIREFKTNKQLNAFVGIDIKRYQSGTSKVGIRSTKEEIKKQDVYCT
